United States Patent Application Publication US 2015/0376612 A1 - sequence listing, part 50

SEQ ID NO: 118429 - DNA, 1050 bp, Homo sapiens
tcttcttccttagagtttgccaaatgagggggttaccagtgctataataggacagaaagaccaccgaacttggagacaggaggcgtgggttctggtttattaattgtgtaaccctgaattcacgtgacatctttgggaataaatatattttaagatccctttaagcaacataatttattactattttttttttcttagcagtgctttcttcaattcctgctggaagacatgcattatccttacccagtctttgagcctatcccatttgacatatcaggttttttttcctatttctctgttcttttttatgtttaggcccttaccgttaatctttgcaggtaaaatgttgggacatagccaccttggagtgcagctggacccttccttcccttggtgggtttgcatacagcctggctttctcttctgtggacataggctctttggccataggtgttggggatggcatgatccgtgtatggaatacactctccataaagaacaactatgatgtgaaaaatttttggcaaggcgtgaagtccaaggttacagcggtaaggattctttttttgagcttgttttgaacttttttttttccaaataattctcttttatgcctgttcatttaaatgcgctctgttgagaatcaaaagttttaaagtattttcaatgaagtttgaaactaggaaagcagaatgatcctgtaaccaaacccattatcctccagagtttaaatttattaaggctctgttcatctcagcattttttctaatagtaagaagttagaaatagcctgactgtatattcatagaaaatgcgttaagttataagataaccaaatgttggaatggcatcaaattattgaaaatgataatgtagattccttcttccttgatgtggaaaggtatataaatgatttatgaaaaatgtcaattataaaacatggaaagcaggttataaaacagtatgtgtaatttttttggttttctctaaaatgatacctttcttttggctattgaatctaaaggtaataaatttttatggtttaaaaag

SEQ ID NO: 118430 - DNA, 1050 bp, Homo sapiens
accattttgttaatatcgtgttgctatagaagtactactaataagtattaattacttttttttttttttttgagacggagtctggctctgtcgcccaggctggagtgcaatggcgggatcttggctcactgcaagctccgcctcctgggttgacgccattctcctgcctcagcctctcgagtagctggaactacaggagcccaccaccacgcccggctaatttttttatgtttttagcagagatggggtttcaccatgttagccaggatggtctcgatctccttacctggtgatccacccgcctcggcctcccaaagtgctgggattacaggcgtgagccaccgcgcccggccgtattaattacttttaatgtgtatatgtagcattatgctggtttgtgatacaagttaaaaattaagtagaacttcagcattgacaataacaaatttttgttttgttttaaagcatacgatatcaacattacattggtctcctcgagtaaaggacttaatagtatctggggatgaaaaaggagtagttttctgttactggtttaacagaaatgacagccagcacctctttatagaacccaggacaattttctgtcttacttgttcacctcatcatgaagatttagtagccattgggtaagtactatgccatctgtattgatgatttttgtttgtttatgatcgtgttttgcattttctttaccttctctgtccttttattcctcaaaggaaaccatctacagatgttaaccactccccctgagcccctggcatcatttattcctccaggtctttactgtctctgccactccgtttttgtttccttggtttccatggtactgtactttcttcgtttttcggatctaactcctccaatcaacctttacgtgtaggaaatgtcctctttcacctttttcgctttctctactgcccgttgatacaacatgaactcccaggtgtcagatgactttgctgggtctctctagttctgagcgctccctttagattgggaaagtgatgcggcattgggatctgtttc

SEQ ID NO: 118431 - DNA, 1101 bp, Homo sapiens
tgcaggccctaagcaagatcctgcaacgtgtggcattccttactgtaagatgaatgggttgaaccagatgctttcaggctccaaactaggctttgattgtgccttaggatatgacatgccaggtgatttattctggccacatctaaataagagtcactttcacattatttgagctgctttccagtctgtgaactaagcagagcaaggtatatcaacattcatttcacagttgagaagctgaggctcagagacttgttcgaagtcacgtggcacagccaatatcagcacttgggaattctgagtgtaagtccgtcggtgtttcagttataccatgggttaagtaactccaaagcatctgctcacttgtcatccaacaacagtatgattctgccaggaaccttggatagcacttcgattaacctagcgtctggttttgcttaaagtcataggagagttggtgggacacaccgaaagggtctctggcttcacattttctcatcaccctggtcagtacaacctctgtgccaccagctccgacgatgggactgtgaaaatatgggatgtagagacaaaaacagttgtgacagaacatgcactccatcaggtaccatggcttactggtttctcaaaccgtttttatctatctgtgctgagggttcttctgttgcaagctagttttgctagctcatctgtgcaaagtaacttgtaattgtgttcattaattagataagaaactatattgtaagatgtctcaactttttttgaaaggagatatatacaaaccagaggttggcaaactgctctgtgcctgtttttgcaaataggttttattagaatacaaccacactaattcatttaagtattgtctatgactgctttcatgctacaagagttgagtagttgcaacaggcatggtatggcccacaaggtctaaaacaattaccctctggttattgatacaaatggactcctgatatagactgtaaatgcgtgaatgaaactcatttctaagctagatagttacttgatgtacctgccttttgagagaacaaaggaaaagacctacttaataagaactttgcattaagctatttaaaaaat

SEQ ID NO: 118432 - DNA, 1121 bp, Homo sapiens
tcccctctcccttcccctctcctcccctccctcccttctttccttccttccttccttccttccttccttccttccttccttccttccttccttccttccttccttccatctttcttcatggagtttagctctgttgcccaggctggagtgcagtggtgcaaacttgagtcactgcaacctccacctcccgggttcaagcaattctcctgcctcagcctcccgagtagctgagattacaggcaccagccaccatgcctggctaattttttgtatttttagtagagacagggtttcaccatgttggccgggctggccttgaactcctgacctcaggtgatccacctgcctcggcctcccaaagtgctgggattacaggtgtaagccactgcgcccagccaagcatgtggttttcacagaagcaccacctatatcatgtttgctacaccaactaaactgacctccaattccactgcatgtgaatctgctgggaaaaacaaagttccagaactgcagaagtttttccagaaatctgacagtgtgaccatccacctgaaacaaggcctgcctgaccaaatgcattatgggacagccatggtgctgaactgtgggagggaccatctactacctgatcgccctcttcatggcttcacagccctcaaactaaggagttagttaggttgcagaggactggtttgctttttggtgtaaaccctttgaattttcctttttcctttttcttttttttgagatggagtctcactctgttgcccaggcaggagtgcagtggcgccatcttggctcactgcaacctccgcctcctgggttcaagcgactctcctgcctcagtcacccaagtagctgggagtacaggagcccgctaccacacccagctaatttttgtattttttagtaaacacaggatttcgccatgttgggcaggctggtctcaaactcctcatctcaggtgatcctcctgcttcgacctcccagactgctgggattacaggcatgagccaccttgcccagcctgatttttcatttttgattgtttctgttaattttttttttttacttggatggcttacttaacattattgcaagaagaatagaaagatatgaag

SEQ ID NO: 118433 - DNA, 1096 bp, Homo sapiens
attctcagcccaaaagtttgaaaaactaataggctttcaggagtgagaaccaaggttagagataatctagtccaatcagtttgaagaagagatgaggaaactgaggctcagagggggaaagggacttgcctgaggtcatccagcaagttagtgccacagccagtgtgaatgccagtggtttctggctgctggcccaggactcttaatgcctgctgagagtgattaacacatgcttggtgagctacttgtttgctttgaaggcaggcttgcaagcataggtagatacacagcctgcaacagcacaattcccagatgaagctcttgctgaaaacgagagaagcagacctgaaattatttactgatcgggcaaactcctatagtcaagggtgtttgttggagagcatcttggcaggtcctagcccataaggttttatgggctttttggattcacagtctagttttcaaacaagaaaatgtgtctggagtaggatcctcctttgatgttcttgtatgtgatatttcaagaattagagatgtatggatgttcattgccaatcccctggcacagggtcattggcaaagtcatgatcagatgatgctcctctttcttcttaacccttttttagatgggaagcagtcaccttgggatccttctttctacccctgggatgctttggagtatgaccaaatggatcagcctaactacatcctcagacacagaaacatgtgcagtgtactttgacattgttaacacacagatctttatcacatggtgtcaatattatggagacagtaagacacagatcatcggtgtaatatatcgcacatgctcctttgaaaacattataatcagagctgacaaggcagaagaaatatctcaacctcgcatcttccctgcatcccaaaaagcttaccaaactaacccaaactaacaagactctgattattcaaggaaagaaggcccagattatgattcactttgcccttctaccataatcaggctgagattattggtgttattttctgatttggtatctaagggtcaagtgcaaggcagaggtacctctctttattcccctaacaccataacaaattg

SEQ ID NO: 118434 - DNA, 1061 bp, Homo sapiens
ttgatggaagtagaataattgaaattatagcatggggaattactactagacaattctgcctccctgccctaccttaaagaagcttctgctgtgatttccccattattaacctccactagctcaaacagaaataaaaggaaactgcatccaaatgtttgaaatgcattcatatatttttattgaatgacatatgtttttatttgtttattttagagacagggccttgctctgtcactcagggtggagtgcactggcacaatcatggctcactgcaacctcgacctcctgagcttaagtgatcctcctgcctcagcctcctgagtagctgggactacagacagaagccagcatgccctgcctatttttaggaacaaaagtatctctcaactcttagcaagatttttatttttatacattatagtgaaaagtgttgtagaaacatatctaggaccacttgatgttgagaaaatatttatattgaatgttttccttgcatttatttctgttaggaaaaaaatagcaatgaaaagcattattagtctgggtggttctttttcagatgcaaaaatcactcaaactgaaatcctttttatactcaaattgggcctgccagctttaaaagagggcagtcaggataatatgataaactggcccatgcgctcaatcttagctcatcaaggctgtgccagaactgacattttcgtacagtatggcttgatgctctgattacaaattggtcttgagcagctatactctttgtaattttattcactgagggattgtgtttgtatcattaggtctgttttggttttgaaacctgaagtaaaaaatacatcactggttgctgtctcttgttttggagtgtgatagagaaaaatattcatccagaaacaagtgtaatttattatatgcaaaattaagagttttgttttccttcaaggtgtcaacaaaagagtcaaatctgtgaaatatttcaagacatttattctgagccaaatgtgaggaccacgactcatgacacagccccagaaggtcctgagaacatgtgcccaaagtggttg

SEQ ID NO: 118435 - DNA, 1054 bp, Homo sapiens
aatacatccattttttttccatttaaagattctaaaatgatttcaacttttaaactaacttttagtttaaaagtttagtctgtctggggaggtgaagagtcttaggagcctaacaagcaagttatgaaacaaaccttcactgttacctttagaatctgggcacttgtaacaattttgtgtaatcaaatgccttcaaaatgaatgtacagatgtgctgcaaatagaaaagatatttttacaccatttacataaataatagttttgttgtgggtggattgttctacgaatgtacagaaagttaatgcattactcattcctttgcatcttgtcattccataggggagagagtttgtttaaacagagaccagagcctgcatattccgtatataattttcccttatctcatagatagttaaaaggagccaccctggagatgcatgaaaggatgcatttaatttgggaagaaaaaaataacctctatttgtcccttttaattagtatatgaagaaccagatttctctaagggtcctctttctagtctgtatttatagaacagcatcttaaaatggcagtttcccagaagaatgagaatttctaaaacatgccatgctttatatcataaaatagatatttaaaaagtacattacatttaataatgtttgagcagttagggatctttctttgtagagtagcaaacactgagggctctgtgggctaattttggcccttggccaaagttacttgggagtcctcaagtctgtgtgtgtgtgtaggtttgttttaattcatcccagttgtcatttgctagttcataacagcccttacccccacagcctgttgtattcatttactttctccaaatggcctctgcaagcatttggattggtgactcctggggcaaaagaaagatggtggtcttaggggatggggtaagaaatttagatgagatgatgcttcctctctggaattgctacagaactccttaggtacttaggattgaccgtttttgtttttgttttaaacaaaaagtgattctttgactgttttatattcg

SEQ ID NO: 118436 - DNA, 1022 bp, Homo sapiens
ggtgtgtgtatctacatgtgtttagggctagagttttgcatatatgaccttatttcttcatgtcgaatagataattattcaaataccattgagctgggtgtgttggcatgcacctatatcccagctacttgggaggctaaggtgagtggatcactttagcccatgagtttgaatccaaccaaggcaacatagcaagattccatttctaaaatcaaataataataataataaaataaaaaccaccattggctggaaagtcctgactctaaacacatctattatactaaatgtgtctcaagtccctgaaatttgaagcacaggagacaactctgccacacttcaaataaagaaggatgttgtgagagatttcctggcactgtccatatcaatccaagtaagaaattctgtagcattcaatttaataaccaactaagggaaaaactattctttcacatggaggaccatggtccacacagagccatttttaagagtgctagagtaaagggcaaagagtgaggatgttgaagtcaggctaaatacaaatcccagtccaactactcgctcactaagttaccaaccactctatgcctcagattccttctctacacagcagggactataacagtgcctatttcataagactattgggataattaagtgaattaataaaggcagagtacctagcatggtgtctctcaatccaagtgctcggtaaattattattactaaatgaaaggaaaacacattatttttatttcctatgtgaacataacaatcatcgatacagcatatttgcaaggccaagtttttacttggacttgctccaagaactcctagacttcttatctaggtctgcacctgcccttactggaaaagatctttttttaatgtctcctttgtttcttctagacatacatagtgtcctaagaaagatagaaagaataaacacagttcagaggcagaaaagaacagatagatggctcaacattagaaatatctaactgaattttaaagttcgcact

SEQ ID NO: 118437 - DNA, 1031 bp, Homo sapiens
ctcaattctatcagaatgtcaaacctatactgacacccactccactctacagtcttctatgatacaaccagcttagcatgcttggtgcagaacactaggtgcatggcaattaagatgtgtccctgttcagagggaggctccatagctgctgggtttctctactaaagtctaaaagacatgagagtatcatcacgagataatggacagcttgctgagagacaggtcaaaattatgaaagaagactatattatttattcatttttataaaaaactttgaatttcaaaacctcgaccaaggttttcagcttttcatcagggtagatgagttaacttggcaaggatacttggtagtagtttgacactcagcatcagtattccactttctccagtagcccttcagtgcttcaggaataaggaaacatttaaaaactgcattcctcagattcccatgtacgacatgtgcctgtatgtttttaaacaaatacatatataagtatatatagatttactatattttcttaatggtgacatagttttaatttattcttcatgcattcaacacatatttattatacaccctttatgtaccccatactgttctggaaacatggtctctgcattcatggcacttacaagctctctgttatgaaaacagacaataagtacattttaaagtgtgtaataaaatatgtataaataataaaaatgtatacattagctagcaaaattaataacaatattgatatagtaataatccaaagcataaatgtaccaatatttacataacatccctctagtgataaacatttaggtttttttcagatttttgcttttaaaccacaaaatgatgagcatccttgtggctgcatctttgctttcatgtgcaaatgtgttactgtgaaagaactttctaaagtttcacaatggtgggttttattatttgcaggaaatattcacataccagatggttatttggactatgaaatgtaaggccctgccagactgtgagacttttctaattccaagattta

SEQ ID NO: 118438 - DNA, 1036 bp, Homo sapiens
ggcaaagtacctaatcttctctgacccttcctttactcatttgtactagtgagattagcaatacttgtgttgaaaagttgtaataaagattagagataaccagaaagtagagtatggtaggcactcagtgctagtttttatccctgtcaacttaaaacatttggagaattgtcttacaaagaggaaaataagtttcagttgctaaaattcagcacagagtcataagctcatgtttaaaggaatgactaatagagtcttaaaagcatatgtaacttgggtgttgctgaaaatcatcattactgtaagaaatacggtgactcaaatattttatatgtacacattattgctggttcaacttaaaataggactctgtgaaacacagtaaactatagctattctggtgcatgagatggcctataaagaggtaaactaaaataattattggttgtgatgcatcctctgaagtctacagagagagatgacaacgtgaaattgcatgtggattactttggacatggatcagcatttgcctccctggaaaggcaaattttagtagaagcctaaaggaatgatactgagacagtcatgggaagagctgggcaagattttaggccgaaggaaaagcaagttcaaaagccctgattgagaaaggacttagagtaggctgtctatgtgtagtgtcaagaaaagggaattgccattcagacagtctccactgtaggaacacacaccctaagtaggagccaatgaagaagcaacacacatgtacttgagtctccacactgcactatgtcattcatgagaggccatttgacctttactggcttatttctgatttgtatggtgtgatgcttacatcaggtggttcaaaatctctgccttcttggaagccctcttcaaagccaatattcctatttgtcaataaaggttgagtgttcaaatggtttagaaatagcattcgaggctggcacgtggtggctcatgcctgtaatgccagcactttgggaggcccaggcgggcggatcatgaggtcaag

SEQ ID NO: 118439 - DNA, 1015 bp, Homo sapiens
aacagaaagaggccaatcctgctggagtagtaataatatggagaaacccagtaagaaagaaaaatattgaggaggtagtagcagaccggatcatgtaggatcttgtagttaggagtttgaatttaagcctagctgtgacaaaaagccattgaaggatttttttcccccatgagagtgacataatctgtgttgaatttgaaaaggattacctgactgctctgaggataatagaatttaggagggcaagagtagaagcaggaaaatcaatatggactaaaacagctatgtttacatttccaagatatgttcatttttaattatctttttaatttgatttataatttaatggcactaaagtcagaaaatgtattctgtgtggcactgttgtttggcatttctttgtgaactaggacattatttttgcaaatggtttagtataattgaaaataacgtagattctcaatttcttgggtgcagagctctacacatccattagttcaaactagttaaatatgagcattcagggtgtccacattcttgctattatttggtcagcagaatctatcattttctaatagatttttgttaaaatttaatgctagcatttgctaaatttccttcatacttctgacaacttttaattaatgtgttttaagctacattgatagatacatacctagtcatgatttatagcttccagtcatattttgttgtttttatatgcagtctctgtggagtacatgaatgctttttgccttaaatactgttttgtctaatactaattttgatacccagctttctttttaacttttaagttcaggggtacatgcacagcatgtgcagatttgttacataggtaaatgtatgtcatgagggtttattgtacaggttatttcatcacccaggtattaaacctattaatagtatccatgagttatctttcctgatcctttccttcctcccaccctccaccctctgataggccccagtgggtggtgttccccagctttctctt

SEQ ID NO: 118440 - DNA, 1014 bp, Homo sapiens
ttcttgtgatagtgagttctcatgacatctgatggttttttaaggggcttttccccattttgctcagcacttctctctcctgccaccatgtgaagaaggacatatttgcatccccctccaccatgattgtaagtttcctgagtcctcccccaagccatgctgaaccatgagtcaattaaacctctttcctttataaattacccgatcttgggtatgtctttattagcagcatgagaacagactaattacataaggccaatggtagacagttgctggcagcttcatggtatctgagtgaacatatctgaagtccccttggtctttttctcatggtcagaagatgagatgactcaggcagctccagatatcatgctgatattcagataaaaacactgaaactagccacatccttaccctcttgtggacagtaaaactttctcagtgctcctccccagtagacagctacctacatctctttgaacaaagtcatgtcatatgtccacccctagcttcaagggagtctgggaaagtatttagctggacattttgctcccataaataatactaggattttcttggccaggggaaagggggaaatggttgttgacaaggaaatgacatgctggccatactggggatgaagtcagtggacaaggtaaaaaattacataatcaaaattatctataaatcacctataaagcatgctcattttaaagctttcgtaacaggactgtattccgaaattaaatcatttaagtgttttaatgctttgaaaccttcaattctttgtccagatttctacttgctggttcttaattttcaggtcatcatcatcttcatctctcgtaaatgattttgtaagtttctccaattattttttagacagtgtttctctgtggtcctcaattaatgtttcaatttctttcaccataggaaggcatcaccacccacttgcctggccacaggaacagcgtgttctactttttcaaagaccaggaaattcttaaaatcata

SEQ ID NO: 118441 - DNA, 1051 bp, Homo sapiens
atttactgaaaaacttttgctagtcattaggcaaatacttcactgttctaccatctaacccactgcgtagatgtcatatgtgttatgtgatttgtgccatgcattgcaataagagagctttggttgctgtttttcaaaacatttccggttgggtgactattaatagtttctgagagacaagagtcagaccttaccatttctaggcatcttttcctttctgaagccgagatggaatttgcctcatggcctcactctgatctcagcaagaatgctttcaaaagaagttccttgtttttcaaaggctgtttgcatgagtgattcaatgctttcctatcatggagctctaaagccagtggaaaaatatgtgggtatggggttgtgtaatggattcgctgcatttagctccaatcagtgtgctgattgtgcctacaggtgactccagtatctccaatctctgtttgcttttctgttttgtttacaggagcggagggcacagtgttccctaaatctatagaaacacctaatgtcagggcagaccccttcaaagaactaaggtaaacttctgactttggtttgcattgattaatggctattgccttgctctgtgcaactggccagtgattcattctgaataaataataagtgtcacagcgtgaatacataaattgaaagaggttggagagaaccagaagataagctacaaccaaaagaaaattttctatgagaacttaaaattgaggatctggatggggtaaaaggttgcccactttgtgaaatctagattcattcatttggaatgtttgttatgtgctgtattttgtggtacccaaaacctatccagttagagaactagttggtaattggtgctgatcagcccaaagaaaaatgatatctaaaagaagatgaagtctaaatacaatacgatgtcttattatgcaacaagctctctattacttggggtggtatggtactagaaagaacccccttctgcagatgttccaggtgctgatgttaatcttcaaatattcataaatgtgctgccttagcagag

SEQ ID NO: 118442 - DNA, 1060 bp, Homo sapiens
gcctgtaatcccagcactttgggaggtggaggcgggcagatcacgaggtcaggagatcgagacaatcgtgactaagacggtgaaaccccgactctactaaaaatacaaaaaattagccgggcgtggtggcgggcgcctgtagtcccagctactcgggaggctgaggcaggagaatggcgtgaacctgggaggcggagcttgcagtgagccgagatcgtgccactgcactccagcctgggcaacaatgcgagactccatctcagaaaaaaaaagaaaacacacacacacacacacacaccaatgacaaaacattcagaaagggtagatatttgtacaagtcaaatgactgatctgtgtgcctggtgttggcactcagatcagtcgtattccagagcgtgtgctctcaacaaagtcaatggttatcaaggtttgaatgatcccaggtcttcaggaaagagaacgcagttacctgttgtgtaagagtacaatggtgagctggtgggttctctccttattgctccctgcagtgtcgtagggtgggtttctgctggctgaggtgaagatggtgaagtggctactggaatgaaaagaatggaagaattgttccatttgtggaggaaaatgtgcaccccaagaaaaataaagaacaaaactagaatcaggaattaccatcacctttccatgggcccttctcctggccttccacagtgggcatgcagggcttctaccgacccacttctgaacctttcggctcctcttagaaatgtattcaaagatggccttcaggcattgccctgctatctaattatctcattaacatgaggaaatgcgatctagataatgttccacatagtcaatatatacgattatctcaaactttctatactcccaggttccctctaaatagacaaagccaacaacagggcattttatgtagaatacccaattaagctttattttattcatacaagtgatatttcactttcagaaaatgggggcttaggaatttgcactaacatgccctacccccttcacaacagccccattctgggtttcctgg

SEQ ID NO: 118443 - DNA, 1039 bp, Homo sapiens
ataagtaatctagagatgatttaaagcatatgggactatgtgcatagtttacatgcaaatactacaccattttatatagggacttgagcatctgcagattttggtatcaagggggtcctggaaacaatttcccatagatatcaaggaacaattgtactgctgtaggagctagtttgctgattctagcctgaccttgaattatgcttggccttgtaacttcatctacacaaaagttattctatttcccaagaacaagagtttatttaaaaacaggacttacgggaacctcctctttccctattaagaaaaaagaaaattactaccgaacagaaaattcaattaactagcaagaaatatcaaagaaaaacttacgtggcacaatctccaatgatacggtgattttcatgtcattgaaccacccacggtgctcaacacggcaacaatatacgccactgtcagacacagctgtattttctatggtcaaagagacatcccttcttgaaaggtcccccaatagcttatagcgtgtgtccttccgataggtgacgtgggttccattggtccagacaatgccattttggcatgtgaatagagaacatgagcctctattccagcacatggatgtgacagctccactgtagtggcagggtagtgtgacagatggacctgcctctccaccaacctttacagaaccagctacagaatctgcaaagaagaaaagacaaactgagaatgagccctcactatttcatcttggctgggcacaatggctcacgcctgtaatccaagaactttgggagaccaaggcaggcagatcaacccaggtcaggagttcaagaccagcctagccaacatggcaaaacccgatctctactaaaaaaaaaattacaaaaattagcggggtgtagtggtgtaatcccagctactcaggaggctaaggcagggagaagtgcttgaacctgggaggcggaggttgcagcaagctgagctcgtgccactacactccagcctgggtgacagagcagactctgtctccccc

SEQ ID NO: 118444 - DNA, 1023 bp, Homo sapiens
gcttagctcccaagcctccccctccaataaaagacagttacatgatgtttggcaatcagttccaatgtgatgatcttatcatccgccctttggaaagtcagggcatcgaacggcttcatcctatgcagtttgatcacaagaaagaactgagaaaacttaatatgtctatccttattaatttcttggaccttttagatattttaataaggagccctgggagtataaaacgagaagagaaactagaagatcttaagctgctttttgtacacgtgcatcatcttataaatgaataccgaccccaccaagcaagagagaccttgagagtcatgatggaggtccagaaacgtcaacggcttgaaacagctgagagatttcaaaagcacctggaacgagtaattgaaatgattcagaattgcttggcttctttgcctgatgatttgcctcattcagaagcaggaatgagagtaaaaactgaaccaatggatgctgatgatagcaacaattgtactggacagaatgaacatcaaagagaaaattcaggtcataggagagatcagattatagagaaagatgctgccttgtgtgtcctaattgatgagatgaatgaaagaccatgaaagatgtttctttttctttttttccttttgataatagcatcatatattagttcattttcttttggacagtcttaagagaagtttcactaaaaatgtaaacagctttaatcttgactccaaatttttcaattatgagatgtcataggcagtaatttcgctgtataacaagcatagacaaatgagtgtccctgcactaagaagaatcactttaaaaagcaaagtgttagctgctgttgtatgggacattcctatgttttagagttgcagtaaaactttgatgataacctcaataatagcaaagttttcgtctttgaaaaggggatttagcatttgctttaagaatgatagataaatggatattaagctctctacatgtaaaactatgaaatctttagacttattccat

SEQ ID NO: 118445 - DNA, 1076 bp, Homo sapiens
agcccggcagcggcgacatcctcgagtccaggtactgcagagcgctggcccctgcctctgccgccgtgaccaccgtcacctcccccagggccagcgagagccgcctgggcccgcctggcagccgcctcgggcacacagaacgtgtgatgggtggggcgaggggcgcagcgtcgatgtttgggggcggagggctttgatgagagaggagcaggtctgacccgcttggaagctttctggcctacactagcatcgctcaccaagctggctgcgggcacggtggaagtgggggaaggggatgagtgggctgactcctgggggaaaaggtggtttttttcttgagctctgaagaaccaggaagatgcttgcctgtctgttgtggcgtctacttttcaggtcagccctacccctcaccccaaagaacagcccacctatgtgcaaaagaagaggaggaggtgctctctgcttggggatgggggcaggtagcatgttccacataagtatggccctctatatccagaacccggctggaaaggacactgacagcccaggtgcctccccagcacagggaatctgattttgacctttgcttgcctactttccccagcacagtggaaacactcaccagggctgatgagccatcagctgtccttccagctaggccaagaatgggacaaggatctttttctgctagttcctgggtgcctgtgccctcagcatgggcagggagacggaggcaggcctgctggcaggaggggcaaatcaggagactgtcggttcctgtgttcccatttcctgcctcctgtctgtgtcccagttagggcagtgggtctcaccttactcttggatacaggctgtgccagcaacctgggtccctgagatcttagagggcaaaaatcaggtccatatctttgggcaggcctgtgaaggccttgatggttgctttctccaccattagaccctctctctgtggccctcctggtggcctcccacctccacttccatacagtgccctgcccttcccccagtctccagtgtcagaaatggttttcaagaaaggagccaatgattgtgtttat

SEQ ID NO: 118446 - DNA, 1068 bp, Homo sapiens
tcacttacttattgattctcttcaagggatgttcaggggtactattatgctacagaggagaacttaatggttattctggtaaatgagtatttttgtgtgtgtgtgtgtgatgaagttttgcccttgttgcccaggctggagtgcaatggcatgatcttggctcactgcaacctctgcctcctgggttcaagtgattttcctgcctcagtctcctgagtagctgggattacaggcacccaccaccacgcctggctaattttttttttttttttgtatttttagtagaaatgggatttctactaaagaaaaattgaccaggctggtcaggctggtctcgaactcctgacctcaggtgatccacccgtctcagcctcccaaagtgctgggattacaggcgtgagccaccacacccgtctgtaaatgagtattttttaagtttgagtagcccagaagaaacctagttacaggagaaaaaaagggaagttggataagagctgggagcttataaactgatctaggggattttatgaaaaatttgaaacatatataaaattggatggaaaaatacagtaatttctatgtatgtgtcacacacaatctatagttactaactcactgcgaatttgtttcatttctattcactcttcccccatctagtattatttagaagcaaaaccctgtgtccttttatctatattttagtagatctttctggaagatataggttcttttaaaacataaccttgatattatcaaacctaaatacaatatttccttcatattatcaaatatccagtcagtactaattttctaattttctcataaagttataattttatttgtatggtggtttgtttgaaataggatccaaataaggtccacacatgatagtgtgttcagtctcttcaaaatctatagactttcctcccatctctcttttctatctttgcaatttatttgttagaggtcctgagtcatttgtccagcagaatttgtcatagattgcattttgctgattacatcactggggtgtagcatgtttttctgccctcttatatttcctgtgag

SEQ ID NO: 118447 - DNA, 1032 bp, Homo sapiens
tttcagttgattatcttggctgtcacgatcctggataattgtattgcatggtaatttaagagtggaactcataaatatccttatgaagaacaaaaggtggagaaactaaccatgacctatgttctcacatcccacttgaggtccctcgcttgtggtcacgtgactgtgtgggcatcacataatttctctgagccttgatttttcatcagttatatggatagggtaccaccttccatgttgatcacagagggtggtggtgaggctcaaccaagtgcacacaaaataccttgttagccataaagagatcctgagatgtaaaagatacacatcgagagcaccttgggaagaagtggtgagtggaagtggcctcaatgcattttaactctctttattctcccaaaggatgctggtcatggtgcggttaagaggaattttagaggcccctgaaattctccactgaccttctcttccttcccttcagtgcagaatacagaaactgcagccatgaccacgcacgtcaccctggaagatgccctgtccaacgtggacctgcttgaagagcttcccctccccgaccagcagccatgcatcgagcctccaccttcctccatcatgtaccaggtaatggaaatggtagatagcaccagggggcccaggaattctggggatcccctaagagagtttgccctaaggcagagggaaggggaggtctgcatctagaaggtgaaaggttgtgagctgatggagtcccttgtgcgctggtagagccgagtataaggaacagattagctactaaatgtgccgcaggactgtttccctccctcccccagggaagtcttgttgatctgctttgaccccaaataccttcaggctattcttgctgctgtaccaaccaaggttttggcagctctggcctcatgaattaaatattgcaatttagaaaccccagagcctgcctgggtaattacttttccttcatgcatgtgaggagggcactacaacacctcatagcagctcatggctcagggaagc

SEQ ID NO: 118448 - DNA, 1008 bp, Homo sapiens
taaagggtcggggcatagagggtgtattcgttggcttggataccttaacaaagtgccacagactaaatggcttaaacagcaaaaatgtatttcctccccgttccggagattagaagtccaagatcaaggtgtctgtaggttcggtttttcctcagacttttttccttggctcccagatggctgtttctctctgcatcctcacatggtctcttctctgtgtgcacacatctctggcaccttctttctgtgtgtccagatttcctctttttataaggacaccagtcagattagatcagggccctctctaatggcctcattttaacttaattacctctttaaaggccccgtctccaaatacagtcacattctgaggtcctgtggggttagggcttcaacctataaatttggggggcacacaattcagcccataacagaaggctttagtttatttaataaaaaattaaaaacaatggaaaaatctttatccttaaaagagatatgaacagaacgcagcttgggggacagattccatgtgttagtcatatgtagaatgagttgcaagtaggaatgaggcaaataaattagtcaagataattaaagttatctacactgcaggcattcaaggctgaatgagggtgatggcactggggtacagctaagaggatatggatgtgagggacactggcttagcagtcacctgggactgcactgactgagttcccaggaagaccaggtcaagacaccaacagagcagtcggaaggaggggttaggttggagagtgatagtgttcattttctgttactgccctaatagagtgtcacaaacttagtggcttagaagaacactgatttatttgcttatagttttgtaggtcagaagtctgacgtgggtcttactgagttaaaatcagggtgccagcagggccgcattccttctgcaggctccaggagaaagtctgttcccttgccttttccagcttctagaggtgtctacattccttgactcgt

SEQ ID NO: 118449 - DNA, 1053 bp, Homo sapiens
tcgggccaggtatggtggctcatgcctgtaatcagtcccagcactttgggaggccgaggcaggtgggtcacaaggtcacgagattgagaccagcctgaccaacatggtgaaaccccgtctctactaaaaatagaaaaattagctgggcatggtggcacacacctgtaatcccagctactcgggaggctgaggcaggagaattgcttgaacctgggaagtggaggttgcagtgagccgagatcgcaccgctgcactccagcctggtgacgaagcaagactccgtctcaaaaaaaaaaaaaaaagaaaaaaagaaattagcttcggatttaaggactcctctgagaaaaattgcctggcagatttgcctttctcgagagggctggctctgaggagggccctagaggagcctggaccctgcccccataagggagcacagtggaccttactcactgcccctctgcccccagcgcaaggccatcgagcggttctgcagcgaggtgaagcggctgtgccatgccgagcgcaggaaggactttgtctctgaggcctacctcctgacccttggcaagttcatcaacatgtttgctgtcctggatgagctaaagaacatgaagtgcagcgtcaagaatgaccactctgcctacaagaggtcagggcaacctccccctctcccctttccccatccaggcccctcctccagggctgcctgtcaagtggaggaagagaatggagcccctctcacctgctttttctttgataccaaactagccatcccccaaacatagtgaggcttggcctgtttcagtgtggtttgaggaacagggcatagagctgggccttggaagaacttgatctttgtagagttttatatctcaagatggaatcaaaccctcagttcccccatctctggagcagcagcattttatgttgccccatgtaatatgggaccagtaagatcatcacaaaatggttacattagtcattttctgcaagaatcataaagccaattcaaacagtgtatgtaaaagaaggaaatgaattggctcacagaaa

SEQ ID NO: 118450 - DNA, 1002 bp, Homo sapiens
tgtagctccaaagatcccaagagtaggaagaggaggagaatagaatggcagggcctccagctgccattgatggaggcatttatgccctagaaggctgctgcatgaaagccacacatcgttccaagttgcaggattcagctgggatttggctaggaggaggccctgtgattcttttctgaatgctgcttttttttttttttcctgaagtcccttgtcacttaaagaggtacatcccagaagacagcacctgctctaatttccagtataaatcagagctcgcagaagtagaatgattaaagactggattttaaattggttcacatttgcaaaatcacagcctctcacctggtacaccagggaccacctcagcttgcccttacctctggatagaatgcctcagcaacgttcatcatatactcactgtgtttcagtgcctctgagagttgatcttttggccacagatctttaaaaatttgcagttaaactaagcctcttagaattttgcaaaggaatcttacactttggaattaacttcccatgttctcagtttattctagcattgggcactgccgacatggagcaagcctgagaggtcagtcatgggaaagcccagattaatattcacagcagaactcagtggtgtgacatggagggcattagatcgagcctgagtcccactgactcttcaaggttaaggaaaaggaacataagtcactaagaggaatcctgtgccttggctttgcttgttttcaagggtggaacttttacttttctctagagttgccccagatgaaaatagggctcattttgggagacccttgcaaaatcttccctaagtcagcatgaatgagatgagggtagaagagaaatacaacctctcccttggcaggcctgggtgtaagtctggctctgccacttaatagctggatgacgttgggaaagtcactaaatcactgaaactgagttccaagtctgaaaaatatgaataccaagggtatcggc

SEQ ID NO: 118451 - DNA, 1048 bp, Homo sapiens
tctttccagaaggaagcactgagttgacaagaaatgaggccatatgtcccaccacagggagagctcagccagacagaatcatttaattcagccttgcagataaattctgaagtttcccagcccaactgcccttcctatgccttgtcagcctcataacagctatgctcagaaaagaatcatctcaggagcaggtagcttgtattcttaactgctacctgatgtgttttagtcccaaatgaatttttacaagtcttggttttatttgcaccctggactttttctttggactgactgtaaagtaagttgcttctaagcggtggaggctcaaggaacgtaagagagggatgaaagatggtcttttcctgactgtgaacttgtttctatttcccaagcaagtataaagctgtcttccttaaggggggttattagcaagcggctggctgtgtttttccctcttcaggtatgtcctctaccctctggatctgtacaacgacagcgcctactatgctctgaccaagtttaaaaagcagttcctgtacgatgagatagaagctgaggcaagtgatgtgcttctctttttgctcctttaatcttgttccaaattccggacttttccagtcttttgctattagcatgaagtaggagtatcagtgacttgttctggagaggaatctctgtaaccatggccatcagaaggcctgtgtaacctctgagggcagaagtacaaactgagacacccagctcagggcctgctgcctttctcttcccacccacaaactctgtgctgcaccatgaagggcttcatgtgcatgtgtataaatacccaagctctgcctgccaactctgctcaaaaacagtggcccttggctagacctaaaccctagggtcacacacacccatagtggagtccaccctcagaggggaagccagggaagagagcacgtggccctggaagaggcttgagccgcctgtagaaggcttctcagaactggttctagaaggggagaatggggcctgagtgcacacgcccaccttgaccttatggatt

SEQ ID NO: 118452 - DNA, 1157 bp, Homo sapiens
caacctggccaacatggtgaaaccccgtctctactaaaaatacaaaaattagccaggcatggtggtgggtgcctgtaatcccagctacttgggaggctgaaggatgagaatcacttgaacccgggaggcggaggttgcagtgagccgagatcacaccactgcactccagcctaggtgacagagcaagactctgtctcaaaaaaaaaaaaaattgcaaatcaaagaaaaatacaatgaaaataacatccatctgaagagatggatggggaggctgccgagttagcggacgaatttgagcactgatgggttctgacagtctgtctgttgcatccctccaggcaggcggcctcgaaacagctgaggagaggggccgtggggagattgggtcctttttgaactttgacttgtctgttcactgactgaggaccctgagagcaagggaccaaatctcccaaacttagccacagaatatttttccccttcaaagcgtctttccccagaatgcactctgggcaatcctgcctgactgctgtctttcagttggctcagtttctgtcataaagctgaacgggcaccagtgatgtttcctgcttcctctccaccaggtgaacctgtgttttgatcagtttgtctacaagctggcagaccagatctttgcttactacaaagccatggctggcaggtaggaaagccccagagctgtgagtagcaatctcttaagactgccacctagaagacatgattttctgttgtgaaacctcccttcttctttagcaccttaggaaaacagagccattccacggacccggactgggtgctgagatagagtggaaaggaaactaggcagataaagggctaacctcacacagcctgcagtccagcaggaaagacagacatcgactaaaagccgatgaatgcacagtgacaaggaggttacatgctgtctgtgagggaaaagctcatgggaatgtacgatggttaaacctttgggggcggggaactagaaaggccatcttgcggaagtggcatctgagttcttatctgaagttggtaggagtgaaggaagtaaaacgaggtgaaggatggggcaggacgttgcaggcaaaaggaactgcttgtgcaaggaccctgcggtgggagtatgatgataacagcat

SEQ ID NO: 118453 - DNA, 1352 bp, Homo sapiens
ctggccatctttccttttcttaaatgtaaccaagcttgttgtgtaaatgatagtgttcccttagatctttccaattttatcattcaggtctctgtttagcaaaacttctttagagagactttggacttcctaactccaaatgatcccattttcttattttcaaagcacttctcctctgcaatccatgcctcagtgtgaaagatagtaacactctcagctcatagggttgtggtgagatttaaaatgtgtgtgtgtgtgtgtgtgtgtgtgtgtgtgtgtgtgtgtgtgtttgtgtttaaagtgcctgggaaataataaacactatgcaactgttacctattatctgaaattattccattcctctgtttgtgtttatattatcagtctttcctcactcgaatataaactccatgaggacaggaactttgtattcccagtacccagaatgtttcctgggatacaccaagcaggcactcaattgcttttgcagtaaatgaataaaagaggaaagtggctcaacttctgtgttgcccatctttaacttagaaactctgtttcacatattgagcttctgtgactgaaaagaaatttgacgtaacttgtctagagcagaaaacaattttacttaagttatataagatagtgctctgtgggtagatcctatgatctgaaatagatgtatctgggcagttgagagtcattcacaatctgtttactggccttgtttcacttttattccttgcagtgtcctgttggataaacgttttcgagctgagtgtaagaattatggcgtcatcattccgtatccaccgtccaatcgctatgaaacactgctgaagcagagacacgtccaggtatggggagcagaagccaccttggagatggaaggggcaggagagagcagctgcgaagttagcatagagatcagaaatcaggcctgggtattgtctgcccggcatgttgccagtgtggatttccgagcctgggtgtagcacagcctcaggatctcataaacaataaagaggcattgggcttcctttggctcaagttctgggcttctccacccatctatagccaacctctgacaagttatggcaaccaaagcctttgtcttctcatcataacctgcagcccacttttttcagctgggactgccacttagagatgggtaaatctgtccctgaacagggcccaagtgccggtctaagtgaggaagactgtggcgcctttgaaatgaaagcatgtcagggcaaatccacggtagaaattgggttttttgtgtgcagagttggtttctattaacatttgaccctatatgtagaggagatgttgctgggaactgagaaacatcc

SEQ ID NO: 118454 - DNA, 1052 bp, Homo sapiens
atgaccatgaaaaattaggcttgcagactgtttaaagggtaggtaaagcagggtttaattgggtgaaaagggaaaaaaaggagggaaacagggactctcacaaggccagagtccctcagctagagagcttcccgccaggccgttggaatcccaggttccacacaagaagaggaggggccaggctcctccctgctgcaaacatcataaacttcccgaggctccacctcaatggacaggctggttggagtttctccaggaaacccctcccacctggcagtctcactcccaccttggtcccccaaagtgctgggattacaggcatgagccactgcacctggccagtgtgaattttaagtaacttttctctctctctcttcatccagctgttgggtagatcaattgacttgaacagactcattacccagcgcatctctgccgccatgtataaatccttggaccaagctatcagccgctttgagagtgaggacctgacctccattgtggtaagagtctgggagcgtgtgggatttctgctctgtgatttctcagactagaagcctagatggggactgtagttagtctagtgctgggccagttaaagaggggcagtgagtctctttcccatctgaatggagctgggaaagaaaaacttacacagaataagagtaatcttacgttcctgattgccttgggaacgatagcatggagggggtctccttgagatttctagagatggccaaccctcagacacagctgcatgtccttaggatcctgcaggctgagcaagtaggtgaggggtcctaagaagctagggaaaattgcacaagagggttggcttcacaggtgtgcagtagtataaggcccagaagggctttgcagctggtttaccattctgcttcactatcttgaaattcttaaacaagggggccccacattttcattaaacattgcaccctgcagattatgtaactggttctgatgcacaagcctggaataggcctactcctttctcccagaaaacagcaattaaaacgactctctgctaattctct

SEQ ID NO: 118455 - DNA, 1073 bp, Homo sapiens
ttccttatctatagaaatggagggaatatcagaatccacctcttagggttactataaggataaaatgagatactacctgtttttttgtttgtttgtttttgttttgttttcttttgagacggagtcttgctctgttgcctaggctgtagtgcagtggcgtgatctcagctcactgcaacctctgcctccagggttcaagcaattctcctgcctcagcctcctgagtagctgggactacaggcatgtgccaccaggcccacctaatttttgtatttttagtagagatggggtttcactatgttggccaggctggtctcaagctcctgacctcgtgatctgcctgccttggcctcccaagagtcttttgtatacatagttagcacttaataaataatagcttatggaaaaaagatgagagaaaaataaatttggggctgcaatgcagtgattttgggtgatttcttagggcttgacctacccacccacctaagtcctgggtcacttactccaggagactgtagtacagcacacatttttctgagaaatcatttggtcacctctattttgagaaacagagttattctttatgccaaatggttagcagtgattagctccaagtggcgggatttttttttcttttttgtttatctgtatcttctagttttccaataatgagcatatcttatgggaaaaaaaagatttgggatatgtgtgtctccatggcctcttcccacctgtccaaaagcactaaatgttcttttagctgggaacaaaatcaaaacaagcagtgaaagcccttgcttatcaggcgagggcagtggctccccagagaacaccagttcctgggaagcccatgaagagacctcagggaagcgctctccgatgggtctggatggcccctgctcgccctggctgagaagcttctacctcctccaagaaacaaaatgaggaatgagctcccctcagcctttccctccacctgaaaaactccattctgagatggggaggcaacttgattctgagttgggagaggttgcaaagatttggggagttagtcaccctcattttacaca

SEQ ID NO: 118456 - DNA, 1079 bp, Homo sapiens
tgtgaagcaggccagcagaatggccatcagcacccaaagggagatctgggggtctaccagggagcttccaggagccagcggactcttatccagggtgtggaacatggtgcagtagtgcctgtaagggaaggcagccttcttacagctgatgcacaggaagtagagagtggaaggggcaagatgttccagcaccacggagctgatcgttcgaggcaccttctcctcgtggtggaagctgtagcgaagatagccagagaagatgctgttccagttgggcctgtacataatatggtaatagtcctccaggcagggctccgaggacgaccaggagatgatggctcctgtataagaaatgttccccacctcgatgttcatcccgattctggaaccagaatcaaagtgaagagtgacatcccctgatttaagtatgtatttatcataatcatagccaccatttattgcacatttgagacgggcactcatgttgccctcatcttacagacaaagaaatggaggccgagaggttctgttatttaggcatagcgaaaaagtggcaggacaaaagttaaaactggggctgtcccatgccaaagttcaggcctaagaacagatgcacccatgcaatcccagccacatcccaccctagctgagatccttcagataacaaaggggattttcttaaggggattgttctcatccccttaagaaaaaagaagaaaaggtaaggagaaatcagtagaacctcagaggctccacctttattctcaggtctgtgacctcccctcaggcaattgattcacctcaattttccttcttgacctcctgtttctgctccaagtactgtgagctcagtgatctagaacattctgcccactgctttttttagcctcctggttctgttgcccatggtgagtggaaattcgcttcgtcactctttggcagctgatctcaccccaaagcttctgctcttgttttgtttgtttgttttttcaaagccagcggtaccaggaaatttattttatgggtgaagataatcagcccctaatatcagcataactaccactatttaattctgctgt

SEQ ID NO: 118457 - DNA, 1044 bp, Homo sapiens
ctggattggtcttacctatcattctgttacatttctgtgcacattttgacctatagctgtgctcctcattttctgacccccagactccttgtatttgatgactgaactcagaaatcctgatattgtccttcagcgcttgccactgactgctcatcctccccagctgtgctccattatctaatttgagcagggcaaattcatgacacatgtgctgccattttccacgcccttacccatggcagacatctctaatcaggcatcatgcttctttcccttgggatttcttgctgaacactgctccccatactgcactggcttcaagagagttctgtatccctttaccactattctgaatctgccccaaatatggtcatctgaatttcatttaatttcctgcaacactgctgaaggccaaaacatttaagatgtttatgaaaatttcaaatgatgaaagagaaagtaatatataaccaggtcaggaatagcaaataggattaatctgctaactccaattctttggcagtagctttgtggaaccatgggttgttacagattgtggagctaaatccagagtaaaacaagaaaatgtggtaattgattaaagatgtctgccttgggcacaggagggatgaatgtgccatgaattttccaggctgaaattaaatagcatgtttcaatctgcacaatttcctggctccatttcattttagctctttgtctgaatctgctataagcatcctcagccccaggaaagaccctacacctagaaatgtgccctccttgaagtctgtaagcccaagacaacgagagagctcctttttcagtcttataaaggcttattttcccttataaaggtcaaagggactgttccccgcctttaggcaagagcctgccccatcctctcagaggtctcagcataacctccataccccgcatagcccagaattcagcccactcatctgtactcttcttttgtcagctccaaggaaccattctccagtatgtgaaaacactgatagaggtgatgcccaagatatgccgctt

SEQ ID NO: 118458 - DNA, 1037 bp, Homo sapiens
agcaacgtagccctcagaagtcgtagggataaataggaacaacttctgaaggcctcaggggcaccagaacagtggaggtggggcggggtggcgggggggggtgggtccctgaagcctcagtccccgagtgtctcctgttaagcacctcttttcatgaggaactgtgactcagagaccatcaattcagcttcccctgttcagaatccagaggcagactattgatgggggccgcaaggaaaggaccacttcctcaggcaccgtctgggtggtcactcacatgtatcactgaggacaacaggacactcaatgaccttcagagctgagacctgagacagacccgctacagcatgaatctttcaaccccttctattcataagtgagaaaactgagaaccagagagaggaggaactcacctgaggtcacacagcatagcagcagcagaggtggaagaactaaagcacaggtttccaatattgatcccagtccttgggggctaggggtcggggaaggatggggaacacagagcagggattaggctcactgaagtcctcattctgctttctacttagacagctggggagatctccaagcctagacagtgctttctgagattagaatgaggcatgagctttctggagtttttttagtttaggaagctagaattaaatttttaaatgacataccaattcttctcaatgaaagaagactactaattgccaaaaaaaaaaaggaaagatgcctaatggccatcatagaggaaaggctgtataaactgtggaatgtccattctcatggaaaactctgaagcaggtaaaaagaataagctgataaagtagttttgcacataccaagataaaaaatagtgaaagatacaatattgagctttaaaaagttttaggacaagacacacatgatgccatagatataaaccacaaataactctgcattgaaaaagatctagaaaaaaaaaagcataccaatatttaacagacattttctctaggtatgagggaggaatccaggattagaggtcaaca

SEQ ID NO: 118459 - DNA, 1186 bp, Homo sapiens
gaatcatccgttttactgtgggtggacatttgggttgtttatagtttggtactattatgaataatgatgtcatgaatattcttgtacatgtgttttggtgtatagatgctcctgtttttattagggaaatacctattaggttagcttcaaagcagttttcaaattgtaccaatttatactcccattcagcagtgtatgagagttatcatttctttgcagcctcataaacaatttgtccctctttaatcatagccattctgggggggctgtcatgtttcattatgattttgatttccctaatgatgctgattctccttccacatgctactagccatttggacaccatcttttgtgaagtgctggtcaacattcttgcctttttaagtcatctttcttatggatttgtggccattatatactatggatacatgtattgcagatctattactctggcttgtcttttggtgaatagaagttcttgaggcttagtgtagttatttttttcccttacggttttgtgatttgtttagaaaacctttcctactctaacgcgtgaagatgggctatcctctgaaagttttagaggttagtctttcaacgctaaacagacctttaagtccatattattcacctagaattgatgtttgtgtttaatgggaagtataaatcttttatttccagattgttctggcaccacttcttgaaaagaccttcttcctgcaatctgtagtggtagtgctatgtctgtcatttatcttgtatccataaatggtctggtcatcgcagcctcttaatatatttgttggatcttatctgaaacaaatcagcatttgttaagtatttttatatgtatcaggtttttaaaggaaattctattaatgtctagtgtttcctctagtatttccttccctgggaaatcagaaagtggtcattagggaaaatagcagtcactaagtttttgtttaaattttgcttggttttctagactttcggccattgtttgttatgccagcatacaccaggagagggacctatttgtacgtgtgagggaaggcaggcctgagtcccccgggaaggacagagccctttagtctgccttttactgcaaggcctcttgcctggagtgttctttgccttcatctctgttacttcttctctccttattagagtggaccacagaaacact

SEQ ID NO: 118460 - DNA, 1074 bp, Homo sapiens
tagtaatgtgttttgacatctagtctgtctagccagctgcttattagatatgcagtagccagaacccagatgaaaagccagtttacattattaatagaggtcatttgtaactgtcaaagaagcacttctagaggaaataattatctgaaatcatgggcaagttttaaaagtaacatatgctcattgtagcacattcaactgtacagaagtatttaaagtcaagagtgacaatcccactcactactccaagcccatctgttcccacaactgatgttagtccttctaaaatatgctttacacacacacatcacacatactttcatctgtgtgattgtacattgtcaatgtttttaagtagaattgtagtatacattcatttctgcaatttgttctatttactttacaacttaaccaatagatctagactactgggtcaagtgtgagctttaacactcactggctgcctctctgaaccttagtttcttcgtctgtaaaatggggagagtaatggcatctacctcatgggatggaatggactcaatacctatcaagtgcttagaacagggcctgctttattacccacactcagaaagcataagctagtagtaattatagtagaagcagtagtactactagtagtatcatgtcagtcttttcaatggctatccagaattcattatgtgggtaaatcataattttaaaaattaatccgctactgatggtgcctggattttacttaacaccagtaagacttaccatgaaacttccctgctgttgcattcaggatcatcaattttgtgccctgctctgaacaagaccagttctggtgaaccaatttcaggtgcagccagctccagagttcgggaatctgtggtgggaggtggcagatgggctctaagatgtggatagaaggtgtatgtgcccttctgtttccagcaaatcgccattgctcgcgagggtgacctcctgaccaaggagcggctgtgctgtggcctgtccatgttcgaggtcatcctgacccgcattcggagctacctgcaggaccccatctggcggggcccaccgcccaccaat

SEQ ID NO: 118461 - DNA, 1147 bp, Homo sapiens
ctcttttagggaatcagaaccttcattgtcctagaagctgaaagattcttggaacattttagcttttactctcaacttgctgttctctttacattccttaagttagactttcgggtgtggcttctctcccaggggtaacatttacttccattttctagactgaaccaaaagtcttctgcagaatctcccaccgagtgtggtaagaaggaaggacaaaaggctttaggatataaatttcatgttacagagcatgtcattgtcaaaggaaatctgtggccctgagattttaagaacataaaatgtgacatttgatatttctccagcccagggaagtaagatggttagcaatggttgccttaatcaaatggtcccatttttaaccccaaaggaagtgcccacagcaagaggtttgtgtgatgcacttatgtcctccggtgaggaaagggggccacatatgaaaggccccttaggtcagatcctgagagtagcacatttgagtgcagattcctgggccccacctcaaacctactaattctgaatctctgggaatagggccaggaaatctgccctttctacaaactacccaagttgttctgttgcacatcaatgtttgggaaccactgctgtaagggaatcattctggtcaccttgagctttgagctaccactaagccatgaaagaaaatacatcatacagggaagagagaagggaggaggttccaagtagtaactggcagatcctcctgtctggaggtaccaccttctattctggtttctgacttttccttcttgatgaccatagatgtgttccagaggcaaaagagacacattatcccagatggcagaacatgctttcaaaacatataaaatgtcaaagttccagatccttctacatctttagtcctgtctgaggatggtagctggctctctgtagctgatagatggctagagttccatccaaatccttgaccacgacttcatggagatttgaataatctatttgatgagatttctatttcaataacccacctctctcaccccacattcatatccctaaatttgaccctctgggccgagtcacattaccttcaggagacttgatcccagtagactgaggtcttccctttcagcagaaagatttcatttcc

SEQ ID NO: 118462 - DNA, 1218 bp, Homo sapiens
tcaggaggactgggggcagtgggaagcacagatatttcgtatgaactgtttttaaaactatcagacatttgatgagggtttatttcagtggcaatgtggcatagcagttaagccccctgactctggaattagactgcctgggttagaattccagcctggcctcttagaacctggtgaccctggccaagttgcttaacctctcttggcctcagctagggatgctgtgaggattaaatgagttaatatgcgggatacattcagaatgttcagcacatactaagccctccatatgtgacagctgtgtttattcttcagtaccagctctgtactgtgcattttctgtgcattatctcatttagttcctgagaacaatgtctcccgtggatattattagcatccccattttgcagatggggacaatgaggcttagggaggtcacatgatttgcccatggtaacgtaagtttttttggaagaaaaccttccacgtgagaaactagtgagttctgatctgttgttctctgtgagtgcttgctcaggccccattttctttgggactctgggacaggcatggctgctctaatccccttctcccatttccacgtgcagtgccatcctctcctcatatttcctgagggagagtctgaacctgctggggaagctgggctgtgtgatctgtgtggccggaagcacagtgatggtgatacatgctcctgaggaagagaaggtcactaccatcatggagatggcttccaagatgaaagacacaggtagactccaagcccctgaagagcaggaaaatactggaggttgaacaccccctactaccccacaaaaggtcaggttgggttctgaccacctcaggtgctgccacctagaggagaaggcaagctaaagaagaaatgttaatgggctggtacttgttagcaaggctagcttaaaggcttcctggcctgatatgtatgggtaccattaataagtgtttattatgtgccaggcactgttatgaatgctttatatacattatctcactgaatcccacagaacagctttatgaggatgatcctattgttggtcctcttttacaaatggggaaactgagtttttgggggtttaaaaacctaaccaagttattaggaagtcatgaagctgggactggaacccgggtttgtctgactctagagcccacgatcttaatgctacctcccactgccatgag

SEQ ID NO: 118463 - DNA, 3527 bp, Homo sapiens
ccattcactcctggggtgcagggcacgcaagagagcttcccattgcttctgctctcctcagaggtcccgggctggatggaggctggtacttacccaccccttttagcttttagggattaaggaagggtcaagccagccactgctgtggccctgcccagggcttggttgagggaacggcttctggctgtatggctgcatgtgacaagccacgtcccctcccacctctccccaaacccctgcatccctgtattcacacgggtcactctgactcagacaggtactattcgtaggcagtgtagacagcaggaggagcaccgggcttgggcttcctctgagccgtgatgccaaaggttgcgactcctgactctggataatttttagttgctctttgttttctctgccgcactttcctggtgccccacgcttttctctcttccttcccctctcattctccctctaatgtgtggtgctttggtgagcaaaccctcagcagtcctgaccttcgggtgaccaggtgcttgtgacctacaagtcagagtcctctctcacagtcggccactggatttccctcactggctctcaggagtgtgaccagagtagacttggggcatggccattggggtcatatgtttatttttcattgtgttttgtgacctcagcagggtgggggtcttcctccttactctaagctaaatctaggtgaggtttccccttagggagcccagctatttacaaagtacacacgagggagcaggctggtcattgacttcgggctggaccgttgccctctgagcagagaacagacccatttctgggagctgcccgagatcactggagaaggcagccagcagcagctgcactggaacagtcagagcagggagcctcttcctcaacccagctttttgtcattcacttccttttgttctctctctggtcactgcccttacctgaccctcacagaaagagagctctgagcaggtgagggggtctgcggtggctcctgtcttccctgcagcagggaaggagggccgtgtggtgctttgctagataggacggtttttgcaaagcacctggagatgtttgctgggagatagactcccactccacaaaggtgctgggtggctctccggacaggagctggcctgactctcactcctctgaggctttcctggggcctcctcccatcctgccatgagcaattgtttgctcttgaaaacctcactgcaaggctgaggctgagcttctgattcaccaccccagggcctccttatagttctctgcacacaataggtgcttcttggatgttcttgggtttggaaataagtggaaaatacgggatgtacccctgggggaaaagcctgggttgggtttagaaagatctcaggaaaatgagtttctcttccctcagggtggctgtgatacaggttccccatgtccttgccgtgggtcatccttgctgtgggtcatccttgctgtggagatccattccccacctttcctgtggcccaaccttttatttaaatgtgctaccctctgcctcaaggcttggttcctggaaagtaaaggtgaaaacatcccctttcacccctctgcaaaacaaacaagcaacatcctcaaaacccaaccccatgcctcacagagcttcctgtggcttctccagcctttctccctcacatcaggaggtagatagctctgaaatgacagcgccacagccatagtgactgcatgagccatctgaacctgcagtccaccctccctggaaccacaccagaaagagacctgggttgtcgttttcttgctttttgttttgttttgttttattattttcatatcacctccatcccataaagttgtactgtgaactggaagatggtggaatgttttggaatttgatagactttcggcaaccagttctactaatgcttcactcctggctctgttcagggaggctgcccaggaggaagactggccattatgcatccccttttctttccagtgcccagtatgctgttttgaggtgtcaaatacaaataaatctgggcttagggaaggagagaccttattccaaagcacgattgcagaaggggaaagggaatattgcaaaagggagaggaaggggccttatgggaatagtgaaaaggctcagaccgaccgatggcaagatctgcaagcgtctcaaagcccaggcagaaaaggacttttcttttattggaagaagtaaacatggctagaaagaaccacgttcagggaatgacgttgtgcccagcctttttttttttttttttttttttgtctccaggggaggggctgtttgctggctcaggctgaggatggcccaaagtccagggtctggtggggaggagggaagcttaactcaagtttgggttagtgagttagcaagctctttgtgcagatggggatgtaggtaaatctttttaaaagtgaaattaacctcctgccaattttacaacccaagaatttttttttaagggccttggagccatctctaaaacaaacctcaagggatttagtgccctgtctccctgtctctagaagccttagcctgggcacctggctcaatcttgtaactgcctgctagccatagattcctttcagccttgctgacttctccctataaaagtaaagcctttttctgccccagctctgagacacttgcagatcttaaggtctgagacttgctgattttctggttggagtgtttttttgtattgccatagtcccttccccctgaagcaatagcccctccccacctcctgcaatacgcctttccaatctttattggaagtctctccctgcctacttcctaatttattcttatttgacagagggtatggaagacttgcaatttgaaaactggggaccagttccaaagtcagtaattgtgttaaccacgtgtataacagctctgctggacacccaagaaagccatgggaacgccaactggaaaggtccccttccccaggggagcctgcgaaggagaggttctgtagaatccaagcccacatttccaaagtcacccccaacgcgtcctctcacaccgtccactgtgcgtttgtatgtgtctgggatccagggcaatgtgaattttctttttatttgggagattgttcacggaaaacagatcttcttctctcttgtccacctattaattgtttacaatatttgtacatctatgcaaaatacttgaatgggccatggtgccttttttccttgttagtatttaattaaaaatgaattgtttgtcatttgcaatgttatctggtttggcagctctttattgtgtgtttgttgtaatgtcctactgctcagattagataggattcatgacgtggacttcagaaagagttcccacaaggatggtcagttcagcctataaagccttcatggtggaccctgagccacagcaaagcctatgttttcctatgaccagtagagggggctgtttgtctttacacctggacgcaggctgcttattaaaggcctgaatgatcctgagattcttcgat

SEQ ID NO: 118464 - DNA, 1130 bp, Homo sapiens
tctgcgtggtgggtccccacctgcaccactgccagctcacctgagcagggctgctaggaactccccagggcccgggtctcaaatagagaggacggagtcgtccaggaggcctcctccaagccggccaattccccccgcaccaaattgcatcgtttcccaggtaagtggataatcagcaaccttgggctgggaacattgcttttaaggccactttcaatgggtaatggcaaaggtggggaaggtgaaacttgtggggtcatgagctgactgccttttctgcaattcagtcaatacgggggcgcacagcaggttagagcaacgaacgtggggaaatagactctctaagaagctcctaaaccatgtggcattttctcccgggttggcctattttatgacaagccactacccaccttccaccccatattaacttctgtcagttcccccatgctcgtctgcctgctaggtctttgtaaatgctgcttgttctgcctgatacgctccttctctccttggtggggccacctcctgctcatcctcagatctgctcctagatgccgcttctcccaggaagtctatcctgattcctcaattctgaggttgatgggactgtacttctctcatcatagtactcttcctaccaaattgtacctattggtaccttctactgattggaaagtcttagggatgtatcctgatgccttgcccatcccaaggggcaggtgcctctgggaggtgagagtggggtctagactctcccccaccagccctggtgctcttggaggcatagcctgcccagcagcctgttcccactgcgtgtgtgtgctctgatggctctgaccacaccttctgcaggagatcccccagtgcagacacaggtgtttcctgggtggcggccgggtggggtgccttctggaactggcctgtgtgttttgggtgtgacccctcaactgagactgctttctctgggtgtaatccagagggctccatggaacccaagctgtctctgaccctaaggactctggggttggctgcaggctttggagggtccttgggatgtgtggcagtggtacagtttgggaaggctgagggcatccattctgtttctctgctgtgaaactgctgctctcccc

SEQ ID NO: 118465 - DNA, 1040 bp, Homo sapiens
caggccaggcagtgtgacctcccggagttctgtacgggcaagtctccccactgccctaccaacttctaccagatggatggtaccccctgtgagggcggccaggcctactgctacaacggcatgtgcctcacctaccaggagcagtgccagcagctgtggggacccggtaaggctctcctggggagcacggctctccccagcccaccacttcccagccagcctcccctggccctcagggtagtttggaatcttggcttcaaatggcacctctagatactacctctttcatccccttgactcagggtagatgttcagggagaaccagaggacagtgttccttcccagtcccttgatgcttttatttctcagagtggacaattgaataagagtaatccaaaagaaaaatgagcagaggatggagacagagaagcaaatgcaaatggcccttaagctatgaaaagacgtttaatctcagtcatattaagggaaagcaaagtataattatgatgaggtgagatttttcatatatcagattgcaaagactgaaagttaagataataataatataacaacaataataatgatatagtgttgtggagggtgtgaagaaacaggtagatataaccactatggaaagcaatttggagatatacttagaaatgcagctaacacttgcacatgtatgtgaggatatatttactatgatgtttactgcaccattgttagccatagcaacaacaacctatgtgtccttcagtagggaccaattaaattaattctggtacattcatataatgcaatgctttatggctaaataaggaggcagccctatatttactgaataaaatcatcttccacaaaaaattaagtgaaaaatgcaaggtgtagaacagcaaataaaatatgctttcaagccagatttggtggcttgcacctgtaatcctagctactcaggtggctgatatggtggcttgcacctgtaatcctagctactcaggaggctgaggtggggggatggcttgagcccaggagtttgaggc

SEQ ID NO: 118466 - DNA, 1162 bp, Homo sapiens
ccatgttggtgtgctgcacccattaactcgtcatttacattaggtatatctcctaatgctatccctccccgcctcttgctaccctacaacaggccccggtgtgttatgttccccttcctgtgtccaagtgttctcattgttcagttcccacctatgagtgagaacatccggtgtttggttttctgtccttgcaatagtttgctgagaatgatggtttccagcttcatccatgtccctactaaggacacgaactcaagggatgaaaaaattctaaattaatgtattggtaaatgttctaaggggccagaatgtatgtgtgtgagacaatgggggtctgaacccaggtggagtcagccccacgggtagcaggagtgacagcacgagtgacacctgcctgactgctagatgctcaaactccccactaattccagccttgtcctctgccaggcacccctttcccaaagtgttcaatggatgcaacaggagggagctggacaggtatctgcagtcaggtggtggaatgtgtctctccaacatgccagacaccaggatgttgtatggaggccggaggtgtgggaacgggtatctggaagatggggaagagtgtgactgtggagaagaagaggtgaggggtcacaatggtgctagtgggaggggaagaatttgcattggtttcaaaactcaaggtcaaagagaacacaattgaaaatttcttagtcacaggtgtttcctacatataactgtccaataccccatgaaaaatcagatatgaagaagccttccagttggagtgtttgtgccgcctctgctagtttgtggccagcatcgctagtgtccaggatcagttcttcttatgagtgtctggtctaaccagaaaccacgatcacgtggcatgttgactctgtcttcctcagtggagctgcacatgcctgcttgccctccagctgcacggaatttattctggaggccacacagccagatatatgggcttgaacaggggccttatgaggatgcttaaaataacaagctcatgctgtttaggctggaggagagatgatggaaaggggatgtaggaagtgctgtcaagtcccaaaagggctgctaggaggaactgtttatgtgtaaactctctccttccttctgatcttcacagtgagtgtgg

SEQ ID NO: 118467 - DNA, 1053 bp, Homo sapiens
atctctttctgctgcttctttcctgctgggtttttttcctcttgatttctttagcttttgcatcatcagacagtacaccaagtgctgtgcctggagtgtatctgtcttgtgtggttttctcaggaaacactaagccaagtacaccctatgtttgaatcaaggtcgtgttttctatgttgatttccttatgtctggagaaatatatatgttcagaagaagaatggggaaaaatcttcctcttttatttattctgaaagcatttattggtctggaagttcatccataggtcagttgtggtctgcaacctttgagaactcaggaaacatggacttttaaacatttgatttcctcctagtgacagcagattcagccttgctgtcagaggcacatatggagagtctgtatgctcagtgacagtggaattggtggagacctgcaagacttggctaaggataaggcagggatggggggcagaggcagatctgtccccttgaccttgacctcaactctgtcttctgagcaggaccactccgagaatgccattggcgtggctgccaccatggcccacgagatgggccacaactttggcatgacccatgattctgcagattgctgctcggccagtgcggctgatggtgggtgcatcatggcagctgccactgggtgagtcaaacagcaagagggaggatggggaggagggcgggcacacctggacagtgtgacccaggggttcctcccagctggccccactgagactcccttaaacttctgatggggccaaaaaatgtagtttttacaacaaagaaattgagagaagaccaaggcaaatgtgcagcaagaacttaactttccagcaggaggtttggtgctggtgtaaccctagatttatttaatttctgttttaaggtgttgagttataaaattggcttggccatatgtgtcttttttatttcatgaattttttatgaggacacattttgatcatagccacagcccttaattcttctatcccaagagagttggatcagtgctgtttcaattccaggcttcact

SEQ ID NO: 118468 - DNA, 2694 bp, Homo sapiens
caactatgttgataaggtgagaccaggtgtgtactttgtgggaaaggtgccaggtgccagcacttccaagggcactggagctgccttctgctggattggctgccccagccatcttctgaaagggaatgagcagtgccatagaggcccagggcggtcatgacagagccctgaactacgtacccttaggcaagtaactcattttctttgtgttgcatttttttttcttttgttctgttttcagcttataaatagaaaggctgtcgtaaatcaatgtgtggtttttttttgttatttttattttcctggtggaattttaaaaaatgaaatcttatgccaatatctactataaaagttagatgaaaacagactgctctaagtgggagctggggtgaggacccagaacactgtccttctgaccccttcctcttacccctgcagtggctcccgagcagcttggggcatggaagagcccagtttaagaatcctttaaggttctttaaggttccttccagatacaaagcccagggattctctgacttaggagggaattgaggtaggtcagggtgggaaagacacacagccttaaaagttgagaagtgggctgtttgagaagtgggttgcttgagaagcggattgtctgagaagtgggttgcttggggctaatctataaagtctccatctgtaaagttatcctaaaattatgtcttgtctcttaggaaggatgtgcagtggttaactttcctaggtcaggaccttttacaagatgctcttcggaaatacctacatttttgaattttactagaacgggctggtctgggacttggaagtacattgtgtatatgaaagaagatatttgttatagtacaaaatgcagaataggtaacctagaatgacagtagcctcttggtaggctagtagtatatagtttttaaaagtagtttttcatgtgtttgggatcaaaagtctctttgagaatctggtaacgtttattgcacaattttagaatactcataacattgatgaagcttaactttgggcctgctagggattcatgaattccaggtctaaagggaaaatcattttttcctaaacactagagaatataggagatcacttaaaatatgttttagggattaataggcaaatgtattagttctgaagtcatcagatggcagtttccatgcccatggtttttttctgccctagatggctctggaaacaaaggtcagtggtcagtgacaggtgaaagtcaaacactggcatttcctggaaggacagactctagggacacagtccagtcctccctctagctcctgactcactcaagaataacatttaaataatcctacaacccaaacatttgacatctgggaaaacaagggaagcttgtttccctggggagaatatgggaggctgactctgctttcccccatgtgacatctattgtttggagacctggcaggttcggacttggctgggtatcccctctgtggggtatgtgatggaaccaagggcgctggtgacaagtgaagggagaagagaggcaccagcaagccccagtccttactgaaagccctaagcctgggtggcccatgcatcctgtgcagccgtcttggctctctcctcgcggctggtgttagtcactcctggcgggtaagggaagccacgcccacttctctggagcttgctgacctagctacttgaactgaactattgttgaactaaaactggaatgaattggactcgtgctgagtcatgaacccaatccaaaatgtttttctgtaactgtgaaaaaaagccaagtttacttccttcaaaagctccctagtaaagcaaattcaaattggaatctgaaccttttattttctgtaacgattgaactggcacaaaacagaaaaatcaaaatttctgttgaaataaactgatatttcactgaatctggagcccatcttgaccagcgtttcttggagcgagtggattatctggatgtgtaggtactgcagcactgaagtagtaaagggtcacaaataggctctgaggttgtaatttgggccttcatcctggctccaccatcttcttgctgagactttgggcaagttccttaacttctctaagcctcagtgcctagtacgtaaaaagtggtggaaaaatgttggtgctatgattattcttttcagctggggcagtacctaccaattttggataaagatggtatctcctgctcattatgtcctctccatacatggggctttttattaagtcactggctcagtatttgtagggtggacccatcaaagaacccgttgtatccacaccttccagtggtttagctttaaagaaaaccctcctcctgcttatatttgtatgaggtgaaaaatgccagatcataaagattagatgtagctctagcctcgaggaggtcgagtcagatcttgggtatagaatttcaggatctctggtttggacaaaaccctgaagattaccaagaacgtctgtagtctattgcttgcaacctgcttattccatccttgacaaaacctgagactatccagggatggggaagaaaatttgaagagtaagcatatctgtgcacttttatgtcatttatactcatttacttccaaaatgagtgggagacattttataataaaatatccatgtattaatataatttggtatatccatacgaaagaa

SEQ ID NO: 118469 - DNA, 1075 bp, Homo sapiens
attgtctatggaaattctaaaacttttttttttgcaaagatgataaatatattcccagtcatccgactgaaaactgtattcttgcccatgtgtgggtccatttttataatcatgttgatgccaaatgatgacctaaagccatggtccccaaaatgtggtccccagagcaccagcatcagcagcacccttgtgtaagatgcaaattctcgggccctgcccccgacctcctgaatcccagactgtcagggtggggtccagaaatccatgttttaacaagacctctgggcgattgggttgcacagtcaagtttgagaaccactgacctaaaggcatagcagttcagcctttaactccatgttcctcaaatcagacaggttctaagaatttgaggaaccctcacctggctcatcatgtatttcatttattcatcagtgatctcttgattttctattatgtgccaagcacctggatatatagatctcaagaagacagaccctccccaggcatcgcagagtttgcagtaacagcacacaaacctgtaggtccaaagtgtgataagcactaagatggaccattaggagggatgaaagtgcagataatgggggattcaacatggttttgggaattagggaaagcttccctgacattgaagcagacacctaaagagtgagtttaggccccagagcccatatttgcctaaattagccagctgttacctccaattctcactttgtttagtgactccatcatataagtactaagtgcatcttctgtgcattggatgtcattatgagctgagcgctcgctgtgttcgagcagggcagacactggccttggtctctcctgaggatagagcccatcacaactccagtctgtctgtatcccatccacatagtttagctaccatcttcccaaagagctcattctaaggcagctgtacctagtcacatttccaaagcatgtgtcctggcagcagggcctggtggtggggagagcactaggctgcaggccagaaggtctttgagtgttagtcactggatgttagcagcagaaggaggtggcccttgaagctgtc

SEQ ID NO: 118470 - DNA, 1066 bp, Homo sapiens
gtatttctaaattgaaggtgatgcctaagaaaaaggaaatagtgtttttcttttattctgtcattgttgagtgtgaaataccctcatcatagaataactgcttttgggggaaaacactactacctttaaaacactcagatgctgacttcagaaagcttaaaaagtgaaaagaaggctgggcgccatggctcatgcctataatcccagcactttgggaggctaaagcaggcagattgcttgaggccaggagtttgagtccagcctgggcaacatggcgaaaccccatctctactaaaagtacaaaaattagctgggcatgatggctgggtgcctgtagtcccaactactttgggaggctggggcacgggaatcacttgaacccggaagcctgggtgacagagcgagaccctgcctcagaaaaataaataaaaattaaaaagtggggaaaaaaagtatgctttccctattggagtagacactacaccatatgcacacagtcctcatattgattcatactgaaaatggcatggtgtttcgaggtttcgaggttctgtgggaacgtggtggttagcacactccctctcatatgctggcctctgtcctgcctgtgctcatcagctcatctcagtattttctgagaataaaggactgaatccagggtcccagagcagcctccagcaataaccaaatggcagtggaaggtgttatatgagtgatggccaccacagccaagaacatctctagtgccgaatgacaaaatcattacggaggtagctgctgcttatccagcagctctgtttcttagcagttttttaaaaatgaggccaagtccactatttctacagcgctgatctgtttctctttcttagatgaaaagggaagatttaaactccatgaagtatgtggagctttacctcgtggctgattatttagaggtaagggggaggcaatgggtcttgcagaaaaactgctctcttgatagcttccattccaggctccagactgctttggggaaatgttgcccattcatctttctccagttcatctatgattttgaccttaaatc

SEQ ID NO: 118471 - DNA, 1055 bp, Homo sapiens
tgatgtaacagttgaagcagctgcctccagtccaaggggtgatgaaactttttgctctctctgttatacattagagtgacttattccaatgtttacactcaacgcttcacaagggtaggcacttggtgtgtcttgttcgctattccgtcctcagcaactggcatgatacctggcccgtagcaggagcccagtaaatgtttgtgactgtcttccagaggactgtgagtttctcaaggacaaggattatgtctagattatgtctaggacacatgagtttattctgagttcagtgctagtatctataatcaagggaggaaaaaaagtagtccctcatgcttggtggtggatgtcacttcaccaaataactaccgtgctgacgtggggcaggtgggacaagtaggcgtgtcatcactgatgcatctagctctggtttccaagcacaaagacccttgtctttccacttaatcatccagtagtcttgataagttatcattgccgtgttagggatgaggaaactgacgcttggagagatttaagatgcttgttgaagagcatgtgacaattgaatgttggagctaaatccagaacctcggtcacctcacttgcaggccactgttctttctctggccactgtactgcttttcctgagtctctaaagttttgacccatgatttgtcatatgccatgttttggtttgggaggctttttggaatcctggacctaccatccttcataagttttaagtgtcacaggtacagccttcttagaactttttgagatttcccagtccagagacttttaacctggagtctcacgatgagcttggtggtggtggttgggtggggtgggggttggggtggaggtccaagtgccctgagctcatgcaccactttttatgtataagtgcattcctctagagaggaagtgtgagcttgcatcagagtctcacgaaggggtacatggccccataattaggttaagaaccaatgatcaaaacccactatgtcattttgcatatggagaaactaagacctacacaagggactttttcagaa

SEQ ID NO: 118472 - DNA, 1039 bp, Homo sapiens
gctcactgtctatcagcaggaagtgtatctggttggtaagttgtttacttttttaaaaatttttttttgttaaaaattatcattatataactatacaggtttagtgttaaatgttcaaatcatgcaggaatgtgtaagctttaaaaagtgaaagttgtttatcttgtcctacccttccaaccaatcccattctccatctgttattactgttggaggtatccttaattactgttggaggtatcctttattgaaatacataattgtgtgtgtgtgtgtgtgtgtgtgtgtgtatatatatatatatgtatatatgaacatatttaatccaaatgagatcaccctatgcatacagttttgtattttttttccaacttaagcattatgttttaggtatacatagatctatctcattcttttaatggttgcataatatcgtttgtactaatgtctggcacgtttcattatatagaaagtctttcagaggtatgcaataaatcatccatagtggtctatttgatggatcacccttatattacagcagccctgccttcgaaaacatagggctcactctcactgtaattacaccttaaccgtggtccctggactcagattctgtgagagagggagagagggagaacatgagattgaaaatgaatgcaggagaatgtgtaggaaagtgtgcatgatggcctggaataagctcaaaatgtaaagtcaagggatccacgtttaagatctagctacatacttcctggctgtgtggatctctgtgttttcctctccccattaaattttttccttgtctttgctgtggccaggctggtccctccacaggcccctactctatccaaaaggtggctaagtcctgggagtggggtgggtggtcagtgggggtgaggtcaggggcataccccagagtcatgaacctgaacattaggagagctgggattagccccggctctcacattaactggctaggtgagcttgggcaagttcttttttgggtgggctttcctcttttctgtaaaacaagagtaga

SEQ ID NO: 118473 - DNA, 1241 bp, Homo sapiens
aataagccatgagtcatccatgaccatcctgagatattaacattgccatgcttatcagtgttctttagcctgaccacctcctttctccttgctaggatcactgcttttaccacggcacggtgagggagacagaactgtccagcgtcacgctcagcacttgccgaggaattaggtaagagaccctgaggctgcaggtggcaccgggcactctccccaggaatggaagtttcaagatagacaaggctgaggcaaggaccttgggaaggagtccattgagaatgtgtgcaagccagcccagagaggggctgagcctgggaggatgggcaagggaaagcctaggtaatccagaaatccattgggatttaactttcctgatgaacttgatgttttaaaatataggttttgttattatttaggtatggtaaggccaaaaaatcaggagatgactgccattgaaaagatggtcatactcacagaaaagggaggggcccggctgtgccatggggggcggcacggggaggcactggggttggtcagcgggcagagggagtctggagaaatgtcagcagacgcccttcttgtggtttctgcgggaaggaatgggcgaggcagagaaagcaggtttaggattggctagtttgcatcatttcagcaggctctggggtttatgggctctctgtccttagttgtcctatacctggttctggggtgattagggaagggggatagtggcccagagggtgagagtgcccataaaataaatggctagggtatggactctggattggttggcttgcatttgaaaggcaaggtagctgggaaattgttgaccatctctaggaattggctaatcctggaaggggcagtccctctatggtcagtaagacccagatgtcaaagaaacagaagataaaaaagaagacacatggttaatatgctcgggatggatgagtttgggcatttggttccacacctcctcagttcttctctgggagatgtacttggaggtggtgaaataggaaatggacggttaatgaacagagagtaggaagtgaaaggaaaggcaaggataattttcaagacagaaaatcaactgaaaagttctgaccagaatgtgcttttgagagtgacccttccttctctgagtgagactacctggctttgagctggtagcagtttaccagctgggtgaccttgggtcccagtggtctcatttgtaaaatgtggataaaaagaatata

SEQ ID NO: 118474 - DNA, 1086 bp, Homo sapiens
gtctcttgttgttacccctgattcgttggacaccgtcctgatttcacccccttctgtctggtttagcactttagcatgcccaacagtgcgtatttgcttcctaaattctatggttacctgacttataaaatgctcggccagcacttgaaatggttatttcaagccccttcttttggtttgtaattatatctgtttggatttctcattaatgactgcctctcacaagaccataagccccacgaaggctgaagctgtgactccgtttgctggctatggtgtctccaggggctggcccctggcctggcacagagcggtggtcacagctgtttgtagtgatggagaaattctgacagccatgagacacagtggctggagagcagcagcagacctcacgggcacaggtaccaaatcaagtacaatccagatgtggagggatttgtgtgaaagagcatcttgagctgtggaagagtagggagtgtttgtttcctagggctactgtaacaaagcaccataaacttaaaggtttaaaacagtagaattttactttctcacagtcctggagtctagaagtccaaactcaagatgttgtcggggccatactccctccaagcctctggagagaatccttccaggctcttctagcttctggtggcttctggccatccttggtgttccttggcttgcaacttcatcactccagtctctgcccccatcttcaaatggccttcttctctttctgtgtgtgtgtctgtgtgtccttccctcttgttagaaggacacaaatcattggatttaggaccttctctaattcagcatgacaccatcttttttttttttttccttttccttgagacagaatctcactctgtcgcccaggctggagtgcaatggtgcgatcttggctcaccgcagcctccatctcctggactcaagcaattctcctgcctcggcctcccgagtagctgggattataggtgtgcaccaccacatccggctgatttttgtatttttagtagagacagggtttcaccatgttggccagggcggtctggaactcctgacctcaagtgatccatctgcctcagc

SEQ ID NO: 118475 - DNA, 1062 bp, Homo sapiens
tctcattgaacaaatgttaagcactgacataaaccagtgagcaaaactgcttggcctctgccctcatgaggcttacagcttttctccctcaggcaaatgggtgactcctccctcaaatcttggactagttagatgctaaggagaaagagaaaggactgggagacagattctggcaggttagccactgacccaaagtttccatgtgaatgagaatttctcttcacaaagctggggtttgtgctttgctttatttttacattttcctgttgggcttcttttcttcttgtccaaggcgagaagttgaaggccttgacatagtacaggagacaattcttgtggcatttgccttctgaccacacactggggatggagggaaatctgagcgatcccagaacttagagctggaagtgactctagaggaattctagagaccctctgcgatgaccctctcttgctgggaaatgtcacctctttcaaaacctgggttatccctgcagattcctttggctttctgtgctggcctcagcctacattttcttctttttaagagcagttttaaattaaaatttcagttttcaaaacacctctctgacagttaatttaaaagtcaaccaacttcagaaatatgcaacttatattgtaaacatcttctgcaacccctgagataatcaccatcaacaaagggcatttgtttctctctctctttttttttttttttttgagacagagtctcgctcttgtcacctaggctggagtgcaatgacgtgatctcggctcgctgcaacctccaccccccaggttcaagcagttctcctgcctcagcctcccagctaggcacctgctaccacacctggctaatttttgtaattttagtagagatggggtttcaccatgttaaccaggctggtcttgaactcctgacctcaggtgatctgcccacctcagtctcccaaagtgctgggattacaggtgtgagccaccacacctggctgaccttgactttctgtagatcaattctgcctttaatgtggctgaactattaatagttgaaacatccatttg

SEQ ID NO: 118476 - DNA, 1029 bp, Homo sapiens
atatgggtcatctacttcacttgtcacaaccaaccaatgaagagtagattcctatattagccctatttggcagatggggaccctgaggtgtggagcagtgtgacttgctaaaagtcatgtgggtgggaagagcagggccaggatgtgaaactagatctgtttgactcccaagtccaggcttttaactggggcagtatattgcctctcagatgcatagtcctggctcattatgctttgggctcttttttggttagcactggcatttcttcttcattgttctactctcccccttccctttcctcctacctttcccaggccctggttagaatttgcatgtcagtgtaatgtgatagtgtaatccaggcaggtgtgcatcccaagcttggctccttgcactacctggaggtgtaagctttggcaagtcgctcaacctttgagagtctcagttttctcatctacgtgatggggataataacctcataggatgtgtgtggaattcaataacgtaatgctcttaaaggatttacagggtgcctggtgcactatgagagcacaataaatagacactgttatttgtgttttgcagggtcagaaaagcatttaagaatgaagtcagagggaattcccctgagttggtttccaaatgtaattaagaagagttgaccttaaaacccattgcccctgggaggaaattacttctgctctccagcgatgcccagtttgacctaattgtatctcgaaaacactgctttgcagtgttctccagtgggccaaactgtacctcttttctgtgcctgcagaatcagatgaggccctgaactgtccaatatgaggttgggatttgttcactggttccggctctccttccagggatccgcagccagggctgcctgtgcagccaggaaggatgtccacggttttcttttgtctcaagcttatttctcctggctgctcttcagcaggagcacggggtaaaatgaatgggaggaagctgtcaactgccctgttggccttagatggacccttatc

SEQ ID NO: 118477 - DNA, 1048 bp, Homo sapiens
tttgctaggcacgtcattccagagagacctggtagtcctgtttgagatgtagtttctaattgtagctttgtagactgagaatgatttcatttgcatttcccatgttgtcccaaatgcctggagttgcagaacaaatggattgccagccagtctgatgtgattttttataagccaaactctcaaccccaccccagcataagcagggtctccatttgcaatgtactgaatgtttatgtctcccttcaaattcttatgttgaagtcctagtccccaaggtgatggtattaggaggtggggccttttggatatgattcgtttatgagggctctgctctcatgaataggattagtgccctgatagaagagacccgagagaattagctcaccttttccaccaggtgaagacacagctagcagctaccatctatgaaccggagagagggccctcactagacacgaaatctgctgatcccttgatcttggacttctcagactctagaaccgtgagaagtaaatttgttgcttatttgctacccaggttatgctgttttgttatagcagccagaatggactaagatgccattatttctaaaatattggacacatgatatcactttcttagggtccattgcttaagctcagactcagtaataagcctggtgatctgaagggatgcagcttcatgatacgcttgtctaaggtatcagagagcatccaaaattgaaatagcctagatgtgttgattctgaaagccttgtgcacacaagccttaaacatcctaatccatagagtagaacagatttggactttggtcccagagaccctgattcaattccagatactgacacttccggttgggtggtctttggtaagtcacttgccttctaagttttacttcttcatctgtattcatagtaatactacttggccaggtgcagtggcgcatgcctgtaatcctagcactttgggaggctgagccgggtggatcacgcgagcccaggagttcgagaccagcctgggcaatgtggcaaaaccctgtctctaccaaa

SEQ ID NO: 118478 - DNA, 1069 bp, Homo sapiens
atgagtgctgtcccgagtgtggttaaaatacaactcacagcttgtgcagtggtggggcttcatccacatccttcctctgcctccaggacatggtggcctcgggaagccagaaagatggggatcacagtcatttttgttcctctcctcttgagagtaaagccagtttaggctgtgtttcttctctcctgtgtccctggaatagacctggccagctgcgtccctagacagtgcagcgtctattggccctggatttttccttgcattgtcttcctttggtcctacaagaaaaggcccttagagggtttgttcttgaccgtgtctctcgggggcctgcctttgttgctcacggcagctttgttcccattaactctagtctaagtgttccctgttgttgcctgtgtctaatctctcctgttctgcccccagtagagcctgtggcccttcagctccctctggtcagcccaagtgatagtgttggtgttgtgggaaaatgcttaggagttggactggccaagcaggagtcccaggactcaagtctctatccttccctcctattttgaaacatttgctacagaccataggaagctaaagcaggaagatgccttagaaaacactgaatggaatgatcttagaaaactctgaaattatggatgcagaagttttgattcagagagggataggcatttgtctgaggccacccagcaagtaaatgaaagagctgaaactaggatcatgtgtattcttggtgtgagtctggagttacagaatgtgacccagggcaaatggctgaatcttttggaacttcggtgtccttgtttataaaatgagggtaataaggccagcctcgtgggatggttgtgaggataaatgaggtgaagtgcaggaagtgcttgcacagcgcatggtgagtggccagccactgttgggatttttattgtcccacactgaggctccagaggagagcccggggctgtggttctagcatctgcttttccgagagcagctctcgtttcccattgagccgcatggggctggatgtggttcctggcctccttgaattggcagaagg

SEQ ID NO: 118479 - DNA, 1073 bp, Homo sapiens
tccagtgtttcccttcaccgcaccacatacatacacttacaccacattgcagcctggagtttcttctctatgcctttcaggagaaagcagatgggggaaggatttgggtcattctgggattgaggtcattttacatgtgggctggaaatgcaattgacctttgctcattcacttcctgtggatcaatgttggagcgctgtgctagatcctgtgcccgacccagggagcctggtgccggcttttaggaactgacattgttttgttgttgcttttagcatccactcaaagctgagctcagggtaatggctgaggggcgagaactgatcctggacctggagaagaatgagtaagtggactcctcctttgtctaaaatgaaacaaataacttctgtgtcaacgccggacgcaggtgtcgctgttctggaaggaagcagtcaatggagtgaccccaagctctcagtccttggtttctttcaggcagcatcttgcaaagccagagcctttccacagcctcttgactcgatgtgagattgctggactgctaaatgtgttgctaaaatttccttaggcagtatttcaggggcccctggagttcactgcgggcacacagaggtctgtgtatgtgtgagattaagggagtggatggaccagaggtctttggcagctgccttactagcgccagcctagtgtgtggcaggaaatgaaggagattagaggaaaacagcagagaggagcgagcaaagcagggtgtgctggggcttggagcctcagactcagattgttccatgtgttctggttcagccgcatctgagattttgtcaacagggcatcgtcaacagtctcctggctacatcgggcccggctcttccatcttcttaacctcattcatcttgggtggtagcctggctcagaggcacttgcacattgatttgccatcagatgcagtcatatctggattcatgtaatggaggaggtgaatgggcacgatgcatggctatgtctgtggctcattctttggccattccccatctacttagccatgaagagctctccttacttggccgggggactct

SEQ ID NO: 118480 - DNA, 1022 bp, Homo sapiens
agcgattctcatgccttagcttccggagtagctgagattacatgtgtgtgctgcgaagccaggctaatttttgtatttttagtagagatgggttttcaccatgttgtccagggtggtctcgaactcctgacctcaagtgatccgcccacgtagtcctctcaaagtgttgggattacaggcgtcagccactgtggcccactgtggttttggtttttccagcaagtgagacgtgaaagagcaagaaaggaagatgcggttgttgtgtgccagtaaccagctatgtgacctgccacttgcgaagtggtagattttcttcatttataaaatagtgcttagagagaataaggagaaaagaaagctggggagaggggttttttctaagatctctttgggttaaaatgatttgtgatttattgggcaacatataggagcaagattatagcaggaaagagatgtgtcaggaaagacttcagacattgtggctgttgaatctggaaagataaatggaaaggagcaatgtccaggatccttgaaactctggccaggataatacagacatgtccaaaaaggctccaacttggatttaccaagggaacctaacagtgtaaattttaggacagaccaagtgcgatggctcaagcctgtaatcccagcactttgggaggctgaggcaggaggatcatttgaggccaggaatttaagaccagcctggggcaccatactgagatcctatctctacaaaaaaaaaaaaaaaaaaaaaagaaaattagctagacctaggggtgtgtgtctgtagtcccagctactctgaaggctgaggtgggacgatcgcctgagcccaggagtttgaggttatagtaagatatagtcgcatcagcatcactgtcctccagtctgagtgacaatgcaagaccttgtctcaaaaaaaaaaaaaaaaaaaaaatcaggacaaataaaagcaagtaacattttgtcctaaaggcagtaaacgcatggaattcatttcatcaaaaagtaggaga

SEQ ID NO: 118481 - DNA, 1050 bp, Homo sapiens
ttaattttcttaactatagttttggtgtattccagattttctacaagttaataaatgccactaagaaaaggggaaacatcacagctacaccttcaaacaccagaaaaagaatttttttttttttttttttttttaggttggggtatgattttgatctgggcactaacggggacactgattgcttttgccagtaagtcaagaccagcagataaaaaataatttttaaaaacctcgtgagactgatttgccgcaggacgggaggaggaagaagcaagcgtggaaggtgctaacggaggaacctaaacctccatcctctttgcctgggaggttaagaactacagggagaggcgagagagactatgactgccctacggctagagtagccgcgaagagaacacttccggggcggggctatctggccctttcctttccgcgtgtagaatgtggggcgcctgtaaagttaaggttcacgattccttggccaccatttccatcactctgagacggtacctgagattgggggcgaccatggcaaaaagcaagttcgagtacgtgagggacttcgaggctgacgacacctgcctggcacactgctgggtggtagtgcggctggacggccggaatttccatcggtgagcgagctcgactcggggcgtcgcgatgcgccagcgcttccggggaatccagcttcttcccttgcaagtcctcccgcccgctccagtcacggttaccagggtaacgcggtagccaatgagtgcgcagcatggagcattgccccgccctgcgtgttggctaggacagtgcctgaacgctggctgttagcgtaattgaatgggcgatgtgctcccgtgatgaggatctggcttggagtgcccgtgttaagtgaacagagacttgttagcaaggacctgttgttaaaagtcactctcatgcacaatatttaagctcttaagccaattgcctagctattctgttagatatctttgaatgctgactgttcagaagtctgtgtaagccttgcttgtgggcaatacttaacgtctgtgcttc

SEQ ID NO: 118482 - DNA, 1081 bp, Homo sapiens
ccttgggagggcaggcgtttgcattaatatcaaggcaaaaagcattcatagatacatgcatctgatttggtattgtgatttacttcagaccctgaaaccaaatatctgatcttccattagacttaggggtcatgatatgagtggaatttacattttagatactataggggaaagaaaagtctcaaaaagaagtattgcatgtctaaaagctagtgccctgagtactcatgaattcgattccaagagtagtggtgtaaattgccttggagccctgcatccacgtcttgtaactaacttttgaattttgcctgacatgattctctcttgatgaagaaatgacatatattatctttgaatatctacaaggaaagttaccaacttatgtaggggtgaaatttggataggcggtatgctcaaagcagccagcaatgagtgctctgttttgatccttcttcttattatggaaaggagtacaggacctcttcagtcttccccttaccagaggtagcctctgcaaatggcataccagatgggactctaagatgcttgtgtggtggcttcttgtccttctctttgacttctgtggcatggtgctagtgcatgtaccctgtggtattgcccctctgtccgtagtgtgaactgtcctgtgagctttatgtcaggagactgtgaccttcatgtccagcttcaaagagttgtgcatgaactcggtaatacacatcacacggctgagagtcccctttccaggcagggccagcatgtgtagaatatctttcagaatatggtttcaccatgaaacaggggtggtagatttattcccttgtgtcaggccaaagaagttcttacaaagtacagtgggtagtgtctaaagcgacactttactcacagcctggcttgagtcaacaggaacaccatagcacccacaaatacttctacttgaatcatattctgtgctttttcaatcactagtgcagaataggctgcatttgacacagactgttaggcaatattgatttttttgttttgtttttatttggttttatctgagataacttatgttcaaggtgagaataagaaatag

SEQ ID NO: 118483 - DNA, 1072 bp, Homo sapiens
gaagttctcagaagagtatcttcagtaagaggagagtaactttttttttgctgctcccgctatatcccaggcctcacccttttctgatcattatcagaaagaatcccctgaacttttcaaggggtttatatggtagcaccaaatggagaatgagcatctaaaaatgacacatcccgaaagggcaatctgtggaagtttgttgtttgtttgtttttatttttaaatgcattgtaaagtgtactctagagccagatcaggtgcactaaagtttatagaggttccagtttacaaactcaagtgaacagtaatctttggaagctgccagtctaaattctaaatagtgtatctgaaatctcagttcccaaaatagttgtcaggtttaatcatcaggcaacactgcgtatacctgtgtggctatcctcatctgcctgccctctcatccctcggctagaatgatgtactctactttcccaataaggtagaaatttggaatccaacggaatataatcagttttcattcattccagtgcctagttaaatctaacctgacttaaacatatgcctgtttttatgtttacctataattttcatatagccgtataaggattgatttaccattttttgcccaacatgacaattctggctatgaaaattatgtttaaactgtgtatgatctattttatgtgctctatgttcccatttgtttgtttggtctggacagtggttctggaatgaattctatctagtaaattagtaaatgtgctgttttgtataaagcatgataattactttttaacagaagttcatttttaaagattactcccttttctttctctcttttttttgagacaatttctctcttgttgcctaggcagtgcagtggcgcgatctcagctccctgcaacttctgcctcccaggttcaagcgattctcctgccttagcctcctgagtagctgggtcagccaccatggctgactcattttttgtatttttagtagagaaggggttttaccgtgttagccaggctggtcttgaactcctgaccttgggtgatccacctgcctcagcctc

SEQ ID NO: 118484 - DNA, 1216 bp, Homo sapiens
taacaaaacctctttaagcaattggtgattgccatgggacttttcccatgtcttctgctgtaattatcctgtgcagaactaggaagaaatttttttcaggactgctctatggtttcctttaaaagaaaaaaacttctgtttgtttttagcagtcattatttacaatttgcagtgattaacttggcaaggcttccttccgtgtttatccctgtagccatcatttaagtcaggaacagtcagaaaaatatttattttattttttttttgggtgtctgcaaaggtaaaaatccattaaaaccttaagttaaatataaatgttacaactcaatgtttgcttttagattttatacagtatttgttttgttttggttttgagtgtatataatgcagcattagcaatatggttccaatagaggagttaaatatatattgttaaaggagacctgtagcagtcaaagattttattgatttaatgacaaaggaaattaatgaaaatgtttttgtttttctgctgtaattctgcattaagctcacatgaaaatcatgattctagagtttggaatgcaaaattaattgttttaccctcaagctgggaatatttttcaaaataaatactataatatagatatcaaattattacctccccatgttatgttgaaaatttttttattaaattgataaaactttatttccattatattcataatgttctgttatacataacattaaaatgttcattaaaatcaatgttgaactgctttttctttcgttctgttagacatttgagaccatttggggaaaaaataattatagtttgggcaaagtaatttttataaataatttaaaattatttaatgacttctctattctttcctatcagactctactgttaggaattaaaaatgaagcagcaaagatatcctgacctgctccattcttgctaatgttccatctacaacatttctaattaggcagaaattcatgtacttcagctaagtggtaatgaaaagtgattcatttgctgaataagagatgagagtgagtgtaattagctgactgcggtttttaatctttcaacaattcaatgtgtttaacttagtttcaaagaataggagctttcaagtgttgttacttcagagcaatcaagccagcctctggtggccgcatagtagaatatggtccctgatatttaaaaccgatcatcttaagtaaattt

SEQ ID NO: 118485 - DNA, 1416 bp, Homo sapiens
ttcaattgtttccagctatttgttattataaatcaagattttgtataaatcttcatacttctgtttttttcttaatagaatgttctaaaaataagtcaaaggatataaactttttaaagatttttgtataaatcttcatacttctgatttttttaatagaatgttctaaaaatagaataagtcaaaggatgtaaacctttgaaagattttttatacacactagctcttgacaacttgttaagtaggatttaacaataggttttgtaggaatgtttttaagttggctgtttttccccagtctactcttactgtttctacatctctggggaaccagagccaatagtcactgaatatatgtctcaagaggaaccagtgcagagtaattgatttctaataaaatcactgtaaaggaattttattggggctaaagaagtatagatagatggtcaagaagttattagttctctgttctatgaacctaaaaatttattgtggtaaagttcttctgtctgttttcgtctggtagatatgcagcagcctatgaatgtgatgactcaaagttttggagctgtgaacctcagttctccatcgaacatgcttcctgtccggccccaaactaatgctttgatagggggacccatgcctatgagcatgcccaatgtgatgactggcaccatgggaatggcccctcttggaaatactccgatgatgaaccagagcatgatgggcatgaacatgaacatagggatgtccgctgctgggatgggcttgacaggcacaatgggaatgggcatgcccaacatagccatgacttctggaactgtgcaacccaagcaagatgcctttgcaaatttcgccaattttagcaaataagagattgtaaaagaagcagattgaatgaagaatttttagctgtgcagataggtgatgttgggatggaaaatgctaatcaactaccctttcttttatcaagtaattaaaataaatctacataaagaaccaaaaaggctgttttataaaagtgaaatatccagtatttcagagggccaggcaagagcacttcagatgaggcagtcaaaatcatttttttccagtgaggatagaccacaagtgggtggtgagaccattgaaagcctttatcaactgaagagtccatttaacagcataatttgtgggaagactggaatagggctgaataaatgtgtttgaatctctaattttatactttcttttcctgaggaacttgatttttctgtccctggatcgccttgtcataattgggtctgttccttttactaccactcttgagtccatatatgaaatcattaaagttggatgatcagttttttataaaaatatatatttttgtccaagaaaaaaaaaagcatacatatgtgattatggctaaatcaaagg

SEQ ID NO: 118486 - DNA, 1043 bp, Homo sapiens
attgtaaataaatggtcccagttgaagcaggcaatgtgctaaggttatagcccttgtattgtcagtggaagtatggccaaataagtgagaaattcttcatttttttttagacggagtctcgctctgtcacccaggctggagtgcagtggcacaatctcagctcactgcaacctccgcctcccgggttcaagcgattcttgtgcctgagcctcccaagtagctgggactacaggtgtgtgtcacaacacccagctaatttttttgtatttttagtagagatgaggtttcaccgtgctagacaggatggtctcaatctcctgaccttgtgatccacctgtctcggcctcccaaagtcctgggattacaggcgtgagccaccatgcctggccatttttttttatggtaaattcaatgtgtcacctacagagctgccaagagatggattttacgttatatttgggaggtttgttttttctttgccaccttgttaactctcgtgtaatatttatgagaaagaatactgtccagatggagatggtacctgcagatgttaatctgggggactcagatcagctctaatttgtttcagttcatagattgttacatttgttctgtgcattccatgaagtttcttacccttagagttatttctgtcttagtaacagcaacaagtgggaatggagactttggtgactggagtgccttcaaccaagccccatcaggccctgttgcttccagtggcgagttctttggcagtgcctcacagccagcggtagaacttgttagtggctcacaatcagctctaggcccacctcctgctgcctcaaattcttcagacctgtttgatcttatgggctcgtcccaggcaaccatgacatcttcccagagtatgaatttctctatgatgagcactaacactgtgggacttggtttgcctatgtcaagatcacaggtaagttgtctggttcccttggaatttgttatttataatctttgagatgctctaactcattgaatgatagattagtataaaacagaaaaat

SEQ ID NO: 118487 - DNA, 1050 bp, Homo sapiens
agatggaagtggttcatttataatgacagttctcatgtgggaatcttgaaggatagcacttgttgtgaaaattagcagtcttccacatgcagcaatttttggtagactcttttatttatattcctttagaatataaatttagatagaagttttctgggaaaatgcttaagtatagaaaatgaatgtggaatttggtatgaatatcatacatacagatatggatagtcttaggagagaaacattttctaaataaagagatttttaatttttgagacagttttcaaagttgaagatcacatttcttaaagtaccagtaaaagcataatatgtggcactttaaaagattagagagaaaaaacattttcagagaaagacaacttctatttgtaaaatagttacatacatctttccattttttgctcccaatattcttaagctactcatgttgaaatcaaaatccctgtaatatagatggagaggaatactatttgctatagataagttatgaacatcatataatttctgttttggtgatagaagataggtaattatctgaaatactaaatacagggtatgtcagaaataaaatttcttaccagtttgaagttgtgatctacagcttttatcctcaacatgtattttctttgtagcctagactgaataagatttgaaaatccctaactccaccaggggcggtggctgacacctgtaatcccagcactttgggaggctgaggcaggtagatcacttgaggtcgggagttcgagaccagcctggccaacatggtaaaaccccgtctctactaaaaataaaaaaattagttgggcgtggtggcagacacctgtaatcccagctacttgggaggcagaaggtggagaatcacttaaacctggcaggcggaggttgcagtgagctgagagtgcaccattgcactctagtctgggtgacgagtggaactccgtctcaaaaacaaagaaaaacagaaaagaaaatccctaactcctaacttgtttgctataataagttatatattgatgtttattcactgct

SEQ ID NO: 118488 - DNA, 1121 bp, Homo sapiens
cctggctaatttttgtatatttagtagagacggagtttcactgtgttggccaggctggtctcgaactcctgacctcaggtgatctgcctgcctcagcctcccgaagtgctgggattacaggtgtgagccactgcacccagcccagacatctggtttgacctactttctttctctatttttttttttgagacagagtttcgcccttgttgcccaggctggagtgcagtacacagtcttgactcactgcaacctctgcctcccgggttcaagcgattctcctgcctcagtctcctgagtagctggaatttcaggcatgcgccaccacgcccggctgatttttgtatttttagtagagacagggtttctccatgttggccagcttggtctcaaactcctgacctcaggtgatccacctgttttggcctcccaaagtgctgggattacaggcgtgagccaccatgcctggccagcctactttctgaaattcttcaattccctttcccgtttttctgtaactgcaaactgttcctaaaattattcattaaacttgattggactgtaatgcccaaggttacggacagctacattagttgtgtaacaatttatgtgatatatttttatatgtttaagatttgaactgtagaattaactggtagttagcatgtagtcatataatacagatatagtgtcacagaatatcaactattttggacttcctggcatgaaatatttaaagggcccctttcatgcatctgtgaaaagttttaatggagcaatcagagaagaattaactaggaaggtcagatgggtggatgtaacttttcctctgtgacatcaagattgctttgaacagagagatttattaaataccaacatgcttcctttacttggcaaggaacctttgagtggtttgtcttctccagtgcaaacagtagtttgactaattaaatagaagtagcaattgatattaatatagtaactgagaaagtttgaatgaaatctaggaggtttcttgccttaaattttattttatcttaataaaaagcaactaatagagattgatattagaagaattttttaaaattaaagttatctcctatttgaaaccgtatgtttaacca

SEQ ID NO: 118489 - DNA, 1228 bp, Homo sapiens
gcattttctatagttatataaaagtttgatctcctgatactatagtaaaatagcacagttgtaaagtgcattcccttatattttcatgcatttacagatgagtttaattattcgaattaagatgtgtgatttttttagcatccattgaacttttattattttattatgtacacacattagtctttgagagttgatgcagaattgtgttgtaaaagtggaactatagtaatttgcacacagtccatgtcaagaaaataatcatcacatgcaagtgtttgaactctcagggtcttatcatggattctgatatcaaatcctattttatttttaagttaagcttaaatctgtaataaaaacgagttattttgacattttttatttatacacatttatgtaaatacttttttgtagcagtattttagacttatataggatattctctgtgtttccacttcccctccccagcgcacatatatcattattcagacagcttagataacattctgttgatccctgtcaagtagtcaaagtatgaaattttggagttactgtatttgaaattctttagctcaaatcactgagggacccattttaaaataatcccgtcttattattttgcttcatttttaatatcttttagcgacagcgatgaggaaaagaaagcgagaagaggcagatctcccaaaggtgaattcaaagatgaagaggagactgtgacgacaaagcatattcatatcacacaggccacagagaccaccacaaccagacacaagcgcacagcaaatccttccaaaaccattgatcttggagcagcagcacattacacaggggacaaagcaagtccagatcagaatgcttcaacccacacacctcagtcttcagttaaggtgggaatggcagtagtttacacattatacatggttttatttttataaaccgctcttcgaattcctgcattagtaggcttgggcatttctaggcaatcatattaattatggatcatctggcatgtattaccaagagacattaataataagaaatctctttgaggggagaaacctgtccaattgctgaatgattgggtactttctatgaaagtagaaatgacacttttggtttgtttggggaaggttgtgaatcagaatgtagtgcctctgtccccatctagacaatactggttaccaaccacaagtagattcactaaagaaaacattggaagtatttgaaa

SEQ ID NO: 118490 - DNA, 1100 bp, Homo sapiens
gactttttagcttattgggacatgtagcattcagattggagttccttcagttgtattttttaagatactgttgctatccaatgcttttctgaaaattgggaaaccattaagggacaggaataaaatataacatattaagtgtcttttgtgaaaacagaaagattttcatttctcttttgcttatatagcttgtgttggttttgtgttttccactactcctttcagtagcctttaagaatttcctgatatgctgtgctgtgcattaaggttgtgtaagtattcataaacaaaagcttttgaatctgcattcctgccacttaatgactggcattacatgctatgccttgctgtaattgtgttgattcagcactgtgggagctttctgttttcctttgaaaatgattttattatgaggaaaagcctgagaaataaggacttgtagataccttttgaatttaatgtcgttagaattgcttctttttttaatgctctatctaggtgaaagatatgatcctgagcccaaatcaaaatgggatgaggagtgggataaaaacaagagtgcttttccattcagtgataaattaggtgagctgagtgataaaattggaagcacaattgatgacaccatcagcaagttccggaggaaagatagagaagactctccagaaagatgcaggtattttaccactttgtctcccgggtctcttagaaagagccctaaatttatgccactgggtttttggttttttgttggttttgtttggggtattaacattatctgaaattgggcctttttttttttttttaatagacttcatttgtttttagagcaatttaagctcacagaaaaattgtgcataaagtacagagttgtcatatacccacttccccttcataacaggttctgtgaacatcttgcattactatggtgcatttgttaacaattgaaaagccagtatggatacacttattaactaaagtctgtagtttacgttggggtttcctatattgtacacttctatgggtttcgacaaatgcataatattcctcattactgtattgtatagaatagtttcactgccataaatatgccctgtgca

SEQ ID NO: 118491 - DNA, 1077 bp, Homo sapiens
cactctcaaagaaaaaacactgcgtttagttagctgtttaaggatgtttctaacagcagaaaaattcccttttttatattgaagcatcaaatacaagttagttttttctttttcttttttttaaatagggctaactcataggcagtgcaaccagagtcggccacaagttagtttttgaattgggcaaaaatatttctcctaaagcatataaataatgttttgaagtttctatttggggaagtccaaagtttttggattatttacccaagtagtaactttattcttcaggtttttcaaagtagttgtagcaacttaatgtgtttttaatagaaattgctatttgaaacttatttccacactattcttgcttgtatctttctttttgccagcatgatatataattatatcagctaaacttagaaaattgaatacgttttcaaactcagtcacaatgcactaactgcagcatctgtattaaagatagagttggatatcctgtgtgtttgcatcacatccttttgctaagttattgttcatggtttatgttattcagacttaactaatcactcttagcagttttgtgttttttctttttcttttctttttttttttttttgaggattcttgctctgtcatccaggctggagtgcagtgttaccatctcagctcactgcaacctccgcctcccgggttcaagtgattctcctgcctcatcctcccaagaagctgggaccacaggcgtgagccaccatgcctcgccaatttttgtatttttagggtttcgccatgttggccaggctggtcttgaactcctgacctcaagtgatccagccaccttggcctcccaaagtgctgggattacaggcatgagccaccgcacccggccagttttgtgttttttcattctgacattagataatgtcttgccaatatccagtatctttagcagtaattcagtatgatgttcaccatgccatgctaatcagtttggttttcatccacttccatttttcgtgtaaatttgtttctttccgaagtctggttcatcacactgttgttgaaatgtacatacacatt

SEQ ID NO: 118492 - DNA, 1091 bp, Homo sapiens
aaaaattcagtttttgagctatgctaaaacctcataattagtgttccagacgtgtactggggaaaccaagacatttgtgtgcttttcagttattaacatgctaaagtggttcttcttttgatttgttttcttaaaatatgatagaaaaacacaatagcacttatggatatgtctattttgtgtggtcatcatcagtaatcctttttaggtcaatctttaattgaccttgcatagtaccattatctgtggtcctttttagttcatctttacatgctcttataagccaaaattccattttagaacttagaatttgctgaagaggaaatgacaaagttaaatagcacaacttgcccctttctattgttttttaaatattgaagtttcttatgttgaagtttttgtgtcttttttttaatcttaaagagcttgatacatattaagtgaattcttaggttttgcttatctcttaccatcctcatagatgagcatggtaaggatcaaggtataaatattcgacagaaggtgaaggaattggttgaatttgcccaggatgacgacaggcttcgtgaagagcgaaagaaagcaaagaagaacaaagacaagtatgttggggtttcctcagacagtgttggaggattcagatacagtgagtatcaaagacaagctgacacctaagcatcagcttagcttcttgagtatattttaagaatcagtgaaataccaaagaccaaaatgctaattttcttttctaggaatacatagaatactaaaatacacgcagtactaatcttgacttctactatcacatgaatcttcctatttttaacttgtgggttcggcaataggattttaaccattaatggctaattaaatgactgcatattttgaggtgtcatacagagattaaaacagatatatgcccttccctcttaggattgccattttaaaaagaagggggaagaaagtttctataactcagagtttagagtataaaaataaaaagtttgatcaggagatccatctttctaatttgaaaccaatttagctgtatttttggcccaaaccagataagcttcctgacagtcattcca

SEQ ID NO: 118493 - DNA, 1033 bp, Homo sapiens
tacaggcatgagccgctgagcctggccacaaccttttaaaacaaaagccacataattaacctcaaaattaaattttatctggggaaaatactataggattgtttaattaccaaataatttctggcaattcacagttccataatgctcagataaaaagtaaaaactgagtcagctttctaaaaccttattgtctatttatatcaagcattctgatattttgaacatcagtgttattcttttaagtctttgacacatagtatccagtagatgatttataattatttatcatgcttaatataagaggaacttcaaattgattatgtaagttctagattatgtgtttaaagtctaatgtaaagaaacctcaccaccagcatgaagattctttatttgctaatgttagaattattttttttaaccatttaccaaagctctactagaatatatttcattaaatcatttattgctttgtatttttgcagtcgttgctgctcctagcttacctcataaggaatggatcagagcgtgttgttacaagtgccagagaacacatttatgatttacgatccctggaaaattaccactttgtaggtaagcaatagaaaaaccttataagcaaattaaaacagtagttggagttgtcagtcacctgaaccagcttagaagcttctctgctctaattagaatgtgactgttgctggttgtgtgacgagtgcagaatccaagacgtggggccctagagtattaattagtgaagacaagaacttgcagaaaagactggctaataacaacagaaccaacacaacatgagtgttcgggtttatattaaaatatgcactggagactggtcccctgtggtgtccataaaggaatagctttaatcatatgggaagaaaaggttagagctccaaaacacacacatctgtttgaagctggggtttttttccctcccaccaaataatatttactgtgcaaaggcagcaaggccacagtgtgttttgaatgtgaaagaggctagaaaatgaagcacatt

SEQ ID NO: 118494 - DNA, 1054 bp, Homo sapiens
agtaatgtagagagtttcagatactaatgtggaaagttttatgcaatccattccccttaaaaatttggctcaaaaaagaaactcacagtgtatcttttttaatgaagttttgagatacactgtagctcaccatgtaaaattttgacaaatgcatataaaataacttgaagtgaaagttacaaaaaaatttttctgtgaacatctgggccattgtaccagtgaatgaagagcttgcaaagtatattaattaatttaattaattattaattgcaaagtattgattaattagtggggcttacatatgtgccaggtagtgtataaaacatagggaaaacattttcaaggaagtacatatcttctaaattttttgaattaagtttattaatttttaaaaactcttcagggaaacaccaaattagaacaagtctgccatctactgtcaaaattaatatattgcagactcttaaagaatgattcttttttcagggctacatttatgtatgaacaatttccagaacttatgaacatgctttggtcacgaatgttaaaagacaacaaaaagaattggagaagagtttataaggtatggacacaagtctgctttaattacttgacatgttgaaaacaaatgctggaaattgaaggtgtatatacataggtgattttgaagtatattaaatcctagaatagaataatcgaaagcacatgaaagaagtagatttgttatttgtgttctattttctagtcatcatgaacaattgttctgaatgagaaattcttaataatacttctaaatgttgattatttcttaaaatttttcctactaaaatgtttgtgcatatcaaaaataatgaatctatagtagagtagtgtgcatgtttagtgtatgagcagttaagatgaataccacagtctgatatggtttgtcatcgacatagaaatttacctaatttatgatagtattctcacagtattttgtatccaaaatgttcaaaatataattctaattttaaacttatgaatacgaactttttatcagattccttttgttctg

SEQ ID NO: 118495 - DNA, 1031 bp, Homo sapiens
tgccaacatgtctggctaatttttaatttttttttttttttttttttttttagagaccaggtctcactgtgttgcccaggctggtgttggttattatatttgatagtaataatagctaacatatattgagtactttctatatgtcagacactgtgctaaataaacaccatttgctgtgctagcctttgaggtagtattcttatttattggttgaggaaactgagattaagataattaaaataattttgtcaaaggtcacatagtaagtgattggaatcagatctttctgactcctgaggcccacgttcttgatcattgctgaagacctaagggaaagttaagtgtccatcgtacaatctcctgatggaatattatgcagccagtaaaagtgagggttacagtgaatatatgacatagaagtgcatatgatagagtaaatgaaaaaagactcaaggatcacagttcagtgtttatagtggttctaaacatctgtagatatctttgatttattcttttaaaaatgtgatatagatactgttcagctgttacataattttgcctaatttatagaatttctataagcaggaaacataagcctgcattgcatgtaaaccagatctggtcaagaaactgacaacttagttttataatagactccagcatgttcagtttttgtttttgttttttttaatttgaccttcagccattttttactggacttaatgccagctctaatgtaatctctcatctgtattcttgaaggctaatggtatagtaaaatctgcttaaagataacttaagtgtgttacatagtgtccttggggtagcttgtgcacaaaagatgttttctctcccatcctgtagaggtagctcattaggacacccagtagtgtcattattaagttttcatgtgtttctcagttttgatgctaatctttgtgcatgtgtgcgtgcatttttttcctctacagcaccaatgttgttatgaattattcagagatcgagtctaaggttcgagaggcaacgaacga

SEQ ID NO: 118496 - DNA, 2045 bp, Homo sapiens
ttgccggtactttaaaaaaaacaacaactaagtgtaaagagataattttttaaaatttcaagttaggaatctcaatttaggattggtgaaagtccgtaagtcacttgtttgactgtagtgttagtttaaatggtatgaaatttattggggaggggcggtgtctttttctgtaattttgtttgcagatcaaattctagacctttgtctggattgttgtgtgtgtgtttaagaaaccgttgagagtgccccctctagcgtctgtgatatattcttaaaacatttgtgtcagaagttttcagaattaaactagccatttttttcctttcaaatctggacataatttttatttttatttttaacacggagggattgttttcttttttaaaaaaggtcactggaattatgggtagggcatagattgagggcagtagaaaacatgagaaaggaaggattaaaatgccatttctacctttttagaaatagttatttttaaatgacctggaataaggccaaaccatacagtgttgtttttagtttacatttgtttctgaattagttgaagcttaaaatactttgtcttggaattctttatgccatcaaatctcatcttgagggggttctttgcagtttctgaaagcaacagcttcattggaaaatagctttttttgggggaggggagtgggagacagggtcttgttctctgtagcctcaacctcctgggcttatgcagtcctcccacctcagcgtcctgagaagctgggaccacaggtacacgctaccacgcccagcaaatttttgtattttttgtagtgatggagttttgccatgttggccaggctggtatcgaacttctaggctcaagcaatccacctgcctcatcctcccaaagtgctggggattacagataggagccactgcacctggcctggaaaataacttctaatagatctggtttctttgtgtaagcgttctgttatttttttgttttatgtttgccatatcctcctgtggatatacttaataactatattgtaagtatgttctgatggctcccattgtttttcaaccaaagaaatgaggagattcttagattattggctctctgccacctctccctctaaacacagcactcacacaggccttcagctaagaatcttgtgaagggttacggaaacagaacctttcttatttgacccatgggcctttgtcgcttgaacaaggaaagcagtgttctgaaatctacagcatttatgaaggctctggtaaaaatatttcatgtacatggactggagattaacttctttcatcttgttctccaacaaattaaacaatgcaaagagatttcaagtgcattcttggtaatgaaatgcttgggtgaattataatcctaattgctattgttcattttcacagctgcattttgacacttttaactgcctaagccacgcattcttcagccaccaggataaacaaaagcattctgaaattcatcattttgtggcatcttaaattgtgaatctgttattggctgccttagttttattttggttccatggttgataaaattaggaggaaaattgttcttctacatttatacataaaactgttgcaatagaagcattactggattttaacgaaaatgtattccttagtggtcttaacatttttaagggggggtgggcagtggagattgtggatttattttagtcctggggaaggaatttatatttattttgtcacattaattgatatcttaggaggcagctttctccaagatttgaaagaaaataataggattttgcttttcttccatagtagaacagtgttctgaatttaaatctgaaagccagattgattcagttttttggcaagtcacacttaaatgcataattgttcctttaaaatttgacccaaacctgtttgttggtttgttctttaaacatgaagaaattgaagtgtttgtaataaatttgaaatttatatttaagagatttgagtgccaatttcaaccaaaccttccttattttaaaaatagaagtttttga

SEQ ID NO: 118497 - DNA, 1098 bp, Homo sapiens
gaggataaaaggtgacttttaaatacagattttgatgtcaagaattattcatccctaacagttttaaaaaatcatattaattccaaaattgggtacttaaattgttctctgtggttttgcatacatagcacttggtgtacatattttagtctgtatgtatatattttagttactgtttgctgcacttattaacctgataaaacaagatattggaagtacagataatattcatgtggtctaccatgatgtttacttgcctataaatagttaaaatgtagctaatgatgatacagtacttatatttttaatggcctttagtagtttaaccttggttacaatataatactttgaaaaaatttggaaaatacaggagagtattaatataaagaaaaacattatttaaaactgttgcttggaactaagttatgtttatttctgtctccagatgtttctgtcttttaaattatcttagtatgggtgtgtgtatgcatgcgtacgtcagaacacatttagaggtctcaaataaaagattgcctgatctcaggatgagtgaaatcttgacaataagcttaaaacaaagagaaaccatataaaaaatatagattcatttgacttcagtttttttttaaaggaataaaatttaaaaggcaaactgggaaaaatacttctcaatctgtttcactttactccttattcctttgttagcagttagtaccacattatacctatactttaccttttctcttggtgtatagttttgttttagcaaagcatattcttgaacttttaagaggaaaaaataccaacaaggactgctcaagttttttcttgttaattattttactgatgattcttaatgtagataagaagtattgactgcctgtaagtaaaagcctcattttagcttttaatcaattctacctctaaaaactggactgaaacttaccaagtaaaataatttgatattatctgaatgtcaagtagtcaaataagcagaaaatggagaataaagaggagggctacgatgaacactaataatttacaaactgaatagttgacccttgactaactgaatactggctgtgtttacatagctct

SEQ ID NO: 118498 - DNA, 1127 bp, Homo sapiens
tgcaacctccgcttcccgggttcaaccaattctcttgcctcagcctcctgagtagctgggactacaagagcacaccaccatgctcagctaatttttttttttttttttttttttttaagtagagacagagtttcaccatattggccaggctggtctcgaactcctgatctcaagtgatctgcctgcctcggcctctcaaagtgctgggattacaggtgtgagccaccgtgcccggccctttttagtttttatctatgcaggtggtgcactgatagaatacagactgctgagtcaggggagttaggggtgatccccagcaaaattaaatcagcccagggatacttctttagcaatttgagagaagttttactacaagtgctattttagttttcttttaaaaagtcagttttaaagttgtataaattaaaaatatttttaaatttttaaacagatgctcccccttcaacccactctagttattaccactctaacacagctgttttcatatggtttttttggttcttccgggctttgctcacatgtacatgtgtttttatatagttgttagcgttcatatacttttgtgttatgaggcttcttcttctatggccatggaaggaaaggaattttctagtggtgactgcctctgcctgctctgttgcttacattgttccaagtaccattgctgccacattttggaagctatttttcatcctacttcccttaacgtcacaatttttcacttttgctagccacaaaacagcccctccagcagtcttactgctgctagagtgcctctctggaaaataaaaacgccttagcattgtgggactagcctgtcttgagacagtttttctgtaagcctgtcatctgcccaggtcataatagcagcagcacctgtgctagagagggagtagaagggcttccatatacaacataataaataataacagaaaactgaatgctttacacatgtcatttcatttaatctccataatgataataatacataggtacctttcagatgaggaagcagagtcacacagtggttgatgtgtccagggatcaggtagtatatgccagagacaaaattcaggccctaataatctctaaaaaattattgatca

SEQ ID NO: 118499 - DNA, 1059 bp, Homo sapiens
ttgtatttttagtagagacagggtttcaccgtgttggccaggctggtctcgatttcctgacctcaagtgatctgcctgccttggcctgccccagtgccggaattacaggagtgagccaccgcgcctggcctggacttctgcttaaaggcaataaggaagcctttactagatttaaaataggagctcagtttcaattagtaaggatttgtatttcatcaagagctctctttggccctagtctggtagaagatgagtcgaagtagagagactagttacaaagctgttcccaataatccaggtgaaaaatagtggtgaccctagattaaggtagtattggtgtgggtagggagaagtggacagtcatatttgagaggtacctagggaatagaattgcaaagacctgggagtagattggatattcagtgggaggaagggagagaagtaatctctcaagtgttgctcaagccataaccttggatggtactgtccactgatacagtaggaggaaaatgtttgagggaaagtagtgatgaatttgtggtgcactaacatggccaacactaaatattagaaagattaatgtggtcatgtagaagatgaatgaaaagaagatacctcagaagtggagagatagttaaatggcttttgtaggaatctcagctagaagtgtcagtattcttaagtgcagaactaacaggtgtgggaaagtaatgggaagtagacaccaaacaaatagttccccaaagatggtatcaaatatcccagtgacagcttgcagcctgctcagctttatgatatgcccctgagatcatttttcaggacaaaaagtagtgaaactacctttatttacttctcaaatttacctttatttacttctcaaatatacatagaaagtaatattgtaaaaagcagctctggctgggcgctgtggctcaagcctataatcccagcactttgggaggctgaggggggcagatgacttgaggtcaagagttcaagaccatcctggccaacatggcaaaaccgcatttctactaaaaatacaaaaattcgcgtggc

SEQ ID NO: 118500 - DNA, 1044 bp, Homo sapiens
tatcttggtctcagctcccctttcttcctttccacctctcccttctctgttcccaagatatcatggagttcacttacatattcatttgtcagtttttcacaagccatcttatgttagacattcgttgttaggcaccgagagggaaagaaaactgcataagatatagtgtagtcagttctggttatatgaggtagctatgttttataaagtcgccttaagcagaaccattgctcctaggggaaaacacaggggtaggttcctttgagcctctggtgacattttctttagccagtcagtacgtcactttgttttttatgtgtgtttttatttaaagacatcttttttaatatataaaaaaattgctgatttattaacattgaactcactgccaacagcactataactgatgtctgaacagggcttatctcacacgcatttttttcctgtaaggcatatcacaatcttcctgtgtttaggagcactacatagcacttgaacactatgctcagggccattttaaacagcgaaattgccaacgtgtaaagcataaaagtgtgaaatacgttgcaccaaatagattatagaaaggacccttgtttatggtttgagaactgaaacaagaaggcaaagtgtcagcttgtttgacctcggatgggaatgtgtgctctggacaactcacgttttttgctcctctgctaatgttcatgaacatgaaagcaccgtgaatacagattttgaggttacattttagtgagtaggcaaatttgcgtatatggagtccataaataaagaggatcaactctatttgcttttttaaaactgacaatatattaaggtaattaaaataaattcatacatagccattgtacaggcagaatataatacataagagtttaaaaatgtaatgttggatttgatcaaaggaagggggaaattatgggttggaaagaacaggaaggcttcatttttgcatctttgttgaaaactaggtttgaaaagaggtggggattctggaagcacatagagtcactgagataagaaagt

SEQ ID NO: 118501 - DNA, 1021 bp, Homo sapiens
ataagcaaggtcctggataaagaaagagctggtgagaaagtggcagtgcagtgtggcaagaacatggaagaagaggagtagcttcagaggtttgtaagccactgtgtggagtttgggtttattctaagggtcataagcagctgatgaggaattttgataagggagcaaaatgacaccgcttaatgacaccactatgctcagggccatgtaacttactcttggtgctgagttggatagtggattggaagggagaacaagagtagaaggtgatagtggctgaaatcatgattataaacagcaattaataacatggtctctggaccttcatctatggaatcagactgcctgggttcatgttttgacagttaatggttgtgtgacctctagtgagatacttaacctctttgtgcctcagttttctcatctgtaaaatggggatagtaatagtagctgcctcatagagttgttaggaagattaaatgaattgtccgtggcttaggacaatgcctggcccattagagttatgtgtattaaaaaccaataaccaaacaaatatggctgtattgtggaagagagtgtgaagtatgagaaaaagcagtcttggctttgtacagttcttctgtggtaatagattgtgcaaaaaaaggagagggttccagtatgtacaagtttcaattaacaacctgccagaaaagtgaaaattgtctatataaaagaattggtacatctatagaaatgaaattcgtgatggctcccaaatccatagtttacactcagcatgggtaggagaagttttcatgtttttgaagtatgttttttaactttagatttcatttagttcttcaaatctttctatgggacacagaaatcttgtgccaagttatcttaactttttaagtcttggcaaggggtcattgagttaatttcagaggatatagtaaattaataagtctttctagtcatgcccccaaaagagctggctttgtgtgtttgttgagtagagggtgtttattttagttcc

SEQ ID NO: 118502 - DNA, 1147 bp, Homo sapiens
agtattagttttaaatgaagagtgagaagggtaagtataggagggacgtgagtcaagatacttcctctacttctgctgtataaaatgaggataaggtctaccttccaggtctgttaagagaattaaataagctaatatgtgttaagttacagtaaaaggaacaaccactattgtgtaagttatgcaaactttattcttattcttttgggacacccactaccaacaatattccaaagccatgttggtatgtcaagcagtcttaagatgcttgttgtttgtaaattatttaccattgtgttgtcagtaaattattgttctttacttttgttttatttctttagttttgtcattgtgaggcattttctgaagttgttaaaaagtttaaaatttagatgaacaaaggccatttttaggttccaattaataggaattaagttgggaaataaatttttataaaatttaaacccctttaacagtaaaatttttactctaaaaatttttttagtggctatcttatcatacctgtgaaaactagaattgggatctaaaatacaaataaaacccttgggctctactcatttttgagtaccttggatatttgatcttcttgtgaaaccagtctaacatatgatacctctggcaagaaaaacacctcaccgtccttacttttataaaacaaaatcgattaactttaaagagcaaataagctgtgcaagtggccttaagcaactgccagcaataggaaagaatatttcatggttaaacttacacgcaaaacgatgtgagtctgaagttgctgtaagtacagaataggagtgttttgcttgttaaatagaaataatatttctatactttgtttctgtaaatgaaccctaggagcttaaacttttaaaatttattgaaaattggatttgaggaacttgtactggaatagataatgtgtaccacaagatatgcagttggatttgtaatggctgatatttgcaaagcaactttcaaataaatattttatggtaaatattcaacaaagtttttctaataagtgggatggatattctagtgatttagagtcataaatagtctgttaccatcatatccaaatataacattttgctagtgtttattaacttctgtcattaactagaac

SEQ ID NO: 118503 - DNA, 1958 bp, Homo sapiens
aaaagttggaaatattgtaagaattactaaaatgcggccgggcatggtggcttacgcctgtaatcccagcactttgggaggtggaggcaggcggatcacgaggtcaggagatcgagaccatcctggctaacacggtgaaaccccgtctctactaaaaatacaaaaaaaaattagccgggcgtggtggcaggcacctgtggtcccagctacttgggaggctgaggcaggagaatggcgtgaacccgggaggcggagcttgcagtgagccaagatcgcgccactgcactccagcctgggcgacagagcaagactccgtctcaaaaaaaaaaaaaaaatactaaaatgcttaatgcaaggttgccataaaccttaaataggtgtgaagcacagtaaagcaaagcacagtaaaattaggtgtgtccatatttcgctaccagaaaggtgaattagtagtatatacctcacacaaattaaaaaattacttgggaaaaatttatagtacttaatttttattttattttattttattattattattttgagatggaggcttactctgccgcccaggctggagtgcagtggcatgatctcggctcactgcaacctccacctcccaggttcaagtgattctcctgcctcagcctcccaagtagctgggattacaagcgtgtgccaccacgccaggctattttttgtatttttaatagagacagagtttcaccatgttggctaggctggtcttgaactcctgacttcaagtgattcgcctgccttggcctcccaaagtgctgggattacaggcgtgagccactgcacccaggctacagtacttaagattctgaaccaaattcagttgcagtgtgttctgttttccacatatgcacctatcatagaaggaattttttctgacctcttgcaatattctgaataatgactgtgaggtcggtgacccttaatgagagggaagcaaatagatgtttccataggtgaaaaagaaaatcttcactgttgttatgaaggtgttctctgtaagcaattgtaaaaaatatttttacatttgttgagctgtattatgtgcttcagaatcagtggtcctctgtgaccaacttttaaaagttctataatcctgtgatctttatgttttggtcagttcgacatgcctcagtgtgtgctatgtcatatgaataggatttatgcacaactttttccaatttttcttatgttcagtgtggataatttggaataatgttctttaatcgcttatgtaccatctaagtactatatttctggcataggatgtaaacatctagacgttatacagtaactcaaaatacattattgatatccttactaatcttggctgaccttgtaagggtccttcactgagtgcttattaaatagtaaccacaagccctgtagagtactataagacatgtgacagatcttagggttccagtaggcagcttacggttctgtaaggcatatgcatatgaaaactgcatgaaaaatagaaaatgacacaagatgatatatcagtgagtactttcttagaagctagttctgtcataaacgaaagaaggtccatattataccctaatcaaatagtgcagattaaataatttgagatataaatgtttcttttttgagaacttgaggggaaaatacattataaaggtcttcaaaatttcagtagacaggttctagaaacagttttccttcatgtcagaaaagtcaagtctagtttttgagattggataatacatctaagtttaattactggtgaaaaatgaaaaaaactatagcctacttaatttaaacagaatatcaagtatttgagttcacaaagagatggtatcactcttaccactgttgagatataggatttttcattttatcattctgttaaggttttttacagttatatacttttgattagcatctgatatttggcaatacat

SEQ ID NO: 118504 - DNA, 1062 bp, Homo sapiens
ttaccaccatgcccggctaattttttgtagagatagggtttcatcatgctccccaggctgggctcaaactcttgagctcaggcaatccgcccgcctcaagcctcccaaagtgctaggattataggcgtgagccactgtgcccagccagtaatatccttagtttgatgtatttggcttataagttcggtactgaatggggctttgaaggatggcctgtttctcactaagcatgtaaaatgtttagccctgtcatctgctgtccactcagcagcgagagggattctttaaaaatactaagtcaaatgggttcagaattctccagtggcttctcatctcattgcttaattgcctgtacagatctggctctttgttgccccgcctgtgatctcttctcccaccactgtccctcactttctctgttctgttcagtggacctcctgtattacatagtatgcactcacactcgtcactatttttttctgtgcttgccttcctctgttacatgtattcatctcctgcctctgatatgcaagttccttgagggcaggaactttgttttgtttactgctgtattactaactcttagaacaattatgacacatagtaggcgctcaaatatttttgaatgaatacattaaatttggtaagttgatatttattacagaggatatcctttaaatccagatatttctaataataaaagctaatagttattgagcatttgccatgtgccaagaacaaaggtgacaacattgttatgttcaattttcttatgaggaaattgggcacagaatgccaagagtgtgccacagatagcacatctagaagatagtctagatttaaatctagatgatatactttcagaatatgtatttagcagtttatgctaatcttttacaagacatcatgtaaacaaaaaaattgttatacaggcatacctcagagatattacaggtttagttccaaaccactgcaataaagtgaatattggaataaagcaagtcatacaaatttttagtttcccagttcatataaaagttatgtttccactatgtggtagtc

SEQ ID NO: 118505 - DNA, 1033 bp, Homo sapiens
ataaagtctttggaaagacatatcgcgaattccatctgccaattcttaatattttgttcagcttgttttgtgtattctcaagattttaaagtaactgctaatgtaaaacattactaaaacataaaaagatttatttcataaatgcaaattgaagcagacaatttattcttaagagactgaacaatatcaagaaaaagaatcctctaaaatatgtgataccaaattcatggtgtttgacaatggacaaacagtatatacaaggaaagcacattggagaaagggctttctggttattcaacccctcaaattggcaagaaattatttggcttaccagggctcttttgcctgaaaattaaatacaggtaaaggaacgtaatatattcctatgtttgagccaatttatagctacttattacttgtggatagatttagctaacgaattattaaatgtgagtgattttgttaatgtgcaacagtgcacatgaatggtttgtacttcatttaagaagagtctagttagccaattttagaatatttcatttcttttttttttttttttttgagacggggtcttgctctgtcactcaggctggagtgtaatggtgccatctctgcttcagcctcctaggtttaagcgatcctcccaagtagcttaagcgatcctcccaagtagctgggacgacagacacatgtcacaacacccagctaatttttgtattttggtagaaatggagttttgccgcatttcccaggctggtctcgaactcctgagctcaagcaatctacccaccgtggcctcccaaaatgctggaattgcaggtgtgagccactgtgcctggcctagaatatttgttttgacatgaattttatttagcttctcaattcttaggacagtatttaagttctagataactttaatataaataatcttttataattttgcacacactcatcattatgtggtaaacgtacatgcgtgctttttcaacaactattgaatgaaatgtttcattcaagaattctcattcaaata

SEQ ID NO: 118506 - DNA, 1101 bp, Homo sapiens
cttgttcccggggctgaagtgcagtggcgagatctcagctcactgcagcttacacttctggggttcaagcgagtctcctgcctcagcctccctagtagctggaattacaggtgcctgccaccacacccagctaatctgtgtatttttagtagacacggggtttcgccatgttggccaggctggtcttgaactcctgacctcaggtgatccacccatctcagctactcaaagtgataatgatgtatttcaaacactggcttttgagaccttgaagactttttctggaagtgggggtatattttccacaatcgctgcacctcctggtggcagtagagggatttgttttgcagaacattgtggaactgagggaagcagataaagccataggcctgccagagcttggaatgccagtatcttcccactcgtcaagttgcataaaaggcgatgtggcaggaaaggataagtggcaccattcccaccaactaggagcactagcttaatcattgtcatcctatgacctatctttacttgtggctgtaataaaattggacatgtttatattttgtcatcctatacatggtaaaattgaaagttgctgcagttctattttctctctagatttgaggaatgtaatgaaggtgacatggtagtggtagatcaaaactgctacttatttgttcaagctcagcgaatccttctctttccttgcaaggagtaatattagtggtaaatctctttcatcagtgacccgcccccccccccgccttttttttttttcggagacagttcactttatcccccaggctgaagtgcaatggcgtgatttcagcccactgcaatctctacctcccgggttcaaatgattctcctgcctcagcctcccgagtagctgggattacaggcgtctacctccatgcctggctaatttttgtatttttcatacagctgaggttttgctgtgttggccaggctggtctcaaacttgtgacctcaggtgatccacccacctcggcctcccaaagtgctgggattacaggcatgagccaccttgcccagcctcagtggccctttttttgatagtgattcaaacagctctggcta

SEQ ID NO: 118507 - DNA, 1043 bp, Homo sapiens
gattaggatatcaacttaaatagttttttaaaggccaaaagaagactaaaagctaccttttttttttttttttttgatggggtctcattcttttgtgtgttcataactcactgcaccctccaactcctgggctcaagtgatcctcccacctcagcctcccaagtggccaggactacaggcatgcatcaccgtgcctggcactgcctccttatttctcagtcagaggtcagaagaataaaaccattaagaaacaccttgttctcttagaggaccaaatttgtggtactcaaaaatttgaagaggctgtacattgttcgtaagacagaaatcgaggcaatattcctactattgttgtacctttcatatttgcttatcacacttgttactaatcttcacgtgctttaggttaaatttgccatgtaagtagttatctaaaggaaaagctattgttgaaaaatattatctatctttttactacccaatttaggatgtagacttgaaccaaattattcaagaacatagaagaatgttgtcaccaaagactttttaaggcttttgtgggtgtctgacacatattaagattagaacatgaggttgatttactgatgagtactcgggattttaattttcatcttttcactggcaagaagagaagaaattcttccccccaaatgtaagcatcttacagaaccgtggatctgttagactgtgcaccttataatgccataatagacgtgcatccatagaatggttggtctgattatcagaggtataaaatgatgaaggaacttgcaaatgaagaagcagtgacgtgattaagggctattcagatagatggatcaatagaatgagggcttctatgagagaaaggttaggggtttaactatctggttcatattctggcattacgtttttaattagctgtatgtatgatttgaggcagaatcacatgaatctccagactttgccttccttatctgtaaaatgaggggacctggctagagtaagactttttccacctttgatggctattggagaaatgc

SEQ ID NO: 118508 - DNA, 1030 bp, Homo sapiens
tccttttacttaagtcagtttcttctgaagccgatggcctctcgagagcttggtggcacacatactgtgtgagaatctcctttgagacttcatggaacagggtccaggcacagaattccacactctgccctccagttaacaagccaaaacctcacgtacgctcccccatttgcaagtttaaagtttactcgtcctaaatgcagacttcatacctatcttccaaaagttgataaaagcaacgtggcaggtattttcgattttcccattccagatactgcctctatcagtcgacccttaccatttgtaacataatagattgaaacaacaggttaagtgctttggaattaagagttaaagggaaccgggggtggagaaaggaaaagaaggttgagacctccaaaacatagttttctgttctatgggaatttttgctctcattatctgggaagtgttcttaaaaataagaattaatagcaaagatgcagcaaagctctgaggatgcatttgcctgatatttttttctttgctcttgtgtttttgtatgtagttataaatactgtagattttttttttgtgattttttgccaaagttgttgttctatttatacattttaatgtcttaagacattttttcaatatcacaaaaagattttactgcgtattttgcaaagaaaaaaagctcactacctttagcttgcacatacttgcaaagttaattaaaaggctttttgttttaaaggggattttgtaaaatatccatataaataatgtatttatctttcgaatttgtacattgcttttcccttcttcctcttccttccacccccaatttattttattgtgtatgtttgctacgtgaaaagtgcgtatttgtttggtcacctacacttgtattagctgtttcaatgtgatttttaaacatttcatttatagttatttttagtattgttataaaccatgcttcagtttttttaatttccacccaaaagtcattgtctatttttgtattatttgtaagttaagaagtttt

SEQ ID NO: 118509 - DNA, 1007 bp, Homo sapiens
ctgtttcatagaactccatgtataagattcacatagcttaggaaactgagtctgacaaaccattcactcctttttcatgtagcctgagtcaatgtctgggggacacagtcccattaatactcagtaatgcaggtagtcatctacagccttcccttaacatcaataggggaggtgaattgcagcctctcttcctctccccctgggtaacctcagacttcctacatgttattgggaaggatggaaaaccccatggtgctgtcctgtatggactgtagggtagtatgaaggtatagttaagataatggactttcaaagtcagacaaatgggcttatgaatctcagctctgttcttaaataggtgagtgtacttcggtgaggtttttgactttctgagcctcagtttccccatttcggatacaggcatgatgatggtgagactaatataacaggtttgtcatgagggtcacagaagttaatgcagctgaccattgaaaaccctgagcacggtacctggcaccgaaaaaatggtattattgggaatatgactgggggcagctgaaggggatattcctttgacttttcaggaaatcattctgaagagagcggccgacattgccgaggccctgtacagtgttccccgcaaccacaaccaactcccggcccttgctaacacctcggtccacgcagggatgatgggcgtgaattcgttcagtggacaactggccgtgaatgtctccgaggcatcacaagccaccaatcagggtcagaagcttgcttttctcttccctccccaaccttaagcaccccatctcctcatttattggtcatgaacaatttttacattaaaaaattattttcatcccaaaagggagattcttagtttatgtgtataagatattattgtacaatattggtcctagctatcattcgggtaatctaatatagagggctagaaaggatgcatgcatttagccatctctctacatttgacttttcaccataaacca

SEQ ID NO: 118510 - DNA, 1026 bp, Homo sapiens
cttatatactaaaatactatgaagtctttagaatgtggggttgtaaaatataattgttatacatttggcattttatgcctccctgcaaataactacttgctacctatacctcatttatgttcctcctttccatttcaatttactctaaagtggtccttagctataatgagaatgcccctttcaacagaaacatgtttaattatatccatgctaaatgtaagtgactcttctcagtcatagggcttctaaggaaagagtgtttaaagtgtgacactaaaggcttctaatgatctgcactaagctctatttcaagaagtttatattacaagaaaaatgaaaaatttgaggaatgtctcagaggatgggaaactaaacggtgcccaagtgttattttggtttgttttactctttccctcactgccctcattatactgattttttagaatgcaaagtctaccattgtggaattttccatttggctgaataaacacaaaggaagctgggatataaaactaccctccaaagaaatacatctcaggacaactagtatttattgcattgtacatccagctctgcaggaaatgggctgcaagaaacttccaatcaatttctcagcattcggcctttccaatcagtaatgtcacccaggctttcagaagtcagtggggaaagatccaggacttaaagtctaggagctgaatgcacacatcaaaatctgggtcctgcagtaaaccctatacgaaggaaggcagtgaaatcaatgctgatttcattgataggtgcttatcatctctacatcaagagtgattttctcatttcacttcattgtgtgttgctgatatttggccactatattttgaatcccctgataaagcaaagtagattggtgataaatgggtatcagggaaatgtgcagtgacagggaagtattgtgcttctttctcagaaatcacccaactcaacttgactttgattatggatgcttgtagttttttttttctgtttcaatctacattcctgaaaaca

SEQ ID NO: 118511 - DNA, 1088 bp, Homo sapiens
cagaagttcacacttcattttctttaacatccatagtatttcaagatgtgaggcttggttttctggattgggtgagctaaccctcttatttgttagtgaaatatcacttggaatttttcccttgaaaaatattattgagctgaaaagtaacaccccaaactaaggccttattgctgtttttaaagtatgcaagagagagttggcatttgtagatgtaaatgtctctaaaagtccataacattaaaaaaaaagaaaaaaggcaggaacagcatggcctaatctatactaataaaggcagaccttttggggagggaagaatctgaccaagcacagattgcctgcaagctggctccccttgtaaggatggtaagcaagcgtacatctctccctcattggttcttcagaccagagacgcacgaggaatccatagctgctaatgtgccatgcccttgtgtttgtccaatcagagtcacagactctggaaagtgaatcctgactggattagaagcagaaaagctcaatagcactttctagatcttactttattgtgtccagttattcttatgtaaatgtagggcaaggctgactttaattttcaataaatgttttctaagagaaggaaacaaaaacactatctaatcacaggattgatttcaaagccctattatcgtttctggtcagtccagtgggaattaaatccactataacctcactgccatgtaagggctctccctaatacctttattattctcacagcttgttttcttgcaggtgttacatctttaagtggcttggatcttttcgaatcgtgatctctcctgctaatccctaagtagccttggaagctaataaaagactcttaggcacctttagctgcttcctcaaagtttttgtagttggttttcctgataagaagcggccaattccaaatgcatgtgttgccttcattctagttatattttctgtaagaattttcatatattctcggggaatatatgactgaaagaatgggacaccaggacaaggtttgagcagcctaggggtaccctgagagctgtacaccacctgaccccccaaaagttggtgaa

SEQ ID NO: 118512 - DNA, 1022 bp, Homo sapiens
aactgtccctgacaatatggtggtgttcttgatctttagcatatgaccttctataatccttttgatccagacagaggcagtttttgcttctgtcagttgcccctgggtgtccagcaccattgacttcctgtgaccagctgcatttaaatgtgtttttcatttgtttggtttttttgtttgtttgttttcatgtttttacggaaatgtggagaaagatggtttgagcttggagagactacctcaaattgagcctgtctcttttcccttctgtataatatggtcctaacaagaggatagaaggaggatcaggctctctggctgaagtggccctgggaaggtcactttgcttctgtgggcctcagttttgtatgtccagtgagagccaggtggggtcctctctaggcttccttttagcatgtactattttatggtgctctgaactaaagctattggcacatgactttctgcaggaggtgactttggagaaatagagcttcctgggaacagagaaatccactggcattttctaatagaacccttcctctggatctccagccaagggataaggtgtcaataaggtggacttgaaatcgctcattcatactaagcaggcactacatgccagacattaagctaggtgcagtaggataatgcagactcagtccttgtcttcacagaatatatgatgtgaatagagaggagaggtactaagcaaaattagagtggtgcatcaaagggggaccacaaaagcagaggagagtaatgaagtgtcagggaagccttgtttcaggaaatctcatttatgccaaaaccgaagagatgagtaggtttttactaggtgtcttagtctgttttctgttgctttaacagactgggtaatttttgaggaaaaggagtttatgtcttacggttctggaggctgggaagtccaagggcatgatgccagcactggtgagggcttccaggctgcatcatcctattgtggaaaggtgaaaaggcaagcaagtgtgggtgaagagagc

SEQ ID NO: 118513 - DNA, 1003 bp, Homo sapiens
catgggcggagggctcggaggcttgacccctcggaaggtacgccctcttatctggaacatggtaggcgaatcattttcattggttggcattgctactttaactgtgaatatatttggtttctttcttccactccaccacatgttctattctgtttcaaatttcaaaagtctttttgaataagattggtcctctagggttttttctcttcaacatatggtggcaaatatttaaagacaggaaaatatctctgaggcccacctttcttgtgggaccactctctactctggaaatggctgatattgcctcctttcaggttgagagaaagaaggaggcctggaccattgctttattctaagctcccactggattacaaaataaggaaaggccaatccaagggaaaaataaggaaaggccacacaatttggtatcactaaaattgtgatatatttgacatgtttataattgaccattgaggttttataatgaacccatcctctttaccaccctcctggtgtatctctgtgaccacctgttgaacttcatttggagatcaggttcaatgtcgaggttggaggtgctttctgaatatgaagcccagaccaaatgtccctcctgtgccctgtacctaactcttacctcttcaccatgtgatagaacttgctgtctgtaagtagactttggtagggagaaatcccatttgtcttgagaattatggctaatcagtggtgcctttgagaggactgaaggaaaccagataaaaatttgaatcaaggaaagtgaatgccactcagaagaaccatgggttgggttaggggcacgcctgaatttttcagtgctgcatgtgtgtgtgtaatatatccactcttcctcctctccactcatccatccatccgttcatctatctatccatctatccatctatccatccatccatccatccatccatccatccatccatccatccatccgtccatccgtccatccaagaatgagtgactgagg

SEQ ID NO: 118514 - DNA, 1099 bp, Homo sapiens
gagttttgtaggcaagtagaaaaaacaaatgaaggcagagtctgaaatggtcgaatgctcatcaaagaggagccataatagcaaccctggaaaatccacttcaaacttttcaagtatctagtttttcaaatgttgttcctttttatgtccattgtaataattagctctgaagctaagataggattacagggagaaagaaaatattaacaataaaatatctaaccatatggaagtcttggtacactccaataaatggagaggtgttttcttcccgcaaactaaggcaggtgagaattgtctgccctaagaactcagcccacagagctgtgaccttgtatgcagattgattcccaaggaaatctcaggccttctttgcccctagagttttgtcgctgtgtatggtgttcaatccaggtgtgcaaagacccaaagtgtctctgtagttccagagctgcctctgacaggggcaaagaaacaaaaaaagggtcgccagttaaagaaacactgtatcccatcttgaaccttgagttagatgaaaatacggaggtaaagttacacccaaattacatactaatgattttttcacatatgaaatcatggcttagaagaagatatagattattcaggtctgtttagaagcaaataagtaacctcttccaacccaacacccaacaaccaccaattttgtcataaaaactcaggcccttcctctaattactggtattctaggcgtaatgtgaaccctctcctttcattgacaccattattagctgggatgtcaggctatcctgaaacctggccaggcacaatagagcagaacttacaacaaatttgaaattaacattgaccacttttatgggactgtcatggttcctagtgctgcatgtttaaccttttagagaagaaagtacaggggatattgcacagctctttgtgaaaaattatgcatcatatttattccatgtttgtgcctctgtgtatgttggcatgctttgttagtttgtgtggtatgtctgtatgtgcttagacatatgcactatgtggctttatatatatatatatatatatatatatatatatatatatatatatatatata

SEQ ID NO: 118515 - DNA, 1032 bp, Homo sapiens
actaaaacaaacaaacacacacaaaactaaattatgtaccgtgggaaatcgtgaacttcaatacctcctcacttcaggataacctgtgattcttttgtggaagacagagtaacataccagtttcacttgtggattaacttcctgagtggacagaaaatctgtcttatgctcaacagtcaagttgttttatttatctttgatgtttcaggcaaggggaagaaaacaaatagtttccataataaggtagacactagcccaggatgcagtaaagcatttcctgaggacttggctaaaaggaggtagaactaataccatcaaagctgattgagttttattttaaaatgttaaatagaaaacctacactttcaaaagtgatccattcccaagtaaagggaaaatgacatcatctcaacttcagtatataaaactcttgtatatttgataccaggcttagcagcagggtggcgggggcttcggggaaggaccaaaaacaaaggcagcagacaaaatgaaaagtataaatagaagtattgaatatacagtaacctggaggaaattactctaatgctgctctcagttcttgtctccatttgtaacaatgagaaagaaatgactgaggtatgtaagataatgctataggagtcccatggttcagacaggaaaaaggtctgtgtctttagaaaagaaaattaaaagattaatggagctcgttgagaagtttgcatggttctgagaggcatgtagaagtggctggtggctatttgttttggaattaaatatatgaggataagggctgttaaatgaataagcaaatgcggatcatctttgacattctttgtaggaaagcataattaccacattgaataaaggcctagtggccagacagcaggaattaaacatttttaaaaaattaagtaagtgtaacatttagggaaaaaactcttaaaatatccctgtgtgacagttttagctttgcacaatttttttatatctagcatatatattttcattttacgcattctcacaacaacc

SEQ ID NO: 118516 - DNA, 1084 bp, Homo sapiens
attatttttatagaataatagttatggaaaggatttttgggggtttagaaatataacccttatattaaaggcacatttcaatggtggaagtataaataaaatgtattaagcaggcactatttgcttttataattttgtcttgaagtaaacctccaactttgaagctattgaaagaaattcctcttgtaccattttgattcattttctttttagagcccaccaaactttgttcctggacacatgggtagtgggaataatattgtggactgtttctgttcttatgtattagcacactgattctcttccaagagcatgaccttctcagtttaaaaacagttgatatattaattagaattaagttaggttgtaattaattcccactcatctccacccaccacactcctaccaaataacagtagcttaagtaacagaagcttgcttatttgtttgttttcctgtttaggaaatctggagatggtgcagtgtggggtgtggctctgtgatgttggggccctggtttctattttcttctgttgtgcatggctacaattcccaaggtcacctaaccatcagagagagttgctggagcttcagcctttacctgcacatggtggccagtggaaggaggaaggagagaagaagagggagccctttccctttggagatctttgaggaagttacacttatcacttctccatgcatccattggtcagaattagtcacatggccacaagggaggccaggaaatcttccatttatctatccagttatgcaccattcatttacttaacaaatatttattgtatattcactctgtgtttgctttattcctggcaataaagaggtgaacaggcagacaaggcccctattctgatagctcttgcatcctagcagggagctagacaataagataaaagtgatatgtgctgtgaggaaaataaagcaggttgatttcataaagaggtgattcatggccaccgatagggattactttagattgggcagtgagagattccctttccagaaaggcgacccagctggtgaatgcattgattttgggtgtgaggagaactatttcaggcag

SEQ ID NO: 118517 - DNA, 1026 bp, Homo sapiens
acgagggaaaacaatcacctttgatgacattatagaataaacacatttaacagcacgctgaattgctgaagtatcattttcaacgacctcattagtgtcacttaattaaaacttcctgctcttgactttgatgctggtacaggcaaaaacacagagggaattgaacaaacaacaaaaaaggtgtagggggtgcattttctagtgataaatcgcagaggttgctaatgaaaccgaattatgtacctttttcctgcaactcccataaaataatctgaaacacgcagcaactttgcatcaaacaaattaatcagctgtcagcagatttgccttataataatcttttgcacttattgatcatttaaaaaggggaggggctttttttctctgtacacaagcattaggttggtgataattaaagcctcagcttcagaaatgccataataactgttaattagcaggatgctattttcaacataatttgctaattaggcagtgagctggtatagtgtatatacctaattatgaagggtcttgtgctgtagacacatgtgactggagtgtaaatgacaccattataggggtcctagcagactttttaaaaatatagtttgttcagaagtacttagttctttagggacttcttcgtatagggaatattactcttggctgttttgcatgaggcttagaagaggaaacattatgtagaaatataccatttcttttatctgtactgtggacagacagggtcactaattctaaagaagctttgtcgcctgatgcctgatacaaaggctgataatttaggcactgaagttgtacatactctactagtagagaattactctctgtttgcttgccacacgcgattcatctgtggaccaggacgctctaaatcttttaatattatatgtctgccatactttgatttttctgccacacactgataacctataacatgtatctctctgcctctgtctctccctcctacttttcccttcatgtcataaagaaaatctagacttttcg

SEQ ID NO: 118518 - DNA, 1034 bp, Homo sapiens
cattttcaattaaagtctgctctgtcagacagacataacttctcacaaaaagctgtcaggagctgtctcctacccaaatgttacacagataatgattataatcataattggtttcaattcatatacaggccatcctttcatctggagtggttttattccagagatagtccaccaggaagtgtcctctgttggggattcactttccattggagtccatcctccatttgacctgcggggggggggggggggcggtggggtgaagggggtgcagtcagaaggctaattgtgtggaaagagcctgttttatcttctctccttgtaaaaggctggataaggtggcctgtatgaacttcctgtctttgatgtctccctgagaatgttccaagaacgttccaagaactacagcagccaaatagcacagcaaaatgcttaagatcctgggctctagagtcagacaaacctaggttcaaatcccagcttcaccacttgccagctgtctggccttggggaagttattttacctctttaagcttttgtttactgatccttcccatcagacgaatcacttcaccttcagaacattagaaaagaggatgtatttaagtggcctaggataccacagttctggacacagtagtagaggttgtcacagttattactactccctggactcgtcgcgatctgatgtgggacctccaattcttgggcaaatcctgccctttggtttcagcaggtgtgtggactgagaaaccgtcctgcacacaatctccaagttgttcagtcctcttccaggtgaagcagtttgcaggatccatcacacccagctccttggctagttgctttgtggttctcttactagcaaaggctgcagctggtgattctgctaaattgaagtgagaacaagaaaactctcccagaatgcaccagggcgaggcaaggcactacagctacccgccaggtaagtaagtactgggtgctgcagttagaaagagagcaggaaagcccctgggtgaagcctttaatgaggagagtgg

SEQ ID NO: 118519 - DNA, 1124 bp, Homo sapiens
tattgaatagatacaatgggaaagcctgtatttgttgaaagaggcagatatagacatctaaaccaaagtaccacattggccagccatgtctagattgggtgtgggtcacctttttatcttctaggaaattatcttacttgttgaagtggcctcttttggaaaaagcctgaacatagtttgtctattgtgatctgttctttttcctgaagaaaatattttctttttagtttttaattttaaaaagtttaaaaagttgtttttgtagagatgggggtctcactgtgttgcccaggctggtctcaaactcctggcctcaagcaatcctcccatctttacctcccaaagtgcttgggattacagatgtgagccactgcaccttgcccataatgaaaacgttttaaaggaactagaagaatgataaatgggtatgccatcacgatgtggaaactatgataattcgaaaattaaatctgctcaaatgcttttgtggattgataagagacaagtgattatggatcaagtcattaatattcatcaatgtaaagaataagttggggaattatatagaattgtaaggagaacaggaaaaggtataaaaggggatataaattactattctcctatatgcacagacaaaaatcacaaatgtctagtataaaaaaggaagggccttgaaatccattggcatttccagaaaatattccatgacctactcctgttgcaaatgtgccttttaccattgcagggtgataaaatgccatgatccaactccagagtacaattaagggcttgtgtgatacagcaggcagccattccatacttgagagttttcattgtataattaaaataaactgaggggcgggaggcagggaatgaagtaggggaggaaggtccggctgaagcgtattcagacatgacattttctaatgtcgataaccatcgagagctcggcttctctgtccatgaagacgagaatgccacatgtcagtcaaaggcagggtcgctgagcagggctggagactggagaaagcaagggagggttcatttggctctgggagagcgcagaccggcctcttctcaggctttaattgtgcttcctttgtgtcagtggtgtccacgtccag

SEQ ID NO: 118520 - DNA, 1049 bp, Homo sapiens
acacacatttatatttatttaattaatgcagtatctggcatattcaagcaggagcttgtaacaaataagtaacaactgtaagaaataagtatttgttgcataaacaaagcaatggcctgcaggtactcctcctttggtaagccattgctaagcaactctttgctactcttcctttcagctgctggctgaacctgcagcatcttcttgtgactcccctcaatggtagcacacttctactctttgagggttgatctgagtttcggaaacagccagcagtaatttgataacgaggctggtgtaaaacatcagtcgattaaagatcattttagatcagaaatgatgcgtccctgtaagggaactactatattgagatgaactcaaaacattctgcctggatttccaagaagagctgcaaatgctctcaagcagtcttccaaagtgacaattaagaatgggatggaattcattttgatgtccagctctggtctaaaagtcagtcacattccaggtctcactctggcccctgtgctctggaaagagaggagcagtgagatatggccattgttgatatgaaaagcagaaggtggaggtcccaggctgctgagttagccctcagtttgaatcctgcgtctgctgttttttagctctaagtcctgaggcctctaatatacatctactctgcaattacttctctctctctctcttttttttttagatggagtttcgctcttgttgcccattctggagtgcagtggtgcaatctcggctcactacaacccctgcctcccggattcaagcgattctcttgcctcagactcccaagtagctgggattacaggtgcccgccaccactcccggctgatttttgtatttttagtagagatggggtttcaccatgttggccaggctggtcttgaactcctgacctcgtgatccgccctcctcggcctcccaaagtgctgggattacaggcgtgagccactgcgcccggcccaattacttctctgtaatttttttcccctgaggattggtggggaaaaaaaatgctt

SEQ ID NO: 118521 - DNA, 1094 bp, Homo sapiens
aaaaagagagtgaaaaaaagtcagattggttgtaaggaccacttcagttgagggtctccttgaaggtatttaaacctgggagtgatgttggcatcttttctgcattaggggtattggctgtttgccaatcatttcccttgaaaaatatcatgcggccataaaggaactatgaaatgtttggcagaggaagcgtccatggcagaatagggacaaagggaaatggagattttctgattcagcctctggtgccagacccaaataaaaagaagaggcacatgccatggaactatggcttacctgaaacaccctgggtcaaggagctttgaaatggtagtggcagagttgggaccatttttttcttgaaccttgattaaccaagtgctctggagataaaatgttcagagagttctaatatactcacttgctacgtattgttttctacatttagctacaactgttgattcagcatctcctataggccagatattatgccagacctaatttgcaacaaaacagatttggttcctgccctcttgggacttcctgcttagacctgcctcatcaattttcatttcttatgtgacttaatctttgtcatttaaattccagtattttcttgcatccatgacagtgcttaccattgtattaataataccttacagaaaagtctggtaaatatctataattttattggctgttcaagtaatgtttaaatttatgaagcctcagttttctcatctgtaaaatggggataataatgtctatctcacagggcgcttgtgaagagtgaatggtataatgtatagaaagcactcagcagagagcttggcacagagttcttagtaattgggagctgctagcatttttcattagaagtgtggctcacgcctgtaatcccagcactttgggaggcctagacaggtggatcacagggtcaggagatcgagaccatcttggctaacacggtgaaacccggtctctactaaaaatacaaaaaattagctgggcgtggtggcaggcgcctgtagtcccagctactccggaggctgaggcaggagaatggtgtgaacccgggaggtggagtttgcagtgag

SEQ ID NO: 118522 - DNA, 1046 bp, Homo sapiens
aagttctgggattacaggcgtgagcaaccgtgctcagccaatcctgagaaactcttgatatttgtattttcagtggtatccaggctaggttggtacatccagaattacttacaagaagcaaatttcctttctttttttcttactttttctgggctgggaggggtgctagggacttcagatgtcatttcacaactttatacaaggaacaagatttttgtggcatcaatgcatattttctcattgtaaattttacttggaatacatagctattagtgttgataatttacaaataccctgttcaatttcaaaaatgatttttgaagttgttttcataaaagacaagttgatcataagtcctttgatgtttacacagcattttgaggccccttctctttttcagtggtatgttcttcccaaatcaattttttaagtatgtgttttgtcttcatttttatctgatatttcatcagcagcaagttaattctttctcttttttcctgtctccaaaaatgcctgttccactttgtctctcatctattgctatgtgacagaaaaacaagagacattctgtgtctagcagtgcacctccagggacatcttttgaactctcataatttgtatttattgccacccactttgtaagttcacagtttaatttgccggcagtggcagtgttaggccgacacagtaaaacaagataacgttaaaatgtcagaatgagagggggcatgaatgatgcattacccctaccaggacttgcacttgtcattcctttccaccaaagtgatgttaactaccttttgagagctttatctgactggtattactcagaaataggatcattagttcactgttctgattaggaagccgctatgcttgattaactcttcttggactgggatctcagtggaagcattaaatgaatcgcactgacttagacatctagaactaatttataatttttttttgcaattatttgtagttgttgacatgtgtttttccatgatgtggtacttaacgggaatgagttaaacctactggagaca

SEQ ID NO: 118523 - DNA, 1035 bp, Homo sapiens
tgtgagccccttccagctctgaccccccagttgtttatgtccaacagtgtttctcatgtggctgtggataagtttctccctctttccattttaaacttccatttgtaggttgcttgtgacattttgcttcaggccagcacttagcatataatattacagatgcctgaaatctttcagcctttctttttcttttcttttcttcctttcactctcactctttttttcctgcctctctctgtctttcatttcactcccaactccttttttccttacaacaccaaaaactctttcgtttaaaaaagttggaaaatatatgaagacaccacacagcattcacaactttagcactgatctgatctatttttctgctattcaacagacctggattttttccctgtgaaccagaaagtcttttgttttcttgtctcagtaaacacagcatacggtatgtactaagtattaggactcaggggtcttattcaaatattttttggggggagtggggtcaggactatggaaagagatacaggaggtgtaggagactgggttttaatgtgagatcattaatcatttcttttttcctgaatcaggcttgggacaaaagggataaagagggttttcccctcaaatattcaatttatcctatcagatttcccacagtgactttctctaccaaggttcttaatgcactactcttagaatgtctcatcagtgaccagagctgatggggtctttgaacattagacagtacccattagtcaaggtccctgggctaacatctctggatggcattttcttctaagtgtgccattagttagtataatggactggtgtctgtcagcctttggggcaggacagagaggtgcatcgaagaccctttgttagaagatgggctgtgttttttcttcaacctgcaagcatgtccccagcaacgtttttagcttttgaaagacaataaatgttaatagcttcagtgaagtctttataatctcccaggtcagaaattgttgctgttttttctccttaaagtctcaa

SEQ ID NO: 118524 - DNA, 1074 bp, Homo sapiens
gtgttctcaagtgtgcagtagttccacaccatgcagcaaatacatgtcgtgattgggtttttaaaagacatccgcctggcccctgactgacagggcctattgattttttaggtttctgccgtcatcggtttccagcctcacagcggccgcatgtcgggggtcagggcgcaccggggcgcagtgagccagccctcgccacttcccaaagtgaagggccgctgaaagaaaatcaatcatgtcataagtgagaagcatcaaaaattttccccctgtatggccaaggcccatcagcctgtctccactcagtagctaaggttaggcatctgtcaagtcaagactaggtgaaaagtattagaaatgccagtttacccacgggtagaccgtgtgggtgtgaggcagcctcttccctttgtctggccatcccgggatgacagggttggcgttttcacttaatttttgagtcagaatcacccattttcccttcctttagcctttgtgtgtgtgtatgtctctttctctctcctccctcctcctaaggcagggcgggttgaggcctggtaccctgtttatttaagaaccagtgaaaagtcaaagtggatgcattcccaggcagcccactgggaggtcagcgccatggcattcttactaagtcacagagtatatttccctaaatgaagcagatttttaaccacccctttcatatcttgctgtggaaacgcacatgacacagataagtttaattgtgaaattaatagtgcatatcccatggtagaaattttatttggctactgtgctgatgtttctgaactgataggatgctaaattttcttcctgtgctactaattgggagaacgtatatttttaattctcagagaaatgatcaggaatattctgttcatttttaaacacctttttatatttcttacattccaaatccatgtcatgagattgcatagtttgttgaaagaaaccgtattaagtgtctaacttaaagaaaccctttacgtgtactttctaattgtgagtttagtatttagtttccaagctataaatcatagattatgtattctgtga

SEQ ID NO: 118525 - DNA, 1042 bp, Homo sapiens
aaaaaaaaaaaaaggaagaaagcagcgtcgttagattgtagctggacgctgttgcctgccaatgactctgctaaacatggagattggtaagtggtaggtgttccagatactagcaccaaactgagactccctcattgatgtaatcagaacaattaagagaaaattgaaaacggcactcttactatgtgattccatattatttaatgctcatatccttgtaccattagaattgtcctgagcacattactggtacagttttatttcccttaacaagtgatggtagtgcttatataataagcaaagtagtctaaaaaaaggtcagtatctacaaaatggaaaaatgaagtataaactcaggtcgttgaacaagagacttgagaaacttagagaatagagttagaaacatgaactaatcatgaacagcaccatagaaatcaattttcaaatcaggtgagaatcttaacatttatggttttggccaccattgatatatcgttgttagcagacttgtaggtagtgctctcagctaaagcaataagttgaatttagaggagctggaaactttaagaagtgtttcttgagattctgttttactctttcttttgagattccaggtatgatttggaagattcatggcaaataagcttctaactaaaggactcaaatattataacagtaaccagcattttaattctattttttgttattgaatttccactggaagagacatagttctatgttctttatttggttacacacacacacacacacacacacacacacacacacacacacactcttacagttgcaggatgagaatctgcccagataaagtactaacatactctcaggtacttataaaaattactatcctaggcctggaatctattctagattttggttgagcacattatttcagatttggtcataccttttccctctctccgtatctcactcccacccatgtggtagcattcattttccaaattgaaacacttgcttcatattccctttgatttttccaaagacattagagccaata

SEQ ID NO: 118526 - DNA, 1138 bp, Homo sapiens
tgatgagttgttcagactgttaggtgaaatagtattgaagagtagtgaacctgaagcagctcttacatgctagcaaataaaatctatctcccacatcatgattaaatggatcattgttcacttggtatgctatggtagaaagctgctttccaatttggagaaaataacttgtaaaatcaattttaacatttgttgggtgactgggatctatctggttgctaagatttttctttccttcatatctcatgatacttaactttggtttaaacaaatagaacttatgtgtttctaacacccctcatttctgaactcctatttttgaaaaaaaaaattggaactgtgcattttggtggagggggagagaataaatgcatatttaaggtatgaatgcttctttcaggaattgatctgcatcttggctggcaaatctctcaggtgcacgaaggggccctggctacttggtcattcatggaggaatatattttttaaatgctttcttgaccctcttctaatttggaggcaagcacattcctcactttttcccaaccagagcgaaccaaattttcatgtgcacagagtgtgttttcagtggattagacccaaagctatgttgttctagaggtcttagaactgcttatgtagtacacaataagctttgtagcacaatttaaatgttgattttaacatataaacagtcatccaaaagcattccagaaaagctgtttttaggatttggcttaaaagtgtattggataatgacttctcaagcatgtttattttttttggtgtctttatttaggcatataaagtttttccttttactgggaccccataaagaagtctgtgtcccctttttttctctctctgtgcttcttcctttcctttcccagctgttcctttaattcatctgagacattagatgacattctttattttgccaacaatgacttatttataactaattgcctgggttctgggattgttaggaaactgtattgacaatgataatttttagttgtctcacaatgaggacacatgaattatcacagattccaatcaaaaaatggcaaatgagaaacaaagcccccaccaacggtacatttctgacattgcctttgttaagtgttgcattaatagg

SEQ ID NO: 118527 - DNA, 1211 bp, Homo sapiens
agtggaatgggacacaattcagcccatggcagtggccatgattagactcttaactaatatggaagccaaatgttcttcaaatcacatgtcagcattttcttttcttttcttttcttttttcttttttttttttgagacagagtctgtctctgttgccaggcgagaatgcagtggcgcgatctcagctcactgcaatctccgcctcctgggttcaagccattctcctgcctcagcctcccgagtagctgggattacaggcgcgtgccaccacacccagctaatttatgtatttttagtagagatggggtttcaccatgttggccaggttggtcttgaactctggaccttgtgatccgcctgccttggcctcccaaagtgctgggattacaggcgtgagtcactgcacccggccacatgtcagcattttctaagcagagaccagggtcattgcagtaaggtctctcttggttagagtgatgcaaagccaagtggcttccgaatgacacagcaagaaagtcaaagaaaaggctccacaaaggctatgtgggccacattaaagcgcaagatttattttcattatattttttcttagcagaacccatcttatctggttagacaggcttctttagaaccagattttgttctttgtgacatttggagttaatatgaggaaatgctctttgtattgcccagtattgaaaatgtcagtaaacaaacgcagcagtcagagaagggggggttctaacaaaagacattgtttcttgatgcaggaggtaacaagagtatttagaacaaaggttttctcaaaataggctttttagcaaactttggagccctgctctggtaccccacccgcttccattctgctgaaacagcgatgttgatgaaaatacttattattttaaccagccccccaaacttaccaacacaaacacactcttaatttcagggctgacagcagggctgggaaggtccttataggatcgcaaaacaactcgggcagttgagggcttccggcagccagctaacaaaaatatactctcagaggatgcagctcagggaggcgtgggacctgcacagcagagagcctgaaagctggcctttccgttttttacagagcttcacccttcacatctggcggagctgtgacaatcagtgttagaccattttagaaatcagataccctgggtaccaggaagttgatttgcctt

SEQ ID NO: 118528 - DNA, 1024 bp, Homo sapiens
ggggtgttaagctaaagtccttattggtttcccactggatgaacccatctggatcagtctccactgcaccaccacagggctccagtggtctgatcttctgcctcaccagcctcagcctggatctcaggcacagcattgtgggccctccagcctcattcatgctccctgtaccttggggtccttctgcaattggacccctctacctggagtgccttccttgcctctctgcctcttcaagtgttcctcgtccttcagatgctatttccaggaaagcctctctgagttcctgagttgtcaggcttctttgttttcactcttataacactgggcctgtgtccttcagagacatgcctagagtcctcttaggagactatttgattcatgcctgcctcctttagtctgtaagctcactgagggcagggcctgtgtctgcttttgctgaccttcttgttccctgtgcttgccgtggtgcttcacaaatatccgcagaataaaccaatttgaaaattcatatattacttatggatcatcctctggtaacttagaagggctgctcaaaaaggactttaatataaatatatatttaaagcttagcagttgcatgatgggcacactggtttgccagggctgccataacaaagtaccacagaccaggtggcctaaacagcagaaatctatttcctcacacttctagaggccagaggtctgagatcaaagtgctgttagggttggtttcttctgagggcctctttccttggctcgtagacgccgtcttcttccagtgcctttgcatggtcttcccctgggcatgtctgtgttttaatgtcttcctcttataaggacaccagtcatattggattaaggcccaccccaatgaccttatttaattttaatgacctctttaaagaccctgtctccaaggctgggtgcagtggcttatgcttataattccagcactttgggttgccaagttgggaggattgcctgaggctaggagtttgagaccaacctggccaacatggcg

SEQ ID NO: 118529 - DNA, 1008 bp, Homo sapiens
agaacacagtgtgtttgtagatctcatcaagcaagctctagattcaagtccaggaaatgttattgctttactttctagggactaggttctgtatggaatgtttgtacagacatcacctcttttaattctcacctcatgaaacacatctagtaacctctactgaggttttatgtgcttaatcttaagagaggcaaggaggaacacttgacagtctctacccacctccagacatgctaaggatttaacaattttcttaaagacaggatagttagagtgcccagatatgggcatatggattttccttttgttcctttctttggtccagctcagtggtgctcaaattttagtaggctgtaaacacaaatccacatgtgtggtgttttatgggtaatctaagtgattttcaagggtagttttgactacacgtgatttttgcttttcaggctaagtctaggacccgactttgtggctaaatggaactcgtttaaatgtgtacaagttcttagagcacaactccaggtggttggacacaaagatgcggaccgtatagccactgtccccagtgcttacagaataatgtgtgttcttcatgtgggctttggtgggatggggagaaaacccactgaagtttaaatagtctcagtgttcctgaagttaaggagcagaggtctggcctggcatggggaggcattctttggaaatggaggtggcagcagacaggcatcctgaagagaacagcccggcccaagacaacttcccagcctgaggttcaggtcctccaggtatttggcttcacttcagccacgctcaccttatctctagaagttgcttcaagatcagctccaagctgagttcctgcagcttccaagagtgtcagttatgaggccctcaaccttaagtatagctggatgttggagcttcctggttgttgcagggaatacagtgaaattcatccatttagtgggagttcaccatgagttctgttgtgcgaggaacttagtggcagta

SEQ ID NO: 118530 - DNA, 1401 bp, Homo sapiens
atgctcagactcagtagatggcaattatagacatattttcagtttatagacagaagacaggaggagtgaagctgtggacttcagctttgttgttgaaaaggggtactctgtgacagacctgggttcaactcttagcgctgttacttactagctacgtgatttggggcaaattacttggccactccaatcctgttcctgtaaaatggaggcaaaaagaataattcttacatcatagagtttttgtaaggattaaatgatagaatatttattaagcatttggttcagggcccagtacattataaagtgcttagccagtgttagctgttataaaattatcatcacagtcgattctcactgtgcatgcaattatccttctgatttcaactatgtgtgctggaacaaaaaattaaaaaagagaaaagaatgctaagaatagtttaaataatgttcttcatacactcactgtgtatctgcctcctagtgagcccaaaatgtaaataggctggtgatcagacctttgtatatagatgttaatgctcaaggttgcaaacgcatgcatactgcactctatgtgtagtttcagggatttgcaaagattttttagactttctgaagttttatcttataccctgacttgagacactaactcccacatcatagttgaagccactgttgttggtgtgttgatagtgttactattggcttgatgtgaaagaacaaatagggtagctgatggagtgactggaagctacagttgagaccttggattagatctagatgtccttggatgattttgataaggagagaaaacagttagtggggagaagtggtgaaagatccttaaatgtccagtgtgagggagagagagaagagggggtggggttagcgatgggaggtgttgggaggggccatggctccttgcccaggaggctggggcagggacgggggagacaggaaatgggcctctgagtaatgggagccgcagagagaccgactgggtgcttagccccatgtgggaaataagcaacacagggagaaagaagtttatacaggcactagtatttttagagactgtcctttcagtgatgcatttgaataacaaggtgtcctaatactccttagccttctcagtcttatgtcttcagttatttgaaaaacaaagtaaatagcatagcttccttccctaggctgatttccgtcttttcctgaatcagtaagcaaggatttgtttcttctttgtgtgtatgaccccatttaaattcagagttcatggtaacataaatggtaactggtaggaaaacaaataaagtacaaatgcataaatacatttctttttcaaaatttatcacattaaacaagccaatagttttgatgttatctccacaaggttgagaccttgct

SEQ ID NO: 118531 - DNA, 1374 bp, Homo sapiens
ttacttggacacatcaacagcccccttttctctctggaagtcatttactctctccccttttagaagaattttctaacatctatcagactgtgtaaaatataagaagagcagagccagggtagcttagcacctgatgtcaaagaaaggcagttataaaccaccacaccaaggaggtgattcactttcagtcccctttgacctctaccctggaaaggaaggtcagatagataccttttgtgtgggctgtatttgcccagctgaccaggaaaattcagggctttggtggccaaaggattttgcagattattctgtacatttgtgtatttcctgtaagtaacggaaagccttgatgaccttgcagctgaaatgccttcacagccatagacacttgctgttgtgccctagatggaaatcttgcaggcaaggtggctctgcgcacctatgttactgtgtaagtgccaggctccagctcagttttaactggttgatggctggccattccagctgacttgtggacctcacttttattgtttcttgtctacttccagactcaatggctatggagaatgcttctggttagtggtcactcttacttagagacaattctataaagcatgagtacaaagaatcatatgatgtatttattttttaaagaaggacaccccacttacacatttaagtcaatattactcttttgagaagttgagggcttattccattgcttcaaacctattttgactcccagcctgtggcatattactttgactatccttggtagggacaagcctccatccttgggatctgtgtttggaaagagcctaacattaggagtcaaacaggtgatcacgttgggtgatttttttctttgttgcattagattatgaagtgtaagcactgattttttttgtttggtttggttttcgataggactgtcaagggctttccaaaatatatcaagcaagggccgtaaaattggaaaaattacgtagtttctccaagacttaggttctggtagatgtgttgactaagcatcagcctatcactttatagtcctagcttgtcaactgtcacgcaggtaatgagtttttgaaggtgaagtttctattctcaggaagagtcttccagcagggaattagtagtctacgaaaagtgaccttgctgccttctttgcttggatctgttgagctcctggaactctagaaactggtttgtgaagtgtaagagttccaggatctcagcatctggggtggcccaagtcatggagattttatcagaatactatgggctttccctttcttaggagataaggttctggccttcaaacactattttcactgacaatttctctttccttgcttgaataatcccactagc

SEQ ID NO: 118532 - DNA, 1049 bp, Homo sapiens
gagccgaagcagaagcagagaatggatactgatattatttccatctgcaagccctcatgacgtatgaagtgccgagagacatttatggttttgttgctaccattaagacctttggcagagtcctaaacttattttggtctctctctcttttattgcaagctatttccagctgtttatttttatcttgctttgagatgtttaaataaaagacataatttgaatctaaattgtggttgttatcagatctggctagaataataagacagtgataccaattctcctggcttgaagtttggagtagtgggtcatttattcattcagtggacacctactatgtaccaagcgaagactgttgtagactttgcatagactttacagtctagtgggagagacagtcattcaaagaatcacataaataaaggtaaaattacaattgttttaggtgctatgaaggaaagggcaggaggatgatatgatatgccagggagaagaactggcttattgagggttctggaaatgtgtcctcagtgaagtgatgatcaaactgagcaaatctcttatgcctgcattttccccttagagtccaaacatacatgctggagtcagatggacaagggttccaagcctccaatgttcctaactagccataagaccttggaaaagtaacctcatctctttggaacttggagtttttgtctgcaaaatagagaaagcaacatccatcctgctggattgcttggtgttgttgaaacaatacattctataggtacctgattcaattagacagtaggtgcttcataaatatcagctactattattatttcacctatgataaaatataagttatgtgaatcaggccttatcctttccagagatattttttaagagggctttcctgaagcctaaccttaagcagctacctagtagctccctgtcatgacatcctatttaacttttttatttttttttttttactgtgaatgtttggtaaataaaaataaaatatatgtaacacatgctataaagtcatccaaacttgtgaacactct

SEQ ID NO: 118533 - DNA, 1069 bp, Homo sapiens
tcccttccaccactccacttaggcccatggctcttacacattccgcttatgttacagtagaatgttttaataagtaggatttttgtcattgcacaagtcgacacaattatgggaatagctaaaattcaccagtagacctagtgggttcaattcaacaagattattgagagcctgttttgtgggagatgctattgctcatatgctagtgaaacagacattttctaccctcgagggtctgtgcactgagaggcatagtcatatgcaaaccaagagtaactgataagatggttaaatggtgggacagagtgtcaggggcacctgtatcggaattgattaattctgtgtgggggtcatggaaagctagagagaagggatatttgagttagacttggaggaatatacggagagctgtagggaacagttcccagaggcaaggagatcaatttgggaagttactgggatagtaatggcccagagataatgaagtcttggtcattactggtggcagagctagaaggcagtgggcagggaacaaagctcagataggctatggggagctgagggagaagagaatcaaggtgaactgtctggatcattttttcctccagtcctttttgtggtgggaagatgggagaattggaatgatctaaatatggcttcctaatgttcatgttatcttgactaatcttgataagactttatgacaactttatctcaagctcctgcagtttcaatagaaattggattttaggatgcacaatttgatttagccaaacagctttggacttccatcctacttcattgtccctgagtgtcatgactgtcattgtctgcattctaattctgtttctatttgaatcattcattaagtacctaaaaattatgcatatagtaaattcacaggataccatatgcaaataggaagcacccctcaccctggtcctaaataaacattgtggatttgttaagtaaatttgggagtttcagatcttttttttaatgcaatgaattgtaatgtcacacttccaatacgacaaggattcttttttttttcttcttcttttaaata

SEQ ID NO: 118534 - DNA, 1045 bp, Homo sapiens
tagagtgctgtttagtttactaatagtgattctttcaaaatcactgtgcactcaacattactcgtgaaatgttagttttttttttttcatcaaattgttgatagacagtggcttaaaaatgtttctgcaacattgataatgacatacccaaaataatcagggcagaattaggtccaattccttgatctatcctggaagtttggtataatgaatttcaggaaactctgttatattatatgtctgtttctcttcttaccagctcttttatttctgtctgctgctcagggtagattgcctggaaatttgtcagctttccagacatggttttagccagctttggtttgtatctacggacacccgttgggctacagttgccacctacatattgtagaaattaggagtaagttgtttgaggaggcctgattgaaatggtggctacatggcagaagtggccatgtccctggaatgtctgtcaaggatttgggggttatgagaacatgctactcatataaaccaggtccatagcccctctgactgttcagaaaagaattctagctcagtccttttcttggaactgtttggagggtgtttgacatgaatggccttatggaatctgttggtagtgggaattcaaaacaagggtatgaattacgaattcaagcactaagatacgtgaaaattaaacagaagggaagtggctgcagctgaatattactaagaaattagcccaaactctacagatccttcttccactaggttggattagtttgatctgttgttcatattctctgggaaaaccaaatgaggcagttcctttgggtttccggaaagatctcaggtctattggaactggagtttgaaggtggcttttccttttctttcagttataaatgattcctggggactcccacacacaactttgtcattgtggaaatgtgaaagggtatctccagattttctagcagacagcttcatttgtctggttgcaaggtagggctgggggtggactggacaattccccagggtccccttcagctgagaactt

SEQ ID NO: 118535 - DNA, 1053 bp, Homo sapiens
tttctcatcttcaaaatgggaaaagtcacttctattttgaagcgttgtgaggattgaaacacctagcactgggcttggcacataacaggtgcttaaaatcaggtagctcttgcaatttgagcatcgtatattccatgtggattttcattcttaatgtgatcattgccatgggacttcctttgagcacaattaccttactgaagttaatcatggtagctaagtctccttagataaagactcattcattgttttgtttccacaaatatttattaagcctctattatatgtcatgcactgttttcagggttgggggtataacagtgaaaaagacaaacatagttcctggcttcatgcagctttctcagtgtctcagggttgatctctgcccccagtcccccaaaaatagttggaatagtaatagcaagtataaacaaagaatatattgatatatatgttttaaaaatagaagaatgccattttacactgggatcatgatgcagaagaaaaatatccccgggttaaagtcaccttttagctcatacccagaggtatcgaacttgggcaaattccacggctttattgcactcttctgaggcagtctacatgttggttaagactgaaggaagagatctctaagaccctttccaactatggaattctaattttagctgtttgtggtattgctgagcacaggcaggtagatgagcgctttggagggtaggttgtaagcctaagagggcagtgactacgttgagcacagtgcctccctcctgtgtactagatgcttagggcttgtttttgtgaaaagaaggaatgacaggaactagaaatgcagttgttgaatctggtggtctcatctctctgtctaaagacaagcttgttataactacacaataaagtgaaatggcactgccattaaagaatgatgaggaacagaaaatgtaagataaaatattaaatttgttacacttaaaaatgttaatcttcacacgattaccatgcaaatctcctcattgcctaactgtttaattgatcaagtaaatcacagagcag

SEQ ID NO: 118536 - DNA, 1048 bp, Homo sapiens
acatttttcatgggtggggcagggggtgtcacatatgttaaatgatgcaaacttaattaaactgattctggggaaggacaggccattggcgttccatctatgaaatgtgtactccactttcggtgggaacagagtggtcttctgtgtgctttgggaatttctatttttgaaagtgaagtgcttggttccagttgcaaacatgccctaaaccctacttgtcatgactgagctagacatgctggcaaattatatagattgatcctacacaataacctccaaaatggcacttggtaactataccatcctgctaactgtttgaggcacaatagttttgtaatataatataaagtaatggtgttagccaacacatctttaataagatattgttcgtgcctttgccatatgctacagagcagcctctcactcggtgggccttttgattcctctcaataagattatttcaaatactctaatcctgaatcattgacatgaatacaaaagcctagtgacatctaatagatgcctcttagctttgcttttcctcttgttcctttcctttttcttctctttttacctgacaaaaagctcatagacacttgggctctgtctctcagtagcagcatggggggctcctcatgaaatataaagggggaaaaaggactgacagaggcccgataagctacagagtgaagggccatagattaaaagtaaatgccagtaaatcctaccctgtacactcacttgttcttttattgttttctttaacactttcagagccagggcagggaaaaaaccagaaaatagtaatcaagctgcccatgtacatttttaatctggacactgtcactattatacatattttatggggctttggcgacattctcaaattttggttcatgtaaaggttgtggtgggttttttttttaatgtccttttaatcaatatcaagaatccctcaagaacttttttgctcatttgctgctcaattaacttaatattgataccatgtgtgggtaggaagagcccttctgtagggtgtgaacactgg

SEQ ID NO: 118537 - DNA, 1022 bp, Homo sapiens
acacagtaactaatatttgaatttaaaaggtttgcaataaacttcatgtttagaaattgaataaataggagttttattaccacattggatatccttgtgtcctaacctttttccttggagttatcttagttcaataaataaaacctcattagactattcccatttcaacgagtttattaaattttgcaggagtaattagcataagctgtgctaatttttctggaagactaatgagggaggttcttaattaggtttactttgtaagaatcagaaaagatgataatgacaaaagtcacatagggtagtctgaattgggaacccagtttttctgcatctattaaaaaatctttctatatggaaactttttaataaatgtcggaactgaatatattaagtatgcagactgttattccatatctggttaggatgaccattcattcttaatttgcttccccaaactctttattttcctaaactatctttgagcaatgacatggatgaatacagatggtcttataaaaacatttctttctccaaagtatgctggaggcttcttttcacacagactcctgaagtttctggctagatttctgttgcttatttgcagtggggtgggatagggggcagcttaatgtttgtttgtttgtttgtttgtttgaatttagaattagtgcaattgatgaaatgaaccattaagtaagggtgacaatgtgagcatcattccttgtgcaatgaatccttatctgttaacaagtggattttttttttagtagatagaaatactaaaggatgaaattccatctcaaattatgttctcctattggtgtgaatttagacctagttttttaaggatataatgtagctccagtaacctaaaagttttgggttcctcaaagccgatatttaaaacttggatgttaaaagcttgtcaacttatgtacctgtaagaattttgagtttgtttattgtaatattaacagaattaccatgcctttttcccccatttttaagaattcctgtat

SEQ ID NO: 118538 - DNA, 1046 bp, Homo sapiens
ctcccattcttaacagcgagagaagagaataacaacaagagaagaacttatgcaagaaagggcaaaatagaaaagatttttcaattccataaaattgctgcaaaggggaaaaaatgatggcaaccgtgtttgaatttcatagtttccaatttgattctatattactgattgcataatatctgtgttacgtgcttagggtttgatttgctttcagatttatggatgcaaatccctgaatattttgtgaaaataggctatgaggcctgcattcagtagcaatagtaactgttttcaaaagatgcatacaatatgcaattacagagctgagggtacaggccatccttgcgttaggatttagcatagttttaacacgcagtcaacttttgagcaccaataatttttagctctctttgcttgtccttcggaatttgggagaacactactatttttatcagtcaaaagacttttagcagtggtttattcaggaaaactatttatagggtagagagaagagactttctggtcatagtgcaatcgtgcagggcaagctatttctgtgttaaattttggctgtattatttgctgccactgactttgggacatcagcctggcatattctatcaaaaaagtagaattaacaaaatcagcagttgcaaactgtgatttagaaaaggggcttctattatacttcatccttatggcatgcacagactgagaaacatatgaccccaattctttttacaatcatgacaatttgtcaagtcacttcaaaaaagtttatagaaaaattgctgtaaatgcaggaagtgcacatctggagttgaatgccaggttacatttctgtgtggtgccaaatagcttgattaagaagcacataacccagcctgcactcagtgatccagatatttgagctgcatagacatgggaaaagtcaaatgtgttatgtttaatagcaaataaccaggaactgataacagcagatttcattatttttgaggtaaagggctatgtgtggtaattattgttaaagtaaaaagcaaaaaatg

SEQ ID NO: 118539 - DNA, 1091 bp, Homo sapiens
attttagacaatgggaaaacttgataatgtttgcaaactgaaggaaagaattaaccagggagggaagaatggcaaatgcaaaacagaagaggagtccttggtggggctggtcccaggtaaggcagaatgagacggacctgtgagctcaggtacttgagttagtgtgacgaggatggatcacttactttaagacatgggaggaagagagaggatagaagagcctattatgtaatggattctttaaaatcaagtcatctttataactattaataagactattcagataaatcatagatctcagtctctagccactttagggaaataggtaaggcatcttgttttttacaagtttgaaatgatgctttcctcctgttgagaaagacactattcataggaaaaagttccatgtccctaagatgaggatctgccgattccatgactgggaatatttaggtgtttcttgctctagtttatgaagctctagaaatacgccacctgtgttaggctggtaagaaagagactcataagttcgcttttctctggatgtgcagaattgtttgggagacacacaatcctgctgaggaaagggctgctgatttcggtccgtagtgtaggtaccacaccaggtgctggctaccaacgcctgagactggccacattgttctcatgtcactggggttgcaggttcggaagggatgtaaacagtggcctgcttttaaaatcttaccctggcagcaaagcaaattaggaaactccaagccttgcaagatgccagcatgagagagcaaatcccaagtctgtgcctggtacagtgcccaacacacatcgtaggagcctaaaaaatagtgctttgaacggatgaaggtccatcagtcacacagtaatgaggacctaattatcattgtgatttcttttattaacactgtcactttttccgttaagtgcttttgcatctgtttcatctacggaattgtttcagtatgagccctcttctgccttaaacataagtgaattcattctcctttcagcttttccttcctggtttcctcctgtgtatagtggaggttggtgctcactcttggtccttctga

SEQ ID NO: 118540 - DNA, 1052 bp, Homo sapiens
ccaatctgcggaaatccaacttcttccacttcgtcctggccctctacgacagacagggccagcccgtggagatcgagaggacagcgtttgtggggttcgtggagaaggaaaaagtaagtgggcgcagcgctgtcgcccctcgtccccggctcggctcgggagcaggcccgggagccttgggcagcgcgcccttccttgagtgcaaagcatccataacacacttctatgtgggggtcccccaagccacttcccatcccagacgaacccagggtcctggtccactggctccttctccagaaaagttcgcacggagcccccagagctagagagaggcaagcctggctctacaatccacagccatgggcacccggaatgaacccgccctccactaccagattacgcaccgcctgcctctggtggccggggcacgagcccctaggccctggaaagaggatagcctgtgtgcgcccgacggaattttcttttgggagagagggagcagtcaggaacagggggcggaggagggatcacaattggccacaatttctgctgctaccgtggctgcctggctcgccagcgggggtcccggcttggggaaagttgcctcgaaagttggtccactcgctcacgcagacctctctcctgcatctcttgtgtctttgcgtcctgatgcaacccaggaagccaacagcgaaaagaccaataacggaattcactaccggcttcagcttctctacagcaatggtgaggcccgggtcgggtctatggcctcaccctggggctccgggtctgggcagggggcgcagggagctccaggtggacgaaatcctccagcgaaggtcagtcatccgctttatttgaggtgaaccagcctctcctaaatttcgccccaggaggtttcacctgaggaggctcctagtggcccaagagccttatcggtctcgcgtttacctggggccaggtgtagtgcctcatccctccctgagccactttcattcttcctccccttcctgaggcctgttcctttggcttggcccaggctgcaggcccat

SEQ ID NO: 118541 - DNA, 2666 bp, Homo sapiens
tatatagaccaaatcttgaaaactgggtatatacattgtccgtaatgagagagtgccacttccttgccaataccctggtattatatggccgattttgtctctttgccaataatttcattataaactgttcagctgtgttgaagcaaaactgtagaaaaagtcctgtcttcatcagattttctgaggttgtaattatactcttgtcataccagtggagacccagtaatcatactgcaacaattgtgtaacacttgcatttcatactcaggcaaaacccagttataaaggtagcttcttcctcatttttggtttttccttcacttttagaaagtacttagccagtagttcttgcattatttgtataagggggatctgtgatggcagcaggattattactgatatataaagtaagttttattctaagatctatgttacaaattttctattgtgggaaagagatgttagaaccagaactttggggatagcaccaaagatactagaaaacagacatttataaggtatcttttttccccctcttttaggacatgaaatctgctgtgatcacgccttgcagtcattttttccatgcaggctgtcttaagaaatggctgtatgtccaggagacctgccctctgtgccactgccatctgaaaaactcctcccagcttccaggattaggaactgagccagttctacagcctcatgctggagctgagcaaaacgtcatgtttcaggaaggtactgaacccccaggccaggagcatactccagggaccaggatacaggaaggttccagggacaataatgagtacattgccagacgaccagataaccaggaaggggcttttgaccccaaagaatatcctcacagtgcgaaagatgaagcacatcctgttgaatcagcctagaggagaagcagcaggaatgatgctttgatactctggaggagaagttaactcaagatggaattcatgttctgatttgaggaatgaaaatgagatgatcaggcaggaaactgacattccaaggatctaatccaggaagtactctcagtggggaccacctgctttcatcccctgacattgtgggagaaattttgcaatgtatgctaatcaaaatgtatttatatgttctctgctgatgttttatagaggtttgtgaagaaaattcaacctcagcaacttcagaaactgcccctgatacgtgtgagagagaaataaaatcagattttgagtgttgaagggactgaggaagtgaggataaagagcatgaggacagcatggaaagaaggaggcagaagtggaactgaactttcactctccatgggacagatcaatctcattatcaagtctgaatagcaaccagccctctcctccaccccgtttctcctcagttaattggagctcagtcaggtgattattgagtcttgtacagcactgaaatgaaatcaaagatgaagaagcattgattgtattcaaagattgaagcacgctcatactttgtatgtgctttagggaaggggtgggtgggcacttgggccttgcgggtgcattcatgtaatctgagactcttgaactttatgacggagtcttcagtattttgatgtatatgaaacttttgttaaatatgttgtatacttcgctggctgtgtgaagtaaactaaaactctgatgaacactttggagtctgctttagtgaaggagaccaaagtgggaagggctttagggcactgatagaggccctgggtgtacttttcaatcctgtgtaatgtttaattcttgcaactgaatcaaaacagtgttaaattatggcaatatttgcactttgggaatgagtacataactgtatgatcacactctgcaaatgccacttttaaagctgttaatagactttgcaccttttctttgacaaggatgtgtcatatttaaatttttacattcatcatggctacaggtagaactggggaggggggaatgtaattttttatgggaattttgatatgaaaagaaactagtcatttatttatacaataggcttggctcaaaaagtgtttttcagacctcggtattcctaatgtgggatgtgactttattttatttttagtagcaaatttggatgtagactgacagacatagctgaatgtcttaataaatttaaatttgaagataattatgttttgttcttgtggtttgttgtcattataaagtgctttttttgaagttctgttcttaggaggttctgtttttaatttagttggacttacatgttgatccttgtcagaaatgccctgtagatggcaaaactctttgattgaaaaggaccatttcttttgaaatcttctacacccagtgttagcaaacttacctgtgcttcagaagtgtttgggaagctttttattttaaaaaagtacacatttctgaaccttacttctgattcagattgaatcagccttttggggtgcctgagcatttcagagcttctatccagctagcctagcactaaggcagtatgacttgttggcggggggaaagtatctaggctagaattcatttctccccaggtgtagctggaagtttatcatctttttggtgctccgtgttaggcagaagacaaagcagatagctccctctagtggtaggaaggctgcttatccaaagacctagcag

SEQ ID NO: 118542 - DNA, 1037 bp, Homo sapiens
tggtatgaggaaaattaagatggagttgatgaggtttggtgacctaaggaataagggaaaaagatgaatcaaaaaattgattactcatcagaatcattttaggaaagtcacgtctgacggtgtggctttttgttttctatgcctggattactaagatcacccacattttagtcatcagtgtcttctctttagagttgattttttatttattaaaacttttttttcccctggatactcttctgtatatttgaaatattgcaccctaaaaacatcaggaatgtgttattgtttaaagcctatgaaaaaagtatcttagtgatcatatttcaagatacgtacatttttttttttttttcaggttctgggaacactttttatttatgtcttatttatggttgaggaattcagaaaagagccagtggaaaacatggatgatgtcatctactatgtgaatggcacttaccgcctgctggagtttcttgtggccctctgtgtggtggcctatggcgtctcagagaccatctttggagaatggacagtgatgggctcaatgatcatcttcattcattcctactataacgtgtggcttcgggcccagctggggtggaagagctttcttctccgcagggatgctgtgaataagattaaatcgttacccattgctacgaaagagcagcttgagaaacacaatgatatttgtgccatctgttatcaggtaactccttcaataagaatgtgtttgggtaagtcatacagtgtatcccttgggactgtaaccatattaaccaaattcaacttaaatttctaggcaaaattatcttctggattaaaaaaaatggacctcagaaattatattaaagacctgataaaatatttccattttatttctaaattaagttttaaatttagtcccttgggttctaatgtattgttgttttcaacattattgctcacccataaataaaggaaaaacaggtcaggtgcattttatatttactcctgaatacacactcacacggactattgaatatactatc

SEQ ID NO: 118543 - DNA, 1040 bp, Homo sapiens
tgagcgcaattaaatagccacttagtagatctgaaaagtagatttctttgacctaagtacaattagtattttgtcatctctgtcaatgtcatctgttattaattacactaattaatttagtatatattgataaaactaatatttagaaaagagaaaaaatatgttgttccactagtataagaatcagtggatggcagttgtgggtcttcccaggatactgaactatcctcactactggctttctccaaaattagatgcagaggagatttagagaaaaaggagcaaactgagaagtgttgtatgtgggccggggtactttgaattggtgtctgtgttattccttgtggctgcggctgcattaacctgaggcgggagaggctgccctcttggctgtgggaggaaaaatagacatgaactattctattctgttcttccctcccaccattgcctacagtaataagagactaaccatcagctacatgccagtatgttttaaaacaaatgaaataaagttaagagaaaaattccacttaccacaactgactcaagaactaaaaagttgaatagttctataacagttaaagaaattaaagcagttggcaaacttcttgagccagatgatattacaggcaagttctaccaaattccaaagaacagttatccctattttatttatttatttatttatttatttttagagatggaatctcgctatgttgcccaggctggactcgaactcctgggctcaagcagtcctcctgcctcagccttctgtggagctgggacacatgtgcacaccaccacacttggcagattatttaaaacaaatactttcaaactataagaggaataccccccaagtccactctgtgaagccatcgtaatcccaatattgaaataaaccagacaatttttaaagtatttcactcatggcaggagatattgcgaggcatttgtaatgttggcttaaggtagaccagtggaatagagaccacagactgacccacatatgggtggaactctggtatatgacagaagtg

SEQ ID NO: 118544 - DNA, 1054 bp, Homo sapiens
tgttaataataatgcaaaattagtaagttttaaaaaacatgctatttattaactatataggctaactttaaaggaatttagctgaaacagtcttgcaatcaaagaaaagctatttaatattttacttctgatttgactcaagtgtttaaagtgtttattgatggtgatgcaagaagttttcctatcttacgtttttatttaggtagtggaggtatatggccttctcgccttgggaatgtccctgtggaatcaactggtagtccctgttcttttcatggttttctggctcgtcttatttgctcttcagatttactcctatttcagtactcgagatcagcctgcatcacgtgagaggcttcttttcctttttctgacaaggtaattaataagagcctatgatactatatataaccttagaaagagaaaactttgatctaggaatagtaagttttgcagattacttttatcgttcatgttacacaacttcgtattttgttaagataggattttcattcactggatacctaggtttggcaatgcagggaggtgctaacataataatgtggtttatttggctgcactatggaccagagtgtagcaaatgatttgtggaaaggtacatagcaaatcgtaaaagtattttttcaatttcaagttaaaattattgggtcaatcagaaaaaagtatattataaaaataacatttattgagtatttaaaatgtaccataccattaaacactttgcctcacattaatctttacaacgaccctaagagataggtgcctttattataattaccattttatagctgaagaaactgtaccaggaataacttgccccaggtaacactgccaaaagaagcagaactggcactcagacccacctgagttcgaagcctgtgacttactctctatactttgcctttgtccctgttgacttcagtatcgagaaagagtccggtaattggtgaaatgggtagataatagtactttactgtctaacccaggggtgttcaatctttcggctttcctgggccacattggaagaagaatt

SEQ ID NO: 118545 - DNA, 1066 bp, Homo sapiens
tattgttgcagtatgatcttgaacaagtaattatatctcttggattttatgctttcacctatagaccagaacagttaaatattgcgtacctttggaaaagaagttatgtataaacattagcaactgaattgtcacaatactgaattagacattgtttaaagttttcttcatattacacatggcatcacagacgaccagtggagatttatgctgctctttccagatcagccctacagaattagtattcaaaattcacagaacatgtgaatatgtaattatagtcagatgaagtttaagtttgatttaaaatattatctacgagattttagttagacttcttcaaaagttgtgttattatccttatcaacagtgttttttgtttgtttttattttgtggatgccaaatactcaaaattaaatgtattctattccctattttaggtcagttggtggtgtgtactttatgctcctgtgtcatgaaaacaaagcagatttggctgttttcagctcacatgcttcctctgctagcacgactctgccttgttcctttggagacaattgttatcatcaataaatttgctatgatttttactggattggaagttctctattttcttgggtctaatcttttggtaccttataaccttgctaaatctgcatacagagaattggttcaggtaagactgctgacaaccacaaacaggtagataaaattctacataaatgttaagtacattaaagttatagttcatttttatttcacagttatggtaccattcatttttgcagtttcaaaacagctgctattttcagcccaattaggagcatctgaaagattcttgattatgttctattgagaaggcagtaaagtgaagtggttctcttaaagcagatttatctgagatcgaaccctgatgctgctgttcactagctgtgtaaccttgtgataattgcgttactttctgtaaaacggagctaataatgaaagctgtgctttcctcatagagttctgtgagatttaaatgagtttagtaccaggcagacaatgttccatatgtgttagcta

SEQ ID NO: 118546 - DNA, 1037 bp, Homo sapiens
aagatatttgccaagttagaaagcttgtaaagttttagtttatgatgcatatacttgtattataaatatgaagcatatttcttaaaactcttcttatcagtggccatggtcttctgtttacttaactaagattcaactttccaaagtccataaactattaaggagcatgttttcttccaacttagattttaaaataattttctggtgtttttcttcatttcagtaacaaacttttttgaaaaactaggtaattttaatatgccatgatttcttagggttgccaacctcttggagatatttctaatagtggaatcctgaaatctaaagagtacattgggattttggtttatgcagagttaaaagttgaaataggcaaatcagaagacaaacaacttattcttttggaacttcaggggaaattccactaacaatatgactccttccttcttttacgtcagcaggagtagtcttctcttaaatacgccatatgagtcatattcttctatgaaagaagataaagggagcctgtaaccccagcactgagcaccacatgtgctggcatagacttaagggaattttcagagcttagaggaagtttacattgtgctcaacaaggacatttaaatttcatagctataaacacagtgaaagccagatcatttggtggcctcttgttttctatataattaggagtttttcttttctttatgcctttatgattatttttcacattactttagtatcagttttttaaaggccaaaattaatgctttgtgagataaaataccgtatgtgtttatgacatagtagattgttgtaagtgtttggtcttatgtaaaaatggttgacatttttgtatttttctaacacaaattgaattttccttattcaaaatgcttggcaccagaagtgttttggatttctgatttttttacattttggaatatctgcattatattactgtttggaaatccttaatcccaaaatctgaaatccaaaatactccaataagcattttcttggagcataatgttaga

SEQ ID NO: 118547 - DNA, 1023 bp, Homo sapiens
tagataagtttctgggggaacacatggtgtttggttacatggacaagctctttagcagtgatttctgatattttggtgcatccgtcgcctgaggagtgtatgctgtacccaatgtgcagtcttttatccttcacccacctctcacctttccaggaggccagaattccactatatcattcttgtgccttttcagcctgcaaaatctaaaactacattgtccaaaactagccacatgtggctggttagcacttgcagtgtggtgaattgagattaaggtgtgctgtatgtgtaaagcacatactcaattttgaagacttggtacaaaccaggttaacttttaatacatcttgttaacttttaatatagattgaatgtctatatgatgatgtttaggatatgttaggttatataaaatatattgttgatttcacttgtttctttttactttttgaaatgacactaatagaaaatttaaaattatatttggcttacattataattctaatctgatataaaggactagcaatagactagttgcttgttgagtgttttgactgtggaatgaaaatgccttatagggttttcctgtatcttctgatacaggaaattgtagagcaaaggatgtaagtttcttgtgaactagacagtggccccgaaagtctgtgtaggattttcttgggtcctgttcaagaaggccttttagatggatgagaagacctcaacagggattgaccttccagattcccaggagctgagaaaagagccaaaaatggccagttgagggtgtataccaagcaccaagggtactgctgcaggtgagagagccacagtgataggaacggtttcagaagaacccataaaagggtccaggggaaaataaatcagttttagatacctcaagtctaggaagcaccagtaacaaccacatcattgtaagagtccagttaagtaggaacctgcctacttccctccctctccttcttccctacccacttcaatccttggtaagtcagagagagaggg

SEQ ID NO: 118548 - DNA, 1520 bp, Homo sapiens
acttgattgcctaatgggaagtcatttcatggaaaaagtaaatacagccatatgagtttgtttggaaatacttgaaatgttctcttttaaatacaatgaataaagcattaaaagttgaaaaaaagggaagaatttttttacacaaacttcccttctttgatgccaaaaatactttagacaaactgtcttccagtactcccatgtaacttactgataataaactaaattctccctggttgtgcttcctgcctgttttctgagtgtgtaaaggctctggttattacttaaagcttactatttctcagtagtcacacgttaaatgagttaaattttaaaaggaatattttgtttgatgtaaaatttgcttcaaagtaaatatgtagcctacttaaatattataattatcttagatttcatatagagttgaaaatgataatttttaagggttgtactcctatcccccagttttctaactagtttgtggttctacttgggactaataaaatataatcggggccaaaactttgagggaaataagatgagggtggggtgatggtggtggaagatagccaaaagagatgtttagtgtaatatcactagatgtgattggttagtgtagtagagttgagagagatcagctctcaattgggtttttactgggcataaaatatttaataaggccatgaaaagaaagaaaatttcataatgtggagctttggcagctttctctgtatggtaaaattccatttcaataagttgtgtctgtttctagtgcacagaaaacagagatgaaggccatttatatataattcttcatatctaaatttttccttagatatggaaaggggtatcattaacataatatgcttttataagcatattgtgattccgctaggaatgtatctaatatatacattctaatcaattttcttatttagggactatgttcggagtgaactggagtttgcctatgagggaccaatgtatttagaacctctctctatgaatcggtttaccacagccttaataggtaagtattataaaagaattaaagtgtaggtaggaaccgaccagtcttactaacttataaaattcatgcatactcatttttttttaaaacggaattctcaaaagtgattcatggggacttttcccacatatacccattgtttggtggttttttttttttaagtcttcttttccccatgtatagattatgtatttatagtcatattgtacatagtgcacagttgcttgtgtttttttaagggttttttaagtatttgagaagattaatttttaaatagagctaattattactttgaaagattaaaatgaaacacgtagtatcttaaatttacttattgctgttgaaagccatgaccttattgtcaaaaatgaatgtccggaaacatcaagaacttgagatgtgattgaaatattcaggtagcagaatgttaaaaatagaagtgttggctaaggcctaaaaacaatatagatacaatttaaagtgaagtacc

SEQ ID NO: 118549 - DNA, 1057 bp, Homo sapiens
ttgtggctttctccttggggatagtgctcttggagctgacctctctcccttttctaatgtaaaattcgtataacataaaattaatcattttaaagtgagcagttcagtggcatatagtacattcataatgttgtgcagctgtcacctttatctaattctaaaacatttttgtcacccaaaacaaaactcagtactcattaagccgttactctcatctccccttctccccagcccctggcaaccaccaatctgtgttttgtctgtatggatttttcctggcccctgtttaaactgtatccattggagagagatatgctatgaccaaaaagaaattattgggctttaaaggtctggatagtactgacactcagagttgtatctcttttaggtataaatttatttttcaaatagcattttaaaatactttgtattaatactatttatatatgcattttgttctaatttcataattcttttaattttttagttttctaactatataattccattgatggttacctatagtaatcagatatttatgtgttatttgcatttgtgtctttctacatgaaaacagggttactcaatattgcacagttgacattttggactggatgattttttgttctaggggctagcctttgcattgacgaatatttagcagcatctttggcctttacacactaggtgctagtaatacctctccccaattgtgacaaccaaaaatgtttccagaggttgtagaatatcccctcaggagcaaaattgccccttggttgacaaccactgcattacaataattcttcctgagaatttggcttcctctttcagtagaaagagacaattaatacattatgtgttagaaaccatcatctaagagtgataaaggagaattgctagatcacccatataacttagtcatgcatttttataatctcagaaactgttttaattcttttaacaatttttagttttaagttttgattcttttttgcaaatacccttccggctgattgtgtgagggtctttccttgtttggctatgcagtgctaaagga

SEQ ID NO: 118550 - DNA, 1063 bp, Homo sapiens
tagatcttgtacattccttgtggccccagtttgagttaaaagaggggaggctgttatacaggactagggacgtagatttttcagtttattagtgccttggggtgattatcagccttccacaagtgaaaaaacatttaagaaggaaaatattttattcagttataagtagattggcaggaattcttgtttctgaagatattaaaacattctaccttttaagtcttctgaaatgaaaaattgtaatgcttctcttgaatagctcacctgagtcttaagagaatcatatgttgttgttaaaagttagaattttatgactcttgccttgaactaatttttcacctaaaatgactcatggaattttggataattcccactttggatccttcttatttaggcttactgtcttgtttttcttatgttgtgaatgaccatccctgttaggactgatttaccaagaattctcaatgccagcatgagatacctggaatttgtgcataagtaagatatagagatttttgttaaccctgattcttatttcagttattctctacagtttgggatgggatgcccagatcctccttttagaagtgacagctccatagtggttgtgtggcatactaggtagtttagctgtcaccaaaactactgccttgactctggcatgctaagctgagctggcctaaagagagagtctgcaggctttctaggcctggctgtttttactgaggtggggctttttggtgagtcagccaaatggaggattttggaggactgtattgaaagagaggaatcgagcaaaggggaaacgttctaaggggcctagggatgatactaattttgaggctatgatgaatgatacagacttaaattgaacaggaatgtggggggcagtacagtattggagagctaatcctgggatcctagaggaggacaaagtaaggagagcgagtgggaggaaaccacttaacatcagggctgtcattgtggcctaaaggttgatcatttattcttctggaatgcagacctcccttagggtcctataatcacagcaaatcgcaaagta

SEQ ID NO: 118551 - DNA, 2519 bp, Homo sapiens
aaaagccctgcacattctttgaaacaaaggtaaggagtgatgtcagggggaacgactgaaagtataggagatagagagtcttcaggggttggagaaataaggtcttaaatcacatggaaggggcagccttggaaagagacattaagacacccagtttttcctctgggactagaaagaaagagagaattggcataaaacaagtaagttgatatcaaggaaaggtagatgaagaaaggagttgtgttacacatttgtgtgatatatttgattattaggtagagaaatctacaaaagaagtgaaaaacacaatacattttcaacaacaaaaaatccataggggtgtcactatgctaaacttactttggtaagtataataaaaaacctcagaaagtactgaaacctatttggaaaattatttgtctcaagctctttcttttattgtaattaattgggaaactaaattaaaattgtattttatttatctttctggtacaggttatatcttaagtgtggtgctgctaacattgcccaggcagcatctggttcagctttatctatattttttgactgctctgctcctctatgctggacatcaaatttccaggtaagaatatgaccccatttttgaaatgtatgattgaatttaaagttttcttttgccaataaaatacttttcatgaacactgttaagtaaagctaaggctttggtaggtccaaaactggtttgatactcattttccaaatcttacacaggattaatagctggtttatgctgacattttatttctgcttttaaaaacaagcttaacatgaaacaagccttaaggttatgtttataaagatatccttgaactggctgggcgtggtggctcacacctgtaatcccagcgctttgggaggcgggtggatcacctcaggtcaggagttcgggaccagcctggccaacatggtgaaacctcgtctctactaaaaatacaaaaattagccgggcatggtggcgggcgcctgtaatcccatctactcgggaggatatccttgaactttcctgtattgcctgataaaagaatttctaaaagtaggctgtaggagcattttaacaattatagacttcattactttaggaaatcaatttatgatgtgtaagaatcagcataagatgcagccatgtggagtgaatgattgatatacattatcttgtaaggttgattgtatagctaaccttctatctctttagccatattgtctgtgtacctaagtctgctagatctaaattttaagacttgggtctgccaatgaatatgagctttctactttgcaacagaatgttaaaatataggtggaccaaaagttacactatgaagtagtgggttggaatatattttggaggtataatttcttttgaaacttaaattttatgatttttgatagaaaggcatttaccatattaaaatatattcccaattctaagaggagtgaccttgcatatagtacaagccataataagagtctgaaacagattttggggtagttgaaatttaatcttagaagtagcatttttacattattagaattacattgttgagtttttaaaaacattaactttttctgattataaaattatggtgctcactatggacaatttttggaaaatacagaaaatgtaaaggcatttaataatcgtttgaaattataccacccagagatagatgtgttaatattctggtactttatttcagtttttaaaatactgttcaattctcaccacttctgtggatatgaaaggatgagaataactaaaatcactgggtttttcacccctcttgttgaaacaggaccaccaattctctttaatgttttgtctaattgtttctcaaagtcccagggtgtttcccagaagcttactcttcttgcattttcctcctttattccttcctggttgattttctatgctcaaaatggtgcctggaggatggtgtcttactctttaacttctgccaccatcctgcccagggtaggtcctctgatgtcaaagttgcaaaatctggagctggcagagtagtgttgcatttcttgcaatcctcacaatgtttaaatcaagctgtgttcccttcaagaatggagacagtgacattccccgttttgcatgacagaagtatgtcactgtgtcttagactccttcatgaaaacaacttagaccttgtcctgtagcatccctctccatagagccaaactaggagtccaagcaccaatactgatacagacatgatgcgtttctcatcctagtaccaccagcccccacacctctgttcctgtggccttaccccgatacctctgagtctcagctcaggctgaggatggagacactttcccatctttgcttactcttttgtaaacaaaaattgtatctatagagtgtaatgcagtcattagggtatactgagctctggagtaactgttctattttataaatgagtgcctgggcacttatttttcgatagatggatggtttggataggttc

SEQ ID NO: 118552 - DNA, 1049 bp, Homo sapiens
catagttttgtacagtgtgtgacaacctattagattcgtgaaagggtatctaaaagcgatttgtgttgactttttatttttatatattgtgtcttctgaattttaggtcttctccaagaaaaaaaaaaagaaaaaaaaaaacaacatggctgcaaaggagaaactggaggcagtgttaaatgtggccctgagggtgccaagcatcatgctgttggatgtcctgtacagatgggatgtcagctcctttttccagcagatccaaagaagtagccttagtaataaccctcttttccagtataagtatttggctcttaatatgcattatgtaggtgagtgtctacatcacattttctaatcttctagtgagcattctgatttatgtcttagtatctttttgaatttgggtaaaatgaagttcattttcattaagatgatagtgatatagttattgatgagtgtttatgaatcttgatagttttgtcttatcattgcacatgaattattaaggctacaagaaagtaagcagtattggatttattttactggataaaactggaaggcagaagaaaacattctagattttaatatgatgaaatataaacaatgagaaatacttttagagacatttggccccttctaatttgtccttgttttggggtttggtagtaattcagaaagtaagctttttaaaatgcaacattctttattgttccctgagataaacgaaaacattaacatcagctgaagataaagtgttcagttaaatgaaatttgggaaatgatactataatactttgttccataaaaaaaatcctcctggaactataattttttttttttttgcttgaatcccctttcaagaaaaatggaactatcattgatatgctatggggttagtggtaaaaataatgataagagattgaagaaattaaagtcaagaaatacaagcatgaaacagataaaatttacctagaataaaaatcatgatccttactttttaggttttggtttatttgtaatgtatatagcaatatattttattaatgttg

SEQ ID NO: 118553 - DNA, 1057 bp, Homo sapiens
aactcctctacgttggggaggggaaaacatacattagcctgttttgaaccttagaccaagacaagacaaacacacaaacaccatttaatttcatactgcaataaaattctttgtaccaaaccatgggatcaaaattgttacagatactcagtgaacagttccaatgcattcattcatccagtcacttactccacaggggtttgagtgcctgcacttggtgctgggcacggctgagccatcccagacgccaaggagtttacagtctagtccagtcagtgacgaggttaaaacgaattctcgcatcattgctactgcgaatgcaccgggacaggatcagcccttcaaattctcccacgtggtccctgcaggtgagtgtgggtgtgagcgcttgcggcccgtggtgtttgggagtgagagagcacgtgtgtcagaatggcgcctgtcacagtgcgcgtccaggtgtctctgcagtacgcctctccatagccacccgagccgggctgtatgggcttggctaggcttatgtctcccgcccacgcaccggaggcggtgcggaaagcactccgcgggcgcgattgtgagtgagcgcgggcgcgcgcgggaggggcgcgccgcgctggctgggccgcgcgcaggcgcagagtgcggaagtcgggccgcggccgccgcagagcgccgggggcgggaggagcaaacgcaggaggccatggccgccgacgccggcgccggctgctaaggggctcggcccgcgagcgcctgctgccgcggacgatggtgaccgtacgggccgggccgctgccgctgccgctgcctccgcctccccagaagcaacatccgaggctcggcgcagaagagccgccgctgtgagccgtgccgtaccggcccccgccgccgcccgaggagaacgggagggcgggcgagagagccggggagttgcggagcccgcccgccggcagcgccgctccccagggagggagtccgcagcctgaggtgaccacgccgcccgcccggccccttcccatccccgcgccccccggccgcttcccacggcctccct

SEQ ID NO: 118554 - DNA, 1036 bp, Homo sapiens
cggcctttttggttctggagcctccacctgcctcctaatgctcccctaagtcagttagcacagcccccgaccctgcaccacctcgcagttgttgctggtgtgcggttctcgccggagttcttagtgcttcacggttatcttttgctgggattgttgaaagttaacctcccgttaattcccaaagtgttacttttactgctatactttaaaatttcttcatttgccactttttaggtttgtggtcccgggcaagtttaatttcttttcaggattctcatttgtataatgaggacaacagctgttggttcaggattgtgaagcttcaatgagataattgtttagcatgtttttattccatcatgaacaccatttgtattgtgttttacagtttacaaagtgctgtcacaggtgttacttcataccttaacactactcctgtccagtgaatattagtagcctcatcttgttgagaagactgaggccaagaggtggattgactaggcaaagtcaacacagtatgttaggtagaactccaacctaaacagctattcttgaccctaggttgaccatatggaagtgtattctttgcttgcttgtttgggtttgccaacttcactcctccccacaccccaaatcatttttcagcttataaatctgatgggatctgaaatgatacaaaatactaagaaagaaggttaaatgtgaaagcaaaatagctcatgcatttatatcacactgcttcattggtgtgaacggtcttaatgatgaaataaggttcagtaacttttaaacaaatcttaaagacatatgcatttacaatttttatggtgtttgtttcgcttggccctttaaggcatttgccaacttggaatttccacttgtgggataggtgcttcgtaacgtttttatgctgctttattaaccatatagagcccatgccctctggcacattttttttaaggctgaaaacattgaagagcctgtagtactgactctcaaatttgagcattcatcagaggtgaggaggactgacctt

SEQ ID NO: 118555 - DNA, 1822 bp, Homo sapiens
gatggctaagtgggagagatctgggatctgaacccaggtcatctggctctagaatctgtgttcttaactacaccacactacctttcaaatgttaaatgaacatggatggtctgtcagggaaggacttgcttgtagcatcaacctgaccaaatagaacaggaggaatggtagctcataattgcacatttccagttgaacagtgagactcagagtattagaaagtagtaactctaagccaaaaattaggagtgtgggggaatttaactttgagtcctagtatcttttggtgttctggtagcactcctgtatggacaaaaatcctctctatcataagttgtaaaataaggcttaaactgtacacataaaacttaaaagtttggcttcaataaacagtatctattttaacttgttcatttttgtcttcctttccaggtatttttttttctgaaggaaagctgcttcctcatatgtttcaagaatggctctccctatcattgtaaaatggggtggacaggagtattcagtgaccacactttcagaagatgatactgtgctcgatctcaaacagtttctcaagacccttacaggagttcttccagaacgccaaaagttacttggactcaaagttaaaggtaattctctcccctcttcagattttttgcattgaatttttagtattatgaattttaataattattttgaatataattgtttaataatttatacttgctatttgtagtttagtaagtctctccctttcgagatttctctggtagaaatattcttaaaattgttttagtggtaaaagtaagaatattaaagtgttctcgaaaataccatgattattaagattacttttgatgttttagacagtcagtatttgcttgttaaacctttggcacagaagtcccggatgaaactcatttattttctgacatctaccttttagcacagtgtttcgttgtaacgagggcctcgtactcttcccaaattatcttttctgtttcaaaagtaaagacaacatttaaaaattacaggcagcattcatatccagtttaaaagggattttttttatggtgttttgtgattatcatattgaagagtgagttttgagtaacagtaaatctgcagttttcttaggcactcaatttttaaggcttcctggaaaacagtaatattcatcttgaacaacagaataaaacatgaattaattttgtttaggtagttgaataaaggtgttcatctaacatagaattggggagaaaataacccttgtattaattttgacttcttcgtgtcttagatatgactaattcagcagaaacaatttgttaatgtaggaaaaaacaaaacaacaaaaattgctgtgacatctgtaccaaaccttttaatgttagggttttatataatggaatagtgaaaccagcacctgaactttagtgagaaaacagtcatttgcttgtattgtaggcaaacctgcagaaaatgatgttaagcttggagctctcaaactgaaaccaaatactaaaatcatgatgatgggaactcgtgaggagagcttggtaaatgtttactttttgttaccatttgtccatttgaagatattatgatttatactacactgttgtattatagttttaattgtggtaaaattgtcagtctagcaatcaatgaaaaataaaacccgcaccgtgaatgtgttattaactgtataagtatagtagtagcacaaatgatcaaatttaatatggtaaatctgcccaggaaacatacataacgaattattaattgtggaaattttccagtatgggcttaaaagact

SEQ ID NO: 118556 - DNA, 1395 bp, Homo sapiens
ttgaaagacatctttttgtcagccaacgtaattcagtctgaagcagtttgcaatgaaatgtttatgtttgcatttcgtaatatattacatttaataataattggtattaggtacttgttcatgatggtaaactaataattatttatgatcaattttcttttagaccacaggtcttgtgcagagactggggtagaattaatgcggccatatcttcatgaatttctaacatctgcctatgaagattatgacattgttatttggtgtaagctgtatttttttgtttagatttccgtggaaataggttgttccatatattattgtgctgtataaaatgtgacttaaaatgacctgtgtttaaatatgaaatagttttcattttttagcaaatttctaaaatgaagcatgtatcacaatataaacttaaacatatattggccaaataccagtgagatagttaatttaactataggacatgagtacattatagtgtaagaataaaaatgactaattttcccaatgaccccaccttgatttgaagtttttccttctgattttttttttttttaactaggcacatatctttagggtctcgctgtgttgcccagactggttttgaactcctgggctcaagtgatcctcctgccttggcctcccaaagtgctggattacaggcataagccaatgtgcccagcctttccttctgatctttgctgtgaaattcttgatgcttcagaatatttttcttttctccttttttcctgactccagttttaaaatacttggaaaaaggtgtttaaaacaaaatcacagtgatatagttctctggaaataaaggcaacttgaattacttaaggaaaaattaatatgtggactaaagccagtgacattgaaattgtggtctgcggaccatttcaagaatgtacaggtctgtgataagatactgagtttgttccaagaagtaaatatactgtaatcgtaagcacactattcagttcaattaacgttttttggtagcaagattttcttggaaaatgaagcaatgcattgatttacatccctcctccccacaaatatttaaagttgcctcttggcaatgtcataagcagagaagagttatcctgactgaattaaatgaagtcccatcaagtaaaggtgctacatttcattgtactaggtctttgagagaaattatgttagttgttgcagtctgtaaattcattttgtatttttccttataatcagagtacttccgttgtttgtgatatgtgagttccatgtgagttcacagctgttaagattaaaattattgtcaaaatatataattttctggtttagtaagataaggtgaagaaagcttgctggtttgtttagcaactttgacatctaagatgatat

SEQ ID NO: 118557 - DNA, 1052 bp, Homo sapiens
aaatttatctcactgtactgttagatcaagctggtattggggttaaatttttatgaataaaataatgtgaatgaaattaattagaagcaactagaatgataggaggcgggaaaggctaagtagttttgcaaagtagagtagctgtgtatggattcaagtgcaataagaaagctggtgttgtcaggttcagattgaaaagataatgttaggtaaaataggtagaagagtttgtaatttgtaaacattatacatgactttctatttaggctaatataaaagtaatttttagtatttatgttcttggtgatattttaacctcattaactctaattgaaatgatagtatagatttgttagttttccttatcacattgtgatgtgttgagtaatgtttgtttcctaatagataaggccttttatgaaagcgcacctaaatcgtgataaagacaaagaacttttaaaattaactcagtacctcaaggagatagcaaaattagatgactttttggatctaaatcacaaatattgggaaaggtaagttttaattgcttatttattttctctttacatcaatgaagaaaaaattatcatttttcatcagtgaccccagtatatatatagctgtcttaatttttatttaaaataggtgacttctaaaaacattttctaatccagtgacctacccccaaaagtattttcccctttcatcttaacctctaacttgttcataaacatacctcttgtaaactctttaatacttctagaagagagaacttgagagactagcatatgttggtgatgctgcctgtaaattattttgtgatgttaggtaagctactcctttatgaatcacatggaatataatccctcttctcatactgtaacttaatgtcaggataagataaaacacatgtaaaaatttcataaatagtattaaaaattaccagtaacttgagtgtagcagagaaattagaaaagtttatcctactaaaaaaacaattactcataattttcctttttaaagataaccactgttaccatcttggtatatag

SEQ ID NO: 118558 - DNA, 1022 bp, Homo sapiens
gatctgtatttggaagttacaatactagttaatatagtgactttcacattggaagtaaggcagtatggagtggtagtcaatgagtatgacctctggagccttgttttgaatctaggctcttccactttctagctgtgtgaatttgggcaaattgcttaacctctttgtgcctgtaaaataggaataattctaatagtaactcctcagagctgttgtgaagactaaatgaattaatacatgtacttagaactgtgcgtgcacataatcagtagatgtaagtgactattaagaatactcatcttgaaatgttttgtcattagaacaaactcctttgggagcaaagttaggttatcttcatgaatttagcatgatacagctttgacatctttattttatttcttgcagatatctctcaaagaagcaaggacagtagttacaagttatactggcagttattgaagatacttaagatccaagaacttcttgcttttatgctagaaatcattatgatagtgctggacactgaagcaaataccatactgcttatacttggtcttccagttttttgtaaatttaattttatattttttgaagatgatagcaatatgctaaaaaatgcttgtcccctatatgaatattctgttacgcttgaaaaatattttctccagcgttggttactgaccaccccaccctcccaccacacacacacacacacacacacacacacacacacacacacacacacaaagtggagaaaaatgtatactcaacaatgtcattttgtgactttggaaacaagttatgttttgtgtttttgtctcattgtgttattgtctgactaaatctaaaaccaaacccatgttgaaactagtacttttccctttaaaaacaaaccaaaaaaaaaaacaaaaaaaaactttttaattaaagaacctagtttgctatgcttaaaattaccaagaattttttatttctttgtcatagacacaatttctcttctgtatgccactagttacatttct

SEQ ID NO: 118559 - DNA, 1068 bp, Homo sapiens
tgaaaaggcaattcctgagacagactaatcacaccagaacaatgtgtgttcaccttcttgctaactggctagcagctgtttccagatgccccccattttggttatgtaagccgggctcacccacatgcaaagcccttctctatgaagctcagcagatgccattaacttctcttcattctgatgggatcagtctctgcttgcgagagccttgaaactgcagctctgcaatgctggcaccaaagtcagggcgcagagctgtctgcaaaggccaccctctgtccacagatgatgcaatgggtcagtgtctttctcaccatggggacagcagttgacatggaaacggttgttcttgcttctacacataaccattacgcctcacccaggcttaccaaatgttgaaaatatttgtctgcccagcatccattttttctacctctaggaactgcatcaagattatcttctgggaagtcatccttgctgaactcccaaacctgttgttttagatagtatgtgttctaccccagccctaagccgagcatgtgacttatacctggtcaaactaagtcacaggaagtttttagttatagacatgtgacccattctgtatccatgagtgtcagctctgggattctgctgaagtgattaggaaagtgacagggttttgctggctgttgtcaagctgatgaaatgagcctggagccgttggtgtcttatctttcccacaagcagcatagaacatgctagaaaatacagttcagaggaaaagcagagttgagggactgagagaaacacatttacactgatatgatttgagcatctggattcagcctcacctggatttaactacaattttagacttttcaattatatgaaaaaatttatgtcttttttgctgagggaagtttgaattaggtttctgtcacctgcaccccaaaaagttctgatgaatgtacagaaaagtcctgatgaaatgttctcccttcacagagattttcacaggaattgggcagaattagacataactatgaaagtgccagttttaagcaaccagtacctttctagaagtgc

SEQ ID NO: 118560 - DNA, 1096 bp, Homo sapiens
gcactgttttagtttctgcctaatttttgctatccaaacagaacacgaacggtggaacgtggaagagttacattaaaaacggcttcttttgttgcttttaagaagttctgggccaggcgcggtggcaggcgcctgtaatcccagctactcgggaggctgaggcaggagaatcgcttgaacccggacggcagaggttgcagtgagccgagatcgcgccactgcactccagcctgggcgacagactgagattaagtctcaaaaaaaaaaaaaaaaaaaaaagaatctggtaccagatttgaccagaaaaggggtctcagttaaaatgacgatttgacattattattacttatgataagctgtatttttaaataatgaattccagtgaaaggaaattacggtgtgttttttggctgtaatgcagaggtttgtttaggtttgaaacagaacttttaaaaatacaagcaccattatatagcagttttgttttgttttcccccagctttagcgtcacctccctcactgggcagcatgggggagaagtcagagaactgtggggttccagaggatctgttaaatggtttgaaggttacagatactcaggaagccgagtgtgctggccctccagttcctgatcccaaaaatcagcattcccagagtaagctgctcagggatgatgaggcccatctccaggaggaccagggagaagaggagtgttttcatgactgcagtgcctcatttgaggaggagccaggagcggacaaggttgagaacaaatctaatgaagatgtgaattcctctgaactagatgaagaatacctaatagaactggaaaaaaacatgtcggatgaagagaaacaggtaagtattttatttattgtgcaagatctgccacttacactgcattttaaaatgtggtcgatactgtatcatagaccacctcatctgtggtaaagaataacttgcccctttgtcttcttatggctttagtagtgttggatctgagataaatcggtggcgtgacagggaagcacttgagtgtgtctgcttaacaaagaaattttcattattttctgtgaaccttcagttatgttcatct

SEQ ID NO: 118561 - DNA, 1113 bp, Homo sapiens
ccctgggattatgcttaaatgggatttaaaatcctaggataccaccaacctcgatttcagataacaattacataaaaacagtttagtttcttcattgaataatcattccttgaggttcattaggatgcagtcaagatcatgagaatttttatttagaaaatggcactcaaagtccctttagtgtttgagaacacacgagagggcaggaattaggagtaaagagaaatcagactgggggtaggggtagggcaaatggattcatttgatccatgtttagttatttctcatatttgccaaagcattttagagttggaacctcccacgagcaatctgcttaagtaagaggagtgagggttcctgaacacagacttaagtcttttccacatgtaacctgtctgatatttcgctggtgaagatctgccatgtattttcctttttgagtattttctaaatctgttgtttgaattacattttataaactgcaatcatgtggccctaaaggaaaaatcatttaaaataaattgagcctgtctggcatttatggccttcagacatcagcatccagacaatgggaacaaatttcccaaaggatcattctgatagccaagttgattgagaggaggccattaacctagactatccagagactttggcccctgccgggtagactcagactgtaaagacggctgcttccgattcaggatagctctggagccttccccagattttccaaaaaagggagggggatgggggagcttttcccctaatttacatatttaattaaacttggccaggcacggtggctcctgtaatcccagcactttaggaggccaaggtaggaggattgcttgagcccaggagttcaaggccagcctaggcaacatggtgaaaccccatctccacaaaaaattagtcaggcatggtggcatgtgcctgcccatagtcccagctacatgggaggatcacttgagcccaagggttagaggctgcagtgagctatgatggtgccaccacactccagactgggcaacagagcatgaccctgtctcaaagaagagggaaaagagcattttctcacctatttttactaacaatgatgctctattttagcaa

SEQ ID NO: 118562 - DNA, 1238 bp, Homo sapiens
agaaatggctagtctggtatagaagctaaggatttgtttaggaaagcaggaagctcttgaatatgaatccaagctcagtggaaatgggctgagttgaattacatttagcaggtggctgctgccgttctagagagaagagacttggagggacctctgccctcactaccaggcagacctggcttggcagggtgccttgagcctcactggaacagcagttggttttcccagaactcaccccagaagcctgtgtcctctgatagcactggccagttaggacaggaggctttgattcccagagagagccagcaggactccactctcatctatgcaagcacaggctgagggtggatggcattaaagtgactgcactgctgagtggggaataggggctgggaactctcctggaagctttcatcatattaaaagtaggcatttctttaactgcaaagagatacttttatattttgtactcagtggtaaggcaagattaattggtaccttcctgcttctgttcattcctgtattcatttgagtttttgcttttacattacaggtaaattaaaagatcttgggaacttggttctccgaccttttgggctctccacggaaaatttccagatcaaacaggattcctctaccggctcgtactccatcaatttcgttcaaaatccaaataataacagataacaaagataacaaaagctttacaagctgacttggaattgtgtgctgcttgctgttagctaggggaaaggccctgccaatgtttaacttttaaaagcatcttatctaaaagaaaggctatccagtagagcccagtgctcccttgtccctcttttatgatcagggtgaaatgtacttcctgatgtaatgaacctaatttgatttccattttaaggtggtgtctgtgcagctggtgtccccgattctggctgtcctatgtccaggaagaagcccatttgttgaggctgaccttcctgatcatacacacacacagcccagcaaaagcctctcctgaaccaaacaaacctgttggttgggagactgcccagacatgattgatgacgggttcccgcctgctgtcccctccctgatcacacagctaacgaggctgcctccagcatttcctgatttcctctgtggtaataaaagctttctgtgcttaggtctgggttaggttgtgaattttgtcacgtaacgacaactaaggcagaagccttctctggctttgggagcag

SEQ ID NO: 118563 - DNA, 1072 bp, Homo sapiens
caggctggaatgcagtggtgccatcttggctcactgcagccttgacttcctgggctctggtgatcctcccacctcagcctcctaagtagctgggactacaggtgtgtaccaccatgcctggctaactttttgtatttttactaaagatagggtttcgccatgttgcccaggctggtctcaaactcctgggctaaagctatttgcccgcgttggcctcccaaagtgctgggattacaggcgtgagccacggcgcctggccagcaacatttcttaaagcactcccctactttcagttacataaaacgtcgtaggaactgcaactctcagcatttatggattacacaaacattcatgtctttggctatatccaagcagctctgaaggacagcgtatgaggtcttgtcattttgccgaagctcagatgtatgtccagtgccaccatgtccctaaagttatagggacatctataacatgtaggcttagtgactccccagcctccacatttagacatggtataacactgtctccttaagtacagttatttgtaaagtgagatgatgtgtgttttgcagggaatgggacaaggagcaaaaggctaaaaaacaaccacaacaaactggctgcagtgcttgtgatggaagggaagcacacatggaaaagcatagttttttgttttttgtttttttctttcagagacagggtctctcactgttacccaggctggagtgtggtggctcggtcatagctcactgcagcctcaaactcctgggctcaagtgatcctcctgcctcagcctcccaactagctggggctgaaagcatgtgccaccatgccttgcttggttttaaaacattttttggtagagatggggtcttagtatgttgactaggctaaggtcttgaactcctggtttcaagtgatcctcctgcctctgcctcccaaagtgttgggattacaggtgtgagccactgcacccagctagttcttagaaaaatggttgagatttttaaaataggtgaatttaacagcatggatccatgagtaaaatgaaagaatgaatccacagtgcact

SEQ ID NO: 118564 - DNA, 1056 bp, Homo sapiens
gtagcgacggggtttctctgttatccaggtagttctaaactcctgggcgaaagcaatcctcccacctcgccccccgcaggtgctgggattacaggcctgagccactgtgcccagctcataaactgccccttgaagggttgtaagcagtcattctcatgcgctaacgttattttcaccctacctcttgaactggctggtagcaagtaatccattttttttaattgactttttttcagagtccatgctaatcttctatcattccaattttagtatatgtgctgctgaagcaagcacagtaatcaatttttcattttcagaagcattaatggatctggtttagtgtgaggtcaggatagctctgcacacaacaggaggaagtgattgcaaattatagcttcctttccctgtacagcttttaattgtgcagttcactgaaggaacagatttttcagccacttctggtggaatgcgcacatacttttttaaaggaaatccaggtgatggaaggattaagcttgttactatcaagtaccgaggaagcaggctggcaagaatcctaactgaaatcacttcaaggagatttgactaagattgtatgggtatgtatcaagtacagagtatccacagataagatcagaggaagagtttctcttccctatcctcatccctcctgtattttttaaggggagggacgagcatatggaggaaaccggcacagtaatgaagggaagtgatcacagaaaacaacaggaaggaacatacaatccagctggcagcgaccatcagctgcaggctcataaggctgcatctgaatgggggctgcgcagctgagagccaacagctccagcctttcctcttaagccaagggcaatctggagagagcacagataacaagcagaggaaacggatgagggctcgtcaagatatttcccatcctacgtggtgtctcagatttgcgctttggtcttgggggattattggactcttcctcttaaagatctttcccaagattaaagcaaccattcacttgcacaactgtcttaatcatagcctttc

SEQ ID NO: 118565 - DNA, 1013 bp, Homo sapiens
ttttatatttgatggtgccgtacttttaataataataaaactgaagttttttagtggcaatactgatttattttttaaaccagaaagataatccatattgattacttactacaaaaaagggaaaatatgccaaaaaataaaaaaccttaaaattcatatgaagcaacgtaacagataactgagcacttggctcaagtggtcagacttttcataatgttactgtgtaagtttggaattacctaataaccccaggctcaggattaacagaaggttctgggtgagttttaaaacatttaatatacctatgatttgttttacaacttgaagaaaaggcaggcagtcttgtgtctaatgagcttaatgcaaattctaattatactgcaaataatttaaagttttgattgcattctacaattgtctgtttggaaaattacatattatgaagtcattatatattttatcaaatcagaaaaagtcagctcaggaactgtagcagcagggagttctaaagatgacatgaactatactataggggtgccctactctatatggcctagggctttggtttgggtcagtcttgttctttcagatacataacaccagcagtactttcgggctcacttcaagaaccagataactctcccaaaccatgatacatgaagtgtataatcaagatttttaattaagctttagaattctttatttgtgtagagtgatggaaatgaccaagaagtaataatataaagcaaaagaattgggagagatcaggttttaagtatataaatattttttttttctcatggcatattctcaaaggtgttttgttacaaaccagattttcattttttaaaaaatgagacttggtggtatttaaaacctacacctaccatgttgctatttcactttcattgctttagttgcttaatatttaagctttgcttcatgctaccttttgtctgtatttcaatcttcataagcctattttgttttgtagacttgaatgataaaaattg

SEQ ID NO: 118566 - DNA, 1852 bp, Homo sapiens
gtgtgtagtatttgtccctagaggtcacttttcattgcttgaggagaaacatgatagaatacccagtgaaatgtattttgtagggcttgatctagtaagcgaaggaagcatgggaacaccggaaggcaacacaaaatcaagtcagttctgtcaaatcatggggaaggtacctcctgtgaaatgtttggaagttaaataatgggaaggacggagtggtttttctgttttccttgttgcattgtgtttgatgtgtttgttattattccactgaaataccatttttggtatgcatttgaccaaaaattcatctttctttccacggatcatctcttttggaactcaaactcgtgttggtacttgggtttccaggtttgagaggcataatcagggattgtagagggtttcagtgggcttctttctacttcgtagtattagacggaggttagtagtgttgatcattctggtcatgctatttagcagtaatttgtataagccttgccctttataaacagtgcgcttggagtcctgcttcttgttggaggtatggtgaagaggcctctgctgagaatcacgtttgctggtgtaacaagggatactggtccgtctaaccagtgtacatgtgttgtcttctagtatcaaaatggtgctcttcatgccttccgatgtgctgtgtctacttctggggaggcaccctccattcccttcttattttgctctttgcaagtatgtggacagtgtgacctgctgctgatttgtacatagcctggctctgtatataaatttgttccttaaaactgtaggctagtctgtgctagtagaaggctgttggtgcttcatagcagtccccagcaactaagctgactctcagagcactgtactgtgaaatggcgatataaggaacaaagttaaaattcccctgttactaggcatttataagcaagtattttaaaaaaacactcaagtgcacattgattatgtaaagatgacagccattttacttgtgttggaaactggcctgataatacttcagaaataacatgaatatttctgctggtttagagtggcagtaagttgttttctcaaaacaacatcggtcaggtttaaccgatttaaaagaaaaaatcaggtgtgatcccacaatctatgtagggcttaaacaacaaggacatcattttcctcatataattacttgtgcttaacgacattttcttccttttctttactatatttcagcacaaagacattagcaggctgctggtttcatggacctgtaccacaatgacacagagaacaccagagcatcaggactgaatgaaattggagtttttaaagctgcactaagaagtaaatgttaaggcagtggttaaaaacaacagtctataaaggggcacttgcaaattgtgctgtcttaaaccgaagaaaaggtattagggaatattttataaaaaataaacttgcaataaattatgcatgagatgaggagaaaaatgatgtgaattacacacgtaagaactcacttgaattttatatatgaagaaacactgacagtaacttctttggaatgtgaagttcttatcagtacagtttggacaggcctaaaaggcatgggatgatgcagaaatgctgaattatttttcatacttaaactttgtgctttctccaaggtttaggttaatcagttcagatatgagcaaaggtatttctaaaatggctcttctatgaaaagcaatagtcacatatgccaaggccaatgtttccttcaaggtgccagtagaaacaacagaaaataacatcctgctgaaaggatggcaaagtgccccgccccaccccacaaacacaatttggatctttt

SEQ ID NO: 118567 - DNA, 1028 bp, Homo sapiens
ttttcgtttttattgctgctcgtatgattgagtagattgtctcctctttctaggagggaaatgccacacattccaacgccttgaactgtgtgtggtttggccatattttccagaggatagtcatttttacccatgggtcattttggggatgctgttaatcacaaatctgtcatctcccccaacagtttagttttagcaaggaatctggctgagtgtggcacatcttggtgtgagtcctggtatactgggaagaattacatgcagtttgtctaaaagagctggttagaaaaatagcactaaggttggaaagccagaagggctattgtaagatgagatactgttgatgcttttcctgcttgttcatgttgcatcatgctttactgtattaagaaaattcattttgagtgttcagtgagataatgtctaatgctcttaagtttttagtttttaattgtgggctttctttaagagcataaactctacttctttcgtgcacgctaagagggagattgagggttaccctgttctggtttgcccattacagttctgctgcttcccaagaatagttgccattgttgcacttaagctttctctcaaaggacaaaataagtaatttccgatgaaattgccgccttttcatgggtctctccctccacttactgcatcacagctgggtctcctggctcttcctaatggatatcctgtgctagtggtaaattctaaagaaaagcctcgagatcctaaaagcattgaggggaagattatcttaaacattagcacaaaagactcacaaaccaggcactgtggaccagggactggtttgttaatattttggcatttcagggggttgcaggtgaggaattgcacagggaaacatgagatcattctttgatacatcttgactctccttgcttaaaattgaaaagcagattctctagaatgattgttgaaacctaacaagttttacttgtagagggagaggttcaaaagataatttctttttttttttttttgagacggagtctcgc

SEQ ID NO: 118568 - DNA, 1050 bp, Homo sapiens
aaaatatgatagaatttttttattgcctgtggaaaaattttttgtaatgtgaaagtgtcatcgagttgagtgtaaaagaaagaaatggatacttaggagtatatatatataacttgccagtgatgcaggtgagtttaagcattcattaacatttttaggaccaggtgccttggctcatgcctataatcctagtactttgggagaccgaggcaggagcatcatttgagtccaggagtttgagaccagcttcggcaacatggtgaaactctgtctctacaaaaaatacaaaaaaataaggtgggctcggtggtgcacgcctgtagtcccagctacttgggaggctgaggtgggaggaccactttagcctgggaggctgaggctgctgttagccatcatcctgccactgcactccagcttgggcgacagagtgagaccctgtctcaaaacacaaaaaagatttttgcaacagtagtgcttaatagcaggcttttattgagcaaagaaccattccctttcacttttcaggcacatggctcaaagtacaagctcttgagccagatttgctggattcaaagcctgactttgatcagccacttacacactatgtgatcttaggcaggttactcccaatatcatcacatgtgaaataaggagaataatagtatctcctcataagataattgtgagaatttaaaagaatatttaaagcaataaaaaaaatgtcttgcatgaggctgtataaatacttgccatcattactaccactgcagtcactttgtgttgcacggtaaattctggtagctttcgatactatcattctgcaacatatactcagtataaatggaaatataacaatgttatttgtacctgaaaattttgagaaatcatagcatgattattcacaagtctctggaagtagcatggactcactagttttaataggcatttgcagaggttaactgaatcgaaggtcatgaggattatggttaaaggagacctgtgttaacatatttcaactcttgccccattcatttatttaacacacaaatt

SEQ ID NO: 118569 - DNA, 1056 bp, Homo sapiens
tttttaaagttgctttcatactttgtgtcttaacttttggatatctaatttcaatacttttagaaatttaaaatttagcagttttttgtggatttctaaatccaatttgaagtagttactatggaactcataatgaaaagattaatggagattgaaaatcaatagtcttgtcagctttcttaaggttattgactgattgcgaatttttgcagaagcaagtagaatttcttatggggaactcactcaatgctttttgattataataaacacacattttgaaaacatgtttcacttgagtagaacatattctttcctgcaaacagaaacaactatacttaaaaaaaaaattctttgaaattcacagtgtggttgagaagttataaggaactatcctaaaagattttccaagtatttgtttcagattaatgaacttgttcaatcaggtgtttttaaaagtttgaaatctaaagttcagaaagacttaaaagtcatcaaaatatgtaattccaaggctttgtgtaatgatctgggtgagttttaacagtagtttgaagtagacattactgatatggtcaagtgcttggtaaatgtgctgttgtggcataaaccaaattggatttgtttcagaagccatggggaaagagaagaaaaaaaaaacatgattgttgaatataaaaataacaatcagttttgtagaacacacctttgaggaaaaggttgagcatatcacaaatgatatgccaaatgaccccttcgttttaaactggcagtctggcatatttcatttgcagtttcagtagggaagcaagttttaaagaatctctctaatcttaaatgtgtattctaaactctaatagctgaatattaaaaacttttattccaatggaaatgtcttagataaatttgtccagtatctactgcagatggagatagagttgaattgggtagttgtagccactttatatttctctttgaaatgataaaaggcacttattcttgatatggagataacagaagtgggtattttttccccttggagtgggagtaaactggctt

SEQ ID NO: 118570 - DNA, 2508 bp, Homo sapiens
cagctgtttgtttttaccaaaaatgtagaacctaaagaaatgaaggtctttgaacttttgggggaagagatagtagatttttgtagtcttgttttttaatatgaaatagttttcgggaaaggttatataaataagcatcagatgttgtttacgtttaagaaattgaattatagatgttaacttaatgtcttctttttttcttccatttctttcaaaggtttgggccccatggtatccctgtgacagtatttcccaaaagggaatataaggataaaccagaagccatgccgctccaaagtaatacattccaagaagggacagaagtcaagtgtgaagcaaatggtgctgttcccgatgacccttctcctgtcccgcatcccgagctgagcttggctgaaagcctgtggacttccaaaccaccacctctcttccatgaaggagcaccttatcctccccctttgtttatcagggacacatataaccaatcaatacctcagccacctcctcggaaaattaagcgacccaaacgaaaaatgtacagggaagaacccacttcaataatgaatgctattaaactacgacccaggcaagttctgtgtgataaatgtaaaaacagtgttgttgctgaaaaaaaggaaattagaaaaggtagtagtgcaactgactcttctaaatatgaagataaaaaacggagaaatgaaagtgtaactactgtgaacaaaaaactgaaaactgaccataaagtggatgggaaaaaccaaaatgaaagccagaaaagaaatgctgtggttaaggtttcaaatattgctcacagcagaggcagagtagtaaaagtttctgctcaggcaaatacatcaaaagctcagttaagtactaaaaaagttctccagagtaagaacatggatcatgcgaaagctcgggaagtgttaaaaattgccaaagaaaaggcacaaaagaagcaaaatgaaacctctacttccaaaaatgcacattcaaaagtccatttcacacgtcgatatcagaatcctagctcaggttcccttccaccccgggttcgtttaaaaccacagaggtacaggaatgaagaaaatgactcttctctgaagacaggacttgagaaaatgcggagtggcaagatggcacccaagccccagtctcgctgcacctctacccgctcagcaggtgaggccccttcagaaaatcagagtccctcaaaaggccctgaagaggccagcagtgaggttcaggacacaaatgaagtgcatgtgcctggtgatcaggatgaaccacagacattgggcaaaaagggcagcaaaaacaatatctctgtttatatgaccctaaatcaaaagaaatctgactcttccagtgcttcagtgtgtagcattgatagcacagatgatttgaaatcttccaactctgagtgtagttcttctgaaagctttgattttcctccaggcagtatgcatgcaccttccacctcctccacttcctcctcttcaaaggaagagaaaaagctcagtaattccttgaaaatgaaagtcttttccaaaaacgtctctaaatgcgtcacaccagatggcaggaccatatgtgtaggggacattgtttgggccaagatatatggcttcccttggtggccagcccgtattcttactataactgtgagccggaaagataacggccttttagtccgacaggaggcccgtatttcatggtttgggtctccaacaacatctttccttgctctttcacaactctccccctttttagaaaacttccagtcacgctttaataagaagagaaagggcctgtatcgcaaggctatcacagaggcagctaaggctgccaagcagctgacccccgaagtgcgggctttgttgacacagtttgaaacgtgaacatgggcagtaaggtaggcaagaccattggaagtcaccacagattttctagtctagttaggaataatttctacaaaatagcgtggccagattggagagagaagttgcactcagttggctggctttttaatacttaccttatagccatttttagactgagagcttaaactgaacatataatcaaattttgtgttaaggaagtgagattttagcagtatttttcagttttgaagttcgaaaccatcccaaggcataggagccatagcctcaactgaaattgaatttttgtagggactgttaattgccatttgtacctaatactgtatatatacatatatatacgtgtgtgtgtgtgtatatatatatatccgtgtatgtatatatacacacatatatatgtatatatacacatatatatatatgaaatacagcctgtcactgtgtgacacagattgcatatttgggattgcaataagggcttggtgagctgggggaatagtggatatttaatgactacttgttttttaaataatgaacacttagcctttctatgcgcataatggtgtaaaagttagatggttaggtgtttgacaaacagatggttgca

SEQ ID NO: 118571 - DNA, 1002 bp, Homo sapiens
ggctcaagcgatcctactgccttggccttccaaagtgctgaaattacaggcgtgagccactgtgcccggcctgcactcctgttttcataattagaaagcagaataaggtgagtgtgctttctattgatgtattttatttatttatttatttatttatttttgagacagagtttcgctcttgttgtccaggctgcagtggtacaatctctgctcactgcaccctccacctccctggttcaagtgattctcctacctcagcctcccaagtagctgggattacaggcatgtgccaccacgcctggctaattttgtatttttagtagagatggggtttcaccatgttggtcaggttggtctcaaactcctgacctcaggtgatccacccaccttggcctcccaaagtgctgagattacaggcatgagccacctcgcccggcctctactgatgtatataatagtaagagacactctggtgtgtatgctgttgaatgaaacagaagagatggccagtgattgtgtgagaatctggatttcaaatctgcaaaaggaaggtgcagaaggtaagttgtttttggaaatggaatggataagtgctcattgtgttagtgctttatttttaaaaaattttctttagtggagaattgctattgagttttggtctcatgctatcagtgcttagaaacagcaatttcttttgttggaggagctattcctaatatgaaccttttccatttgaatattctgaagtgaaaggatcctattactattatttatttatttatttattttttccaagacggagtcttgctctgccgcacaggctggagtgcagtgatgcgatctcggctcactgcaacctccgcctcccgggctgaagcaattctcttgcctcagcctccggagtagctgggattacaggggcccagcactttgggaggccaaggcaggcagatcacttgagcgcaggagttccagaggatcctgggcaacatggtgaaaccc

SEQ ID NO: 118572 - DNA, 1035 bp, Homo sapiens
gtctgtcctctaacgtttaactttagcgggattggagaaaggggtgtgtacattggggttcccaaaaggttacctgtcactccttacagggggaagagcatttgttaaaatgaaccttttaactgtaattcttacggttagaagtcattcccgttaggttaaccattcaacagagaagcatattttgctaattttaatgatagtttaagaaaagtttaaagaagagattggagatttttaaaaaatcctttaatgtcaaggtggtgtagcataaaaatgttcaagtaacttctaacacctgggattcagtttatgtattaaggacaagaaggttgagttcatctacaaatttggcttaaccacattttcattttttgatttaaaatgtttttgggctctgctttcaacaggggaagagaacctgttctaagtctggagttaacctttttattctcttcttttgcagatatgaagtgcagagactcccattcacggctttccattctgtttcctgcaacagcacacgctctgatcgtatctcacctgtttgcaatggcttattagtatgttttactcttaaacttgcttgctctcccatcaagacccaggaatccttctttcccatttggggaaaaaagccatttaaaatttcatattgaagtatggtgtttgaggggaaagatgagagcagttattctgtattatttaatctcaaatatctttttttttttttttgagacggagtctcactctgtcacccaggctggagtgcagtggcgccatatcgtctcactgcaacctccgcctcctgggttcaagcgattctcccgcctcagcctcccaagtagctgggactacaggcgtgcgccaccatgctggtctaatttttgtattttttaactagagccgggatttcaccatgttggccaggctggtcttgaaatcctgacctcaggttatccacccgcctcagcctcccaaagggctgggattacaggcatgagccgccgtgcccggcctcaagtatctttttta

SEQ ID NO: 118573 - DNA, 1057 bp, Homo sapiens
ctgtgaggttcaaatgagataatgtatgcaaagcactgaagcaagacacttggcatgcagtaaatgctcagttaatgcttgggatcacaatcactgattttttttttttttttagatggagtcttgttcttgttgcccaagctggagttcaatggcacgatctcggctcactgcaacctctgcctcctgggttcaagcaattctcctgcctcagcctcccaagtagctgagactataggcgcccaccaccacacctggctaatttttgtattttagtagagatggggtttcactatgttggccaggctggtcttgaactcctgacctcaggtgatctgcccacctcagcctcccaaagtgctggaattataagcataagccaccgcgcccagtccaatcattgatctggatactcatgcccattttagtttgtggtaggttatgggatggttgtatcaacagtattttttttttttttaagaccgagtctcgctggtcaaaatggctggcaagaaggctgttgcagcatcaggcaagtggctggatggtattcgaaaatggtattacaacgccacaggattcaataaactggggttaatgaaagatgatacaatatatgagaatgaagatgtgaaagaagccataagaaggcttcctgagaacctttataatgacaggatgtttcacatgaagagggcactggacctgtccatgaagcatcagatcttgcctaaagagcagtggaccaaatatgaagaggaaaatttctaccttgaaccgtatctgaaagaggttattcgggaaagaaaagaaagagcagaatgggcaaagaggtaatcatgtagttgaagtctgtggatgcagctgttacgaagatggttaaacctgaaacaatcttaagaattatttggtctgcagctgttttactttaaataaatatctattgtaaaaaacaaacaaaaaaaagacagagtctcgctctgttgccaggctggagtgcagtggcgcaatctccgctcactgcaatctccgccacctgagttcaagcaattcccct

SEQ ID NO: 118574 - DNA, 1015 bp, Homo sapiens
ggatttcgaccagcctgggctctactaaaattacaaaaattagccaggtgtggtggcgtgtgcctatatacctaggtactcaggaggctgaggtgggagggccacctgaacccaggaagttgaagatatggtgagccgagattgagctacttgcactccagcttgtgcgacaggagtgagaccctatctcaaaaaaaaaaaaaaaaaagaggttgatagggctcctgctgttccaatttaggacaatgtgaacatcaaaaagaaaaatgtagatggaatgatatgatttttaaaacttccttttcaacccccagtataataatttattcagaaaaggatcatccatggatgcaaagccattgagctaaaggttgttgagaaacaggatattcacaaagtgtgccctcccagattatttattaatttcccagggaagctggtaccttgaactggagcagtctcgtgtcaccaccttaatcaagtgatctaacataagccaggacaaagtgacgtttcctaggactcctgctatggtccagtgggtgagaaggacagaacagcttctgtcatttgcttgcctgtactgtttgacctgcatctaattgtgaggaaacaatcaggcagatccagaatgtggagcattttacaagacaactggcctagattctcccagagtcagtgtcatgaaaagcaaacgaaacaaggggacttcagcggtaatagactccatgtgtgaacctagtttggattctggatccaaaaacacaaaacaaaggttataaaaggcatttttaggacccctggagaaagtcagatgtggactgaatattagaaaatgtgattgcattaatgttcatgtcttagaaatgctaataacattacaatttgtaggaaaatgacctcaggaacggatgctgaagtgttcggggtggcatgtcacgtctgcaacttgactagaaatggtctaacaaaaccagtatttacagacagaatacacctagacagagcacacatg

SEQ ID NO: 118575 - DNA, 1005 bp, Homo sapiens
agaagttcgagaccagcctggccaacatggggaaaccccttctctactaaaaatacaaaaaaattagccggttgtggtggtgggcacctgtagtcccagctactcgggaggctgagggaggagaattgcttgaacctgggaggcagaggttgcagtgagccaagatcgcgccactgtaccacagcttggatgacagagtgagactctgtctcaaaaaaaaaaaaaaaaaaaaaagtggcggcactttcgtggtgctttgcaaacacgcacagagctgtgtgtcccatatggattgacccatacccatattccaagctgagacccagtaagaagcactctgtcttcttctttcacctctcacactgtaaacaaatgtgtttttagtggacttagtgccacatttttcatatttttgtgctttttgttggtgattttggtgtcaacaagtctccaagaatagagctgaagtgctgtctagagctcccaaggtcaagaaggctgtgatgtgccttgtagaaaaaagcctctgttagagaagctgtgttcaggcagaagttataatgctgttggccatgagttcaatattaatgaattaatgtattaaacaaatacacaacacaaagttataggctgatcagttgatgaaatgttgtgatcagagccttgcaggaacctaaccttgtaccttcccctaggagcagtggttcagtattcactaattcagtgttcacaatggctttatagagcataactgacatgaataacaagaattgaccagatatatttacacagctgggttactgctaaaggtgctttcttcatagtatgttacggaacctctttttccatcagcgcttgtggatttacttcactctttttattgactgcaaagtcctttgttttataaacactgtcatttatgtaatgatttctctatttttggacattcaggttgccatctctttttttcactgctgtacagtgactggctttttccctgtatct

SEQ ID NO: 118576 - DNA, 1022 bp, Homo sapiens
agaccatcccaggcaacacaatgagacccctgtctctacaaaaaatacaaaaacaattagctgggtgcagtgatgaatgcctgtagtcctagctacttgggaggccaaggtgggaggattgcttgagcccagaagttcaaggcttctgtgagctgtgattgcaccactgctctccagcctgggtaagagggggagactcctctcttaaacaaacaaacaaacaaacaaacaaatagtgtctaatcttctttgattgaacggtaaatatgagagatactgcatataagaacattattatgttgtaaaaaactttgttggtttgatatcttttattggtttttcttgagttagacaaataaaataaggtaatgtggcagtatatatattgcaaagtagaagtaaaagtcatctagtcacctcccaggggtgtgggaagtatcatgatatctgaacttacttttagaaaaaaaatgtatatgcatgtagagaaaaagaaggcagatgtcaaaaattagggaattgaggtgaagggtatttgggagttccttgtactattatttcaacaacttttttaggttgatttttttcaaaaacccgtctctcgtaatcctaccctcagaaagaattagatgtggatcctgagaggtcacaggtgtgctaggcattttgcatacattttaaatttagttctcagctctcgaggaggaaacaaaggtgatggcaggtgaccagggtcacacaacttggctgagtagtggaaccagaatttggatgtgttacttcagaccagaccctaggggaaaaaaaaagaatttggacttagacctctgaccccaatgcctttattcctttatggccttgtgtatctcaaatagcaaacctttcccatgggaaggaatgactggcttcctctgtcatcctctaggtccttgatactttatgagcctgtgcttagtgaaagcagatgggagatagcccaggcggggctgccatcctgggacttgcaggaaaactaagaaggg

SEQ ID NO: 118577 - DNA, 1041 bp, Homo sapiens
gacaagaattgtcagggaaatactattcatcccagtacgggggggaaccccctttttaaataggtccccaggggatttgaatgcgtgtggtcaactggcaacccatttgagaaacctttggactgtagatgggtagggaagtagagtcgcagcgagggggtagtggtgcagtcaccctactgtcccattttgggcttctcattagggtcgaagctcccaggagaatccacaaaaggaatctggaaatcgggggcaggagctggaggtgtggagggaagagctttggagccactccacagagtgatccaggaggaaagcggagagatccaagaattggacctgtgacagagaaccagcatggagggggacatcgggacctcttcccctggataacagagggcgtgggaggatgaggggcaccccagtcctccactccagaaggtatgggggatgcggtcctgtaggaagctggcagaagtaaagaattcagttggagggtgtggcgtcttttaaaaaggccatgaatgttgtgtatgggggtgtttggaggccccagagccatgggttggatgggggaccagtgagggttgtgcacgcatgtgtgtggtcactgtggatgccctggcagctgtggctgggcctggtacagagtttgcccagaagggcagtggctctggcttccgggaatgaggaggtgtgcttggagctggcctgcctgccatctgcccaggagtagtacagacgccggctgcggatgtggtgcctgggttacctttcactctgctggaaggaagctacaggctggacttcagcaggaggggacgttacgggcattgttggccttatgtgacacgggccaccctctcaagaatgttgaaatagtgttcccacagaggtgttgatgctttacggaaaatgcttccttgggccttatgaagcaatcggggcagagagaggaaggagggtgagcctcctgccttgctgggcctcccaggtcgtgctgtgtactgaggcctctgaagagccagcctttctccccct

SEQ ID NO: 118578 - DNA, 1053 bp, Homo sapiens
cttggcttggttgtcacacagtgcctgcgaaagcagcctctttatccagtggtcatttagtgagcctcatgtgtaatctgcaagacctgtgggaggctctgccaggagaaaccatgacccaaaacctgccctgaggcccttagcatagctgaagatatagtcatatcaaaccacttatagccatatgttaatggccataatagccatttaatgttagtaatgatagtccacttttaatgggtgcttaccatgtgctgagagcttgagatcccctccattagctaagtcctcaggcaactccttccagtaggtcctatacttatccccattttacagatgggacatgcaaagtttagagagttacataccttacccaagcccacatagctagtaggcaacctggctccaaagctcactcctaccgctataccaaagacaggtccagttgcccaaggaagtcttaaaaagcttcaaggaggaggtgctgtttgatttgggtttgaaggatgagtagaagtttgccaggcagagacaggtgtgaagttcatctctctgcagggtccagggcagctagggagagtcaagcattagcggcctgcaaggggcagcctggtcagttgtggggaggaccaggagatgcaccaggaacactggcttagaggatgtgggtcttcctagatgtttgaaccttatcctgagaacccatggagggcaatgggaagggtggggaggagagtgccagctccctggaaatgcaccctggcctcagagactagttattacagttattgcagtcgccccaaagcgatggcatctgaactaggggaggaagtgaggatatttgacaggttgtagacaatagggtcaaaaggaccagcgaacaaaaagcgtggaagatttcaagtttcttgctagttggaacaaagtaactttccttagctgagcttgttcagcctttttcatagtaaacattattcttggagggccccttctggaaactgtcagttgaaggactccctctgccctgtaagtgaagggaattgatgttcattg

SEQ ID NO: 118579 - DNA, 1150 bp, Homo sapiens
actcttagttgaatgttgcctgatgaatacaaagcatgtttacatatgtgctgtgtaactgtttccatacaaccacaagcaattatcctcacctgaccgacacaggaggcgaagttgagatcactgagacgttgggagccccagtttgtcaaatatgagattccagtctggcatcatactacagggtatcaaaaacttgacaccatggaaacaagtcttggtactgcatgcacgctagtgatggaagtgaaaccctgatctgctcatttaacctctctaaatctggcccctatcatccattcttcccagaatagccagaatttagattgtgtcattctctgcttaaagacctccaatgtcatctcactgcacttaaaattcccagtccttaccactgcgtggaatacccagcatagcctggctctggcctgctctctgaccttgtctcttaccccttccctaccctccatgccattgctcttaagccacactgacctcctttctgttcctggaacaagtcaagcttgttcatgtctcagggtctttgcactggctctttcctctatttggattctgtgtttctcagactctcacatggttgcttgtctcccttaatctattgctgcctctccatgtcactctattaaatcaccttgctttttctttgtagcatttaccaggatctgaagtgtttttctgttttttgtttgtttggttggttggtttctttgagacggagtctcactctgtcgcacaggctagagtgcagtggcactatcagctcagtgcaacctccgcctcccgggttcacaccattctcctgcctcagcctcctgagtagctgggattacaggcatgtgccaccacacccagctaattttcgtatttttagtagagacggggtttcacctgttggtcaggctggtctcgaagaacccctgacctcgttatccgtcagcctcggcctcccaaagtcctgggattacaggcgtgagccaccgtgcctggcctgaagttatttttcgtttgtttgctgcctttcttcccacactagaatacatgctacacgagaagagacctgtgtctgtcttcttccttgcgggggcctcagtgccatgaacacagcttcccgatgtgtatggaatgacaa

SEQ ID NO: 118580 - DNA, 1037 bp, Homo sapiens
gctccgtagtttgtaagttttggcaagtccttgagaaaagtcagaattgtagtctctaccagaagcatcatttgtgagcttgtataagtaaagtgaacctcatttaatttttgttattaaataaaatttcttcaacattgatttaaaatgttatagaatgttttgtgctgtataaaaatatcatataagccaaatagtgattagttgtagcttgacagtagaagggctgactccaaagctctttcaggcaatctgcgtttttgatagagcagttcatattcagtggggtgtgttggtactctgccacttttgaagaaaagacatctgatgtagagctgtgatacacattttattcctctcactataggcactgaacgcagaggaggcccgccttcttcatgtcaaggagaccatgcagattgatgagaggaagcggccttacaatagcatgtatgaaactcgagaacctactgaagaggaaatggaggcatatagaatgaaacgtcagaggccagatgaccccatggcctctttccttggacagtagcaactagtcagaagaccatccaagatagatgcagctgatacattcttttcagcttcttattgatgattgtagatagaaaaatccttgtttattcttcttgctgcctggctttaataaatatttcagatgcctcacagtaagttcactcctttccatactgaggaaacaagaaaagaagaagaggcacatgaagtgtgcttttgggaatagaatttaaaattggattaagattttatttccagttttttttatttatttatttttttttttgagacggagtcttgctctgtcgcccaggctgaagtgcggtggcgcgatctcggctcactgcaagctccacctcccaggttcacgccattctcctgcctcagcctccctagtagttgggactacaggcgcccgccaccatgctcagctaattttttgtatttttagtagagacggtttcatcgtgttagccaggatggtctcgatctcctgaccttgtgat

SEQ ID NO: 118581 - DNA, 1014 bp, Homo sapiens
aatgctgtcactcttttttcaagtattcctattgtactggagaagctgggaaggagattgttgtaagtaattgtctttggttcttaaaggtataaaacaaccgaagctcctaagtcaaactaaaacatgctgtctcatgtttcaaattttaacttgttcttagatgattagtaactatgacactcaactcaaattacatgtatttcccacagaactctgaggagtgtattataaatgagataactggggaagaatctgtgaaaaaacctcaaaccctcatggaggtaagttgataatcatttgtcctgaatttttaagtcctggagggagggctttaaaacctgcacctgagtttttttttttcttttgaaacagaatctcattctgtcgcccaggctcgagcgcagtgcacggtctgggcccactgcaacttccgcctcctgggttcaagtgattcttgtgcctcagccgcccaagtagtgcacctgagctttgttttcacattaataacactgcatttcaatcctccctttcagctgcatcaagaaaaactgaaagaggaaaagaagaagaagaaaaagaaaaagaagaagcatcgaaagagcagttcagatagtgatgatgaagaaaagaagcatgaaaaattgaaaaaggtaatttgtgaagtctaaatagtaaaagtgacaagtagcagtattctttgttttttgggttgtttttatttttttgagacagggtcttgctctgttgtccaggctggagtgcagtggcacgaccgcagctcactgcaagctccacctcataggctcaagcaattcttctgcctcagtgtcccaagtagccggtattacaggcacatgcccccatgtgcagctaatttctgtatttttttatagagccaggatttcaccatgttgcccagtctggtctcaaacttctgagctcaggtgaactgcccacctcatcctcccaaagtgctgggattgcaggcatgagccaccgttcttgccagta

SEQ ID NO: 118582 - DNA, 1785 bp, Homo sapiens
agctttttaaaatggcattctcagagttctagagagtggcagcaaaaagtgtgctgtggtacataagtgcctttgcttgcatcacatttgccaactttcattggtcaaagcaaataacatggtcaggcccagattcaagggacagagaaagacttcgtctcttgatgggaagaaaagcaaagccctgtggcaaaagggcatgtatagaaagataagaggaatttatggccatcttgtaacttactgtactcaacagatgaatagcaactgagacatcttctatttgcctcagaaaaaatttgtggctttttttttcctactgtgctttctataacaaaacccagtaaagaatgttccctttctttctgattagaaataaatgttttctggaaatttaaatgcaaatcaggttgtaaaatgtattgaataatgtccaatgtccttttagtatggtggccaagaacatttggatgcccctccagctgaattgcttttagcccagactgaagactatgtggagtactcaagacatgggacagtcatcaaaggacaggagcgggctgttgcctgctctaagtatgaggaggatgtgaagatccacaatcacacagtatgtgctaaactggaacaattttgtgtccttgttggttttgctctgtattgcatttttccactacaactttattagctaaccatttgtattctctatgctttaaaaaaaaaaaaaaattttaactgtttcatggaattttttcaaaaatagaaaaattttgaaggaatactatgttcatctatatacccatcatctaaattctgaaatttttaacatattgccttatatgctttgtctagttgtatgtgtgcatatgcacagttttacatatatatgtaaaatacacatatatacacacatatagtttatgtatatatttatttgactgaaacatttggaaattatgtatatcatgacattttatccataaacgctgtatcacatatctccttaaaatgaggattttcttctatataaccacatcgacattattgcacttcagaaaattaacattatatcacctaatatctagtcattaatcacattttccaaaatatacagaaaaatgcctttaacacctattttttgttttagtcagaattcgtttcaaatttcttttgatcgttatgcggttattatgtctcttttctagagtgtatctcttcattttcatgacggtgaccatttaacagattaggccaattagtttgtaaattgtctcatattctgtattgactggttcctagtagtgttatataacttgtttctctatccctgtatgttttataaataggaatttaggtctaacggcttgattggatataagttaaatattttgacaagaatatttaataagtaatgtagtatattcatattgcattgtaaacatcataaagcatatattgtcctttgctgttctcttgaagtaaccaaactacaattgtctctcttagttgagggtcaaaaacctaactccctataggagccagaccagtgatcatacatgagtgaagtgagccaggcaaattgtacaaactggagaacacaagccctatctaatggggcatccactgttcagcaacagctgattattgccaagtggttatataggcccagaatttcccactcctacgtttttcaagagaagtcagataccctaaattttttaataggcttttgggaatagaatttaagagttttgtaactacaggtcctgcttctcacacttcagg

SEQ ID NO: 118583 - DNA, 1067 bp, Homo sapiens
cagtttttactgttatgatttgacctattcacccttattcctttgaagtcatagtcacactgccttttttttttaattagaggtatcattttaaaattataagatttcatataaaaatctggatttcatcttttcttgaatattgtaatatatggtaaccccacgcctgcctggtaagagtcagtcatctagagttctgtggcaactgcttgtttttgtcagggcttgctccctgcaatttactactgatgccatttggctcagtttacattaatgcctggttcaaacactgtgtaactcctgctctttatagagtaataggtctagggctacaaggaatcccaaagagataggtttgttcagtgaccttttctgaaataaattaatttaaagttattcattttaaatatataaaaatttaggtggtgacttgaatgttgtaagtaaaatttaaatgtttactttttctttctttctttcttttttttttttttaaaggcaaaacgaacattgaaagcccagaaactccaagaggaattagcctcaggaaaattagtggaacaggctgtaagtaatgaaaatgatcaataaaaaggttttatttcttttaaacaaagaaatgaaaattgaaacaagaattcattttatagctcttcagttaggaagagagaaatgctattgggggaaaaataaaactgatactttgtatacagttcatagtaatataaattgatgcagtcagtttgggaacaatattgccactatttatatttagacacacacaaacatttactttttcaagttaaattattaaagctatccatcctaaagaattttctagagtttagaaaaatcatgatgcataaagatagtacagcatttttcacaatagtaaagaaattggaatagcttaaatgtccaggaacagggaattggttaagtgcatctgcatggtgtaatgctgtgtagttcttaaaatggcatttctcaagacttcattaacaacactggttaacacttgtatttgaataatacatgaaaagatagtataatattatcacacagaa

SEQ ID NO: 118584 - DNA, 1050 bp, Homo sapiens
tgactgctatgaaatctttctattttgagtttttctggttgttaccgtcacatctctagataataatacctacacaattattttaattaattgactatagacattatttgaaccaaaacttcttgtgatagaagatttagattactaacacacatctctattttccttcctctcttgtcccccttcagttatatcactattcttagtttcttagttggaaatattttcactctaaaataaattacttctttatttttaattattctttattatagtatagagatagcaaccttgttctcttccccctaccactgcaatatttctgttcttagattttgtataagctacctttgtaattgtaatactgattattttccaattttatccttaaattttttttttttttactttaattacagagacatcaacccccatattcctcagtatatttcttcagtgccatggtatattgatccttcaaaaagacctactttaaaacaccagagaccacaaccagaaaaacaaaagcagttcagctcatctggagaatggtacaagaggggtgtaaaagaggtatgtaggcaacctgtatacatcttcatggatatggagagtttaagaacttaatgtaagaatttttaatgcaatactatttaaagtagaaacagataataaaaccctttatctggtattgaaattcacagtgcattactattttatctttgtgtttcttatataaattttacactcctgaactctttaaagtttcacatttataaatgtgtggagactctaacttattttccttttaacaaagaaatcatttccctagacaaaatagtaatgagagtcaaagttatttctaacttacgtggttaagacatttttgtttttctttatatatatttatagaattccataattactaagtaccgcaaaggagcatgtgaaaattgtggggccatgacacacaaaaagaaagactgctttgaggtaagttcacctttgaaaattttgaaaaccgttgtcagagtctttcttttttctttg

SEQ ID NO: 118585 - DNA, 1003 bp, Homo sapiens
aaaaattagccgggcatggtggcgggcacctgtaatcgagctactcgggagactgaggcaggagaatcgcttgaacctgggaggcggaggttgcagtgagctgagatcatgccactgcactccagcctgggcaacagagcgagactctgtctctaaaaaaaaaagaaaaagaaaaaccaagagaatgtagtgtcagggaagtcaagacataatatataaaaagggaaggaacagagctgaaaaatgtccattggatttagcacaatggtccttgatgacttaatgatgtaactcttttctttagaatggtagggaatggagggctaagttagagtgagtgaggatgaaaatagaaggtgaggaaatggaggcagtgaatatagataactcttgagatattcattcttgaaggggtacagagataggaccctcttttctctcattaagagttactgtgttagaaaagtttgagacatacacagaaagagggattaaggatggatatgagaaaagagtcctgtgaaattttaaatacacgtgtgtgtctctctccatttgtaaattggagttgagagagaaacagtgctaacagtatgtagagaccttgaggagggggaagagacccttccttacacataatataggagaaaaaaaaacatatgaaacagtatatattattaggatgtatttttggtagtttgagtgaattcatgaaggcctactttttactgtaagtttcacttcttttcctagaggaggccagataaccatgtcagccacagttgtagatgcagttaatgctgcacccctatcggggtccaaagaaatgagtttggaagaaccaaagaagatgaccagagaggactggagaaagaagaaggagctagaagaacagcgaaaattgggcaatgctcctgcagaagttgatgaagaaggaaagtaagtacttaattttttgtatgatccattcattcagaattcaaattcatgtctacttagttta

SEQ ID NO: 118586 - DNA, 1019 bp, Homo sapiens
ttgaagcatatataataaacttgcttggaatgatgattccatgttatatccaaagctaatataagatcaaaacacctgtgctgtagcatagactgacaataacttcttactgcagaaggtctgaggtcttcgtttgaactggtagtcaaagccaacattatgttttctgtttgttctgatgtgggataatttgtcctaataagttacattagtgagactgttaactcttactttggtctctaagaacaatagagattcagatacttctaaaacttacttcctaatgaaagtcaattctggggccacagacacattccaaaaaatgtgtcaggaggggatgcaggtgattgatttgacaaagggaaaaacatgaatttttgattgacagctaatgtctatgttgatatggacaatgactcaaggatttgcagaaattttaataagagattcctgttttctagatctgttgcagtctccttcaagcattctgtcgaccctggatgttgaattgccacctgtttgctgtgacatagatatttaaatttcttagtgcttcagagtttgtgtgtatttgtattaataaagcattctttaacagattcttcctagtattgtggttgcttttccatggaggttacttaaaataacatgaaagctagctgaggtgtttaacaaagagtctataatgtgacaatagagatttgtctgatgtctaaaaacttaaatctttttggtttaacagcttattttagaagctgccactgttttttcctgaaaagtatacccctcaatgtgtactttattgactttttgtggccattaactagtgacagttattagatctcttaattagaagagctacttccaactcattaagtatctattgctgggcattctttattgccggttctacttagtttctaatgactttaatactcagtattgaaaggctctaaatctgagaattcagcctccttgggatcttcaattagattccttaaagatcactggagataatt

SEQ ID NO: 118587 - DNA, 1106 bp, Homo sapiens
ggctagtccctgggactgggtcggcagacacgaaaggcacctcaggaggccggatccggctccgcccctccagcctcggactagcctgggcttgtgctcacaacagcggtagagtttagtgtggaaaagggcgcgggccagacctactcctcgccccgcgcccccaacccagctccccacccgcacctggcggtcaactcccgcgcagtcccactcaccttgacagagactgcagctcctcagcggtaaccaccctccccgggcctgctcacctcaccccacgatatcagatccgagaggcctacgaggagaggggactcgtaggcaagaggagagaggcccggggagggggactgtcctgggtggaggcctcggcagcgccgccgagacaactcggccctgatcagggtcagctcggagccgaaggggccgcgcctgccctaacgaggaatatattggagggcggggctttctcgcgagaagggggcattttcgccgctgattggtgtaattcttttgatggatggcctccgcgatccgtaaacggctgggccgtggagtgagaagtccggccaatcggctcacacttcccgttatctggcctcaaattccccggcccccttccacgcccctacctctaagcgtctctcattggagaatttaacaaagtgtcttcattcagtagggggccaaactaaatactcggtgcagcaaccctcgcctgggtcaggtcaatcggctgccagccggattggccggcgtatcattccagaatgtactgtttgttctgtggggtttaggagttctacagtggttctgccccatctttctaaaaatacagtgagtagttaaaaaaaaaaaagtcaacctttgatttttaattacagataaagaggtggtggaatttatatggtttggtggtttatcaacttccagagtgctctcttcgtgaactttggaagtcagttgattcttgccttagtttgctttttatacaatttatcaaataatggagttggactgtgtaatttcttgaccctctaccaattttctgaatttgcttttaaagcaaatttaaagagaaaagttggtacaatttttcagtt

SEQ ID NO: 118588 - DNA, 1088 bp, Homo sapiens
gaactcctaaaccccacagaacaaacagtacattctggaatgatacgccggccaatccggctggcagccgattgacctgacccaggcgagggttgctgcaccgagtatttagtttggccccctactgaatgaagacactttgttaaattctccaatgagagacgcttagaggtaggggcgtggaagggggccggggaatttgaggccagataacgggaagtgtgagccgattggccggacttctcactccacggcccagccgtttacggatcgcggaggccatccatcaaaagaattacaccaatcagcggcgaaaatgcccccttctcgcgagaaagccccgccctccaatatattcctcgttagggcaggcgcggccccttcggctccgagctgaccctgatcagggccgagttgtctcggcggcgctgccgaggcctccacccaggacagtccccctccccgggcctctctcctcttgcctacgagtcccctctcctcgtaggcctctcggatctgatatcgtggggtgaggtgagcaggcccggggagggtggttaccgctgaggagctgcagtctctgtcaaggtgagtgggactgcgcgggagttgaccgccaggtgcgggtggggagctgggttgggggcgcggggcgaggagtaggtctggcccgcgcccttttccacactaaactctaccgctgttgtgagcacaagcccaggctagtccgaggctggaggggcggagccggatccggcctcctgaggtgcctttcgtgtctgccgacccagtcccagggactagcctggggaggaagaatggaacccctgcagttagaggttcctcacatgactagctctgaagacctcctgccttcctgtctttagttggtgtgggagggaccttccatgtatccagggcttagcttgtgcccgggacatggttgtgttatgcacacttaaatcaatggaattcccaggttcatctttcagactaggttagcaacaacccaccgcacccccccgccccaatacgtgctcctaatgtcaccttttaagtttcctttcctaacaacaataaaagttaag

SEQ ID NO: 118589 - DNA, 1264 bp, Homo sapiens
gtggctcacgcctgtaatcccggcactttggaaggccgaggcgggcagatcacaaggccaggagaccgagaccatcctggccaacatggtgaaaccccgtctctactaaaaatataaaaattagctgggcgcggtggcgcatgcctgtaatcccagctcctcgggaggctgaggcaggagaatcgcttgaaccagggagtcggaggttgcagtgagccaagatcgtgccactgtactccagcctggcaacagagcgagactccttctcaaaaaaaaaaaaaaaaagcatggttccttccctctaggaactcaatttaggatgtgaccaacttgtagaagggaaataaataacagatggcactttgcaatgacttagatgcactagccgcattgggggatgggaggcttataaatcatttcttggcccagtgcaaagatggccaaggaaagcaggaaggactactcttacactccttgctggtctttttttctatatatagatgatagaggtactgacaacaactgactctcagaaactgctacaccagctgaatgccctgttggaacaggagtctagatgtcagccaaaggtctgtggtttgagactaattgagtctgcacacgataatggcctcagaatgactgcaagactaagggactttgaagtaaaagatcttcttagtctaactcagttctttggctttgacacagagacattttctctagctgtgaatttactggacagattcctgtctaaaatgaaggtatgtttgaagctacatttttgtaattttgctcagtgtgttttggagatggaattgttaccttttggctggtattcataaacttgaccttttttttttcagcacgtagccaaaacattaattttgtctactacagcattaatatttcttatcataatcaagagtagtacatcaggtattagacttaaattctgaaatgaaaaatagtctaatatcaagtaacaaattgcagtttcctagtaagaaaattggctgtttttaaaaaacccttcttgataggttggatttgtccatttatttactatttttagatataaacaaatttattagtggcagaaatttattagaggctacattgtggctaagaattaagatatatttgttaatcactacccatatataaaattgtaaatgttttagccttagacctagtcaagacttgcttatgcttggcatttccagcttcagtgtacatgcagtagggaggagagtgtgtctga

SEQ ID NO: 118590 - DNA, 4630 bp, Homo sapiens
gattagtagtggatagaactcttagaggcagagtaaacagtatatgccatagtattttaaaactgttttatatgtgttcccacaaagacaagagcctggaaaaaatacaacatcctgcaaagaaatggcttattttgtaaataagccataaagtatttcagtcctcatatatctttgactagttaacttatttgatcaaactagaacaatgtttacttatagttctacagtgattaataaaaacacactttttctatgctgagccaaacattatactgaaactcagtccagttactcaaaaattggttctaagtggggtccatagtgttgacaggctatagtttaggtatgagtggattgtgttaagtccatcacagctgagaaataaacctcaaatatacattttcaaaatgttgggtcggagttctagattatcctttatgttttaattgaaataaggtagagtcatgggcttactggttttgtttttgattttttaggtacagcccaagcaccttgggtgtgttggactgagctgcttttatttggctgtaaaatcaatagaagaggaaaggaatgtcccattggcaactgacttgatccgaataagtcaatataggtttacggtttcagacttgatgagaatggaaaagattgtattggagaaggtgtgttggaaagtcaaagctactactgcctttcaatttctgcaactgtattattcactccttcaagagaacttgccacttgaaaggtaagtgacctttgttttgaacaagagacatttggaaatcagaatggtattgtatggatattgcataaaatcagtatcctcatagaattctaataaaaataagtaaaatgacagctgtggctccttgaactttaatgtccatcataagtgagaaaatgttccattgtcaatagcttcgttaaagctaattcttgggattaaagtacattttgactttatagaacctagtaggaaagcatctaacacaaatttatggaaaaaaaggaccttcagtggatgttgaaatatttattaaaactaaaagaaaataaatcttgtatttgtggcatagtactattcattttaattttttggcccaaatcatctaaaactcccatatggtgcctttagaagttagtatctctgatggaaggggaattcctttcaatagttcatttgctatgttaagtgtgcataagctttactttaaaaattgacttcaatgtttttctaaaaacatcttttgactagatgtagtattacctaataaaagtaataccattttctttttaaaggagaaatagcattaattttgaaagactagaagctcaactgaaggcatgtcattgcaggatcatattttctaaagcaaaggtaaatattttataaagattatgcctattgatatgatctgtttttatatttggcatttactttaaatttatctcttttagccttctgtgttggcattgtctatcattgcattagagatccaagcacagaagtgtgtagagttaacagaaggaatagaatgtcttcagaaacattccaaggtatgtgaaggacatagcctaaatcctattaacagctgtaaaagaaactaaaccccttctatctcctgaagtaaaatgagatgtcatatgtttatttgaaacttaagtagctatcctcaaatgtttttaatgagcaaagacacatgttcataggattgcatttattaatgtagttaaataaggtgggacttacttggagtaataattttttaaaatttatgtatgtacagataaatggcagagatctgaccttctggcaagagcttgtatccaaatgtttaactgaatattcatcaaataagtgttccaaaccaaatgttcagaagttgaaatggattgtttctgggcgtactgcacggcaattgaagcatagctactacagaataactcaccttccaacaattcctgaaatggtcccttaactggtaaatttggtccgttattattctccagatagagaacattttccaatgccataattttcaactaaagaagagtaattatcttcaaaataaacaaaatggagttggaatagtaaagggggagatgacatcactgatctagtcagctaatatttgaaggcctttactatatacaaggtacaacatcttaggagtaaggaattatccaacctctgatacatacgttagccatttcattaaattttcagcttagagaacagcatcctccttgtagcactaaaatcatgcttttttttaattgcacatgatcttgctgtatgtatctgactgatttaaaattacataagctgagcaggacaacagcaccaaaagtctgaaccaagtatgaactaatttgagactgttagcttataagcaaaatcaatatgaacttggatattgtacttaaaagaaaaaaaagtaggccggatgcagtggctcacgcctgtaatcccagcactttgggaggccaaggcgggcggatcacgaggtcaggagatcgagaccatcctggccaacatggtgaaaccccgtctctgctaaaaaatacaaaaaaatttagccagtcgcggtggcgggcgcctgtagtcccagctactcgggaggctgaggcaggagaatggcgggaacccgggaggcggagtttgcagtgagctgagatcgcgccactacactccagcctgggcgacagagcaagactccgccacaaaaaaaaaaaaaaaaagaaaaaaagtaggatatgatagatggtctctacattgggtatctggaaactgccagagtgtgtcaacactatactaacctatcattgctatagcagctggactactgcaaagtagttatatgcataaaaaatgtaaacttgctttctgcatatgtgatatacattcttgccatataaatttcctaactcagtgatgatttattctactcaaaactaaatgttaacatttaatacatctacatgtgattatgaatattagatatgaacatttcaattttcttagtagtatttaggcagactggcttctgttaagttggattttgtttgttttctttatttaaataggattattacagcaccaaaaaacttctctgaagcctttctccacaaccttgttctatggattccataatgttacaatggatttaagctatgaagcctcaaaacatcacgagataagcatgatggtctcagacttgggaaaactgcctaatattatgctgtagtggaattatgtttagatttgaattcatctgtgaagcattcaaatcaaagctaaaagcctaaatgtgaaatgctaatgacaagcctgagaaggtaaactgtgaatcttcatttctatcattgatctaactttagatattggatcaatatatttaggtggtattgaaaatgctattggaggagtcacactaatactatcaactatcagtcttcccacagcttcaatcactgtcattattctaatcctactcctacttaaattttaagttatgaggtttatgtcaaaagcaacatttcacaaatgtacttttaaggcataataagggttaacattctaggcagtataaacacaccccataatgcaagtaataggtaatctagagatgtggactttattgctatatgggaattacatttaaatttgagggcattttatataaagaaaaatacagacctataaagtttggcatattcattaagttatcttttaatatttttttctagaaaacaggtgacatttgtatctacgataaaaatttttatacagaacctactgcctcaaactgaatcccatcaagaaaactagtttctattgtattagtaactcaaaataaattatcacttcgaaaacttgctttcccacactaaggtaagttcagactagattgaacactccagaattttttactacagactgtttttaagttagaagtgatggcaattttataaatagagaatatacttccactgatgcccttactgtgccaaaacaaaaatcttaagaaaagcaagtagacaccttcataactatgaatgaagctgctgaagtagtgtttaggatcctccatggcagttagtgaatgtaagaagtacagtgttaaagtgttgtaaacagttactcagtgcaatgtatagcctgagtctatccatgatggctatatccaatttgacatcacgttatggatcagtacacaatgaaaaaccaaagaaccacagtatatcttattcttaacttttgtaaaccatgttttatgggtaactttttagttttcccaaaaggctgataaatttcaatattttgaatacatcattgttaattttgagttggcagaggtaaactaaccaactaccattatgttttagtactaagggatatacctttcaataaagttaatgaaattcaatcctttgctgggtggcttttttctcctctgatttaattaactcttttagcaatgtgttaacagaacattataaaaagctatctctactcagtatatttaaatttagtactaaagttagatgcatagtaccagaaacaataaaatccctattaataatatgactattagatgacactttactttgttttttc

SEQ ID NO: 118591 - DNA, 1098 bp, Homo sapiens
caaagtagagttaggaacaaccaaaattgccaaggataattagggacattatataatgataaaattcaccaagacagtgctaaaagtgtaagcacttattatcagatcttaaaaatacatgaagagaccaggtacagagactcattcattcctgtaattccaatgctttgggaagccaaggtgggaggattgcttgaggccaagagttcaagaccagcctactcaacatagggagaccctatctctacaaaaaatcaaaaattagctaggcatagtgatatacatctgtagtcctaggtactgaggagcctgaggtgggaagactgtctgagcccaggagtttgaggctgcagtgaagcatgacagagttgctatgctccagcctgagtgacagggtaagactcaaaaaaaaaaaaaaaaacatgaagcaaaaagtggtagcattaaaaggaggactggacaaatcttcatttacagttggaaacttaaacattcctctctcagtagtccatagaattaatagaaaattagcaaagatgtaggaaaatggaataatactaataaccagctagatttaattgacataaaacccttctacctaaaacagcagaataagcattcttttcaagtacacatggaacactcaccaagataaaccacatcatgggtcttaaaccttaacaaatttaaaagagatgaaatcatataaaatatgttttttgaccataatctagaaatcagtaacagcaagaaaatctccaaacacttggaaattaaacaacacatttctaaataactcatgatactacagggaagtcttaaaaaatattttaaaataaatgaaaatatcaccgtgcttggaatgcagccatgctggtgctgcaatttataacaatcgactgctttttactaaacaagaaaaagttctcaaattaacactctaagctcccactttaagaaagtaggaaaatctaactgggtgtggtggcacaccactatagtcccagccactcagaaggctgaggtaggaggatcatgaccccacgagtttgaggctgcagtgagctatgatcataacactactccagtctgggtgat

SEQ ID NO: 118592 - DNA, 1051 bp, Homo sapiens
gaacagttttattttattctttttagtctatgatttttcttgcctgattgcagtggccagaacaataacatggagaaagtggccatctcagtcttgttctggatcttaggattttgaaagcattgtttttgaccattatgtatgcaagctgtaggcttttcttaaattccctttgtcatgttgagcaagttcccatctattaatttgttgttagcagagtttcatgagtggatgctgaattttctatgctctttctgtatcagtttggtcattctttttgtttagactgttaaaatcatggattttactgattccagaattttgaaacagcttatatttcctcccaaccccaaacttggtcatggtacattattcagcttatgtatctagatttttattttttgaggatttttatgtctgtgttcattttggatattgtgcaattgtttttgtttgttttttccttgtgttatctttatcttggtatggtatcatgttaattctggtcttgtaaaatgaattgcaaagtgattattctttctggaagagatttgtagaatttgttatatctttaaatgttttatgaatttgctagtaaggttttaaacaatggttcaatttttaaaaatagagaatttattgaggtttatttaagtttgggtactgtatgcctttcaaggaattggttcatctaatcctatgtgcatagagttgttcatggtattttctttgtgtcgttctaatgaggatctatactgttatcttttctttgattcctaagattggaatcaaagattggaattccttctctttttttgtcaattttgccagaggtttatcaattttactgctcttttcaaaaattagttttttgattgttttctattaatttgtttacaattgcatttattttctgcctcttttttttttttcttctttctgcttgctttaggtttagtttgggcttcttttttttgtagacaggtctcacttcatcacccagactggagtagtgttatgatcatagctcactgcagcctcaaactcgtgg

SEQ ID NO: 118593 - DNA, 1047 bp, Homo sapiens
gcatactttgatcatcccatttaaatataattttatttcccttatcctgttttttttttttttctgtgtcacttaccaacttttaacacgacatcagcggttggcaaactacagcccttgggccaaatttggcccactacctgttttatagcttttctaggatacgtatatgctcatttgtttgtatattgtctttcagacagttgagtatttgtgacagagactatgtggactgcaaagcctaacatatttactacctagtttttaaaaagtctgccagcccctgtactggttgatttatggtttgtctcctcctgctagaatgttaagttccactagagcagggatttttgttttttttcactcttgaattctacatacctctaatggtctcccaaacagtaggagctcaacaaatgtttgttggataaacgaaatagcccaccaaaaagactaaggcctgacatagtacttcacaggactgttgtgagggttaaatatcttatatatgtatagctcttagaaatttgtgtggcatatagaaagctctcaaaaaatgctagctataggctgggcgccatggctcacgcctgtaatcccagcactttgggaggctgaggcaggcggatcaccggaggttgggagttcaagacaagcctgaccaacatggagaaaccccgtgtctactaaaaatacaaaattagccaggcatggtggtacatgcctgtaatcgcagctactcgggaggcttaggcaggagaatcgcttgaacctgggaggcagagattatggtgagctgaggtcgcaccattgcactcccgcctgggcaacaagagcgaaactccgtctcaaaaaaaataataataaataaaataaaaatgctagctattaaatataactacagacttttattgaagtatatgtttccccatacacttgccaacattgtagtgtacatatgatgtctaaatatttgtaactgggagagttgaaaaatgcctcataattttaaatattactttggtggtaacagtgaagtctgttata

SEQ ID NO: 118594 - DNA, 1018 bp, Homo sapiens
caacattttgccgggtgcggtagctcatgcctgtaatcctggcactttggaaggcctaggcgggcggatcacaaggtcaggagttcgagaccagcctggctaacacggggaaaccccatctctactaaaaatacaaaaattagccgggcgtggtggcgggcgcctgtagtcctagctacttgggaggttgaggcaggagaatcgcttgaaccctggaggtggaggttgcagtgagccagatcgtgccactgcagcctgggcgacagagcgaaactctgtctcaaaaaaaaaaaaaaaaaaaaaaaaaaagacaacattttttagttttagcaggagatcccttcttgtggttaatttaaattggtagaattaaagcatttcagatattaatttcacatttggccagtggtcagtattactgtatcttctaaaaattaaggagccctgatctttctttagagagctctgtgttctttgccatagtaaatatcccttgcagtgtaaactagtttccattttacctgctgggagaaaatttagggttgtgcacctataaatgtcatggtgaagtggtggtataagatgtggattaggtaggaaagtaggtaaatcttaatcatgaaaactttataaaaattaaattctgtatttttagcaccttatatgtttatttttcagggcaaactctttgattctacaatagctgatgagggaacatggactttgggtaagggtaattactataattcatcaaattaaaataattttgtcttgatatcttttcctcttttgtattaggtcttttttgtctttgcagctttgaaagataaagcaatagaaatgtgttgaaaaccgttgtatgtcaaagttacctagtggggggagaaaaaattagttagttgtttttggaaatataaaatttaatgaagaacttcttgagaccaccctggccaacatggcaaaaccccgtttatactaaaaatacaaaagttagccgggcatggtggcgcatgcctgt

SEQ ID NO: 118595 - DNA, 1021 bp, Homo sapiens
ttctggatttcagttctttcatccggggcctgccggtgccgtaaacggccattcaaagggaaaaacgaacacgcacaccaaagcgctagcttgcgttcctgcgcatgcgcagtgacccgagcggagaggccgaggcgtagcctaagcgtgggattccgcgcgtgcgctcggctccgcctggtgcggccgcggccgggagggactggattatgtcggccccgtttgaggagcggagtggggtggtaccgtgcgggaccccgtggggccagtggtaccagaccttggaggaggtgttcattgaagttcaggtgccgccaggcacgcgcgcccaggatatccagtgcggcctccagagccggcatgtggcgctgtcggtgggcggccgcgagatcctcaaggtagcggcagctcggggcttgtgttcagtttcctcttcccagacgcccccagccccgtttccctgaacgactgttgggtgtcccgacggctcctgtggctggcagaaagagaaagaggataacactgaccaggtttgggtctggtcagagcccccgcctcttcagggcaggtgctgagttgtggaaatttgaggagcctattttcgtgtttagttttcaaactaagactgctgcttctgcttctctgacgggcttcagctgggaacagattaactaggttgctaaaggaacaaatatttcttccgtgcactgaagacaggcaggaagacaacagataacgtacctgcagtggagaggttaagctcctgtacggaagcgtaattcataaatagataaatataggaaaggacaacaaagaaaatagggatagaataacgggcagagaatttagagatgatgtcaggtgattagttttctcatctaaaagcttgaaaatcctgcatgtttgtggagtggtcaagcaggtggtgaagaggtgtgtgcataaaataagtagtactccttttatttcttttcaccaatgctctttggatctggacccgctttttctttgttaagtgtat

SEQ ID NO: 118596 - DNA, 1679 bp, Homo sapiens
tgtcgtttgctcagttgcctgtgttcctttgacccggttgatataaagggcaagatgatattgttcttcatagagaggccttctttgtaatatcaaatggatgcaattttttacatttaaaaaaagcagtttgttaatgacatttttacatttatattcactttattatgacatgttttaacttaagatcataagtaacattagataatatattaatgttttctatttcctctaggttgtgcaccatctccaggtgcttatgatgttaaaactttagaagtattgaaaggaccagtatcctttcagaaatcacaaagatttaaacagcaaaaaggtaatatagatcaccaaagaacaatggttatgtgatcttataagttttaaagttatgaataacaatatttaaagatgttatagcattttttaaaatgtgaagctagaactatatttaaattttatttgatggatttatgaaagggtcaagtacagaataatgctgtcatcattacattgttatataaccaggaaaattaagcaagatacttatattgatatgtagcttcccttttggtaattaccttgacttgtcagggaatattaggaaaatcagaaaggtgttagatgtgtaaaaaaattgtatgagtaattatttgaaaatgtacaactaaggaaagaatatattgtttcatcaaaagttgtaattagaaatttggggccgggcaaggtggctcgtgctcgtaatcctggcactctgtgaggccaaggtgggtggatcacatgagttcaggatttcgagacaagcctggccaacatggtgaaaccccatctctactaaaaatacagaaattagccaggtgtggtggggtgcgcctgtggttccagctactagggaggaaagtgggagagttgcttgaaactgggaggcagaggttgcagtgggctgagatgacaccactgcagtccaggctgggtgacagtgagactgtctcaaaaaacaaaaacaaacaaaaagagaaagacaaaaaaatttggaaattgtgttttgtgtgtagttaaaacacattgacatcaaccatgatctgtacaattcatttttccgcagaatctaaacaaaatcttaatgttgacaaagatactaccttgcctgcttcagctagaaaagttaagtcttcggaatcaaaggtgaggagcttttatatgccagctggtttatcaagtgtatcatcaaaaacatctgaaagtattgtatttgattagaatgggttaagtgtatgaatcaaggttataagtaaatctgtaaattaatgaaatgagttatcattagaactctagcaagttttacatttctgcctaggtcattatgtttaaatgtgcccttagttcacaattataatggtcttcaattctcaatcacttctatgtttaaattgttcattacctagtaaacatttcaaaattatgtgatgctttgatttattaagtaccaccatttgagttgttttgtttttgtgtatttgtttgtggggaagggtaagtgtttttgaagaaaagtgggaaaaaatgccaatatctaagagaggtttgctactgagaaactgttaaggagtggtgagagattaaattcttaatagtcttgtggcttgtgcaagagctactattactcttttcataagtttata

SEQ ID NO: 118597 - DNA, 1334 bp, Homo sapiens
ttaaatttcttgaagaaactgttctgtaattttgtaatttataaagccccttagaaaactaaattacatacaagtttgtatggagccccaaaataatagtccttccccataaaaaatttcatggagtgtgaaattaataaacatgacactgatgtcacccccacctcctgccccacttagaaacatctgaaacagatttcattcaagatgttgatgcctttcttccatttttagatggaaaagatattctttttctagccattgtgtcagaaagtctgttggatataaaaagatatagtgtgaaaattatatgtcttatttagaataaagccaatgagaaaattagaatcagagcttatgctgtttcagtttttatttctttgcatctgtatattttcctcttcgggtatcaaagtttaagtcgatttctctttgtaagattctttctgagatagcataattaaatattcaagatgtgttgctatttaacattagagggaggcagtcagtagctttattcataaagttccacctgttcttttcactgggctgattaggaaaatcctgatttattgggttgaaaatttctaaacctaaaatgtcttgagatttttagaatattttatttatcagatgagtggcctacacaatgtttaacagtgtaatgtttaaaatagaaactaactgattggatcccttcatcttttctgataactgaaaaacaaatttggctgtcatatctgtgacatctaaatttgcttataagtttttttggcttttaaacagaaggaatctcaaaagaatgataaagatttgaagatattagagaaagaggtaagcagtgctttaaacttagtgaaaagtacacatgatagaaagagagttacacagatttaagagataaggattctgttgcagtgtgaggagtcctgcagtgaggcaaacatgccatccagaacagtgcctacaggaaaacagttcttacagtatttcacagatctatccgggctatgttaatgtggtatgctggcaacgccgagattaaagatagcccacttaatgaaaaactgataactgaaaaatcattatgtcagttgattacaattatatatgtggatcaaatatttatatctatccatcgttcacagtcttcctgtatgctaacttatgttaacacaacatagctagaggatttcttagtgagcatgcaatcctagctggttagactgtgatgaagttaggctaactcgatgcattgctctgcacaataggtataggccttcctcatgggtgaaataacatagagctgtgctgtttgatatggtagctactca

SEQ ID NO: 118598 - DNA, 1184 bp, Homo sapiens
gatcacgaggtcaggagatcgagaccatcctggctaatatggtgaaaccccgtctctattaaaaatacaaaaaattagccgggtgtggtggcccgtgctggtagtcccagctattcgggaggctgaggcaggagaatcgcttgaacccaggaggcggagcttgcagtgagccgagatcgtgccactgcactccagcctgggcaacagagcacagagcaagactccatctcaaaaaaaaaaaaaaaaaagtgaatagatagcttaattgtacttggaacttatggcaactaaagttcttatgttcttaaaatgcattaagacttttaagatgtatcataggtaaatatgattattcaaatagctagtaacattagaatatctacaagcataatgtcaaaatcagagatttttccagaaactttaggggtgattattggtagcatctccttatgttggcattctatcagtgaatcatttattatcaccttgtttttgtccagattcgtgttcttctacaggaacgtggtgcccaggacaggcggatccaggatctggaaactgagttggaaaagatggaagcaaggctaaatgctgcactaagggaaaaaacatctctctctgcaaataatgctacactggaaaaacaacttattgaattgaccaggactaatgaactactaaaatctaaggtatctgagcctcatgataatatttacaattgaataaatataaacacgttttttagggccgggcacggtggctcacgcctgtgttcccagcattttgggaggccaaggcaggcggatcacctgaggtcgggagttcgagaccagcctgaccaacatggagaaaccctgtctctactaaaaatacaaaaattagctaggcctattggcgggcgcctgtaatctcagctactcgggaggctgaggcagaagaatcacttgaacccaggaggtggaggttgcagtgagctgacatggcgccattgcacttcagcctaggcaagagagtgcgactccatctcaaaaaacaaaacaaaacaaaacaacatacaccaggcgattcagattcattttgttaagcaaacatgtttcaagaaatcctttctcagggacttgctttagagtcttgcaatggactttccagcatatagaggtaagtgaccacccaaacaacctttc

SEQ ID NO: 118599 - DNA, 1050 bp, Homo sapiens
ggaaaagagggataagaacagtagactggtacagtggctcatgcctgtatttccagcattttggaaggctgagggctggagaattgcttgaggccaggagtttgagaccagcctgggcaacatatcaagaccccatctctataaacaaattgaaaaattagctaggcatggtggtggtgcacaccggtaatcccagctactcaggaagatgaggcaggaggattgattgagcccaggagtttgagattatagcgagctatgatcatgccactccactctagcctggacagcggagcgagacttgatctcttaaaaagaaaagaaaaaaaaattaaatcaatcagtaattatggtgtaggtcaaagactgttctctctaccaaagtatattaaagtcaaaaacataaccccagtgataggtagaaaaatcaatatttgtgtattttaaatatgtcttagcagaaaatatttctgaattttttacgtgtttgttgtatttagttttctgaaaatggtaaccagaagaatttgagaattctaagcttggagttgatgaaacttagaaacaaaagagaaacaaagatgagggtgagtgctgcccttggcaggtttgctgtgtctggatctggggatcagtacaactttctcatttcctaaaacaggtatctttgttgtgtagggtatgatggctaagcaagaaggcatggagatgaagctgcaggtcacccaaaggagtctcgaagagtctcaagggaaaatagcccaactggagggaaaactgtaagtgagtgaatgtgaagagaaattgttaagtggaagcaattcttgatttgagtctcttcacaaattattgtttactgagacttcaaccttctgttagtacttatctcattgcctccctccagttgccctatttctctttttaaactagaatgagccctaatcattctcaaacatgttgtgctacaaagttgtatgagtgcattacttttgtacatcttctgtattattaatgatgaggaaagatttcatgatcttatgaaagtggtca

SEQ ID NO: 118600 - DNA, 1799 bp, Homo sapiens
ccccctggcaatgtatgatagtttcagttgttccagattctcaccaacatttaatgttgtcagtctgtttgattttagcctttctactaggtaggaagtggtatctcctttgtgattttaatttgttaccatgaatgttgaccttatttttatgtgcttattgaccattttatgtgcatatcaccttttgcaaggtgtctattgaagtcttttgtccatttcttgcattggacagtttggtggaggtaaacagataagtaattgaagaccaggtagtctgggacaaaagctttatgggcacacaaaatgctatttagtatgttggatgggtggggaaaccaggaagaccacaaaaagaatattatttctaacacttgggatactgtaatgatggttcttgtcatcataggtttttttgtcagtatatattcagaaaactttctcacttaaataaaaattttagtcttctattttgatgtaaattgtgaatttgagaaattacataaaataatagttaagagttagggctctgtagtcagcctgcctgatacaggagtatctggtacataagcattatgtaagattattaaataacgaaactagaatgtattaacatatgcaatttttgttttagtgtttcaatagagaaagaaaagattgatgaaaaatctgaaacagaaaaactcttggaatacatcgaagaaattaggtaatatgagcagtagctttaaattgaaccttatttttttaatactcagtcattttcatcatttttctgttattttccctgtgcctaaatagatgtgctttttaagataatttgttttaatgcagttgtgcttcagatcaagtggaaaaatacaagctagatattgcccagttagaagaaaatttgaaagagaagaatgatgaaattttaagccttaagcagtctcttgaggagaatattgttatattatctaaacaagtagaagatctaaatgtgaaatgtcagctgcttgaaaaagaaaaaggtattacagtgttttatagttactttgtttagataagtgttacatacaacatttaggaaaaatactactatgctaaaacaaccttttaaatataattagctatactaacattttaaatataattagctatatagctatacaacagcaaaaacctgtactgcattttagaatattttactcttataatgtttgttttctgtttatttcaatacagcatattacctgtcttgattgaaatatatacagtcatataattcttgacttttccactaggtggctgtgtaacaatcagtagataacacagaacaagatttgtgggttttattatttagcacatagtatatattacatggagtaatgatacaaagttcacagttttgttttcttctttggaaataccatgctaaaagcagtgtaatggaatattatgggagtccaggtttctcagtcttaatgttcttatctaattccagtattcttgatgttttgcgttttctagaagaccatgtcaacaggaatagagaacacaacgaaaatctaaatgcagagatgcaaaacttaaaacagaagtttattcttgaacaacaggaacgtgaaaagcttcaacaaaaagaattacaaattgattcacttctgcaacaagagaaagtaatttaccaccatatttttttaaactgttcattttgtgtcatacatttccctatgtctctgaacacctttaaattgtgtatatcctttgatctaccaattctatctttagagtcttatcctgaggacataatcatg

SEQ ID NO: 118601 - DNA, 1032 bp, Homo sapiens
tccctccccaaatgtatatgtatatataagtgtaaagaaaaataccagaaggcatatatattccaaactagtagctatctctgcaatgggaaaactaaaattagggggggaagtcgtcaaagataatattaacatcatttgtaatgttagaattatttcacaatggtgatgtatttgtatattgtatagcttaaaaaataattttatgtaatatggaaatcaccacacactttttacataatatgtgaaaaataatgttaatatcaaagccagttgtaaaacagatatatatatataaaatataattttagattaagaagtttctgcatgtgcgttgcatagaaaaaagcctaagatgatatttgccacaatgttaacaaggtataggaaataatctatgaaaacaaatatgctatttctatattgttttaagtttccttgaatctgttgaatttaggtttcatccttctttatctgtacttttttttgtctcctagtacaacctcacaatgccattccaaattattttggtggttttctgtttggatataggaattatcttcgagtcttcatcagaagctctgttcttttcaagaggaaatggttaaagagaagaatctgtttgaggaagaattaaagcaaacactggatgagcttgataaattacagcaaaaggaggaacaagctgaaaggctggtcaagcaattggaagaggaagcaaaatctagagctgaagaattaaaactcctagaagaaaagctgaaagggtttgtattaataggatctcatgtttatgtatgacttcagatgtatttattttgagtactttttttagtattctcttatcaatcatgtgagcgtgttaggttggaattattttataattaagtagtaattattaattattttacaattaagtagtagacacagaatgtgaacacaaaatgtacatgcaaacaagtaagacagccccctcttttaagttaaaagttaaaggttttgccccctttttttaaggccaaagagagttta

SEQ ID NO: 118602 - DNA, 1539 bp, Homo sapiens
cccgtctcggcctcccagagtgctgggattacaggcatgagccaccacgcccagcctacttggacacctttaatggttcccgtctgtccgccaggtaagcccactgtgccctgcggtgatgaccctcatgccaccagcttctgctccagcctttcttactcattaggctctagtctcacttcttattttttaaattgtgagtaattttcatgcttggtagttgatttcttttccatctctgtatgcatacttcctgcacctagtaggcacttgatttttttttctttgaatacacagcagatgccatgtaaactcattagtacttgcctcagaacactgaattcttacctgtgttaaatgcatgaatacattaaaaactttttagttttacttagaagtatataaagtgtaaactaatcagttatgattgtcatacgcaatagttagaaaactactttgacttttttttctttttaataagctataaagcgttaacagccagtgagatagaagatcttaagctggagaactcatcattacaggaaaaagcggccaaggctgggaaaaatgcagaggatgttcagcatcagattttggcaactgagagctcaaatcaagaatatgtaaggtatatagagcaaataatggccttagaaccattaagacaatttaatgttgaaagccagctagtaactgtcccttggcttgcttttggccatcttatactgcaaattaagaatttactcagttaaaaaatgacacttcttgaagagttccttgaggtttaaagaaaaaaaaaggaaaaattaatgaaagtggctataaaatgtttagtgacctcttctctctcaaaccaaaggatgcttctagatctgcagaccaagtcagcactaaaggaaacagaaattaaagaaatcacagtttcttttcttcaaaaaataactgatttgcagaaccaactcaagcaacaggaggaagactttagaaaacagctggaagatgaagaaggaaggtaatctatgattagaacctgagtgccttgttaactcagttacgatgtgattttttaaataactatgtttttctcaatttaattcttccatgcagaaaagctgaaaaagaaaatacaacagcagaattaactgaagaaattaacaagtggcgtctcctctatgaagaactatataataaaacaaaaccttttcaggtttgtcagttaggagtaaacttacttgtgtttattttagggactcactttgttccctattatagtgaggacagtgactcgggttttctgcaagatcattttgctctgcacttacagtgccaatttagctcactattaaaggtttatacattttattaaattatgcataattttttcccacattattgaagtataattgacaaatttaattgacataattttttcaatggaccctttgtggtttaaaaaaaaactttgtaatgtggaacttaaaagtttggctcagagggcttgcctggtatgagcttttgataattaacctattttaattt

SEQ ID NO: 118603 - DNA, 2459 bp, Homo sapiens
tttttgcagattttcttgaatagatgtttcttcatttgctatttttcccttaggtcaattttcagaggctttaactggttaatattttataacttttagtttcactagggagcaggtcagcagaactttcatgctgtcatgccagaagtccatctcagcaattacttttgagttgaacttttatcagaaaaatagctttgtagctgaggaggggcaaggagatttaaaagactgtatctcctttgtcacagctgtttcatgtcattttgtaattcagtcttaaagcctgtgtctagtagtgatttttgctgttgagtgtgataatacataaacaactttggaatttgcccgcaacattggtaacacatttcactgacatactctttaataattgtttattacctattatttctttttacctaggaagtatcaaaactccgctgtcagcttgctaaaaaaaaacaaagtgagacaaaacttcaagaggaattgaataaagttctaggtatcaaacactttgatccttcaaaggcttttcatcatgaaagtaaagaaaattttgccctgaagaccccattaaaagaaggtaagacatgaataaatgtataaaagtgtcctcttcctttggatttgcttttatagcatttagcaagtcatccattttatgaactgtgaaaatttgttgacaccttctgataaaagcagttcttactgagattgttgtgtacaatgactgttttcttcctccttctacgctttcttttctgtatacctggattctgcctgttcttcaaggcaaatctcaaatcttccttgaagctttgcatgactattttgtccctgtccacacaccccaaattactccctctataatacccttagcattttaacctaaatgtctcttaggtccttaatcattttctgatttgtagttttagagaagtaaatttcttatttcttgactgtgaatgtttgtctttcacgataaattaaagttggttgaaatgataaatctaaaaattatcttacagaatatattgcttcatctgccttaaagaagatacaaggcctgtttttagtttataatgatggataaattcgttttaatctagattactaatccttcttttcaataattcttctaggcaatacaaactgttaccgagctcctatggagtgtcaagaatcatggaagtaaacatctgagaaacctgttgaagattatttcattcgtcttgttgttattgatgttgctgttattatatttgacatgggtattttataatgttgtatttaattttaactgccaatccttaaatatgtgaaaggaacattttttaccaaagtgtcttttgacattttattttttcttgcaaatacctcctccctaatgctcacctttatcacctcattctgaaccctttcgctggctttccagcttagaatgcatctcatcaacttaaaagtcagtatcatattattatcctcctgttctgaaaccttagtttcaagagtctaaaccccagattcttcagcttgatcctggaggtcttttctagtctgagcttctttagctaggctaaaacaccttggcttgttattgcctctactttgattctgataatgctcacttggtcctacctattatccttctacttgtccagttcaaataagaaataaggacaagcctaacttcatagaaacctctctatttttaatcagttgtttaataatttacaggttcttaggctccatcctgtttgtatgaaattataatctgtggattggcctttaagcctgcattcttaacaaactcttcagttaattcttagatacactaaaaatctgagaaactctacatgtaactatttcttcagagtttgtcatatactgcttgtcatctgcatgtctactcagcatttgattaacatttgtgtaatatgaaataaaattacacagtaagtcatttaaccaattaatttttcagcttgtattttatgaagttacattcatgcttctatgtaagatgtatttatcatctctaccctacccacaccaccttgtccccagaatcacaaaagatactgtttggaaagtggtaaatctctctctaaaatgcctgttttgcacatatcattggtatgatatttataagctaccttttttataatgtgttctcactgatggctcaacagggactatcagtcagaattgcttttcattattattttattagatcttaatacatggttgaattttaaaatacagttttttaaattaagttcagaagaaacgtagaaattagaaaaattgtctaataaaataaaatggtttaatgggctgggcccagtggctcacgcctataatcccaacactttgggaggctgaggcaggtggaattcaagaccagcctgagcaacatagtgatacctcatctctaaaaaatatataaataaata

SEQ ID NO: 118604 - DNA, 2177 bp, Homo sapiens
accaaatagttttgcaaatagacccaggcttgactggcaattaaacatgaaacttctcattgggtattttcgagactactacggggaatcagctaccagcttactgccatgtggagaactgcacgagattccgggattggaatcaaaatgctaatttaaaaggtcaagtgaagctgctcctcacgttttggcgtgcctgcgctctctgcaggcagaagcgaacaaagacccagcaagagaaggcagaggctaagacccatcccgtatctgctctcctgaaataattctggagtcatgcctgaaatgccagaggacatggagcaggtaagaactagcaattcaagaaatgaagcattctagagtaagagatgctttaaaagcattccagtgaacgcctgctaaaaccagaattgttgtgtaaagaaaatagaaacgggtgtcattcatttccttaaaacataacctcgggacatggaagaataagccaactttagttactgacccggagaaccaggttatgaagggctcagctaagtctcactagctgacaatacagaattgcactttcatttaccattttaaatgcaattatgtatataaagtttctacataaataaggattttatctgtagtgtgttcctttccagatgttctttgtctttgtatgaattgaatctgctaacataacttttagtttcaggctgctctctttaaatgtatagacttagccaccacacgaagttgtatattgtctatgttaagaatggcgtttgattcgcatagaccctaccatcattaaagaaaatgattaaaaaccatatccaaacatatgcccctagaactgtacccaacttttacggggaaagtatcaagtcagattttcaaaagcagccaagttaaattctttctgttcctcaagactaggctgctctgagaatcagaatgctaattgcatatgcttgcccttaaacctgcttcacgttgaagaatgaagaattaattttcttttctcccatagaaaggtaagattacatcacgtgttgcgactagaaactttaaaccgaattcccagttaagagaaaaagtagtaagatgatcttggctgctcccccggccctcttcccgccctcttctttgttgtcccctgattatgcttgtttagcgctggggcagtcctcaaggattccctaaataaagccaaactaatgaacagtaatagcctgtgtttaaaaaaaaaaaaaatcggaacataagaaacctcaggctgtcttcgattactgttctagagaaactttatgtttacacgaataaggaaatgagtttttgttgggggttgaggaggaaggaaagtcatggtgttctgacgtggaaaacttctttaaaaggctgcttagtctttagtttgaaaataaaccaaaaaggtttaggagtcggggaaaggccctaggaaaatccagacagtggtcacgtttgtggacgacgtttagagcttgctatcctgggcacacaagaacccttggactgttcggtgcaaagttggcaaatcctacacggcctgtgccagggtttactttctgcatcaatttcacaggcgtccagcctggctgaggattttttgcggtttttaactggaagggaaataagtcggcatcagcacttagggctgcttaacttttaaaaggtggtagaacgcccagccttacacgctgctgcttaaattctcggtgctcaccaaggctgggctcgtgtggcccaatcctgcaatccccgaggcggtgtttcttaaagagtgggcttgattctggttaaacccattaagaagtcggaccccgggctcgtttcttgttctgtaattatgggtaaagtccaaggatctgcgttttgaagaggtacctaagtagttcatcttccttccccctacaactttttatttttaattagttaaaaatagttttacatttttgatatctcacacacaggttttttctttttttaagcatcccaggaagacaaatggctcagacgccaacccttttatttttattccttgtctttttctaaatctttcaaaacccccacctagagctctagagatgtgtccattatgctctacccacctccgcccccgcccccatgactttaaaatgctttttattccactttttatattgctcagt

SEQ ID NO: 118605 - DNA, 1059 bp, Homo sapiens
tcagagcctccggccgggagtggtctcaccgccaccctcccagccccggatccgaggggggcgccaccgagtttgtttatctcagcgcacacgggtcagtgtttttttcttccagccactgcggcaggaagcaagtaggtggaggttttactttcgagttctgtctctgctcctgaggacgaagaggtttttcagaattgtttgttttgattttggttttccccgtttattcatctttggttcgtatttctcgatcttacaagttcgtaggtttgagaaagaacaggaaaaggtgacttctcacaaataacagtgctggagatgacaacttattgaactcttaagttctcagcactatgttatgcacttgacgggcattactttaatcctccactgtgagatacttgttattgcctcattttgtagacgagaaaacgggcatagagggtgagacattggcccaggttcattccgtaaggttggagcctggaattcagatacaggtttgtgtgactgtcttgggctttgaaccactacggagtttccctgaaggaagattatggtgatgattggaagatccatctctggtgcccccctcgcccccgtcccatcctgctccattccacttaagggcctccagcattaatctgtccacagaacatatccaaccctggggataagaacactactaatgcccagaccatgtcttttggagagagtagagaatataggagatggctgtttctgttattgcaaagttttcatgcttccaaatttacttagggttttcaaatcactttggttctttgagggtaaagttaggataaatggtctattaaacctctatgttcctaggtcctccagaccgtgctgagtgcatgttacatacgtttacatttatatgtatgcatttgtatgtgtacgtgtgcatataaagcttaatctactttcacaaaaagaagttcagtataaaaatgaaaatagcttttcgtgttttccttcattaaaaatgaaacaacgaagagcttggcacagacttactgctctcaaaacctgtag

SEQ ID NO: 118606 - DNA, 1020 bp, Homo sapiens
tttttactgtttttttgtattgagatgggtctcattatgttacccaggctggtctcaagttcctgggctcagcggagctgcctgcctcgcattcccaaagtgttggaattacaggcatgagcctgatgcccgaccctaacttaactttagaattggcttgcagatatgggacatgagtcaaaatacgtagaattaagacatttagggaacaacgatggtgcctaatatatttgagagaactgttttcaaagttagtaactctttctatccgccttcaccttttaggaggaagttaacatccctaataggagggttctggttactggtgccactgggcttcttggcagagctgtacacaaagaatttcagcagaataattggcatgcagttggctgtggtttcagaagagcaagaccaaaatttgaacaggttaatctgttggattctaatgcagttcatcacatcattcatgattttcaggtatgatttaggttattttaagatatacatgaacaatattaagagttgtctggatgatacagaaactatccttgctctcaaggaaattactatgtttgaaagctctaaagttgtattatgcagtagcatttttttcatttagcatgacatggtatatgtaaaccttaaagttaaattttgacacgctgacaaagacaaatatgagacattttataaaatgcttatgtttatagagtgccttctaagtaatactttctctgcaaatggttttcaaatgttactgtaaacctcacaacactgcaaaatagttattttcattttagggctgagggagcaggctcagagaggttttcggtatcattgatactattctccctttgacatggatttattagatatttaaatcatgttaattgcataaatgatagctctttccttttgtccaaattgggggataaaacttgttttgatttagaaagacttctgttttgttcttgtttttgtgacgtaatcttggtttgttgcccaggctggagtgca

SEQ ID NO: 118607 - DNA, 1041 bp, Homo sapiens
tttcagacagggtctcactctgtagcccagggtgaagtacggtagatcgatcacagcccactgtagccttgaattccttggctcaagtgatccttctgcctcggcctccacaacagttagaactacaggctcatgccaccacgactggctgatttttaaatttttttgtagagattgagtaccaaccactatgttgcctagtcttatcttgaactcctggcctcaagcattgtctcacctcagcctcccaaagtgttgggattacatgcatgaaccgtcacaccagagtagaaatacagttgttgacagtttttttcctggtttgtgtctgcatattatgaaatactcttttcagtgcctataaatattttaagtttgaaccttgcggggaaaagaagcagcatgacaaaactacattagaaattacaatgatttattcttagttgaaagaatgttgacttactgcacatttttctctgaattaactttaagaaggctgtaatacctctttcattttattttgagttaaaaatacgtcaatgcttaacttctagccccatgttatagtacattgtgcagcagagagaagaccagatgttgtagaaaatcagccagatgctgcctctcaacttaatgtggatgcttctgggaatttagcaaaggaagcaggtaatgatgactttataaaattttcataaaatattaagtgattgctgagtttttagaaattaaggttttgtagatggttatttgtttttatatatcatgaaaaaccattctaaattccatgaaagagtaatgtcatgtaaacatttaatagatttgtcttctttttttgtagctgctgttggagcatttctcatctacattagctcagattatgtatttgatggaacaaatccaccttacagagaggaagacataccagctcccctaaatttgtatggcaaaacaaaattagatggagaaaaggctgtcctggagaacaatctaggtaagacctaatctatttagcccctgattgtttttgaagactttaaa

SEQ ID NO: 118608 - DNA, 1059 bp, Homo sapiens
gttatatgtatgttgtatgtattaacattctattatggtgtttcttttttcctgtatgtgagtttgtgtataacacacatctccatatataaaaagtatacactccttagaaaaaatgtaaaattactaagaacaaaagttctcataaatgctgcctcagggagataaacaccaaatatggttaagtgtggaagcatttttatatattttcaaaaaatgtatgcatgttgtttcacaacctgttttttttccctcaacatctttgcattttagtacacatggaacctactctgggatatcttactcctatcagtggctgcgtagtacttaatttaatggtcccctgcactaaaactactgccttagactgtactatggccttgagaagcagccctagtgtagaataccttactaatggacatttagttttttaaaaagttttcttgtattataaattattctgttgaaatcatccttgaatacatttgtcttagtttatttcgtgctgctataacagaataccaacaactcagtaatttataaagaacagaaatttatttcacacagttctagaggctgagaagtccaagatcaaggtgagggtctttctggtcctctggaggggaggaatgctgtgttctcacggcagaagagcagaaagggatgtgcttcttccttcaagtccttttataatggcattaatccattcataagagcagagtgctgatgaccacctaaacacctcccaaaatgccccacctcccagcactgttgcttcgtggattaagtttcaacatgaatttttggagaggacaaaaacattcaaaccatagcagtatctaagttctcttgtcatgtaatttaaaagaaaatgtttgatttgcagttaaagtgttaactattgtataccatcagcagggaccattataaaatctaaatattaatgagtggttgtaaaactaatgtgaacactcatatacccttcacatagattcacaaattgttgatgttttgtcacatttgttttatatgtttgcttttgccagacccattgataat

SEQ ID NO: 118609 - DNA, 1398 bp, Homo sapiens
tgcctgtaatcccaacactttgggaggctgacgcaggaggatcccttgagcccaggaatttgagactagcctgggcaatggagggagatctcatctctgtttaaaaatatatacatatttaaaaaaaggtcagggggaacaaagccctcaaaatatagcctttcacttacttttgatttttttgtgtttatctttctttaaagattactgacagccctgtcctaggagcacaacgtccgagaaatgctcagcttgactgctccaaattggagaccttgggcattggccaacgaacaccatttcgaattggaatcaaagaatcactttggcctttcctcattgacaagagatggagacaaacggtctttcattagtttatttgtgttgggttcttttttttttttaaatgaaaagtatagtatgtggcactttttaaagaacaaaggaaatagttttgtatgagtactttaattgtgactcttaggatctttcaggtaaatgatgctcttgcactagtgaaattgtctaaagaaactaaagggcagtcatgccctgtttgcagtaatttttctttttatcattttgtttgtcctggctaaacttggagtttgagtatagtaaattatgatccttaaatatttgagagtcaggatgaagcagatctgctgtagacttttcagatgaaattgttcattctcgtaacctccatattttcaggatttttgaagctgttgaccttttcatgttgattattttaaattgtgtgaaatagtataaaaatcattggtgttcattatttgctttgcctgagctcagatcaaaatgtttgaagaaaggaactttatttttgcaagttacgtacagtttttatgcttgagatatttcaacatgttatgtatattggaacttctacagcttgatgcctcctgcttttatagcagtttatggggagcacttgaaagagcgtgtgtacatgtattttttttctaggcaaacattgaatgcaaacgtgtatttttttaatataaatatataactgtccttttcatcccatgttgccgctaagtgatatttcatatgtgtggttatactcataataatgggccttgtaagtcttttcaccattcatgaataataataaatatgtactgctggcatgtaatgcttagttttcttgtatttacttctttttttaaatgtaaggaccaaacttctaaactaattgttcttttgttgctttaatttttaaaaattacattcttctgatgtaacatgtgatacatacaaaagaatatagtttaatatgtattgaaataaaacacaataaaattaacacttgatccagaatgttaacttaccaccccatcctagaatgttacagttactgtatctatttgt

SEQ ID NO: 118610 - DNA, 1025 bp, Homo sapiens
ccgccttactaggcatttctcttgggattcagaaacttgactaggtctttttagacattcttataatatccccattaggtagatagaggcaaggtggatgaggagaagaggcaaactcaaacattgccaaataataatgagaaaggaaaggcaacaaaggttaggagttttgaatcacgtaggccatgctgtagcacagtctgggaatgaagagaaagggccctacagctagaaccaaggggagtgagagagtcagattttcccctgcagctatgtctgtttctcatactatatctggcattaagaagaggtattggcatttctagggtatttatgtattatttattacattattacttgaaaaaaaatcctcttaattctatgtctgaaatctaacaccataaacttctgggctcttattttaaagccacaaaagaaactcaggccatcaaataaggagaagtaaagagagatcgtaacatttgaatggagacagatacaatttggcacaatcgatcaaaattcaaaatgcacattatacataccctttgatctagtaatttcacttccaggaatttaacttttgaatataattatataagtatgcaaagaaagatatatacacaagatgtttcattacagatttgtttttaatagcaaaattctgaaagcgatctaaatgtccatcaagaagagactggttaaataaattagagcattatggaatattacacggactttaaacaagaatgaggtaagtctacataaaattacctgaaaatgcttccacaatatctgattaagtgataaaaaggaagttgccaaatgatatgtatatgattccatttatattaaacttaaaatatacatgctcagacatccacaagcatttttgaaagcctaaaataatcaaccttcaaatgaaatttccttgaaaatggaaattgaaaagcagggaatattcctttccattttctgtctatgtgttgaatattttaccaagagaatgtgtacattctacaata

SEQ ID NO: 118611 - DNA, 1244 bp, Homo sapiens
agggtggccggcggctgggactgtcccacgagggggcgcgtctcgggccctaggacccgccctcgaggcgctgcgcgcggggaggggacccgggaacccaggcgcccggcgctccgcctcccgtttccggggcagcgcggttacctgcaccgcccgagccgcacctggcggaggcagaagtcacaaacccggcgagctcagagcggtggagcggagaggagggacggcacccggctgcagggaggagggaggcggcagcggcagcggcggcgtggagggcgcagcgcgccgcgcggcggaggagggcagacggcggcggcggcggcgctcggctcgctctgcccggccggctgggcgcgcacccgggctcgcaccgcgccgctgcggacgcacatggcagcgtgagaggccggcggcgggaggagcgggcggcgccgggtcggggctgcagggccgcatggacagcggcgccaccccggccggcccctactagggccccccatctgcgggcgccaccccccggatcatggtgcctcggcggccgcccgggctaagagcggccggctggagccgctgagcccccgctgcggccgggagctgcatgggggagcgccggcagcgcttgggaagatgccccggccggagctgcccctgccggagggctgggaggaggcgcgcgacttcgacggcaaggtctactacatagaccacacgaaccgcaccaccagctggatcgacccgcgggacaggtaggaccctggaaccctcctccgtgcccccacacccccgcctgggcccccacctgcccctggagccgccggccgggactgggagggggcaggggagctctgcgtgcctcttgagctctcttcagttcgccaccccctgctccccccaaccttctggagcgctgctcccgcctcagtgggccaccgagaggaggcgcctgccggggagctggcccaggctgccccaccgccatccccagttggaggacttaggccccagccggcacctgcccggagttttgaccttaagctctagccccgcccgccccctttaggaagagaggtcgggcgggggcgggggttgggggagcgacctagccgggtgaagccgggtcttcccggggaggcttccacccagcgtggggggtgggcggatggggatggggaagtgtccggttagagggggtggtcaagaccccaggattccgtgggagaccactggagagagggcactcg

SEQ ID NO: 118612 - DNA, 1271 bp, Homo sapiens
ctgaatgtctcatgaatgtaatctggaaggtaaatatttagtgctagagagcatctcttaggcaagctgcttcaacctctgagcctcagtttccctgtttgtcagatgggggagcccaccatttccctgaatttaaaaagtttgcttggaagggaatattgggatgcttaaaacttggaagggacgtacatcagcgcccaactcccatttgaaacataagagaaaatttgaagcccagaggtgtgatttgctcaagtattttgatttttctgccattctgcgtaccagttcttcaccagctctgaagttctaacctgcaaacttgtcaccctgacacactgcttccccacccttactcgggtcagttgccagctctgctactgtgttggtgaacttggcagcaccttttctcttgtccttttctcagaacagacacaagttcaaacatatgtgacctgccccaatttaggtccctgtagtttacggaggcctgtgtgctgttagcaggtggacgtcctgttggagggaaaggaccgcccctgccaacactgataatcatgcatctggggacttctaatacagcaataggaggcccctctcaacagtaattctttacccttggaaaagggtaagtaagtagcttctatgaagaactgattggctggagcacaatctcccaaattttagtgttacatggaccacctccatgatttttttttgctatatccacctgtgctattgcttacttactccttgactttagatcaactcactttaaaaatatgtgtaccattttcacaaatgggaaactagttatatctattgtcatacaggggaaacaaaaaagataggcaaacaaaaaaaacaaaaaaccagggttagtatattttagctaggtactgtggccagcctaaggccacagcacctcacctgcccagcctttgtttttaagcagattggcaagccatggagaggcggcagaaacatagtggcacttaggtgagcagctcaccttcttcatcttgtgtcattggtttttttgtttgcttttggtttttttgtttatttgtttttgttttttggagacagagtctcgctctgtcgcccaggctggagtccagtggtgcgatcttggctcactgcaagtctgcctcctgggttcaagcgattctcctgcctcaacctcccgagtagctgggactacaggtgcacgccaccacatccagccaattttttgtattttagtagagatggggtttcactgtgttgcc

SEQ ID NO: 118613 - DNA, 2010 bp, Homo sapiens
gctgcacggttccctcagtggcagaagccttgatcaggcttcagtggcacttgcagggaatgccgacctaatgtcaggtggctgtccatgacgtgtatcaggagctctctccagccacatgtggtgctaggtgatgaggctctgcagcctccagttcagcaaggggccctggataagaggaatccacttcacttggagaagtggcctggtgacatccctatcaccagctcctcgctatttgctaagggaagcacctccacttggacagggctgagggctagatctgggcaaaaaactcccgtcttgcctctcccagcatggagatggccagctggctgcacacctttaggtagaacagcaaaggttcagttgctgctgcctcgaatccgtttcagagtgagataaagaaagagaaaactaagaaactggatacagtgacattttgttattagaccttccccagcaggccatttagcctttagttcctgagcagaaaaataataatggggtggcgggaggagggggcaggcgttcactgttgtgtgcggagaatattctctaaagatgcaggatggggaagagggggtggagcagagagtggggaggagggaaagaaaaaggacaagtgtggtgggtcacatgcccattctccccaccccccaccccttgccagttgcctgctcaatgcttctacccatgacatctcactgttgggaagaaatgagatctttcagtttcaaatgtctgccaaagaaaagggacggaggcttaagttctcactcaatggtcagccagaaaaaaaaaaaaaaatgaagctgcatcaagattagggacacctttgttggctttttttttcttctcttgctccattcatcactctctggcagcgaggacaccaggccaactgcagctgctgactttccccagtcggctgcctgctgttgcccaggcctgttttggtagcaacccccacactggcttcctccccgcccagtggtggttacttgttggattcgtccctggggtagcccctgggatccactgacgggtaacagacttggaaggataaaatgtcaagatgcaggcatcaggtggctgctaggatgagatgaccctgggacagccttccagtcctacatctgtcgtggcttttcttggagagtcgggctgtgagcatttcactgtattccaggaatttcttctaagtgcattgtttgtctttgtatcactaacagtgagaacaataactggcacctggtgataatggtgataaataatcatgattgtctttaaagatccttatccattgtctgtcacgtgccaaacactattgctcatcatatttttatggcattttgcaaatgaggaaactgaggccgagagacaagtcaagtgacaagctcatttttccactatggaaaaaaatgtgtatgtgtttgttgttccacccaaacatgggattgcataccacacgattcacgattccctgtagtagataagctctccataaagatcattagaggacactgagtcaagtctggctttgtcactttaaaatagtaagtgggactgggtgcagtggctgacacctgtaattccagcactttgggaggccaaggtgggtggatcacctgaggtcagaagttcaagaccaccctggtcaacatggtgaaacaccatctctactaaatatacaaaaaaattagccaggcgtggtagcaggcgcctgtaatcccagctactcgggaggctgaggcaggagagtcgcttgaacctgggagacggaggttgcagtgagtcgagattgtgctattgcactccagcctgggcaacaagagcaaaacttcgtctcaaaaaaaaaaaaaaaaagtaagtgaccttgaaccagttccttctcagctataaaacaaggataagaatagaacctacctacccctgagagtcatggtgaggatatgacatccaacatagaaagtcttagcgcctatcatgccttcatatgggagccct

SEQ ID NO: 118614 - DNA, 1005 bp, Homo sapiens
tttttgagacagagtcttgctctgtggcccaggctggagtgcagtggcacaatctcagctgactgcaacctctgcctcctgggttcaagtacttttcttgcctcaacctcctgagtagctgggattataggcatgcaccaccacacccagctaatttttgtatttttagtagagatggggtttcgccatgttggccaggctggtctggaactcctgacctcaggtgatccacccatcttggcctcccaaagtgctgggattataggcgtaagccaccacgcccagccagtctaagctactttagagttgtaagcctgggggctaggccttcctttcatttgctgaacctggtttggattttatgcacataatctacatcttcgagactccaagaaaatgggttgcagacactaccaccatatagatcgcagcctgtggacaggaactaataattgctaatatttattacaactctaggttgtgccaagctctgggctgtgtgctttgaatgcatcgcccagtttaattctcatagcaaccctatgaggtaagaaccatctccattctgcagatgaggaaattgaagcttagaaagttgaaaacttgcccaaggttgcgtagctaataagtggcagaactgacatgcaaaaccagtctgtctgcccccacagatgcatgttctttaccatcacgtaggtcaggccaggatgtcaaggagagcaaccccgaactagtcctggtgatttagactagagcgtctttcactgctgtgattccttcattggcactttcttccagttgtacagtgtctgtctttgcttggtctttgcttgttctacccttagtttagcagatatccctctctccatgaacaaggtgagtgagctctttttctgagtacatttggtttttcaaaatccctccaaggaatcatttccttgaccaaatgccctcatctgtggtggcgatcaacatctttgattttaccctttttttttttttttt

SEQ ID NO: 118615 - DNA, 1035 bp, Homo sapiens
ttcttcctgctacagaaaaacagatgaaagaacagttttccagtcccagggctgaccccaaacccaggacagctagaatgctcaggcctcccccctcttttcaggcaggagaagctgaagaatagaactattggaccatgaaactcccaagagtccttccccctcagcgtttctcagaatttgcgaccacgattttctctgtgaggctcgcaattgctatttgccaaactggtaactgttgacccaacagaaatcaaacaaagataccagcagccccagacaggctgtcttcatcgcatcagtgaagggagagcaggtgcctgggatcgaaaggacattgtccatcacctggctctgaaaaacaaaatgcatttccttattcttaacaagctgagcaccagaaacctgctttaccagtccagggtgcctcctggaagctggctcgcttatctgcatgtatgtgagggctgggggtgtttttgtggggctggctccgggcagggtggctttggaaaggagaggcctgacctagcgagactctagggtcagcccagactgctgtgacctcaggggactcagcccaggaggtccaggtgagggcagcctgccctctacgtctgcagtaggtgaagaaccccttggttacttgaagagaaagaaaggactggctgggttgtaggcagcagggccgagcagctgagggctaagtgcacagcaggccctagcaaatgcttctggaattgaattggtccaaggggagactccagctttagttcaacatgggctgtatccgaatccttctgaaatttgctgggattccatgagggagtcaggtattacaaggttttggcaattactgagtttcttttgtgcttttttctttatgagaatgttgtttctgaacccattccctttctcttcccttctcaccaaattacacttgatttgcctccaggaagaaaatagtacattgttatcatttggtcaagatttcatattcaaaaaagagtaaagtgacaatatagttcaaaaatc

SEQ ID NO: 118616 - DNA, 1025 bp, Homo sapiens
tcttaggatatacagctattgagaaatgtgaacacagaggccttttcagagagaaagaagtcctgctcctcagtattcccaggatcctagcttactggagagattaaaaggctggattatgtgggaaggagaggcaagtggactgggacagtttagatctaattgcctaatgactcctagaatatgtccttccagatgtcctcattttcattcagagtcactgcctgcctttgtgagaggtcatacagtgttgaatgatgcgttatcagtgtaatgcaatagcccagtgacgtcatgaaaatcctggctttctgagaacacgttcacagataggaatgcagtgctggagagacccgagggtcttggtatactgcacaattcagcttctattgtgtaactcctgggtttattggccctttgttgctgctctctttgataaagtatgattttttttttttaactttctgattagaaatcagtagtttaagcctgctaatcacctctttggcttggcctgcagatcatggaaagtccacaacacttaatctgtttgcaaatgttctcttggttccagaagttcagaaatgttaccagctcccaattttttataagattgtataatttttaccttaattacaataataaaggttctgagatctattacacagataccttttcttagtttactttttaaaaatttatttttaattgtggcaaaatatatgtaatataaaatttaccattttaaccatttccgatgtacagctctgtggtgttaactacattcatattgtgcaaccatcaccaccatccatctttagaacgctcttcatcttgcaaaactgaaactctgaaaacttctactttctgtctctatgaatttgacttctctgactgcctcatataagtgaaatcttagagtatttgtcattttttgtgactggctattttttttttttttttgagatggagtttcgctcttgttgcccaggctggagttcaatggcgtggtctcagctcactgc

SEQ ID NO: 118617 - DNA, 1041 bp, Homo sapiens
ttcaccatgttggccaggttggtttcaaactcctgacctcaggtgatctgcctggcttggcctccaaaagtgctgggattataggcgttaaccactgaacctggcccatatgctttttaaaaagccaactcctcatgccacttcaaagctagaaaggcagtagagtgtaacattcaaggaactgatcttagaagccaaactcccaggttttaatcctgtctgctctccttactaacttggtgactttgagtcagttacaagacctctctgtgcttcagtttcccgtctgtgaaatgggataagtgacctaatctcatcaggttaccaggataactcagtgaattaatagagataagtcccataacatgtgtaagactctgtgtgtttggtaggtgctgggcatcagtgctgtcagtgaacagagcagaatctgctgccttcatcctcccgggatggctttcttctctgctgaggctttttcaagtagagcaaaggccttgggaggctgaaatgagatggtggctggaactggtgggttttcacaccccaaaggtgggtgtgtcaaggggcagaagaacaggggcagtttctgtccgatgtccctcctggaacttggcatgtctggtttcaagaatgagtgagtgcagaactggcaaccagaagacaggaacaaggcctgggaatggagcggaaaggtagctgctatatatagttccttcagccagtaacgattagagccaatagccatctggatgatgaatggctcctaattgccttaaattacggcagttagctaagggtttctgttgctacatgggttaccgtaggccgctgcaccctgcataactgtcctcaggcctgcgtcccctgagtctcagcacttgggcctccatacagtgccgtatttggtaggacatccccctcatcccagagatacctgggcttttgtgccaccgggattaattccatgagcatcagaaggaccctaagttatagcttccccttttcttcccagagcggatttccaacttggtctgggaa

SEQ ID NO: 118618 - DNA, 1062 bp, Homo sapiens
ttaatacctcgtgttatttctgcataatgtcagctcaggaggtttttcttttctcttttaagcctcttctgttctaggaagcctagaacttttctagagcagcagttcttgaagtgtgatccctggaaatatttgagatcctctcaggagatctgcgaggtcaaagcttcataataatactaagaaattacttgcctttttaactttcaacctcttacaagaatacagtggagttttctgtaggcaacatgacatgtgattttgtaacagattgatgcaaatgcagctcttaggagtcactgtctgctattaaaccatacattacattgaggagacttgcaaaaatgtaaaatataccactcttctcaccaattttgaagggagattggaaaatacaaaaaaaaaaaaaagtttaagaactgctatcctagagaagggttggaaacccttctgggactaggcaggctttgtggaccataccatctctgtcttaactactctgtggaaggaaagcagccatagataatatatcgacaaacaggtgtggctgtgtctcagtagaaaccttatttgcagaaacaggcaatggatagatttgacctgtgggtcatggttctctatccttgctctagactaaaagctttaagagggcaggagccacatttatcttgtaaactgctttatcctcagcacctagcacaaggcctgctacttagtaaatacttgttaattttaatagaaatagtgtttagctgctggtagtagagatcaataataacagtggcttcaagatagatgttatctctttgttacataagagaaaaagaatcaagagacaggtcggtctggaccagggtggtttggtgccacattgtcatcagggacccagattctgtatgcttttctaccccaccattttttgcatgtggtttccatccttaaaatcacttcatagcctaacaatgcttcaaaacaattctcaagaagattaagctgatcggccaataaattaggcatcaaaacaaaactcaacattcttgaaagaaagaaaacaaagttcag

SEQ ID NO: 118619 - DNA, 1063 bp, Homo sapiens
tggatgaagagttggccacacctctcccctaaagctgcagaatcttctgactataaaaagagctggtgcattcagaatcctctacaaccagtccttcccctgaccttcccagaagcttcgaaccctcagtgctgagctgccaagacgagctgggtgactaacatagccattctccagtttggggatgtcagaatgtccaccccttccccacttctcgagggggtcatgcttcagaactgcagccctgccacttcctcacttcagccttgtatgtaagagtagcaagcccagcaaacagcccaaatctctctccctgggggctgtgtggatacattttggggcacccatgcaatggagtaccttgtggacactgacaagtctaaggtagagctacaggtgctcatagggaaaggagtccaagatacatgatggagcattcagcaagattcaaaacagtagtttatatgtttaaagaatggagttaaaagtatacactcccatcaactagagttttacagatgggcttcaaggaattatctgttccatagaaatgtttggcccacatggttttgaaatagctgcttctccaggaccaccctttgaaagcttgtgttcactgcagtccacccttcccacttcactgggttacctgcctgggtcatgctggaatttgagtttgcaaccccaagacaactgagagtgagttaagggaaattgtgtatgtcctacagtgtgattgatcagttttaagatgaacttgtttgttttgcacgttaatatcttcgaatgtgaggtactcttatcaatgctgttggccattgctatcgttgcttgcaccatgcacaaataatgtcgtttctgttaaggtaacgtgatagctgtggcccctctgtgttttcattgaaaaccgtggaaaaaccatttgcaaacaggtctttgttcttattgaaaaactttctttgacatcttctggtgaagtcaagaaagtgctagaatcaaaattcaaagtaattgtcagcggcttggaagagaatcacggaattctctttcaagaaatgctgct

SEQ ID NO: 118620 - DNA, 1092 bp, Homo sapiens
agaagtttgagaccagcctggccaacatgagggaaccccatctctactaaacatacaaaaattagccgggcgtggtggtacgtgcctataatcccagttacttaggaggctaaggcaggagaatcacttgaacccaggaggtggaggttgcagagagctgagatcatgccactgtactccagcccaggtgacagagtgagattctgtctcaaaaaaaaaaaaaagataaaaaataaatgccttaacattcagtagcacaaaagaatgacactgtgaatgagaaacacacaggtgctgatgactcagagctgagaaggggctcaatcttataccatagttcattcatttcatttaacttccttgtcatacatggaaaagagagtcatataataaaggccatatctaaaaaaagtctgagctttttcagtacatataaatattctaaggtaaggaaagctttgggtcataacttattggtagtgttttccttttctggttgcatctaataattctgtttataagtgatactttcttagtaatgaagtagaatatgtgtatgtatttgatcagcatgtatatgtgtttttgtgtgcacatgcatgtgtgctgggttagtgtacctgctgatatgtctgtgaaaacatttctggaagggcacactggaaatattaacttccctgtaacttaagggtttgcatagtaggtgaggagggaaaagtttcttgttacttgtatttgtgggttacttctgtatgtttttggttttttctttttctttttcttttttttttgtgacagggtctcactctgccgcccaggctggagtgcagtggcacaatctcagctcactgtaacctctgcttcccagactcaagccatcctcctgtctcagtcccccaagtggctgggactgaaggcatgagccaccacaccaggataatttttgtattttttgtagagacagggtttcaccctgttggccatggtggtctcaaactcctgggctcaagcaatctaccctcctcagcctcccaaagtactgggattacaggcatgagccactgtgcctggccatttttcacttttattaaa

SEQ ID NO: 118621 - DNA, 1046 bp, Homo sapiens
tatctagtggctcccaagcctctgttctgagcactgtgtcacctccaagtaggcctagcagccagcacttgactatttccagtcttcttagcatgttccattcatttgctaatttaattgtttataaaacttgatgaggaagatatgattactttcatttctgaaattactaaactgaggcttagagaaattaattagcagaaccaggatacagacacagctccctctacccagaaagcccttgctttcctccccctaaggggagaggggagtctgtgtcacttagagcaaatcgcttgtcctctctggtcctcgtttcctcatctataaaagcaggacattggacgttgtcagaggttttcaaatgttgttttagcaatggaaccatttcttgaaatggaatcttctcattgaaccctggtatgcaaacccctcccttaaccgcccacttactgctgccctcagcccacctggatatgtgggccccacaaaacccaatttgagaaactcagctgtaggtgatttccaaaggcctttccagtttgatcagccatctttgcttctgtaattttgggtccagcagaagagccaaggcacgttctcctttttaaaaacaatacccggccagccacggtggctcacgcctgtaatcccagcaccttgggaggccgaggcgggtggatcacatgaggtaaggagttcaagaccaccctggtcaatgtggtgaaaccccgtctctactaaaaatacaaaaaattagctgggcatggtggcaggcatctgtaatcccagctactagggaggctgaggcaggagaatcgcttaaacccaggaggcggaggttgcagtgagctgagatcatgccattgcactccagcctgggcaacagagccagactctgtctcaaaaaaaaaaaaaaaaaaaaaaaacaataccttgtgatctccatcctcctcaggaccccggccaggaggatctgagcctgtgccccagaactccttgttgtatgtttaacactgactccaccgtagggaagaaagacgaaa

SEQ ID NO: 118622 - DNA, 2959 bp, Homo sapiens
ggagtttcctcacgttggccaggctggtcttgaactcctgacctcaggttatccacctatctcagcctcccaaagtgctgcgattacaattcaaccatttaaagcttacaattaagtggctcttagtatactcagagttgtgcaaccatcaccacaatcacttttataatattttcatcacctccccacaaaaaactctgcaccacttagcagtcatcccccaatcttcacttccccccagccctagacaaccactaatatactttctgcctctataattttgcctatcctggacatttcatataaacagagtcatacaatatgtgaccttttgtgtctggcttctttcagtgagcatgatgttttcagctttcatccatgttgaggcatgtagcagtacttcattgcttttcattgccaaataatattccattgtatggatatgccacattttgtttatccattcatcagtttgtggatatttgggttattctcactttttggctattatgaatgaatgctgctatgaacattcacgtacaaacttttgcatgtacatacatttttctttcttttggatatctggtagggactatttttctccttgttttacaaataaggacattgaggcacagaaagtttaagttatttgcctgggtcacacagcaaataagtaacagagtcataattagaactcaggtagtctgcctccaaagtctgtgctgttcatcagtacctctcctgaacgcttccttatagcagctactgtgccaggagccagagagactggggagagcaaagcagacatgtccctgtccttgtgaaacttacagggagaccatggcgcaataatcgaagacacgggaaataactaccatgacagctgcgttaaggattacagtcgagagttgcaaggttctggcaggtagaccaatgggctatgggacttgtcatcatcagagtggccagggaaggaaagcttccctggagaggaggtgcttgctctaagatctgtaggacatgtaagtgctaaccaggcagagatggaggaaagcagcagctttaaaggatgcaagactcgagggtgcggccagtatagtatgcaggcttctgaagtcaagcatttactcatctattactcagcaccccataggcacaaggctccatggataatgggtcctagggacactgctaactgagaaaaatctctccagccccaggcaggaacacatcttgctgtcagagatcactgatgtcccagtctgagagacccaaattcccatccctgcctctcattttcaacatcaaaaggctgctatgctttagatctaaaacccaggatggcatttttcatctcctctcctctaggtagctggcctttcaaatgggggagaatatcattcctcttcaaagcggtgcaggtgtcatttgctgatttaaaaaaaaaaaaaagattttggaaaaagtaaggcctgggtcaccagatacacacctgccaggtgttcagatgctggtccttccctggccccttaagtgagccatgaaaaggacctggtgattcacccacagataacggaagaaagttctgttacctcttgatagcagcttttgtgtccaccccatttccccaggtgggccgagagcattggtagctaattgtaatcactccacacaattagagctgtgctgccccttcccctagccagtggacttcggtacccagagtgaagcctgcagcctgtgtcagacaccagcatgtgtaatgggaggaaacagcttccatgtccagagcgctggttccaagggcatcttcaggcactgaaattggcactgaataggcatggggaagtttcagtggaagtgaatggggagcactggggggacttactgaaagactttcagatacagggagtatttgacacagctcacctccaactggcctggttttattctgaattgtttggagcagaggaagggagagggaaaacataaagatcagggtaataggttctaggagctgacggagctgatggagctgaacagggtagggaccatggaaggtagagctattgcgcaaaaattaggcagcctctaggcaggcaggcacttggctggatccaagtggcagtgttaggtgctgtgggtgaatgcacacccacaagtatatgcacattccctgcctcctggaagctcacagttcagccagtgatacatgtatagaagtttgaagcagtaacattagatatgaggttgaattcatgctgaccggatttctgtggacttcgtggaggccctgaaggctttgtaggatctagaaaggcagaaacagatgtggtgggggataggttgaagagtcgtggatgactcactaagacattgaggtgggaaggtatgcagggactataccacactgtgtggaggagggggttcatggaaagggtaagaactcccaaagggtagatgaagagccatgaagacccagctaaggaaacccatgaatgactgggatccactggaaagtcttgagcaaagaaccggaggatgcaagtgctgcagagaacagaccccatactgtggacggattgagagcacagtgggggcccctcaagctgttccacactctgggcagtagggtttatccaagtgcccaccaccaagtatctgggcactaggcagggagcaaggggtgtttccagttccagtgttaaaaaattccatccaatttgtaggttccaaggaaggattgggctcccagaagcttggagttcttgttttatgaccaccatccagccctaagagcctggggggtttgtatgcattttcattgcgcagatggacctcccaattttctcaactttacttccctttcacatttgcacagaccatataatcatggttttaaaggtcataaagttcactgtgctaggagatacagaaatactttcttgatgacggggcc

SEQ ID NO: 118623 - DNA, 2228 bp, Homo sapiens
agtgagctgagatcatgccactgcagcctgggcgacacagtgagactatgtctcaaaaaaaaaaaaaaaaaagttgaacttttgcttctgggatgtttatgttttttcctagtcttcaggggttcagggctctcagatgtctcccccaccatacctccactcagtcttccactgatgacatttcttaataattcacgtgcttccccctcggctcagttacacattggagaacactgctgcatctgaaccactgtagctgacaagctatcatgcagctcacccaaacagcagcttgcaaggcctatccattctgaacatttggaatggaactcttctgatccttattttccacctagaacagtcataatggggcaatgggaatgtattgattgtcactgttttgcttgtataccttggactgtttctgcaaaaggagatatgtttgagtgttttaaggcagccttgcagatagcttctaaaaagaattcactggcctgaaaaaatgattcctagcctgcagaactttcatttgtcttccctgtgcttgagagagttgggtagcccacaggaaagaacaagtggtgaaaacctggcttctaatcctaaagcttccaacagcgagttatggggtcttgggcacattctttacatttcaggctcggttttctcatctgtagaatgtgagtgttacttttctcctccagaattgtcctgtgggtcaagatgagatagcagatgtcataagagctttgtaagctacaaagtagatgtatatgtgtgggataatagtacacagtttcctgaactaactcatggagttcttgaagacatcagatgaaacagtagatgggaaaattctgtgaagggaagaaactctgagcatctctgaagcaggtgctcttgctcaagccttagcattgcgtctgtcacagcaggaagcaggggctgcttgacaaagcagtgcagggggttcatattccaaggggaggttttatttagaagagaaattacttaaaatagaagtcaaacatttatagtaaatattggggggaaaagatttgatcaggccttcattttgagaaatgaaactaaaaattttaaagtatatttatactgtatttaacaacatactgcaaccatgccccagttcttagtttgaacaaagtgttgatttattttttgtgtaattatttggagacaatgagaatagcagaaaaggacatttttctcttctcgtttgactttcccaccaggctcataaggaaggtcatttttacaaaatattgaaggttttatctgttttcctgtggccttgtttaaccccttggtatcactgaaatccttctcttttattattttatttttagaggttcactctgttgcccaggctggagggcagtggtgcaatcttggctcactgcagtctccacctcctgggttcaagctgttctcctgcctcaacctcccaagtagctgggattacaggcatgcaccaccatgcctggctaatttttgtatttttaatagagacagggttttgccatattggccaggctggtttcgaactctcgacctcaagtgatcctcacctcccaaagtgctgggattacaggggtgagctaccatgccaggcctgaaatccttcccttttaaagggcctgttgtctcttcttctttatcttaatggattttctccttttcagttgttacctgagtaactcagccattccttgggtgtgattgagtagttattcaacatgacattcacaaacttcatgaaatcctgcctcttttagaatattagtgatttcccttgcagttgacttggattgtacttgcattgctttgtcagatgctaagacatccagcagacccataaagatgttgacagtaaatactgatggcatggactagacactaatgttaagtggggagcaatatttgtataggcattgattttattataagtactcaattcatgggttaattttttaactcagctcatagtttttatattttgatgactcttatttctctaagtgatcatctaagtgcaggaatcaagatacatatccagtcattgactttcccctgattaagagagcaagctgtggagtcagagtggctgggttagaatcccagcttctacttgtacaatctgtgtgacccttgataagataattaaattattggagtctcagtcttccccagtgcgagcctgcggggac

SEQ ID NO: 118624 - DNA, 1034 bp, Homo sapiens
agcacctgttgtatgcaagcactgtgcaaacacctggcatacctgagctcctttattcccgagatgggtgttactggcagccccatttgacaggttgggggatgtgatgtgcaccgtttcctgaaggtggccaagagaagtgatgtgcaccggccacacagctggcaagtggcagagctggttcctgagctcaggggacgtgactgtgatgtgtgtgcacgggtgtgtgcacaggctcaggtagggtgaagctcagggagacccaagccctcaccctcaccctctctactgttttcctgccaaggaggggcacatcctcaggatgtttgcaggctttattctgcctgggcagtgacccaggctcctttaatccacagccggatgggaagagctgctggcagagggaagggccacacatcattgtccctctccctgaagcatacctctcaagaagttccggggtggggtggaagcttggctgtgagcacaggcctccctttatcccaccttgacctcaggtgggccagaggagagccacacacatttgccagctgggggtgcggccatcacaaacaaggacttctccaaggaggaaatacaaaggtgccatccggaaaagatcaaggagtagttgtccaggcagggtctgctggagaaatacaaagaaagaaattatcagcctaggaaagggccctagcagagccatcctgaaggtagcccagaaggaatttgattggggtggggccaggggtatccagcccccacactgcagcctgggatctttgcttgagggtgtgagaagaaaggggtttcccttctgatggaaaagttcctgagtggtctgaaaattccaaagctaacacatgtcagctgctttcaatatgctagacataatgcctactgctgtacacacgtcatcctataaacctccccacagctctgtgaggtggggatgattgttatccccattttacataggaggaaactgaggcacagcaaggttaatacgcccgagattcaagagctggcaggtg

SEQ ID NO: 118625 - DNA, 1124 bp, Homo sapiens
cgtgtttattgtaaggcttcattctggagagaaagtagcaggaagcaaaggaatgcacacttcttgagtcctgttcagttccagggaacatgccgatgcggccggaggcccatggaggcaaggtgtctggcccaagctctcacggctgtgaacctgggtccctggggttccaaaggctttgcccgctcccctggcctccaggctcttatgtgttggtgtccataggaaaaaaggtgtcatacatcggtgtcaggcaagagtcttccaagtcagctgagctgggagaattccccggcccacaccctgctctgatctgggaatcgaatgtgataatggagtcaaccttgtctctcaaatcactgaaacctgtagacaatccacaaggatcctttctaccttagtgtcaccttcttcccccaggactttcgagtagagctatccaagggctgcagaatgcacatgccagagagagctggcttcttcatgatgatgattatactaattaaaatgaaacaggagtaggagacagaggccttgtttgctacccagtgggttatgcattcccaggggaagggaattggctcttgtcgcgcttctccagttaccagctgggaataagggaagcccatggagacggttcctggtggaggagatggagcagtgggccaaggctcaggtggctcatatccaataatcctggccctacctagggccctgggagccctgtcagttgtgggaagtctctgagtgtcatctgtaaaacagggaaataatcatgatggtcatgatgccactgttgtgacggttatttgagtatcaaataaggtcaagaatccaaaagcaccttgaggaccttaaatgtttcttcaatcacaagtttctctttgttgggacaagcaaaatttggaaagtagagggcctagctgtgaaccctgctgggaattccaatgagatctttctttctttgttcttttgtgagttcatttattcattcagtgaacattcatttggtgcccactcataagatgctgaggttacaactgttaataagatattaagatactgtctttttcttcctctttctctcttacacacacacacacacacacacacacacacttttt

SEQ ID NO: 118626 - DNA, 1181 bp, Homo sapiens
gagctaatgagtgacagtgcctgcattgggacccagatggctgactccagacttgtgagttttaaccaccaccgtgtatctcttagggtgaagactgataatggtgggtgtggtgatggtggtgatgatagctcacgtgttaaggatttgagataaagggtgatgtgattcttcacaacgcgcagaactctctgattatgtttgcaacccacatttatcaagggcttgtcttgtgccagtcccggcactagatactgtataggttatctcatttaatccccacaacacccttatgagagtgggccttcctgtgtaagtttcacagagaagaaaactcctctcaagcaggttacataacccacctacagttctggaagaggtggagcctgggtttcagcctcgcatcccattcctgagcctttgtgggtaacatctaccctgcctcctccttaaccatggagctgaccacagctctttcctcctcccctccccagccctccctgactacaccccattgctgcattctctccctgcccatggcccgttggcctttcgcgtctatactgctgacgtagcaccttattaaatatccctgcatcctctaattacctgtggctcaggccgcgggtagcgttacagccacatacactcccatggaatgttgtggggatgactccctgcctgtttggagtgtgagtcttgttccccggccagaccctctgcccctggaagcagaaacatggcttcttcaagcgtctgagccctcgtagtgcctagcatgggcctggagtgccatactcacttgataaatgcttgttgcttggtggattgattgaaatgagggtggaaggatgagagtggagggtgaggcagagagtgtctctgggtcaccctccagctcaacacaagggcagtggtcagaggaataatccaaagtgcatacccaggccccagagccgccaaagctgacctccgcctccacttcacctgaatagcatggatctctctgaaatggccctcttgatttgcttctggctggggtgcatctcgccctctagactgtaagggcagggccctatctgtctctttcctctgtagctggtgttaacgaaggctctgctgtgtgtcatgtgctcagctctcctaacaaacttgagagatggttatttttatcatgccca

SEQ ID NO: 118627 - DNA, 1028 bp, Homo sapiens
tgggacttgcttgggaaacactaggaacatgaaagatagggtatgcattcttcagtcccgagagaatcaccacccagtattaaacttggcagaaggctttcctctcctcctctgagctgcctccttagaaaaggcacattgtcagaatgccgaatgcccaccgtggtctcatgtcctcacagcccgtaggaaagtaactaccagttacccactggtggttgcccctgagaggagggtaagggaggcttccagcccccggggtggctctccccgacaggtgtgcctgtgtgctgtttgtagggtgctcctggcagaacctacctgtctccacagcgacacatctggccgtttttccaggagggcctgttgagaaacattcaggaatgtttgtgctcctttagagatttgtaattaagaagaggcagaactcgttcttgtctggcaccctcccttcttgcccctccagcatctgggtcatttgatttcacaattggggttttcggcagcccgagttgtggaggctggaagcagggaccgactgaaccaggctggatggtggtgaattgcttcacccgagggtgggggctgggagttccaggcaggcccccaagtcctggccacatctgaaagtggacatttcttcccaggttgcatccttagcacttgcccaaggtgaaacatttcaggccagtggagcacccacagttcctgggggacggggggtggctggtttaaatggacaattcctctccttaactgccaggaagagtgagtgtgtgcatgtatgtatgtgtgagtgtgtctgtttaaatctttgtgcagccaaaaacacatctcttcatcctgaatgacacatctctacacactgaataattcatctccctcttggcatttgttccggagagaatcttgctgtccagatttcttgtaagttgcatagccttccataggcacttccttgtttcccatggaagagctctgggagtcaggatatcagtcagtcagccctctggcatttcccctgtgat

SEQ ID NO: 118628 - DNA, 1001 bp, Homo sapiens
ggaaagtaagttgcctaactcacacagccagtaagtgatgcttactgaacccttatttgttttgttgttgttgttggtggtggtggtggtgttttagagtcagggtctggctctgttgcccagcttgtaatgcagtggtgccatcacagctaactgcagcctccaactcctgggctcaagcagttcttccacctcagcctcccaagtagctgggactacaggtgtgtaccaccatacccggctaatttagcacatagtgtattgcacatcacatacctctggcctcatcctcatggaaccagcagccttccacagtgcagcagtaaattactatcagaagcttttgggtattcattcaaccaaaaggtatttttcatagcctgccagaccctgggtatatagtggtacgtgaacacaccaggtcctatccagctggggctctttcagcatccctttcttcatgtatttttctgtaagttggatttggagtgagttttagagggcaggagagtgtaagcctctttttttggtttttcctatgtattcattacattattcactcattgtgcaatttttttttttttttttttttttgagacagagtttcacattgtcacccaggctggagtgcagtagtgtgatctcggctcagtgcaccctccacttcccaggttcaagcaattctcctgcctcagcctcctgagtagctgggattacaggcaccagccaccatgcccagctaatttttgcatttttagtagagagagtttcaccacattgagcaggctggtctcaaactcctgacctcaagtgatccacccacctcagcctcccaaagtgctgggattataggcatgaatcactgcgctgggccccgttgcacaaatacttattgagcgccaattgtgctggacacaggattctgtagcttggttgcaccattgattaaaatcatttaattaatccccaagaaggaatttaaaaggtgatgatccatatgc

SEQ ID NO: 118629 - DNA, 1144 bp, Homo sapiens
tgtttgtgatagttttctagcactgacaagcctttgttagtttagttgagtgatttgtttatttgatttagccattgagacttggtgattactaccactttgatccccacaagatggggacatagagagcggttattgctaaaagatcagtttggcctggattgtctaaggaagcgccattgtgggtgcaagcatttgggaatcagctcaagaggaaaataaatactgctcattggccaaactcacagggatggaacatctgctattcttgatgttgcggcaagccagccttccaaagggcaagtgagcatgacaggcgtgagacagagccaggataaggattagaggtggggtggctgagtgcgttgcaggtgaagaagccaaggagggctggagtccaactcaagaagcaagacttgaccttagaccctttgcctgcaaaccctcaatcagagttgcagaaacagaggcccaaagaaggaagttgacttgctccagtcacttctgaaggagtggcaaagttgggaccagaacacagattccctgcctcccacacagggtgatcttatcctgctgctgcagctatgtgttcaccttcccgggaacaaaggggacaacagagctggtgctgctgtggtgtaaaacttttggatctgttgagccagcccagaaaagcaggaggcacagggaagcagcaggttgcaggcatttggggactgtaggctgatggagtctgtttctcctctcccttgccaggtacaccaaaccgctcacctttgctgactgcattagtgatgagttgccgctaggatgggaagaggcatatgacccacaggttggagattacttcatagaccacaacaccagtaagttcccgacggtcctcccttccctgtgccctcttcatccctccacctccaagcccatcctccctccaagtctggaagaaccacttgcagactcttggagccagattgtattttgttttatatagatttagatagaaatgtcgatgtagatatagatagataatgtatgcttgtgtaaaaataacagtttagaagggtttttaatagaatctaaaactcctctcacaatccatctccccaattttatgggggcagccactgtgaacagtttcttg

SEQ ID NO: 118630 - DNA, 1065 bp, Homo sapiens
caggcaagaagaaaatagaatgaaatgggatgtgcctggcaaagtctgaaggctgagactagggcatcaaatcctaatagcctctgtttactgagcacacagtctgtgccgtgtcctgtgctgaggacttgataggcattatctcttttaatcctcccaattcctggtgggatgttcagatgatcatccccatgtcataaatgggatttagagtcaattgactacttaagactcacagctaaaatgtggcagggctgggattggaactggccctggagaatgaagttgtacttctccacctacttcctcttctgggtttcagtagcaccctggccacacctgtcttgtgcccttcatcaccctgtattataatcatttgcctgttgttgcaggtctcctagagcagagactgtgtctaattcatctctctagtcccaggcctttgcctggtaaggcacatagtaggtgtgaacttaacctgtgctaaatagaaaagggcatacgtgcatgaatgcatgaataaatgggtgaatgagtggactgttgttggcaccaaagtgtagaagagcttctgagagacagctaatggcattaattgcattgttgggggtagcaaaggtttttattagcactcatgattgcgtactggataatgagaagtaaatatgcctaattgagtgtgtatggggaatgaggttaatgcttggagggctgcatgggatgctgggttaaacactgatgtgcaggagacctaatcagtcttttcctgtttctaattgctgagtgcatccccctcattaaaatctcatggtgggagtgggatttcaaggtgcttctgggagctgttggaaaaatggaagaaagtagtagcaggccgtggcagagtttattcttgagggaatgaaggcagaaatggggtgtatgggggtgattaaatggggccatagcaggaagaattctatctggtagtttcacaagctgtcaggctactggtttcctcttggtttgaggtggtctggttggatgtgggggaccacctcagtagatggagccattgatagcaat

SEQ ID NO: 118631 - DNA, 1474 bp, Homo sapiens
accttgccagggtacttactgtcccagccctccctttttccttagcagctcaggaaaaccctcaggatctcagaggttatagaaaagaactgtgttacattcattagctattctgtgtcaagtaatgttctggagacttttagaaggttttagcacttaatctgtcttagtcgactcgagctgccataataaaataccatagattgggtggcttaaacgttacacatttatcttcttacagttctagagcctggacgtctgagattcgggtactagcatggtcgagttctggtgagggctgtcttcccggcttgcagacaactgccttctctagtgcctctttctattagggcactaatcccatcgtgaggagcctaccctcaagacctcatttaagcctgactatttccccaaagcctcatcttcaaatactatcactttggggattaggacatcaatgtattatatttatttgggagagacacaattcagtccgtaccatttttgttaagacggtcctggaagggagatgttattgtccctgttgaacctcaggtttaaaggggcaaagtgatttctctctctctctctctaaagtcccacagtttgaaaaagtgtcaggtgtatataaaaacaaaaacaaacctttgtattttgggggacaggatatttacatggacccataatcacatgtcaggtaatgagaattaccctacaaatcactcactaatttcagaaagatgtacttttacattggagagatgggcagccaccactttacgtagtggtaaaattagcatgaccaataatgagaccaggtgatatcaatgccttctgacgtgatgcaataaagatatcatgaaggatccctcacaagaatatttcatctgaatctaatcaagagcacagccagacaaatccataatatggattattctataagacaattagactaggttttttttttaaagcctaaagaggcacaccaccaaatgaaatgtttgtaccttgaattagagcctgaaatgggggaaaagcagccataaaagacattctcagacaattggagactttcctgagttgtgataatggagttatgaatatgtaggagaatgtctacatagattttatgaagatgcatgtggcaacatatctgcagcttattccaaaaaaggtccaagaaaaaaaggaaaggaaagaaaataggaaaaactcagtcgggcacagtggctcacacctgtaatcccagcaatttgggaggccgaggtaggtggatcaattgaggtcaggagtttgagaccagcctggccaacatggtaaaatcttctctcttctaaaaatacaaaaattagctgggcgtggtggcacgtgcctgtaatcccagctactcaggaggctgaggcaggagaattgcctgaacctgggaggcggaggttgcagtgagccaagattgcaccactgtactccagcctgg

SEQ ID NO: 118632 - DNA, 1394 bp, Homo sapiens
ctcacgcctgtaatcccagcacttcgggaggccgaggcaggcagatcacgaggtcaggagatcgagaccatcctggctaacacagtaaactccatctctactaaaagtacaaaaaagtagctgggcgtggtggtgggtgcctgtagtcccagctactcgggaggctgaggcaggagaatagtgtgaacccaggaggtggagctttcagcgagctgagatccagccacttcactccagcctgggcaacagagcaacactccgtctcaaaaaaaaaaaaacaaaaaaactaaaaaatgccagttgaatcactcacttgattttactcactgcaaaactaggagtatcagataaaatatatttttaaggcatatatatatatatatatatatatatatatatatgattagggaaaattggagaagaaagaacagcaataaaatttggaagctggaaagcagacagacaggtggcaacctacgtagcagacctgagaaaagagaaaatgggctgatagtgaggaaggctcacaacactgttctatagggcacttgcaaaaactgtagatgttggtggcagcagctatttctgcaagtaagactgaagggaagagggtctcaaagaggaatgggtaaaggttgtttctaagacaattagaccatcagatcttttccttaaatcgatacagtcaggcaaccaccatcttcagtctggcaaatgactggaagtttattttttggagagggtaaaatagagtctctggactctaggacacaagcaaattcagagccagagtgtactatcctgaaagcacgagtaagtgaagggttttgagaccttagccctcatataccacttggtgcccagaacagtgccaggtcattaccctctaggctggacagtagagaactctactggaaatctgaccagggaagagatataaagagaaaagctggaaagacactgacattgaggattcctggatgaaaccaaatcaagtccagccaaatcatatgctgtggccaggcgctcatgcctgtaataccagcactttgagaggccgagatgggaggatcacttgaagccaagagtttaagaccagcctgggcaacatagtaagaccccaactctacaaaaaatttaaagaagaaaattatccgagtgtggtggcaagcacctgtagtcccagctattcagtaggctgaggcaggaggattccctgagtccaggagttcaaggttacagtgagctatgattgtgtacattgcacttcagcctgggcaacagacacctgtctcttaaataataaaataaattttaaagatagaaaacaaataacgtactgtgcaactcacagtccacaaaccacactctagtcagcattttgggctcccatc

SEQ ID NO: 118633 - DNA, 1081 bp, Homo sapiens
cttcaaacactgggacaattcaagatcctaaaagctttcagagagaaaaaaatcaggtcacacagaaatgatcaggactcagaatagctccagacttctcaccaatagcactggaaacctaaaagaccatggtgcaatgccctcagggatttaaggaaaattatttctgacctagaattctatatccagcaaaactacctttaatcaagtgtagggccgaataaggctattttcagacgtgtgagattttagaaagctcatttccttcatggtttctttctcaagaagctactggagatgatgttctaccaaaatgaggtgggtagaccatgaaaaggaagacgcggtatacagagaggtgaggagacacacagaggaacacaaaggcggatctcaggaagccagccgaacacagagagcagctcgctcacactgaagcagggcagaagccctggcaggacagatcccaaaatagaaaactcaccagattcacattggtctggactctatgagaggagatttagataaccagcagaatgtgaggttgaattagtggtaagtttgtagaaactaagcaaacgtaaaaatgacaataattaactcaaggggaaaaaaagtgctgaaaagtaaaagtaagcaaagtcagctagctgattgcaccctgaatagtgtttgcagagtaaaaataatgcaaacactgaacatcgctttcaccaaaagtatgctattgcttttaggatgacggggagatgggagaggttcaagtgcatgctgtaggggctggggaagggaaggaagggaggctaagtccccaccctcctgagaggtaagtaaataagtaatgccgaaaacagaaaagatcaagaagcagtaatgcatgcatataactagacacatagaggtagccacccaagaaattgaaaatgattttcttttaggttgtgagttatggggataggggttgtggaatgctcttttttatagcaaacctcaaactatgttggactgttaaactgtgttcatatataactttaataaaaactaaaaattaagaactattaaactttggggcaagatagta

SEQ ID NO: 118634 - DNA, 1054 bp, Homo sapiens
tattactgttgatcagtgagtgagaaatggtgttaactgtcttaatattttgttgaaaggacctatttgggaaatacagcaggtcctcaaataacatcattttgttcaaggtcattttattataacattataatattataacctccccacactgtatgcttaaggtgatacctccagctaaatatccaaccaggtctatccctgaaatccccaagtctagcaaagaccaaaggaattagacaccaggagatgaaaactttaaattggcaataaaacatctctgtacatggattccctgttccatgcttgagacaaaggctacaaggcccttgccaccccaagtgttgtccccactcatctcttctggtaaacctcggtcttctttttctccatcatcattatcattgtaaattcagcagaaatgcaacacttcttgtggtgccaaatatcttttatgttattatgcagagcagttttctcatcccccaaacttccaagtattacattttaatgccttatgcataaccaaaaggcctattaaaatatttttaaacaaagccaaacagtagcattcccctcatgactgtcatgcctacctccagacactgacaattgccagcaatcaccaaataagcttctctatcctcagaaaaacccagatctcagcaggtgatctggctacatgtgaacattaaagagtgttcagatgatagccaggtgcggtggctcacgcctgtaatcccagcactttgggaggcccaggcaggcagatcacctgcagtcaggagttcaagaccagcctggtcaatatggtgaaactttgtctctgctaaaaatacaaaattatccgggcatggtggagcgtacctgtaatcccagctactcaggaggctgagacaggagaacagcttgaacccaggaggcagaggttgtagtgagccaagactgtgccactgcactgcagcctgggcaatagagtaagacttcgtctcaaaaaataaaaaagaaaagaaaagaaaaacccagatctcagcaggtgatttggctacatgtg

SEQ ID NO: 118635 - DNA, 1484 bp, Homo sapiens
taaaagttgaataatacagtgtaggccacacaaaccagcagaccgagtctagctcctaaggcatgtcttgccactaaagttactaagttgcctcttgcctccacgtgaagcactctcatagcctttgccagctttaagtgatccatggctctggaaattgccattgtcctcatccatcagaacaggaaagggaggctcaggatggcaagacagcttgagagagttcacacagcgaggaagtgggaaggcccactctatcccaggtcagctcctgtccacctgtttccctggagcaaggactggctaggaatgacctacagaaacactgcctgggatgctgactgaatgggcatctgcagagaccaaggccaacatcggtgacaggagggggctctgaccagtgtggcgcaaggggtgctgacctgagtcattatgcaggcgcagtgggaggctctgggttccctttccagggagaaggcagcctgcaccttggtgtcagcctctgacccagccctgtgtgtggtctgctgccctccaggtcaacaagctgaagagagagatggttcacctccagcacgagctgcagttcaaagagcgtggctttcagaccctgaagaagtaagtacaccctgcatcccagagcatgggggctgctccccaccctggttcccctcctgtcctctctgtctctctctccttcagtccctttcctcccttctcaaaatgtggctctctcatcattcaattcaagttctgttccactggcatttcctgaagatactgccacccaagggtggggtttggaaagaggaaaggggagtcatttcagaccacagaacactcattgtcccgtggactcctgaagccattaagatttgttccactcagccgagtgttactatccagtcacagaaacaagtattgcccagcatttctgtgcacacgcctcatctctagtcaatccagtagggtctcatatgcacacaaacaaaatacacttcttttttccatatcccctaaaagcagtcactaagtgcttcagtgaaggattaatgatctcttctagcaaaaaccaattactagaaaagtatgcacaatgccatatgcattgtgctctatgggtgacttaaggagtttccaggataactttcaccaaatgtaattttcacccttagaagctgagctgtggccaggtaaaatacagctccgttgtgtcttcttcttcttcttttttttaacttttatttgaagttcggggtacatgtgcaggtttgttacacaggtaaacttgtgtcatgggggtttgttgtacaggttatttcatcacccaggtattaagcctagtacccattagttattcttcctgatcctctccctcctctcaccctccaccctcccagaggcctcagtctgtgtttttcccctctatgtgtccatgtattctcatcatttagctcccacttataagtgagaacacgcagtag

SEQ ID NO: 118636 - DNA, 1058 bp, Homo sapiens
gctgtttctcgctttttgtccctccctgactgctataccttttcctcattccatgaatttcaaatccaccctcatcattctgtggccatagccccaagcctttggctgtctatctccaagccctattagttgagggaactgtggtcatccgttgagggaccagttggttctttttcacgtcttcccaccccacaagtccccaccgcctggggtgagccacacaaattcagcacaacacatgctgtaagaaagtatggctttgtattattacaaattgtatgtaatttttgtgtcttacaaagtattataaattatggctttctgtatgtttacatctacgttatatacgtgttatttatatatgtgtgtatacatataccaatcttgtctctcaaaccggattctgaactttttaaggcctggaaccatgctttatgcttcttggtaatcttcagtagcaccattgacagtttggggcaatagtataagcttagaaaatgcctatttttgacctattgaagcaatagcctgattcctccactttgcagcaaaatggcttctgagcacacagtttaagggctactcactcccacatcattttactgaatgggttctctctgcttcctggctactgcagtccaagagcttctggttagaacacttcccattattctctgagccactgcaaacctgttttaccactttgtcaccctgtagcagcattgaaaactcttgttgtttggtaagctgatgctgaaaccccaaagacaagcctcctttcttcccctccctctgccccatgtttgatatcaggacagataagactccatggcagctccagccgcccacactccttagccggaagctgggctctgcgtccagtgtggaggaagatgcgtcctttaatgtacaccttggcagagagggtcaggaatgtagtcttgagaggcaggtggtcagggttcaaatcccagttccctgggtccttggaaaagtgacttaacccctgtgagctttgacttcatttgaaaaactagggattgtaaagattgaattgg

SEQ ID NO: 118637 - DNA, 1612 bp, Homo sapiens
caaagctcagtccagtcctagttatgaatagtgaaagcactgtccagatgtggctcaggaaagagttagagtagggctgaaccatggtgcctcgtaacttttggagagcttttgttttactagagccagcaacattgaacgaatctgccttccagcctctgtggcggacagcctctatatgctgttcctatctaagttccatagctgtcttcccacttgtccaagggtgaccggtgagccttgtagcttcttgctgctcttaacagactagcacagaaaaagaggctgtcccttccttccccataccaccatgtgtccagctactagccatctgcaggccaaagtatttgtaaaggaactgtacccctctttgtgagtgcaggggtcttctccccaactacccagtgtttcactcctgactgcagcctctgagttttctatggatcccctcaccagtgcccctagaatgagtttcttgatattggctatccctgtttcctcctcaccaactgtcctccatgcttctgtggcttgaatgggcaccaagccaagccatttggggctgcaagatgatattctgggcttttggcttctattttcaaagtgatcgatgtctgagcgtacggttcttcccgtggcctgaagggaggaaagtgtttttgcttaaccagcttccctgcgatctgcaccgccagcccagtcaccgggggctattcttggctactgcccacgcaagctgtcaagtctctcatgagccctcgaaacccaactcagcaccggccacaacagccacataattcctgactttgttcttctcctccagttcggcatcaacagcaacaatcagttggcagagaaggtcagattgcgccttcgatatgaagaggctaagagaaggtaattgggctggggctaggggcgggatggttccaaaaataataactactattgtagaatgcctgctctgtgcttagcttttcacacacttcgtcttctttaatcctcacaaagattatgaagatagttattatactttttatattttcatcctctctgaaattcagagaggaaatgactcacccaggacacttcacaagacagagagtgaaactatgctttgaacccagatctgtttaacctcaaagccgagttatcttcccacttgcctgtcttgatttctgcaaccgaggctttcccatgatcctgtaagcattttggtttgaaggagtacaactggaatttcagcaacaggctaaaaagattatggacactacccacttcagtgtctcctgcacagctgggagcaagctgggcttttaagcagtgtagacctctgggatttagatgttctgtggcttcacagaatcctaagcaatcaggttccactaccacaagtaaaatcaaaataataatcaaagctgacatttttagagcatctgttataggcctaaagagatttttatttttaattactttgttttcttttttagggacagggtctcgctatgttactcaggctggtcttgaactcctggccttaattgatcctcccacctcagcctcctgagtagctgggattacaggcacgcaccactacccttggctgagattg

SEQ ID NO: 118638 - DNA, 1025 bp, Homo sapiens
cttccggccctcaggctgcatcaccaccatccacgaggatgaggtggccaagacccagaaggcagagggaggtggccgcctgcaggctctgcgttccctgtctggcaccccaaagtccatgacctccctatccccacgttcctctctctcctccccctccccaccctgttcccctctcatggctgaccccctcctggctggtgatgccttcctcaactccttggagtttgaagacccggagctgagtgccactctttgtgaactgagccttggtaacagcgcccaggaaagataccggctggaggaaccaggaacggagggcaagcagctgggccaaggtagagagcaccatacccagagggtgggaaccaggaggagggaaagagatactctgtgctcagaaccccccagtgatcattctagtcgatatttactgactgcttctgtgtgctgggtctttgtatggcaagtatatttattcagtggatgtttattaactcagtatttttgaggtcctgtgtgaagggttttcagtagtagattctgtcctccaacagacatttagcacctcataaaactaaatgtcaggtcatcctgtgctaatggatatacatggattcatctattcatgattatagatatgctgggtgccaggcactgggttggtcactaaggattctgtgttgaagacagacagggtccctgttctcatgaagcttatgttcaaatggaggcacagggaataaacctgcaaccaaacaagcactacaaagaaaataaaacagggaatgtgatccagcctttctggttagaggtgggactgccagggcaggttgggttgtgaaagaagatgacatttgagggtgtcttgaatggtgagatggagccagccttgggaaaagcaagagcaaaatctctgaggtcagagcaagggactagaaggggagccaggaagccatgagtcagaggtagggggttaccagtgaggctggagaactaggcaagagtccagatcctgaaaggcc

SEQ ID NO: 118639 - DNA, 1056 bp, Homo sapiens
tgcaggagttcgaaagcagcctgggcaacacagcaagaccccatctctacaaaaaataaaattagccaggcatagtggtgcatgcttgtagtcctagctactctggaggttgagatgggaggatcccttgagctgcaatgagctgatcatgccgcagcattctggcctgggcaacagcagaaccctgtgtcaaaaaaaaaaaaaaaaaaagcacagagtaatgaaagcaaacacataggcattcacatcccacctttaccacttgctgtatagctggatgaccttgggcaaggtacttaacatctctgatcctcatttttcttatccctaaaatgcaaatgataatgcctccatcatgcccactggaagaatctttataaggattgagatagcacccgtaaaacacctattcaagtgtctgatccacagtgggttctcgtttagtggggccattgccagcctcctccctgaaactgaccttctccggcttccatctctcactgcattggcaggagtcaggactggggatgaagtagcccaagtacattttgtcctaagagacaggcagacccaagtgcagacagatactcagctttcccatctgtagaagggggatttatataatagctaactcgggcttgtgatgtacaagtgaattagaagaagtaaagggctttgttaaccctgatgccatttagtgttagaatattttaatgataactcaactgtgggcacaaaggagcccaagtgtgggcattatacctagaaggtcgctccactcatgctcagatctgtactgggagcttgttgtgtccccacccctgtgtctggggctggggattcaatggggaaccaaacagacaaggtgccagcattgatggctaagatgtaaacaaactgtgaggagggccgtgttggaaatggatgggttgaagtgatggaggaaaatgtggggtatgtgcaaaggggaaaaacaagatgtatacacctctccgagcctctcctgcctccatttctggaagctggaatgtagagcctctcactgccttcttggag

SEQ ID NO: 118640 - DNA, 1063 bp, Homo sapiens
gtttaataccactgaactgtgcacttaaaagcggcaaagatggtaaactaaaggtttttttatcacagtttttttaattaaaaaaattcataggataagtcttcaataaagatttggcaaatgattaaaccaatcaatcaatgaatgaatgaacaaatgagctaattggaaatgttaacaacttggcctctcttcctgccgggatgcctacctctcatctggagtggtgttttttccatactgtcctcttgaaccaaattccctgacacctggtgtcccccccaccgccacttatgttctccttgtttccatccccaacagggaggcgcccagatcagcctggcggaggtctgccggtctggggagaggtcgactcgctggtacaaccttctcagctacaaatacttgaagaaacagagcagggagctcaagccagtgggagtcatggcccctgcctcagggcctgccagcacggtgagctgggaccaggtgtgccaccttcccacaaggccgcacccggatgttggaagggaaagcctctcccagaactggaggtgatcaggcgtcatgagaggagaacaatggggtggaggaagtaggagaagaagacagggaaggagagatctccactaaggggcaggcggctccctttctgcaacttgttcccttccacatctgtgtttcctccttctgtcctttgccctacctaataccacttggctaacgaaaaccttaattcatgattttttacaaatgaagtggagaagaaggtaaaaaactgtggaaggaaaaagattaacctttcttgggcccctactttgttcaaggtccatactggaggctttgtataagaggcagctagaaatcatgggaagagaatcagagggctaggtcagtcatatcacctctctgagctttcaatttttaatgtctaatatgagccttaaaaggttgttatgaggatgggcacggagcctcatgcctataatcccagccctttgggaggctgaggcaggaggatctcttgaggccaggaattcaagacaagcctgggcaacatggt

SEQ ID NO: 118641 - DNA, 2003 bp, Homo sapiens
ctctttctcctcctcctctcctttccctcccatccccaccttctttttcatcgtcatcatcatcatcatcattttctgtacttccttttgcatcaggcactgttctgtttattatgtgcagtttaccaaggctcagagagataaccaaattacattaagatgtacatctcatcagcaaagctaggtctcaaacccaggtctctcactccaaaaggagactgtgagctgataaaggtctcgaaaacaaactcctctcctttctagagcatgaccttgagtaagtaacatcaaccctagacacactagttctctccttcccatttctcaagtgagtcataataattcccacctgtcaggatggttgtaaagattaaataagatgctacacataaaccatctttcacagtgcctgctatataccaggccttcagttgattttagttccctctttcccttcttacaagaaaatgtcaggaatttttcaggctctggcccacactaccaagggtaaccacaaattaaccatgtgctcagaaaactacaggatccagtttttgctttggtattagctaccatttactgggtgccaattatgtgccaggtattcttctgtgttcctcatgtagagtctcaattaatcttcataacaaccctttctagcagttattagaggaaacagtctcagagagtttaaataatttcctcaagtcacatgggctttttcactgtagataccattcagtataaatgttcctctttcaggaagccctccctgaatgcaacttcccaagctttatcactgttccgctgttcccaaacagccagtacttatctcctttcacctctcttctatgtcatatccttactgtgttatgttactgatggttcacacattggtctgatgacactgtggtctgcttacagtcagagaccttaattctctctcacttcactgctaaacttggctatcttccatcacgatgctgagtaagttcatacatacaggagctattctctggagaactgctagttgaaggaattaaggacaatttttccagtttatcagtgaccttgggcaagacacttgaccactctggtctttggtttcaccatcaattcactgggagggtcacagctctgagatgctctgattcctggcaggtagggtggcacctacattgtacccaatgacccagcaacctttgtctctataggacgctgtgtctgctctgttggaacagacagcagtggagctggagaagaggcaggagggcaggagcagcacacagacactggaagacagctggtgagtgagcccgcccttgggccccaggagctgccctgcctggacctaggcccagcaatgagatcccccaatgccagtgcaactaagagaagggttccactgggaaggctgagaacccctctcctcatgggttctctacaggcaaaaaggcaatgtaacctagtacgatggttcccagaattcctttcgaatttgccatttcgtttcccatgaatcacctatgctagttcacacctaatgttattctttatcttgatatagtgacatttattttgctaaaaaaaaaaaaaagtaaagaaactttatgttactctaaatggaaaatttgtgtagtttgccataaattaaagagttcttgggaattgcatttgactttcaggaatggagagcagaaatattagacagaaataaattagaagtttacttcttcttcacttaagaagaagagggccaggcacggtggctcatgcctgtagtcccagcactttgggaagccgaggtgggtggatcacgacgtcaggagctcgagaccagcctgaccaacatgttgaaaccctgtctctactaaagatacaaaaattagctgggcatggtggggcacgcctgtaatcccagctactcaggagggtgaggcaggaaaatcacttgaacccaggatggggaggttgcagtgagccgagattgcaccactgcactc

SEQ ID NO: 118642 - DNA, 1033 bp, Homo sapiens
caggtgcaaagcacatagtagaccctcaatacatggttgaaatcattgttaggaaaaagagaaggaacgttcctcactactggctggaaacagggtaaatcccatgtaggaaatggccacagcctatgagtcttgccatttggaaggaaaaataagttggtcttaagtgcatgtgctttaaattcagacagatatggatctggagtctagctcagccaacttccttctgggatcctgtttctgaccggtaagaccttactgagcattagtaagatttaaaagctccctgggtgattctaatgtgcagcctgggctgaatatcacagctgtaaacttccgtctcctcgtctgtgaaatagagatttagaaaacagccactatgtcatggggtattttgcaaaattcagtaaaattatgcatgataagcacttaacacagaccctgacctggaggaaacattcaataactcttccgtattattattctcttagagcctcaaattatatatttagtctcaggcggcgccctcccgtaatatctgttactccacaggtcagcagatgatttctggagagggccagatggtaaatattctttgccttgtgagtcgtaagaattctgttgcatcccctcacctctgctgttgcagtgtgaaagcagccgtagacagtatgtaaaccaatgacactgtctgtgttccactgaaacgtcatttatggacactgaaatttgcattttatataatttgcaccttttcaccaagtattccccttttgatttttttttcagccattttaaaatataaaaaccattcatggcttagactgtccaaaacaaagcagcagacaggattgggcccactggctgtagtttgctggttcttgttttactcttctctcttactatttttttcatgtgataaagcagatggcaaggttcctggaatttttgtatgttcctttgttagtttagggttctctctaaattgtctcaatctctctctccccctccttttctctctctttctttctct

SEQ ID NO: 118643 - DNA, 1033 bp, Homo sapiens
ttggtctattttctctctccattctaaaatgtgtctgccgtgagaggggagatcgtgtctgttttgttttctttgtgcccccagagcctagaatactgtctggcattttaaagtacacaataaatgtttgttgaataaatgaatggatttgttagttttgtgcccatttcacaaaggggcaaagtgaggcctttgagagccagaagctctaggtcagtgactgtcctagtctatccaagcacagagcagctctggttagtgtctgctcaattcctctcccctcgcccaaacgtccctgagttgcggcctcgctcctgaccgaaatccccgcgggttctcctcgcagtgtctactggatcccgccaggaggcagcagaggcgccagcacccagtccgacgggacagcggaccggagggggtttccgcttccgggagaggctgaccgtttccgcttccgtccacttggcgagtgagacgctgatgggaggatggacgtactggtgtctgagtgctccgcgcggctgctgcagcaggtttggacgcaggagaccggcgggaaggcctgaaagagatggagcaggctctgactcctgcccaagcggcttcgggggcgggacagctaggcgaggaccatcctggtcctctcagagtggagcggcacggtccctgtgggaacaggaagggttgagagaggaagcacccatcatttcaaagcccgtgtgactgtgattttcagcggaatggagggtccccaccctctcccaggcctcccccaaaccagcgtcttcggtgggctggagcctggcatgttcagaacagttctctccctacaatccacctcctcttctgcatacacacgcgatttaggggatgcggggagatagacaaggggggaatacattcagagctctgggtcttggtttgcagctcagccgcagttcttcccgggttactgagcgagaggattcctaataagcccatggggtgattcattatcagaccagcggagcttgctctgtgccctcagcattcg

SEQ ID NO: 118644 - DNA, 1049 bp, Homo sapiens
atgtatgtgtggttaatatattctttttctttttctttttttttgaaacagagtctcgctctgtcaagcagactggagtgcagtggcacgatctcgactcaccgcaacctcagcctctgggattcaggcaattctcctgcctcagcctcccaagtagctaggattacaggcatgcgccaccatgcctagctaatttttgtatttttagtagagacagcgtttcgctatgtttgccatgctggtcttgaactcttggcctcaagtcatccacctgcctaggcctcccaaagtgctgggattacaggcgtgagccaccatgcctggccaatattttcttattaaggataatatgctaacgtcagcaaaaatctcagaggagaaagaaacacagctcatcaaagggaacattaatgattcccatggtctatgccacgccttggtagagaggggaaatgtggaagtaagtttatggactgaaaaaagtgctttttttcccacaggaagaagagattaaatctctgactgctgaaattgaccggttgaaaaactgtggctgtttaggagcttctccaaatttggagcagttacaagaagaaaatttaaaattaaagtatcgactgaatattcttcgaaaggtgagtactttgggttccagttttattctccagtttgaatcattatagcttttttaaagcctttgttaccaaagattctggaagtatatcctatggaatttggaaaagaagcatagaaaccctattcttttccctgcattagacaacttaggactgaggtagttggtgcaaatagtgacaagttggtgttgtcctgtccttcaggactctttgaaatgtttcatcctgctaactgtttggctaacttaaagtaggatttaggtagggttgaggcatttctttttaaaaatttatttattattttttgagacagggtgtctgtcactcaggccagagtgtggtggcatcatcacggctcagtacagcctcaaccttcaggctcaagcagtcatcccaccacagcctcctgagtgg

SEQ ID NO: 118645 - DNA, 1022 bp, Homo sapiens
gaattacctggagtcaggagttcgagaccagcccagccaacatggcaaaaccctgtctctactaaaaatacaaaaattagccagggatggtggcatgggcctgtaatcccagctacttgggaggctgaggcatgagaatcacttaaacccaggaggcagaggttgcagtgagccaaaatcgtgccactgcactccagcctgggcaacagagcaagacccggtcccaaaaaaataaatacataaaaataaacaaaaaattgacatttattatagcaggttttgggtataagatcataatctaggccaagtgtggtggctcatgcctgtaatctcaatgctttgggaggccaaggcaggaggatgtcttgaacccaggagttcaaggttacagtgagctgtcatgccactgcactttagcctcagcagagtgcacagtgagatcttgtctgttacccccaacaaagaagagaaaaggatcatatccaagtaaatttggcatttgctgttggaaatctttagattgggaaaaatgtatcttccttgttttaagtatgttaccacagagaggagtcaattattgattagctacaaacttgaaatcaggttttttagtgaatttaagaatataatttcttcatatgatagagagggctgatgaggggagcataaaacttggactgtccattccaatagacctgagtttgaatctggccttttccacttattctgtcttgtctttgacaagtgacttatctgtagcccacatagaaatagtgataatagtaacaagctcgattttattatgtagatggaataagataatgcatataaataaagcatttggttcaaatctttgcatactcaagtattaacttttgttattgtcattattttatactgttgacattttgatgaatataaatttgtgatgaacataaaattgtgatgaacatgttgatgaacataaaattgacaaacataaaggtgtataggcagcatgtttatcttctattaaaagcata

SEQ ID NO: 118646 - DNA, 1002 bp, Homo sapiens
aagtacgttttcccttttggttcttaagatatttggaggtttatactcaaaatatttggagacatcttgtatgatgatggttttacgtacattattgacatgtttccattcttttcctacagagtcttcaggcagaaaggaacaaaccaactaaaaatatgattaacattattagccgcctacaagaggtctttggtcatgcaattaaggctgcatatccagatttggaaaatcctcctctgctagtgacaccaagtcagcaggccaagtttggggactatcagtgtaatagtgctatgggtatttctcaggtgatgtattgtcatgactcttggctgtttgatttttttaagtattattatcatcattgccatttacagaaataatactattacaagttgtatccttagtgaaaaggacatttgccacagtttgaaaaacttgagaaaggagttgggggggtatatgttttaacttttttaggcacaatttttaaggtttggttaaattttatatgtattctcaatatttaagggcaatcattggtactcttttgtttaggtatttccctcctgctgtgtccaggattgctgtgtggtggtgatgagtgctgggaggtgaaaaattaaaataagccatttaccagtcagcatcccaattaaatatttgatgtaactgtgatctttgagccaggcttatatattcattttcaagcagaggagttccccattttaaatagaggcattgtctgatgtgtttatggttaactgcatctggcttgggtctttctgttttcctttctttgctgaattggaaggggttactctgaagagtccaggtcttacagtgtggtttatttctcaagtgtgaatattgcacaccttcatggcttgaaaattagaaatgtaaatatgctggaaccagacttcataactgtagactttgttatgtcatcattaaaaagttcgaggtgttgtaatcccagctactagggaggctgag

SEQ ID NO: 118647 - DNA, 1448 bp, Homo sapiens
tcaactacctgctctgggagagaataaaaaggtatatgtacactcttctattaatatattagtatcttagaactgcgtggaaccaagcatggtggtatgtgcctatagtctcagctacttgggaggctgaagcaggaggattgcttgagcctagaagttcaaggctgaggtgtgctgtgatcgcacctgtgaatagctactgcacttcaacctgggcagtatcatgagacttcatctctaaaaaagaaaaagaaaaacgaactgcatggaaagtgctgaaaccgggaatggatttcacttttatactgaaatttaatcattcacatttgagattatgaacatttatgaagtagcctttcccctgggtctagcatgttgtgtgattttttttttttttcacttaattccacaaggcatttgaggtagccaattgatacacagatatcactgaaatagaatggataatttgtatacatgaatttgattctttttcagttaaaaatatacaagcagatccatcataaaatcaaacatggttgaattacggcccaaattaatgtttaagtctgagtttgttattaaatgtgttattaatgaatgcattggaacaaaatgtttatgctcctcttaaaaaaatctttctctctttatgtttatgcccctcttaacagcctttctctttttgtctaccccaggttatagttgacttttcctcccctaatatagctaaagagatgcatgtaggccacctgaggtcaactatcataggagagagtataagccgcctctttgaatttgcagggtatgacgtgctcaggtatgtgctcttgccttgcgtactattctctttccttattttcttgtttggaaaattctatagaacatggaatatctcactcaagaaagaacattcgactaaatcagtggttcatcagcttagttcttctttacaaccacccagtaagcttttaaaatatgtcctgagcctttcctctgaaccttttttactattttatttttttagactcttagtggaaccaaggacaaaactccttcattctacacatgtttcttgaggacctcttgtatgcaatgggtttatatcctagcagggagagaagtagtaaagaaacaggttgttttgggccttgtaagctgtgagaggcaattgagattttattctaagtgtactgggaagctattagagagttttagtttgtgaagcagggtgatcaaattaaagattagcctgggtaccatggctcacacctataattccagcactttggtaggccaaggtgggaggatcactagaggccaggagttctaggccagcttgggcaacatagcaagaacctgtctctattttttatatttttaaagaaataaaaatttttaaataatacaaattaaagattactctggttacttactgtgaagaagctaga

SEQ ID NO: 118648 - DNA, 1041 bp, Homo sapiens
cacggaggttgcagtgagccgaaatcatgccactccagccactccagtccactccagcctgggagacagagtgagactctgtctcaaaaaaaaaaaaaaaaaaaaaacgaaaaaaaaattcattcaggaccacatccaaaatggagattggaacacagaaaattcagtcctacctgttagctattctgtactaacccttgaacacaaaagtattagctgaagtagacttttgtgaattggaaaagtgtaaagaaaactgtggtgagatttttgtattttttaagagaaatgatttcaaagttctttggcatgttcatttgtaacagtattctcaactattgagggagagcacttgttctcgtgtttgtactttctcactgtgtttgtgtgtgtagaaatgtgtaagttctttttctagaaatacaggattagatctttttacacaccttactttttaaaatatatatatatacaggaatctaagaagaggtttgatactgaggaggaatttaagaagcgagcatatcagtgtgtagttctgctccagggtaaaaacccagatattacaaaagcttggaagcttatctgtgatgtctcccgccaaggtgagtttctgggctttgttccttcgtccagcaaatactatgtatatcatttcctggagtcttcattttgatttgactttgagtgatattttaaccttctaaggacaggcaaatagattttttcttaaatgtatttctgaaacaaccaataaattttgaacctgccataagacaggcaggttcaaatcttaactttcttagaagtcagcaaaaattaattagaaaataaagtggaaaataaaaagaaatcttattcacagtagcaacaaaacctataaaacacttaggaatgaatttattcagaaatgtgtaggaccaaaatgatgagaagtgtacaatgagatgtaatagaatgtttggatagagtgccagacccagttccctagttctccaaatttatttatgattttaaggcgatttcaagttttctaacttg

SEQ ID NO: 118649 - DNA, 1054 bp, Homo sapiens
gtaatcccagtacttggggaggcccagacaggagaatcacttgagcccaggagtttgagaccggcctgggcaacgtagcaagactgtgtatcaaaaaagaaaaaaaaaaaaaaaaaaaaagcagttgggaaccaagtttagtgtttaagtgtggaaaactgccagaacatctgacctgtgctctgatagcaccctgagtatccaggcaaccttgatggttaacattttccaaggtttctaatagatcatggtgaggaaaaaattatgtgctttctttagctctctaataaatatatttcaaaatattcttagaataactaaatatttacatagtagaatgagtaagcattcattttccttcagggttcttttaactttattaatgaagtgttttttaccccctaggatttgtgcaggtggatgatggcagaaagattgtatttgtcccagggtgttccataccattaaccatagtaaaatcagatggaggttatacctatgatacatctgacctggctgctattaaacaaagactatttgaggaaaaagcagatatgattatctatgttgtggacaatggacaagtgagtttgtaaatttgtatgtgttttacattgactgattagaggtaagacagtatggtgaggttggtgacatctgacactggatgactgtaaattttccccaaagactaagattcaggacatcagtatagcatagaagaaagaagagggtttggacccagccaaactggacacttcctagttttccagcttgcctccacaaactggaacctctgaacttcagcaattgttcctatcagtagggttattgtgagacctaaaatgtaattgaagtttttgcatgtgaccctgcccttaattcagttgctttaaaaacgtttgaacatagtagaaaatgtaacagtgttgctcttagtgtttctcatatatagggaataaaagaagaggttttataatagcacttgtctcacaagatttatgagcgatttgaattttacagatctattcctaagcaaaagagccttaagtct

SEQ ID NO: 118650 - DNA, 1006 bp, Homo sapiens
attctagaaacatatattttgattagtaatttttctaaaaaggtgaaacatctaagccaaacttagtattccaagaaagcaaacaaattaacaaatatcttctttctctgttaggaaacttattaaaggtaaatatgtagagagtgcttttgagggctagagcataggatgctttgagttgagggctagagatgaaagacacttgaaagcacagtgtttcatgtagtactctccttgcttgatgactggcataaggcattgttaccattggcatcaaccctctcttaatagttctcaggggcaatatgtaccttagagatttaaaacatatgttgcagttttgtggtcaggtctctcaaaccttcattttcaaagatttctaagttgaaaagtctgtttcaaaatctgattgggggttttacattttttaggaaaaagtttaaaacacgttcgggtgaaacagtgcgcctcatggatcttctgggagaaggactaaaacgatccatggacaagttgaaggaaaaagaaagagacaaggtaattcaaagccttataggcataatgtgtatcaagcattgtgatttttcatttttgtttttattgagagaactgaggagaagtgtgaggagtcagtcccacctaggacaaggcttatattgctctgactttattgcacagtaagtttattttgtgaattgctgagcatttatttagaaaatatagttcttggcaattaaaaaagaccttggctttttcctcctttgttaatgtagcttagtatccgtgctgcttaacagcagttcccaaagatgggagaatattgcagactgaaggggtttgattcgtcagctcacatcagagtctacatgtgccatgctccttcttgggagcatttgtagagtggtcatagcagtcagttcttgccacccaaggccattgatgaaccttcagagcaggcaacatgatggcctttcatggcacccttagaaaagactatggttcagtt

SEQ ID NO: 118651 - DNA, 1024 bp, Homo sapiens
aagttatcccagaatccctaaacctggccttaactgcacttgccgatactcttctagatgctctatgtttaaatacctagaaagtgtcacctgatcccctaaaagaattatatttccatttttagtattatgaaatgctttagatctggctattagttttgcctaatagtatatcgtataataaaatacttcattttataggaacttctttttaatcggtgataatttcgagtggagaatgagtgtgcctaaaaaaagggaacagtggtgattgcctgatgatttttttgttttttttaaggtctattgcacgtctggccaatattgatgaagaaatgctccaaaaagctgctcgagaaaccaagattcttttggatcatgagaaggaatggaaactaggccggtgcattttacggttccctgagattctgcaaaagattttagatgacttatttctccacactctctgtgattatatatatgagctggcaactgctttcacagagttctatgatagctgctactgtgtggagaaagatagacagactggtgagtgtcttttttttttttttttttttttttagtgagagacacggatcttgctctgtcccttgggctggagtacggtggtgaaatcataggtcactgaagcctcaaacttctggcctcaagtgattctcccacttgagcctcccgaatggctggacttacacacgtgtgagccactgcacccagctccaagtgtctcatttagtagccatattagggatggggtgccattaaagcatttgaattgtgtgggagtggttttcagatttattttattcatggaaacttccactttttccctaacagttgcacagtgaaccatatcatatataaaagacaaaatgtgaagtagcactttaaaccagaaatggaactctgcccaatcagtctacttttctacaattaggcacatgagatggaaccttaggactccaaagaaaacaattggaagatgactgagagtaggatttttcca

SEQ ID NO: 118652 - DNA, 2143 bp, Homo sapiens
atcatctaatacaaaacctattttataatgaagtgtttaatatctcaaataagagtattgtaccacatatcgttatcccaggataatatcagagtacaaaatttgaagtacagtttttaactgaatgtgtattgcttttgccccattataaagttgaaaaaccataagtcaaaccattgttaagtcggactgtttgtgttacatatatttgggattttttagtggccctttttaaaaagctgtttcttatttctgatcattgtgagtggggatagatgtgggaagaaccatgtctctactaaaaatacaaaaaatagccaggcttgttggcacacacctatagtcccagctactcgggagaccgaggcaggagaatcacttgaaccgggaggcagagggcagatcatgccactgtattccagcctgggcaacagagtaagactctgtctcaaaaatgaatgaatgaatgaatgaacgaatgaatgtactatgagctgatactgggatttcaggtaccgcagtttgtgctgaatgatatgtttggggtaaatcagtttttttcttatagaatttcggcgtttttgctgcaactgccactaattttgcatttaaaagaacaaaagaggaatgtatttttcaaaggagtgaatgaggttaaaatcaagattttgaatggtataaatatgcaactaattcagttgtaggatattattaaattttttattgctaaatatgtttctttcatacgttgcagtgcttacagttccaacagctttccaagaaaacatttccatatttgtgttatttgtaaagtatacataaataatgtaaaataatttgggattatttcaactttacattgtatgtctgaatttcatcgatgttgtacctggctcagtcaatagttgtcacaggtattaagccattttggaatttgccacttttttctgggtaacctgttttagtttagtttacagcatttagaaacagaaggtaactttatagaagtaacaccaatatcctagtctgcttgccccgaatataactaatagtattaggatgtaagcaatattaagatggtttttattattttttatacactgtgtgcttttactttttatttaaactacagcaaaaaactgattttttaactaaaattgaatggcgtttatcttaatgaccagttattgaccaaagtgtactcagaagatgttattatgtcccaatctaaggaatcctttaatttggggattaattttacttacacatgccatttcagtttcagttgcctcattctattacatcattcttgtcaagtctaagctttatcatgtctgaattcttttaacactgaatctgtgatgtaaaaatgtatgatgtgccataaattttattcataataaactaagttatagcctattgtaatctgtaaaacatttcttgtaaattacctaatttattttttcatttatgtacagtatcttatgtaaatttgaaaaatgtttgccatggcgcattctgtaaacattcccgtattcttttccttaatgcttatttgcatgaaggtaacttgggttttgcttgtttgtattggataaccattaagccaacttcagtttctctgcctttttttctgtagtttaaccatttctaattttgttcatattctaaatagatgttagaatcatactttttattttctactttctaaataaattatctaagttgtttactatgtgtgcctttttattatttaacttacatattcccacattttcactgtgattaaatgcaaggttgtggttagttctgtgagagcaagaactttgtaaagtcttgttcacctctagatccccagtacctggcacagagaaggcattgatgaaattcagggcttgcatttattaagatgtgaaaacttgcccccctgagaccatgttatcctgcatcagaaatgaatgttgttggctttttggttttgggtttgtttttgtttttgtttttatatatagtctctttgttgactgagctggcgtgtagtagtgcagtcatagctcactgcagcctcagcctcccaactagctgagactacaggcatgcaccaccatgcctggctatggttttgtttgttggttaggtgttt

SEQ ID NO: 118653 - DNA, 1678 bp, Homo sapiens
acaaatcagaatggtgtgcccttgtgcaattccacatggcatgcagtgagagtgtcaggcacagccacaggaagttagtttgttttattaagtaaaggggagagggtgcagaattgctgttacagtcctggaagctttagtgtctaaaggccacacttttagaatacgtatttcagtgtgagcctatagtcccagctattcaagaggctgagatgggaggaccatgtgagcccaggaattcaaggccagcctgggcaaaatagtgagaccatgtctctaaaaataataataataaataaaaatacatatttcaaaggtgtgtagacatcaagaatacagattcagaaaattttttataatagctaacaacgcagaaattggtaggtttccaaatattattaaacaaatagattgtgcatagttgtgtgttctcaagtggttaatattatatgctaacttaaaagctgtactacataacagttatttttaaattacacagggttactttggagcagttggtgcacttcttgggctgccaaatttcagctaaagcatcaggtctctctctctgctaataaatgtcatccaagaggaactaaaaccagaggcattattactgcattgtttgtcactgggaaccaaaggataaaagagtagcataagctgctgaatgttgccatattaaaggagagaacttggtaacgtgaagtatttctcattgaaatgctttcccttttgtatatagccagtgttaaatccttaaatgcaatacagcctctgattattgagcttcctcttaaaaagatttttttattttatgtagccaacattgcagtactgtatgctcaaacacaaatcttaaagtatcggaactgtttagcttatgaaaataatcgactctgaatatttgttacaagtctgttttatgtgttttgattactagtgagcagaaaataacataccctgtattcaaaattactgaaatggcaatcaaagatgatcatttttatgtgattttagaaatgttaaggcaatactactaattattgtaggtttttttaacgtatcacccaaagcatgtatgtgatctttccccattagtatctttttctcaaatgccataattaactgaaatactattattaaattttcatgagaattctaaaatgaatcctgggaaatgcacgtttggtgatgttgcactttctgtattttacaggaattagtcaatacatgttgaaatgtttaacattttaagattggaggcttaattactgggagtctgtctaatgaagtcctgggactattgtaatggaatatgatttgagttcactgtgctctttttgtttgtttgttttggtcatatatacattcagaacttttattttaaaacaaccacaataacattaataatagaaaattcatctgtaaatattcacagtctagtcactgaaaaatgggaaaacctctaccatgccttattattaccctttgctgtttgaggagccagaaatagaggtgcagttagaggacggtcactttttccaacaaaacccactccatagccatgtggatttttatccaaaggctcaacaaccagagggaatggtgagacctgataactaaaatactgttattggcaagggtttgaaatgtgtaagaacctaggagggaaagg

SEQ ID NO: 118654 - DNA, 1099 bp, Homo sapiens
aatgaatgaatggagtgactgaatccataggacgaatacttttgtatttgtatacacagacagataggtaaaataactttgttattctctagcctcagataattataaataattttcctactgccactataaaaatgactggcagaacactcaaagataatgcatagatgggataattttttggtctgcagaaatgtcacacccattaaagatgtctggcatcacaagtccctgcccactaaatgtcagtttggtccttccttcctccccatcatttagaaaactagcagtgaggtgataccaccctcactgaggaccagtggactagatgaaatcccgaaagagattctgacatgaaacaaaatgaaaatgtgggggtcatagaccatttttaatttttgtaaagtaatacaggaaaatcatatagttgagtgtttttgaatgtcatccttttttgtttttgtttgtttgttttaacagattggaaacctccacctgcacaaactggatgaacttgactgccttgtaaagggcttgctgtatatagactctgtcagtttcaatggacaagccgagtgctattattttgctaatgcctcagaacctgagcgatgccaaaagatgccttttaacctggatgatccctatccactgcttgtagtgaacattggctcaggagtcagtattttagcagtccattccaaagacaactataaacgagtgactgggacaaggtagtgacctttttggttgtattgctgcattcacattgttttatacacagaagttatgaaatcagtataataatgtcattttcaccagtaaaagagcatgtatttgcacaacagcaaaaaaaaaaaatatatatatatatatattttttttttttaagtgaaagagggtgccatgttgcccaggctgctcttgaacttctgagctcaagcaatctgcctgtctcggcctcccaaagtactgggattacaggcatgagccactgctcccagccaacagataatgtatttttataagatgtgtatgtcaagactcaaactgaaattattaaatgtttattagtcagcatcagttgggatcaaaattt

SEQ ID NO: 118655 - DNA, 1167 bp, Homo sapiens
gaggcagaggcaggcggatcacaaggtcaggagatcgagaccatcctggctaacacggtgaaaccccgtctctactaaaaatacaaaaaaaaaaaaaattaggcaggcgtggtggtgggcacctgtagtcccagctactcgggaggctgaggcaggagaatggcgtgaacccgggaggcggagtttgcagtgagccaagatcgcgccactgcactccagcctgggcaacagagcgagactccatctcaaaaaaaaaaaaaaaaaaaaaactttgaagggaaaaaggtaagttccacatggaacatgtgtcttacccaatacatattattgcctgaatgcatgattcagagtaaatgaagtttgtggctaactggtttttaatttgtgtttctaaaatggatatatatatatatatatatttttttttttttttttttttttcctcccatagctttcccatggtttggcatggacattgggggaactctagtaaagctctcgtactttgaacctattgatatcacagcagaggaagagcaagaagaagttgagagtttaaaaagtattcggaaatatttgacttctaacgtggcatatggatccaccggcattcgggatgtacaccttgaactgaaagatttaacactttttggccgaagagggaacttgcactttatcaggtttccaacccaggacctgcctacttttatccaaatgggaagagataaaaacttctcaacattgcagacggtgctatgtgctacaggaggtggtgcttacaagtttgaaaaagattttcgcacagtaggtatcttttactcaaaactgaaaattgatacctgtttttaaatatgagagtaggtttccatctagcatgttccttaattctccctgcacatgcagtgggaaatatgtatccatggttgcctttcacttggggcgttttaaacacgtttatgagatgagtaaaaattgcccggatttggtcatgttgttgcacataatatttggtaaaacttgtttagggctgtactacaaagctacaataaaaaggggatttggggactttaatgaatttggcagtgtacaaagccagatataaatgaagcttgaattattttcactattgtcctacatttacatggtttttggaatattacttattca

SEQ ID NO: 118656 - DNA, 1064 bp, Homo sapiens
gcatggtgaatgcctgccgccccctagcctttcctcccactttctcttcgagatctgggaggtgccagagggaatttctgattctgatttttgtcaaaccagactagtctcctctcccagctccccctgaattcaggttgaaaagaggcggtcgcggctgtcaggttgcgctggcggcttttagcacctgtttttagggatttccgggcttcctgcttgtgtccttgaaatgccggtgggttcctgggagttgtcactgttgttacagttggagctttcaaacgtacgtgcatgcagtctgccagtgtgtaattgctttggcttgtttttgtttagaatatcaactagttcatgtttgttttagaaaacgcagataaacaagaaagataaagtcacccgtattccccgcacccggagcgaaccgctattaatattatggtgaatacccgtagatatttttctatgcatgtacttaaattctgactatgcttttagaaaggtcgactttcatttgcttccttttatgtttagtcttttaaaaaccttttattccagtaattgacttatttaatcacccagccattgtgattgtcactctttttaagtatagcctcccagaaggactaggaacgtggggattcatgctcatcttagagtcgtattgatacttttgctgtttttacagtgtttcatgtgatctctttaactgttaagaaatccacaactataaaacagggcgctgacaccttccctgcccgcctatcggggttcctgtaaaactcacctgagaggcaacaagccaaaaccctgtgaaaactacaaattcctatataactgtaaggtaatttggtcttaacttcacaggtgaggaaattgaacttagccccagagtaacttttccaagcatgtaccaaccatgtgctatgtggttcataactctaaggggactgactcataatacagtgttctttctcttgcacccatagagcattgtctaagtactttatctggtagtttcatctgttaattaaaatttttaaaaaattatttataactgaatagat

SEQ ID NO: 118657 - DNA, 1015 bp, Homo sapiens
cagcctccatccaaccctcttgcccttactgggtcagcagaagccagttctttggtctgacctaaacaaaggaaattatattaatattaaaatggttgtcttaccttgggggatctttctcctgcatggacactgagaagtcttgctccctgccaccaggatcccaggcagtccaccccgtgccttgaggacttttccacattttatacctacacgaaatactattcttaaccaaaactcatttttaaaatgttattaaatagcttattctgaaataatttcagacttacagaaaaactgtcaggacagtataaacagcttaatcccttcaccccagtcattagcatgttgccccatctgcactccctgtctctccccatgttatacacatgcacatgcacacattgtcattaacctctttctaatccttttaacaatctcataattttaaagacttttaacaacacctgaagctttaaaatgcataaagccctttctccttcacaatcgcctctggtgcccgtaacagcctgggagttgctggaaggacaggtaaatgtgttaccactttgcagacacggaaactgtgacttgcttgtcaagggtcaagggtcatggctcccttcctcaagtgccttgctgcagacattctcccactgtagtgaggacagtagaggggtggaaatgaaaagctgggtcagggtccagagtgtttaagcagatacaggggtgccctttcccagcctgcagttatttctaggccttctggaaaagctcatcgcaacacctgcttcttattcagatatcaactccagctcatttcccagagaagcctccctggcccctgggccaggtcaaatgccttttgaatacaaatgtcttatagcatacaaaaacatatactgtatgttcttgtatgaacatcttccctttctttatagcatctacctcagtttctttattaaatatattcacttaaatagtatctagactctaggccaagagagacagacta

SEQ ID NO: 118658 - DNA, 1051 bp, Homo sapiens
ctctctttatttgcaaaagagattgtgcctcagaagagccaaagggagggcagtttggaggacagctggaggaatttaagccatatccaggaaaccacttccagctgggggaatgatgacaccggccttgttggtggacattagccccagagcgaggcagccagcatgggccaggggagatagaacattgcctggagatggggttggatgaaatgaccttttaggttcctaagggtcttcctgctcaggaccccaaggcctcatgtgtccaaagtgctttctcagacctccatctggaggaaaaactaattgtatttcccacccgtgtcttcctctctgccatcccaacccacctctctccctgacccctgactcccctgctctccacccctcacatcccaaagctgctcctgccctctgggctttgaggggcagcggtgtgagatcaacccagatgactgtgaggacaacgactgcgaaaacaatgccacctgcgtggacgggatcaacaactacgtgtgtatctgtccgcctaactacacaggtaaggatctcatgactgtatgtatggtggggtggaggggtgtcgctagaataccattttcttaacttcctccagggactctcttcctctctccctgaggacagagactaagaccccaagactgtgatatgccaagaggggctccccaaaggcctgtttgcttctccgtgtcctccaccaccagccaccagcaaatcactgctccttcccacttgaaacagagtcccaggctctttagctgctgttcatctcattgctggccattacatcctttagggcccctgtagacctagtggtgtttgaggctggcagagaggcgcttgcattgtgtttatgcttccttcaggtctagtcaaccgtctcttgaaatccacattttccagacacttagctaggagctagggatacaaaaatgaccaagacagagttccttctcataagaagtttatagtcaggtggacagaggcgtggattcattagaaagagaacataacatctataagccct

SEQ ID NO: 118659 - DNA, 1048 bp, Homo sapiens
atatccaagccttcattgctcttaatttgtcaatcccttagaatgttgtcaggcaaggaggtcccacattatgacagtggattggagaatgtgggagggcctcatgtggaacaaaggcaaagaacaaagcctccctctcagttactttgagactttttctccaaacagtggagggtaaaggacctctggttctctttggagcctttttgagtttctccctgtgagtggcctacaagctgaggatggagtctggcccggctttcagcaaatgctgactccgcctgcactttggaaacatgaccccggctaggctgcgagctggctgccatctgtcccgggccagtttaatccacacatcttgtagagagaaggaaaaagtgaaaaagctgtcttgaaaaagagatgcaaagagtcacagagcttcctcaaattgggttactctaccatagttgggtagatgggaaggtcaagctgcttaggaatgagaatacagtttgagataaggaattaaaccattaaaaaatctaaccaatatattattagtattttgtttaacaaagcagattatcaaatcatatattccaatttaattaaataaaatggaaggtacatttaaaagtttgaatatgattttatatatgtatatatttgcatggggaaaaaagcctgaaggacataaaccaaatgatagcaattgtcaactataagtgataggaatttggatgattttattttttaagtcaactttattgagatttaatctacctaaaaaatgcatccatttcatctgtatgattctatttatcttgaccagtgaatagccatgtaaccaccaccaaaatgtccttctgtcttcagccagtcctctctcccatgcatggatcctggcgaacaccaatctgctttctgtcactgtagttttgcctgtagaactatttcatataaatggaatcacacagtatgttaccttatgtagctaacatctttcacttagcgtagtattttgaaattcaccctgtgttgtattgtcagtaatgtgttctttgtt

SEQ ID NO: 118660 - DNA, 1038 bp, Homo sapiens
gatgggattacaggcgcctgccactgtagagacagggttttaccacgttggccaggctggtctcgaactcctgaccttacgtgatccacctgcctcggcctcccaaagtgctggtactacaggcatgagccactatgcccagccagattattttttaaatcatgggcatatattctttaatattaaatttatcaacaagtttgagtgtttgaataaatcagctgggttacggaaaagctaatggtacctttctttttaatctggtgttgtggtcacttaatatgagggcgttagtaatgcttctcaaaccaatggcagccagttgccttactaggcgcatctgttgaactccgtatgtattgattggtgcaaaactaattgcagtttttgccattagaaataatggcaaaccctaaccctgaccctaaccctttgccattggaagtaatggcaaaaactgcaattagttttgcaccaacctagtaagttctgagcacttagccaggtgcgatgggcagtacaggcaagtggtaaggagcttgcagtcaagttttggagaaaaggccaaaaataactcatcagtagcaggggtctggaattcaaggctgatggggacttctagactttcagtgcctcagaatacaaaagaaaatctatcaggaaaccagccagacagggtggaatacctaagccgaatgagctgtaacaagtgaatccaggctggatggcacaaaggggagggagagcagtgtgggagaaggatgaacaggaccagagcagtgggagagagaaggacaaagtaagggagccgtgcagaaagtttgaggatggtgatgtggggaggagatgggtttatagcccagcctggccacttgtggagggaccatgggcaaaccctagtttcttcataaaatgcataaaatacatcatagagacatagtaaagattcaagtgtataatgcatgatcagtgttcagtatgtttgtaatatacacccaaactttgctggctctatgtaagtatgtaggggaggaaaca

SEQ ID NO: 118661 - DNA, 1024 bp, Homo sapiens
ggttttagagagaaggctgacagggaaccccagaagcagggggaagggctgtggccatctttctttaatacagagtcttgtaaaaaattgttattactatctgcatcaagatgtgtcttgtttggagtactggttggaattcctcagcatggaatatcaataaaaaacaagggatttgactgagatttatgtcaggggaccagttctttccatgcctgtagtgccacacacagattcagaggtaggcaagaacacaagctggggctgagacacaatgcccaggaccacagcagagcaggaagggttcagagccgttaaaatccaactcgtaagtctcaaggtatagtaagactaggacttggctaggaattgctgttgattctggtctgggaaccaaagctcacctccacttgatcttaggtagggtattgatttctgattcttttcaagtctctcagattctaaacctgatgattattatgcaatgatgttgggtcgctgtctattcctagttactcatcatcccactagagggatagaaaaactcctatttagcaatcccttcatttatttccgtctcctttgtacctctgaagctgaacatattagtcatgttgtatgacaaggaattcccagctgttcagaaggagagagggagaaatgacagggagagacgccgctatcaataaaacaaagcaccgtgggtgaggtgtgcagcattttggtgttgtcagcaatctagccagccccgagtcaatctacctgtataaggcttccccagtggagctggaagaaaagttgcctggagaaagaaggagaaaaaaagaagaagaatctccttaagactgagaaatacattattttttaaattggcaatcctttttgatgagttaaatggaagcaagttgtgatctaaatcaatggaattgatagtgtttttatcttgaaaggttaactgtatttttgccactctcctaactcccaagcaacttggcttttaagaaaaaagaaataatcctctggg

SEQ ID NO: 118662 - DNA, 1130 bp, Homo sapiens
agagtccacttacctgctcgttggtttcttgaagaaaacaactttgccaattagaaacaaggctcaaaactcaaatgcagctgggtgcggtggctcacgcctgtaatcctaatactttgagatgccaaagcgagcagattgcttgagctcagaagttcaagaccagcctgggcaacatggcaaaaccccatctctacaaaaagtacaaaaaaaattagtagggtgtggtggcatgtatctctaatcccagctacttgggattttgaggtgggaggattgcttgagcctgggagttcaagattgcagtgaactgtgattgtgctgctgcactccagcctgggtggcagaggcagagtgagctacacacacacacacacacacatacacacacacacacccttacacacccttaaatgttccttattaattatactggcttgcattgaactgaggtgtaagtggtcgatttggactcctttcctaaaagaagggtttgagaggggaggagtgagagagatggagggtactgggtcccaacccgcaggaaggagagaagcaggacatgggaagaggaagccaggcaaagactgggggctaggagtgccctggatcccaaaagtctgtgccccagaaacacatggtccagtccaggccgacacatgaccacttagctccatgtctatggctcctgtgagtggccaaaagtctgccaccatgactgaaatgacagagcagaagggtcagaggtgtgaagagagactggagaagcagacgggtcagatcatgcagggccttgtggacccgggtacagacttctatctagtccagtggttggcaaacccattctgtaaaggaccagatattattttaggctttgcaggccagacagtctctgtgaccctattccattctgctgttgtggtgcaaaagcagccgtagacaacatgtaaatgattgagcgtggctgtgttccggtaacctttatttcaggcagcaggctggatttggcccacaggccatagtttgccaatgcctggcttagtctaaggacactgagaagcctttaaaagatattggcaggacgtgatggctcatgcctgtaatcccagcactttgagaggctaagttgg

SEQ ID NO: 118663 - DNA, 1047 bp, Homo sapiens
taaaactgtcccgaaaagcccagatttaatatctggaagattcatttcaggactgatttaatgcaacctgcatagtggtttatttcacatctccaagttgggactaaatcatccttgtcttgttgatacccataatacaatggttggtatttgcaaaatagaccaggctataaaagaatctgaagactctagttgctctaaatgttttttacttaaaaaaaaagataaagatactttataattttatgtgtctaggagatttagttttttttcttctttgctctcagcgatgtcatttaaatagaaataataggaagtatgttcagagatgtggttcttcttaactgttgatttgcagctatggggaatcaccttctttctctggaatcaccacactgcacaaagaactagtgacatctggcattcaatatgacaaactatagaagcaccatccagaaacaattcatcgtttcagtatacttgttcttaagccctgggctgctatcatactttttcaagatgaagacttgaacagagcaaacctgttattaccaaaccagctaatggcacttaccaagggctattaccctctgttagcatttatcacccgcatctcatttgacacttatcatttattgcctgacagttttatttatcttttcttttatcctccccgactgtattaccatctgctgaaagcctgggccctagagttagcccagttcaattcaatcccatctctgctacttactacctaggtaaccacagctgtagaacttaaccgctaatctcagttggctcatttttaaaacaggcataaaaataggataataggattaaattaagtaatatatacaaaatctttaacacagtgccaggcacgtggaaagtgttcaataacatgatagccactggcattaagattaagacaaggataataacactgatagcataaaatgtggtcttaaatgttgctttccatttcatgtaccaaagtcccttgcataaaagtagataatgtgcatctgtggaaagtcttgattatag

SEQ ID NO: 118664 - DNA, 1035 bp, Homo sapiens
gcatttgggaggttggggcccaatgtctccagcccaatgctgctgccccatggtagcatctgtgggtgatactaaggctctctggtcctgtaggtcctgcagcaggactgattctctattacaaagaggctggggaggctgagaggactggggtcaactgagtcccctcccttggtctctcaggcccttggataggttctcaaatcagcagccataagaaagagctaaagggtcaacgtgtatagtgattgcaagcacagacacaagtcccaatcccagcctcattgaaaaccagccaggtaaactcagggaaattgtttcatctcagagcctcactgctaccacctacatttgatgtgactcccccctagcattgtcgtaagaattaaataagaatacagcacataaaacttagtacatagagtgcggctattattgtaacaaggaatttagaaacagtacgcgagaaactttccaagttcatagcctgggaggaaaatcttgtttctaatccaatcatgacattaagcacaagcccaaagattagaacaaatcaagagatatttggcccaggcctagtggaaccactgccctctttctttgtacatggttttgggtttccctaagacgctggctgcctcttcacagagccacatatgcatgcgttttgttgcacgtgttgggaggaggaaacacccgagtttagccctaaagcagtcgggattgttttctctctctcagtgttgatatatttggaataactgaaagcagacctagaacatattaaaagtatagcatgtggagagggttccaggcggagacacagaacctctgtggagaggccaggccagaatgtgtgatcatctctcttgcctaagaccggatactgggccgggcgtggtggctcatgcctgtaatcccggcactttgggaggctgaggtaggcagatcataaggtcaggagttcaagacaagcctggccaacatggtgaaaccctgtctctactaaaaatacaaaaattagccaggcatggt

SEQ ID NO: 118665 - DNA, 1048 bp, Homo sapiens
aaaaatcttgattgtgctacagaagtgttttcccaaatgctttattaagacttgcacaaatgctcaccatttatcagcaggaagtgtttgcctgcttggaggaaaatcaaactagtaaattattttattttatttgcttttatgtagccccctgcatttctgtccatttgggctgccttctttgagcttgctattataactagggacaactcctcgtggcctcataaatcataatcgttgatatttattgctcagtaggtcttttaaaatccagttggaggggttccctcctcccttaaaactctgccttttattttgcttaaggcactatggtaggaaactgaaacatattttcctggtttttacttaaactaaatgtaaggcaagccttatataaagccaacaaaagagagcctgaggtttgaagatgaaggtcagcctcttggtcattgattcgacaagttccaacctggcatttgcaagggtttgtctcgcagcaactgcctatcagacgcctatgatggtccagactctgaatcaggtacctaacacactgctagacaagcaaggcttagtctctgccctcgtagagttgacagtctaatccaggggtcactgatctttttctgtaacacagcagatagtaaatattttaggcttagaatagtccctgtcacaaccactcacctttgccttgtgtggtgaaagcagccatagacactctgtaaagaaatgagcatgaggttaggcacagtgcctcatgcctgtaatcccagcactttgggaggccaaggcaggcagaatgcttgaagtcaggagttcaagaccagcctggccaacgtggagaaaccttgtctctactaaaaatacaaaaatcagctgggtgtgatggtgcatgcctgtaatcccagctactcaggaggctgaggcaggagaattgcttgaacccaggagatggaggttgcagtaggccaggattgcaccattgcactccagcctggccaaacagtgagtgagactccatttcgaaaagaaaagaaataagcat

SEQ ID NO: 118666 - DNA, 1049 bp, Homo sapiens
aatcgcttgaacccgggaggcagaggttgcagtgagccgagatagcaccactgcactccagcctgggcaaaaagagtgaaactctgtctccaaaataataataataataattaaaattttcaatgaaaaagagggaaaaaaagttatttctagatggttttgcttctgtgcatgggtcagaagccagcagttagaaaactgtagttatattcatggctgtcatggaaacaaggcatgggggactggtctttgtcccattattgcctttgggctcttcaaggacaagctggagcttaacatactgaagttggaaagaatttcagaggtcatctaaggaaagactgtgccagctactctcagcattttgcttagccaaacacttcatctctgcttttaccaggaacttacacctaaagaggaaaagaatccatgtgggggatatctgtggcacggcctggggggacggaaggactggggaaagaatgcatttgacctgcgaacagaaggagagagtagagtgacaacagctgccttgaagtgtggatgaaatgttacatgcttctcacacccaatgtgaggcaacaagcaaactctgagttaaaacaggcaaagacaggtatgagtctagagaagacagcaagaggaaggaaggaaaggaatctgacaggcatggaaccttcatcaggatttcattccacactgagtgcttcccagtggccatctcgtgtcatccctgcctcggccctacctcaaaggtaatatgccattttcacagataagaaaaccaaggctcagaggtgtgatgtaacttttcagagccactcagttgacaagtggggaaactgagattcaagcataagatctagggagtcctcaccaaggtggccctaaagcaatcctaggaaaagggtccgccataatccacccagttgctccagccaaaaacctaagactctttcttttctgatttctctcttcacacacacacacacacacacacacacacacacacacacatgttgtcctgcagctagccatcaacaagccag

SEQ ID NO: 118667 - DNA, 1018 bp, Homo sapiens
gttactgctgataccgttgtaaatctatctttgtctgccttcataagtatttcttgggttaagttcttagccttgtagccctggatcaaagggcatgcaatattctggggccttcctgaagccttgccatattgcccaagttgaaatatcatgtgggaggtggaaagagcttgaagtgtggagaaagacaggccttgatcctaatctttgctctgccacttaccaagctgggtgacctttgccaaaaactgatattctctgagcctcaatttccttgtatagcaaaaggatgaaagtaaaagcatttacttcgtaggacggttttgggactcagataaaatcatgcattttgagccttctgtgggaagcagccttccccttggtcattttggaatggtgtacaagcaaggatgcatttttaattcagtctgccttctccatcaacttttacacgcatctcagaacccgggcaccactccatagaacattttagccagggaggagagggcgtgggggctggaatttcaaaggcatgtagaactggtctagctctcttataatgtgaacaaaatttccacaaacaaatggttactagataaaaagggtttgggattggagtcttttgagggctgtgtcccctgctctaaagtgtggggcctcggagttgtgtgtttttgctgcttggtgaacaggatgacaatgtctggttctgaaatcccaggagctgagggaagcccctttttgcccagttcctgttctccgagggttttttgtgaagtgagcctaggagctaagaagagagagagaaatgaggtctgctgatccccagcaaaactacatgcacctccctttcatctgttttggttgaaaacctacgaaggttaaaatagagaaaaccttcagggcaggcaagctatatgtggttagctttgtgtgggaacctgagtcctggagactgccctgacttttgcagcaggcacatttgtatgtttggattttccagaagggataaatcaca

SEQ ID NO: 118668 - DNA, 1043 bp, Homo sapiens
caataagccaagactctaagaataatgtgctttacattaattcaaaccatttatcagaggaatatgagagcagatgctgtattttagaattcagacatggagttattgatcaaagaagaaattaagacttatggttattatagtaaagggcaggagggatgggggcagcagtgcttggagtcctggataacccattcagctctatctacaataatggaagtcagggagtgttggcaggatcagtgtctgctgattaggtctactcttggctcctctggtgaggatttgttttattttgatgggcataagggaggctctgcgcatggaacctccaccacatgcattggtgctactgcttaggaagagggagtgatcctcctgcctcagtccttgaggcccccaagcctcattgcaatcccgggaatctgtcatcttcacctgtctattcagatccaatccccaccctctttctcccctacccccatttaccaaaatctgaactgttgcgtagtcagtccctattggcatgcaccccacagtgagccaaatgcatattaatgaataaactgacacgtggtccaaattacatgctacacaaattgtagcaactttgcttgtgtctaatatcagcattgcgcacataatgacaaaatcatacattgagatagtttctaaatagcgccttgcatgtgaatgttgaatattttcaatgcttttattcttatttaaaaaaatatctttttgggaaaaatataaattagcaaaaagaagaaattcatctaagtcagtacttgtatagaactaaatcattcttttccatagcttcatggtatttcattgtatagatttaccaaaatgatggtaaccattgcttttgatggacatttggttacatattcaaatttttttcactttacatcgtaaacattttcccacatcactaaatattcttctaccctagtgtctttaatgactgaatacttgcatggtattctattgtatggatataatgctaaattcaatcagtaccatataattacttt

SEQ ID NO: 118669 - DNA, 1043 bp, Homo sapiens
accattctactctccccatcatgcaggatctgagtgttgtctgtgttcccttccaaatataaaattatggaattgtaggactttgggaaattgcatgtccacaatttctttttccatgggaaaaaaagggaaaccatatctatggagttacagtggagatgtagcagagatgccctagagcgagcaaccatctgtgtttgcctagcacggaaggattttccaggacacagggcttcccgttttaaaacccagaaagtctcagacaaaatggtcaccataggtgcacatatggtccattcaccagactccctgacaccttaatacaggtgcaggatggcgaagcccagcctagggaggtttctaaaccccgcaggctttctgatggagtgtggctgaaagaaagggggagacaggtgccagccacattccctagaagagaacaccttaatgtgcagttgacttgtttgatctgcttcagctgtgacacagtggtcccatgtgtacaggtagtgcactcacagaaaatggaaccaggggcctatgaggatattcagtccccccacctacctaacaccgaaaaagaagtcatctatatattccataagaaatcatttcgttctttcccgttctggaaataaaagcttcctccataatgggtgggctgccaccttgtggccatgagtgggaatgtgggaaagtacaggtaaccacagaggactaaatgcctctgggtttaaatcaattcggttcctatagggtacgaggcagtgagctagatgcttgtgtggctaagactatcattatgttaccaagggtagagctttactgtgtgcatgtgataaatacgcttagcagtttgcatgtagtatctcctatagtgtgcttaacaaccctgacaggcaggaatcatcaccattttacagatgaggaaactgacactcagaggttaagtacatttttaaggtgacacagcaaagagctaggatttgaaaccaggattggctggccctaaagctcatggtctggaccactaggctatactg

SEQ ID NO: 118670 - DNA, 1434 bp, Homo sapiens
cgggagaatcacttgaacctgggaggtggaggttgcagtgagctgagatcacatcattgcactccagcctgggtgacagagcaagactcagtctcaaaaaaaaaaaaaaaaaaaaaaaaaaaaaaaaaaaaaaaagtagaatgccagacactggtacatgttagtagcattagatattattattctgtttgtaaccactttgaccagcgaatggcaaagctgttagccttggaggtaagatgggatttatgtgggtgtgaaaacagataatttggttgggagtaagaggggattgagatggacagataactaaattctgggatggtacctttcgcctttatggggtatgagcaagttccaggtaggaaaagtgtggaaaataaatgtataggacaatgtcaaccttagggctggttttctgtaggattccagaggatgcctttgattctcagtaaaccccagaaagccctgagagaggctcttcaccagctccagcagcagaggctcctcccctatcccagcactgaggattccattcaccttgtttttctttagggtcatgactcttaccaaggggttgtggagtcttccgaggagccacccagctgtcccactccagggcctctaggacaagggtgtctgcagacagcctggtaaagtctttttcttctccaccgtctcctcctacagccacacaatgagccaatcaggggcaaggttgcagctggaaccctggctcccgatgtcttgtctgcatccctcatacccatcctgggcatcctgcaattcccactgactctagaagccctcagtcagctgctgtgagaaactgacattctgtaaattctgtgttttgcctttgttttgtttgtattatgttataacatcaagagaaacccaagggctttccccagaatggggaaaaagcgggatgattttgatcacgtggctctaccatttactcagtggggaagagaaggtggcccctgaccaggaacaaggtgatagatttctgtgcccgtcttcactttgtgtcttgtttcttttctgcctatcatcatttagtcaggagtttttttttttttcctgtgtacttagaaagtatatgagaaaacagaaactctttccataaatcttgttaggagagagaagaatcctgtagttacttaggatggaaaatccttctaagacaaaagggccttcagagcaggctgtgggagcacattgagcccacagagagaggttgacccccatgggggattttgtctggcctttcacttcctaataccttgttgtccacatctgtgtagtgggtctccatctgtcctgcctgcttctgagagatgacagagggagtctctgaaaaagccaggcgtcagatcctgtaggcggggtgccatgggcatggcctggacaagtgaagcctgacatgtg

SEQ ID NO: 118671 - DNA, 1020 bp, Homo sapiens
atgcctgattaatttttaatttatttttatttttagtagaaatggggtttcaccatgttcaccaggctgttcccgaactcctgacctcaggtgatctgcctgcctcggcctctcaaagtgctgtgattacaggagtgaaccaccacaccagccacattgctttttcctataattaccttcatacccccatgctccctattcctcttttgagtcccctcctctccctactctaaaaacctaccgtttgcagttcccaccaatgtctcccttctctggagtactgctgccctgcaattctgtatgtcaaggggaaaaaaaaaggagggagactttggttaattaccacttcacttggcaccaggaagggtaggctaagagaggagctatagccaggagtctaaaacttttcttttggcttgtttaaattgttgacaaaaatgggattagtttgagattaatcactgaaaaacaagggagataaactcctgggttccagagatattaattccttggttctcatcccagcttaggttatcaaaaccaagaattgttcatttttcacagtttatgaggtttatctttggcctgtcatgagatgctgacagaaaaatgaaattggtctgtttctagtctatttcactttctcattcccactctcataacaagtcaaaatgttccattgtaacacttaaggagggaaaaaaaagacgtgacccgcctatgtgcctgtacttcttgtcattatttggtgtttttttattctaaatatttttattgttcaagccgaactcaaaagataggtgcctctcccttcatttcaagcagaaagtgaattttaagtacttagtaggaaaagttgatggcaaattaatatgtgggggtggtttgagaacttttcatttttctcaggataaggcagacaagacaggttcaaaatacggacagtggcgatgagctggaagtgagaagtttcctcagaaagggctgaaagggttggctgagaattttttttcatttcat

SEQ ID NO: 118672 - DNA, 1040 bp, Homo sapiens
gggaagattaatgtctaaattaatatctagcgataacttttttggccctgagtgcttcagcaagagaagtcatggggagcccaatttcaaaaggcaaaaggtgtgtatgtgtgtacctgcattataactgcattagttaaaggccatctttagttctgattactctcgggaagaaacgctattaagaggggctttctacttggagaaagtgaagatagttaaaactctagcagagcaagtcagtgtatattcagtgaagcagacaggctgcagtgtatgtaggcaaacacatgcagactatacacccaaaatacacacttaacacacacataggtatgtgtcatgcaaactacttacctatccagagattcctagacactttcaacctaatcttattttaacatctattcgttttggatcaaaaagcacgtagaataaggttgggtccaaagggactgcctgatgttccaccccttcatccttggtgatcagggcagagcccctggaattgtcaatgagtcatgatgacagactaggaaaacatccaagatactgagacttggcagtatacaggttgtattagtctgttttcacactgctttaaagacatacctgagactgggtcatttataaaggaaaaaaatttatttgagtcacagtttcacatggctgaggaggcctcaggaaacttacaatcatagcagaaggggaagcagggaccttcttcacaaggtggcaggagagagaagagcaggggaaactgccctataaaaccatcagcttttgtgagaactcactcactatcacgagaacagcatggggtaaaccgcccccatgatccagtcacctcccaccaggtccctcccttgacccctggggattacaatttgaaatgagacttgggtggggacacggatcctaaccacattacaggttgcagttggggggtggggtgggcagggctgcgtgatgagagtagcctggcttaccaagtgcccagggcatgcctcaggcaccatgtatgtgtatccagacactct

SEQ ID NO: 118673 - DNA, 1041 bp, Homo sapiens
gtagtaacagataatacaaagtgcaggccctgggagccttatttattattttccatcagccaagtgaaggcaatttttagatttagacttttttttgatgaactatcaccatggtgatggaattggaaattcttttcctgacaacattgctgttaaaccatttgtttaattatttgcataccatgactctaggaggcccctagagctgtatgcttctctctgtacaaaagagagttaatctcaggcatctcttagtttccttacagcacagagatccaagttttctatatgcctcgtctttaccaggtatggattgaggctcctgggggttccacagaattcatcttgcaaaagatgttcatgaaagaacaagattgaagaaaagaaagaagagcaaggaatgtaccatctgttctgggaaaaatggttttgagcctctctacttcttctctggacccaacagatttggtttctggcacatcacatctacagaatcacctataggccagagatgttggaaggagactttcagtaagtaccttctggtacgagctgggaactctggagtctaagttaccttttctattatggggctggagccatttctgaattcatccctttccttccttgaataatagtgtctttaaaattccagatggattcaagatatatttatgtattttaatcccctctcttaactctgcagctgactccagaaccatatccagaaaggtctcttctaaacatccctccctgatttgggtcgtgcttattagcgaaagagaatgagcttgcttcctgagtcttcctatactttgccctgacccacacttccattcagacctggtctctgaaaaattactagccccaattataatgaacagtttccccatgagaagtaatttaattttgcaaattgttgtccaagtcataagggttggaggtgtctggagactttgggagcggcagttgttctctaatcctgtggccctgtggggatactgtgtacatcagggtaggaatttcttcaagctgaaccaa

SEQ ID NO: 118674 - DNA, 1032 bp, Homo sapiens
tctgtctcccaaagaggagaggaaattaagttgtcaagggcaggatggggatgagggtttagctgaaagaagaaacccacaccatatccttaatctctaaatatgcaagactgtcttaaatggttgaagcaagggctcttctttccagttttatttcctgagaaatatttgagctgtttatacacaattttgtcagctttacagttaccaaaatggactgttaagataacttagcctcctctctgtgggataaatacagatgagcaatgccatctcaaaggaaaaaatgctttattgagccaatatagaaaagtattaaagttgtgtaaacatgcaggaagaagcaagggaattcctaacagagctgacgggctgtgattgcacatgccttgatatactctgtcccaaaagttgaatgaaaccctggatgtggtcgataggaattagattacgtgttgtgagggctttttttatttccaagttaaactgtttatatctcatctaaatggtctcatggcatctaaattttatttcaaatcatgatttcaaaaatatttgttgctgctatatggttgctgctatacactaaatgatagggtcctttgaaattctgactcaacaatgtgaatcaaacattggcttttgttaaaagggatagtgaagttcagtattgtattgtgccctgaggcgcttgcattaggtagggtgcctttggctgcaagtaacagaacaatccctgtttgaattcgttttaataaggcattgtactgtatcacgtgataaggagtcgtttgataggggttgctccagctgtaagatgtcctgattacacgggacatcatgtcatatgtcaagtcagtgttgggactccatcctgatactttgattagtggtggtggaaggaaagggtatattgtttttctatttcaagacaaagaacttaactcctggccgggtgaagtggctcaagcctgtaatcccagcactttgggaggctgaggaaggtggatcacgaggtcaggagattgagac

SEQ ID NO: 118675 - DNA, 1022 bp, Homo sapiens
gagaagtatacttcactcttgcagagaagtgccttttttagaactgcaagatttaaatgagggaagagatcaatagcttattttttcctattcatttccaggaagggatcttggcaccctatacctatccacttgggttcctaagaggaactatctttcatgcgtctgattgctggaaatagggtcttgtctaacagaagtggaaagtactgacttcattgttagccttagagagtaaactcagctgctttattttctgaagcatctcccaaatattctaatctacccagattgcttctgttcttcaaactcctataatatatatttgtagcagaaaaaaagtagaaaatagctttaagcctgcctttctttcccaacatttcattataagaattgaagaatatctgacatttacttatataactgcattggggaaagaaggaaggacaggcactgtaggactaattattctatggaagctttagtgtaagtgctgagagcgctgtaaatgtaatggacaagaggaaaaactctgaatgccttctgaacagccctccctgctgtctccctctcaaatcaaatccatgatagatgccactctgctgtactcccatggtatccagtactcggctccatccggcactcatcatactctgttgtgattacctgtgtgcatgtttgtcacctccactagactgagatccacgagaacaaggactgtgtctcattcacatctttatccccagtgctcagcatacagcctatgtgctcggtatatgtttgtcgaataaatgattgagcaaatgagtgagagagccatgtgaagtagttggggccacgtctcaaaagaagtgttactgaagaaatattaggtgaatattccagatatcagaattgatttgaatgatattgtacttctgaaacctaccagagtttgggcatatgatactaggaatcatggaaacagtgacaaatgtggaatattcatccagtaaacaaattgtgggtagctgaacattttt

SEQ ID NO: 118676 - DNA, 1095 bp, Homo sapiens
tgaaccaaactagagttaattcagttggctttcactttccttcctatttttcgtgaatctaaattgatcccttgaatgtttgatttccttttcctttccggttctgaaggacccacaaagtctacttttattgcttctgacaacaagtttagaagttgacatgaacttcctggtgcagccaaccttcaatttttcatctccgttttgcagtgatttagatgcagatcttgatggtttgctagtgacgttttcagataaaacaaaagccagtaagagagaagttatgtcagataaccaaccagggtccataagacagcagagcgctggaaggctgctgaatctaaatgcgaaacataaatagtgccaacaaattcattcaacacatatttctgcctattgtgtgccaggtacatggaaatttctggaagggtggaatgtgatctcgccgtgatacctatggcgtctttccatgtgtattcttcctcttcagaaaggaaatctacacgttacagttggcagcaagctcaacgtgaagtgttatatggtcgccaaaaaaaaaaaagtgctattataggctgcgtagtatccagttcaaagggggcagtggttaaacaaatcctaacattaattggcattttatttgactataaatttcataagggcagacacaacgttggtcttgctgctcaccacattccaataacctagctcagggcttggcacaccatggacactgaatagatatttgatgaatgaaccaattatctgggcacagacccaatcgtggcaaagaaacagaggccaactttgtgctgggtaagctggtcagataggataattatgggatggatgggtggatagactgggtaaagtgacatcagaggaagtgagatgagattttgttttggacaaataagatggggataactgataatgggcaaataaaactcaaggttcactctcaagaaagagctcacaggctttggggatttgtgcatgaggagatacagtgctgcattcctaactgtcgagtgactctgctttaattaggtttgggcagtaagtaggaagaacagtaagagactccttaacatc

SEQ ID NO: 118677 - DNA, 1009 bp, Homo sapiens
ctgcaggtttcgctttgcacctttccactaatatgacatatgactgtttaaccatatgaacttgtctcctctgtgcttctggttcttcaaggaccatactaataatttccataccttcctcaaaggcaaagttttgaggataaaattaaatagtgggaatgaaaggtcagaactctttgtgtcaaggcaagcaattaggctgggttctagtttcgaaactgccagggaaaagtcctctgaagctcttatttccgtttcattaaaatgaggaggtcgggctggaaaatctctttggtccctcataggtgtaacgttctgggagtctatatgaaatattcaaaaggattcatcaacagcaaatccctagaacatagtgctcctagaattgaatcaatattgaaggaaatccagtgtctcgggacagaagatgcacagagaagagccggactgacctttcttgtagctgcagtcacaagagacttatggcacgggaagccgtaacactcatcatacagccagttattgcatgtgaagtgtgtgaaatttggcagcagaagaacctgggttcaaattttggctctgttagtttccagctatgtaacctaaaacaagtcattttacatccctggcctcagtttccatctctgtgaggaaaaaagaaaaaggacaatactcatgctgggtcttgtgagtggcaaataagatcatatctaaaaatactggcatattatagggcctcacacatagtgggcattcaccaatgtgaccgccattgcttttattggactaaatcagagaagacaagtttccatttcaaccacccaaagaattaagaggcagtggctcggagccaagaatacttcaagcaggcaaagaatgtttgttctgtcccttgcctcccctcccgacttcagttagagtcctttcaggaagtcagaggtgggtcacagggttttaataattccagaaagagcatctgtttatctgtttaaaggagagcaacagaatc

SEQ ID NO: 118678 - DNA, 1072 bp, Homo sapiens
aaaaatatttgagtataccatgatgatttccttgggcgaaaactttacatgccggtcaaagggagtggagaatgttaatgcttttgctatatagtaccaaattgccttctagaaaaatggagcaaagtaaacttccactagcagggtatgaggattgattacttcttcatatgttgtccaacactgggaattatcattgttatcattaattattttcctaggtttcaaggcacagggaatggtggttgatttaatttgcactttttttggtcttgtaagttgagcgttttttcatgcatatgttggccatttgaatttcttattttgcagattgcctcctcttgttctttgcccattttgggctgtgatgttaattttggtgtgattatcttttgaaggattcagatggtcctactttaccaaaaataattttccccacttactgtctgtattacctcatactaaaggggaagataggattgaccctgggcttgggactggagaaatgtaatggtagcactgcaatggtaccactgcagtcagaatataatttaacaaattccagactgctcaaaaatagtttttacattttagtgccagctatggttgtatttgcattattttagttagactgtgtttgagtcctggatttgccatttactagctttgtgagcttgggccaggttaccgcacctctctgaggctcagtttcttcatctgtcaactggaatgacacctgccttgcacactttttgctagtaacaaatgtgatgaagttcatgaaacatagtacctggcacaaggatggcagccattaagagatatttaagagactatatgtatgatacctaattttctactcaaacgtgttactttaaagtagccttgatggaatcataaaggtctccctcaccctctgttcctccctctttgctgaagggacagagaagcaggggtgcatgctatgttgggaagaagccttccagctcctatggaatgggctatccgggaggatttgcagagatcttgccctcgttgccccacagtggcatgggaatagcagtgctcccag

SEQ ID NO: 118679 - DNA, 1070 bp, Homo sapiens
aaatggggtggttagcctatgtaaccctctacgctcttaaaaaacaaaaagaggtatttgtgccccttggccttgactgttctcacaggggccacgagagcttctgaaggacacgttggggctgtgaggaaaggccgttggctttaggggagggttgccatttctgctgaggaggctagctgtagggaaaatgagggcctctgaaaagtgatttggggagccctcatggagtaaagggtgctgctgactcttgccgctgcaggctggtgctctgtggctgagtcagatggaggtcaaagacaccaacgttggaccagctttgaaaggtggcaagatggggctgcctagcaacacccatgtcatttctgcctgtggtttgcacgagatccacccagctgtgaatatcacagaaggaattttcacgaactcatggacctttcattactccagaaatgagagcgatgacagagcgtaggcattgcatgtctctggctggtccctttaagacgacgatttgtcttgctgagctggggcaggctgtgttgggtttgggtattgacaccaaacagttctgattcacagcggtaacctccttcttatttccatttcattaattttcatcaaggcttaaacagccatgcatgtggcctggatttggggaattggggtggatctggacaattaaaagtcccttaagttttgcagtttatctctgagtagagcaagaccaaagaaaaaacccctcccacgcccctttgctgctgtgttagttgaagcgatttcagtgggattaattgactgctggaatgatttgcattttattgcccaggtctgctcactgggtcagaagatgtcataaaagcagaaaccccaggttgctgacagcctcagagacaacaggctgctccacaaagaaattggaccagccgttctcattctttataactcagcagtgtaataagccacatgtgtttccagccgacctgctctggctctgagagtcagattttgtgtttttccaggagcccaggaagcaagtaaaccccagtagaagttggagggctgaattt

SEQ ID NO: 118680 - DNA, 1010 bp, Homo sapiens
aaataaaagctccccaaatgtgcagaggccaggggtgcattcttagtcctgacctcacttttctcttgaagcaacaggagaaagcactgcctcacatccctacaaagtgagcccagctccagaaatcaacagcagacaatagagatttgcctacaaatgccctgggcctacctgggagatggcagcattaccaacctcacagcaaaatatagttgaaaatctccactagacacttctgtcctctacccctctcaccaccttctggactctgttttctcctcccctgccacagccaccccctgcaggatgcctccctagcagttagtgctttgcagaatatccgggggaagaagctaagttgttttgttgttttgttttgctttgctttgttgtgaaacacaaaatagcatgccgggagggtgcaagatgtcaagctgctaaatatttactcagttgctgtattgctgactcttattgctggctagtaagtagttgcaagatagactctagtttttggacggcactttgcatagcactaatcttcagccctttccttttatgctcagcagtttctcacttcttagcttctccaaacttgcattctcacaccatcatcctgcccaacaaagacttctcctttggatgtccccctgttagaaggcagtcaaggccaagttaattataccagtagtgctgaaatgaacatttgggcctaaacctttgtccacatttctgcttaggatagatttcccggagatgaattaagggtcaaaggtcaagggcattcttaagactcttgacccacgttaccaaactgctttcagaaagtttgcacaaattttcataatcaccagcaggagttaagaggtccagcttgactgaatccatgctaatactgacatcagtttgattttcaaaatttcatctttgctgtagtgaagtcaaggaaaaaaatactatctctgaatggttctaatgtgcatttcttttatttttagtcaagccgtata

SEQ ID NO: 118681 - DNA, 1060 bp, Homo sapiens
cttgatcctccaacttgtgcctggggagcagggtttggacctaacaaagggcagatgagaagcagcatctgggaccttttgcagggtggtggggggctacagagcaagctccaaggcaccagtgccaacctgacagccctcctgctactgctgctgcgcctgactgcctcctccaacagccccctctggccagaaatgtctgtggctgctaagctgacatcatcgtgtaactactcttcgtagaataaacatctccctggtagtctgcctttgatagttttaacagttctccaaactgtcccaaaaaggtgaaagcatattggataaatacaattttgaaaatgcgtctacatgtcacagtgggattcttttttctctcctttctccctccttccctttcttccttcttcccttttctcttccaccttctacctttcttcctccttttttccttccttcctctcccatttcctctccccttttcctcctccccatttatctatccatcttcctttcattcttttgtgggtaaaacacaagcaaactgtaataccacatctcacacttaatggactaagtggggaagaaaagtgaggatttctaggcagagagaggagttttaagttacaacttcttggccctataggcagggaacagtgcacatttcaggtagagacagcaaatggtaatgtttcaacactaaataggttcccagcctcatgggtcctaacaaggaatcttaacccgaggttcatgggtggcactcaggagctctgttacctgaaattgcagacaaactatctatgcatattcctggggaaatggtccaccagaaccatctaaaaaccattgttgttacaacccccaggaacttaaatgttggactagctgtcttttgacctgtctgcactctacctcttctccctttaacagtaggacgacattgtaatatagtggttaaaaatgcaggcttggagtcacgctacctgggaaggaatctcagctccactcattaccagctgtgtgaccttaaatatttaatatcactgagtttcaattg

SEQ ID NO: 118682 - DNA, 1067 bp, Homo sapiens
ctctttacctgctttcatttacaaagcattttcttccactcttgcctttgtgctacgacaatcctgggaagtgggtatcattttccccatttgactaataggtaaacgaagcctcatctagtttgaaggacttgaccccagttcacaaatctttcatgtgactttgccaggactgatcccaactgttaagtccagggctttttgctgtcctctccttcccgtctgactcatgctgtttaccactgttttcttgggcccaaggggattccatgttcaccattcttcctaggctcttctagctttggactggatccctcattctgctggctctgctgcaggcttgaacctacctgtttgtatagaccacacactctactctgttttttcacttacccccagcattagcagtgccagagagaggcttggcagggtgatgagataagtgtacgtgaagcagaacaaggcgttccaagctaaaggccagtcatctctctgacatctgctccccaggaaagaagctgctttctggctcatggtcagtctgctttcgttcagataagcccagcaagtgggcctggacctgcctcttccagctggcagatgccctccttgccttcggggcacaccttagatgttatcttttccttgcaacattgcctgccttcttgacctaatgcagggttagatgcccgtctggtagcacttgtcacactgtgttaccatcctccccttacctgaccacctcgccagctacaccatgagcatacattgaggtcatgaccggcattctgtgtcaggatatggcatggttgggactaagatgagctgggaaggcagactgcctggatttcaaccccagcccctaatagctgtgtgactacttacaggctgaattgtcatatctgtaagatagggctaataatcatttctaatcaaaaggttatgagaataaaatggcataaagtctagaaaacagtcagcactgtgaagagcacacagtagttgctaaacatgtgttagtgattctttttgcatccccagtgtctagcacatggaagggaaggaac

SEQ ID NO: 118683 - DNA, 1049 bp, Homo sapiens
tgcttaggaagcgctgtggcctgttcttgggtgtcacgtaaagggccaaggagagaacctagagttttcaaatttcttcaatctacttctgacttcattggcaatatttggcactcaccttgtataggagaaacagagttctccttttgagaatagagacccctttgggtcgcagggaatagagtttgttagatatctccaaagaacgggaaccctggtacagcttgggtgagactttttaaacaaacagaattctggctaacaccttctcttagtccctagaaatcctccattcctcttccccacatcaaactttgaggtagagctgggattggcagcagcttggctctgccatcgtgtccaaattccactatttctgtcctgaatttgcatttcctggcagacttgagccaagtcccaatgaaacagccatagcttttcaaaattacaggcaaaatcaggctgggaagaggtgaggggggcagggaggggacgggggagaacatgcacagtaattgtcacgaagggcccagtgatgtggatctggactgaggaagtcatttcacatgatctttgctcactcacttccagtttggctcttccagctcctcaatccgggcatggagccgtgctttttatagattgtaagtccattgtggagttatgtatcctggcagtttgtaaagtggtgttttctctatttttatgggtgccctaggacagtgcaggcacacacacctttcttggtaccttctcattccacgctacttgtgattaatgaagaaggactgccacctccagtcgcttcacaggatagacttggggcagcctctgacttgctgtgtgtccctggtggagccaaccctttcaagccccctgctccctgccccctgctggatattgtgggagtgaatgagggatgaggatgacagtaaaccctccctgaagggttatgtaaatctgaaaggctctgtggactttgaggctggcctagggaaacctcaacaaatcagctactccttgcttccttgctttttattagattccct

SEQ ID NO: 118684 - DNA, 1034 bp, Homo sapiens
gtgctctgtgtcaaccatgatgtcatttgagagggccacccagtccaggtctaagttgtgcttttcatgatgtcaccactaaagtcccttgactatgaatcaaagacatttctcttatgctgacttcttttgttaattggtagtaagagaggaaagaggctctgaggattacaaaatatcttaccctttagcaacatcatggtgttgcctgcgtgaggtctcacatctctctctgtctctctttctcctttccctcttcctctctctctcctgctttccttctctctgtctcttctttatttaaatacatttgctttttaaatttttccagagcacttgtcacttcagaacataaataggatgtctaaaatacatgatttttaaaataaaaatttatcaaaggatcctgcaaaggaagatagtcctacaaggtcctttgatgtctaacgatgtgccattggagagctagaaggcagcaaagcccgactttctaagataaatgtagcatctcttgcaataattccatgggccgcttctgtctgtgggtctcagtgcaaacctgccaccatgagatgagctaaaaagcaagcttgcaaaatgaagttcctgaggagtgtgatctctagggccctagttgaggtactcttactacagccaggctgaaagcatatttcagcttgtagcaagctggtttcgtctctacctgaggaaagataaagaactttgctcaggaaatgtgagcccctgttcccaggcttcattcctctcaagctgatggacaggtatggaaggaatgcgttcgttggcaggaattagataatgcccaggcacaaatggcagtcacgttcttttcctccctctctctgctttgggggaaaaatgtggtaggaggggatgctctgcagggagaggggtgcagaacaagctgtctcagcttcagccagctgccgtttgtcactggattctgacaatggcatctggctccgtgagtgtggaagccagggacctccctcacggtgaaggccgagtgacca

SEQ ID NO: 118685 - DNA, 1035 bp, Homo sapiens
caaagtgctgggattacaggcatgagccaccacacccagcctagagaactatcaatataagtatctcttaagagagtttggatttgattgccatttcagcacattagagaggggcatcttactcacacgtgctctcctggtgcaaaaacacagggaaacaatggagtgacgcatggcctttcgggccaggtgcttgcagagtatggcaaattgtaggtttcgatgaacaagcagcttaccaaggaattataacccccgctcccctgccgtgtccaagtccaattccaagtgtcttataaccacagtttgatgctgctggctcctcccccagctccacctttgcctgtgagtatatgtatctttcaaaagtcatctcttatttccagtaactccaaatacaagccgccttttagtgacaagcagatgagcgtgagctgcagtcgcctggagtgtgcaatgctgtcaccagagagaacttagtaattacatttgccaggctcaccgtccatgttggctggcaacatgaagggatcagagaattctttgaaacaatatccaagttcttggttaaaagagatacaggctgggcgcggtggctcacacctgtaatcccaacactttgggaggccgagacaggtggatcacttgaggtctggagttcaaaccagcctggccaagatggtgaaacctcgtctctactaaaaatacaaaaacattagccaggcgtggtgttgggagcctgtaatcccaactactcgggaagctgaggcaggagaatagcttgaacccaggaggcgcaggttgtggtgagccaagattgtgccactgcactccagcctgggcaaaacagggtgtctccaccttaaaaaagataaataaataaagatatatagcattacactacaggatggaagagcccagaaaaaggattccttcttagaagctactgaagagcgaagtgatttcttagggcagtgtttcagacaaatttaaaaaatttatatatgcacacatataaattatatatatatatat

SEQ ID NO: 118686 - DNA, 1054 bp, Homo sapiens
ccccagtgtgtgatgttccctgccatcagggcctactttttatagggtggtcaagaaaggtgtccctgaggatgcacagtttaagttaagtcctatggaaaagaatgaggcagctatgggggagtgggagaaagggaggacagaaggcaaaggagtaggggaggagtgttttgggcaaagggagcagcaagcatgaagaccttgggtccaagaagacttgaacttaagctgaaagaaagccagtctggctgcagcatgtgagagggacagaggccccaggtggttgcaaagagaccgaggggcccactcctgttagaccttattggacttgattctaagctcagtgagtagccattgagaagtcttaaagcagggacgtaacatgatctaatttatgactttaaaatatcctgttggctaccatgttgagagaagatttgagcagataagcgtggaataggggaatcagttgctttttatctatagtctctagaggaaggccagtggatctgcctttgcaatggcccaaagctttgcacatttagaaaacctgcattattaatgaaacatttgcatcttaggaaatgataaaacaggctgctacatgtaaaaattaagtaactcaatttgttttaacagcttgtgctctagtacagcaatttgtttggcatatacacaagactccatcggaacagtaattatgccatgctaattattttactgcattgtgtacatctgacgtttaattatgggaaagtatgtgagggtagattttcttcctccctttgcctgcctgacaggtagttttgtttcccatacctcttttgcacctacattgtctttatgccaacttgtcatctgcagtgaaattgtgtttccatgacagctttgctcagccatgttgcctgcaagttgcagacaatcaccaaaataaacagttgacacagatgtcattctcaccctctcattctgcctctccctcccccttaatctagctcctactataaagattttatttttctcccacctcgagaaggaaagtgatccctgacaa

SEQ ID NO: 118687 - DNA, 1048 bp, Homo sapiens
cacctgaaagctgcccaatatgctttccattgctgtgtgaagcctgaagagtgcacatggcagttgtgaatttcaagggttgttcagggagagaaaatcgttacttgtccatttgccaaataattgggaatttagctaagtcaaagtagcgggtgggggtggggtggggctgaggattcctcctcccctccccattggcccaaatggagtgaggggtgggcgacatagcttgatttgaggcgacttgtcagtatcctgctgtgcattctgaacctggcccacgtcagccgaagtgatgtcttatccagacacacactatgggaaatgtgaactggattgaaatcagagcagggatgactatggggacattcagagccttctgaaggtatttttagaatgcttttaacctgaaaaagggaaagtgccacctttctggagaccgtagagctgagaatgactcacagcgaaaccaggctatacctaatttgggggaagccccctttggctgcttccttgggtccaggtgggagtgcctgttcttaagctctgggaatgtgacataccggggtaggtgtcattacagcccctcacactctgagtctgaaactaggacactcacagtgtcagggaaggaaataattattccctatatttctgagtatggtttacaaaacacatggatagattttctatcactgatggtattggatacactgggcaggcctgctgtcttccacttttctgataaggatcttgacgttcaccatgtgccacgcccacacagctctagagtagactctcagcccatatactcacctgtaagccaaaaaaggtacacgtggtcaaaattaccccgcaaaatgctgcaagtcatccccacgaggcggtgcccagacactttgcccccgaagagctggaagagattagttccttcagtggactaccagccaaattcaggtgacttacatttagaggtcaagtttcttaatactcagcctgctgagatgcatgcacgcgggacacctgcagaagctgagggatcagcagg

SEQ ID NO: 118688 - DNA, 1027 bp, Homo sapiens
ggattacaggcatgagccaccatgcccggcctcagtctctgttttttaattggcatatttagaccatttacatttaatgtaattattggtgtgccaagtctgccattttattttttgttttctgtttgttctgtttttagtttccttgttttcttgtgggttacaagaacattttttagaattccattttgatttatttataggtttttgattctttttctgtatagcatttttagtagtgcctctaggtattatatgtgcataacttatcacattctactggtgttgacaatttactagttaaactgaagtgtagaaacctcacttccctttatgttcctttgccctcccctattacaatataattgtcttaaatatttctacataaactggaaaaccacaccagacagtagttataatttttgctttaatcaccaaacataatttaggaaatttaagaaggaaatatattttcccatatttttactctttccattgttcttcctttttctgaatattctaatagtcattttctttttgtttagaggatttttttttagccatcttttaggggccatctgctagtgacaaattttcttagtttcctttcatctgagaatttcttgattttcccttcattccaaaggatatttttggctggatatagaattctgggttgacagatcttttctttcagcccttgaaaaaaaattgtgtcacttccttctggacttcatggtttctgatgagaaatatgcagtcatttgaattctttttcccctgtaggtaagtcagtaaagtattgtttctctcttgctggtttcaagattttgttatttccagaaatttttctatggtgcgtcttggcatagatttctttggatttatccagtttgggatcttctcaccttatttaatctgtaggtttctgtctttttccaaatttagaaatgtctcaaccattatttcttcatgtattttttaagccccatcctttctctccctcttctttttgatatctgattat

SEQ ID NO: 118689 - DNA, 1042 bp, Homo sapiens
ctcagaaagcctgtgtcgggattaaggtactcatgtatcttaagtgcaacttggatttcccagttcaacctgggcttcatgcattggagtctgcacgttcaaagtgaaagtcatgtaaatcagatgaatttgactatcagcctggcacaccttttcatttccttttttttcctcgcacggtggcctgggctggaatgcaatggcacaatcttggctcactgcaacctccgcctcccaggttcaagcgattctcctgcctcagcctcctgagtagctgggattacaggcacacaccaccatgcccagctaatttttgtatttttagtagaggcggggtttcactatgttggccgggctggtctcgaacacctgacctcatgatccacccacctcgacctcccaaagtgctgggattacaagcgtgagccaccgtgcccagccccttttttaatgatcatcagagccattttcttctccctcctgtctgttattgagatatttactctgtgttggaatcaggttcaagttccccattctctgcaggtctttctcccttagagctatctccctactcctaccttaccttcctattatgatttggcagtgaatcctgtatcacctggctgacagatcttaatgatgaccctggccatttagcaactaagcctcctaccatgtgccaggcatcatacaaggtcattgccctaacttcattttatccttacagcagcctgaaaaggtaaggggagccaggcccagtgagattaagtgacttcattaaagtcccactcataacaatcggggtcaggaatggtgtgagctctgtttgaccccaaacctctgaacacggatgctttgactcatggtgtggtcagtgctgttggataactttgcgcacatgcttgtctggttttgataattagggaatatgctttgcagggcaggaagctcacatttctttgtgtccccatggcatctggcacagcacttttcactccaaagacctgcatgactgtgtgttgcttgagaggtctgagcagct

SEQ ID NO: 118690 - DNA, 1050 bp, Homo sapiens
gcagactgcatacaataggatctctcttttaggttggcctaggcacaagttaagactcatcacacacacctggattataaaaattctcttatgcatgcagcccttctgaggtttctcatacttttgtgtaaattgcatcacttgtttcttccaacatccctgttgggtagcaaggcaggtgcctttagttaccccctcccctagcaaaggcaagggatctagcatttcctgagcacctactatgtgccaggcactctgctagttgttttgcctatatatgttggctcccttatccctccctagagtccgggaggtcatgcattatcattactgtttgaaagatgaggaaatctaggtctggctccccagattggcacagcaataagctgcttgctgggcctgaagcccaggcatccaacggcagggtatcttctgtggctcacgcagtgagcctgcccccatctttgtcccgaaaccttggcatgccaccccagcagggcagccttgcctgggaagcctgggaacagggcgtgttgttggcttgcagtttaattgaagtggaaagcagcccattgagacaggcccagatctgttaatcctgcttgtaggaatgctggagataaaagcagccatggacctagagaacaatagctccacataccagcaggaaagggcactgtcattgccccaaaccaaacaactgccagggcctggagggtctggcggggaaggcccaggatgaggctgactcatagagatgacagaacagcccggagagaatgggaaaatgtagaaggccaagtttaccccagtgcatatatactttggggctgagtaatgtggtagacaaatcactcccttcaccatcccacccagagtggaagcacaccctgaagcctcaaggataatttctacttaaaacagttgagtaaaatggaaccacagactctgctgcttcttcaggaaaaggggctgcggtcctgagactcccaacccgttgtgctagaatgggaccttgggaaggaaagctttctccgagggaattgaatt

SEQ ID NO: 118691 - DNA, 1069 bp, Homo sapiens
tcttgtctccaagtcttagttatactgttgctggcaagtaatttggggtgtgctaattaccatctgaactgagcagcaattctctgatagggaccaatttgtggtaaggagactttccttgccagggatcccctctctaattttcggaaccatgaaaacttctaccattctccccagtttgacatctcaagggcccctggcctcagacctttttgcatggaaaggctgggagaaaccagctaatttattttcctgagttatgttattgaaacctgattccattatttatttcagaaaaaaatgtgtgttttcatacacttcatatgtagacaagccatgtaatgatatattactctggaagcagcctttgagagcttctagttgaggcatggcaaagagattatgtcctggatgcccactcggattagataaatggtgctcagggtaatatattgaacatgactctgaggtcagaaaagctcagaaaaggcatctggggatatattaggcctggatgccgtggacccaggacagggaacggagcacattccctaggtgctgtcactcccatggaactcatgctcttcatctagcaggttaggagccggcacctagagattggaggcaactaggatgctgctgttgcttacaacacctctgtgcgagttagaaaaaggtgatcccccccccactctgggctgaccctgctctgggatcacagggcttgggatgaatcctaagtgaatgcctcttaagcaggctccctagtgctttggtggagggagaggagcatagagctgagtggtccccagtctgttgtcccagcagggtctctggccactggccaatgccagcaatcaaggaacttctccataatttgccccaatttgcccccatttccccttgttcctcctgaaggatgcatgcagctcagacttcagccatcagccatcagagcatccctgacagtttgaggccttgaaggggatcaggtgtaactgagtggtttaaaagtatgaaaaccagacagatctgggtctgaatctcgactttgtcactttgggtcctt

SEQ ID NO: 118692 - DNA, 1181 bp, Homo sapiens
acctactatatataactcatttacctgcagctacttagccagactccagtgaggagtcccaaattgctatgctaatgatggtagccctcccctcccaagaagtgctgatttccccgctcagcatgagggacttcaataatatctctttccagtgatataatttgattcctccatgggatgctgctttggtcctagttcacttagcactaaatctctcgttagatactctcatgacttaatcttttcaggccccagatcagcccaggcctcttatttatttatctggggccctgtttacttccctgttgtaaattacttctggctcctggccgtctgattgctgcagtgatagactaatagctcagagctactgcatttgccttgtgtgatgaggcaaataatatgcttaacttatgggagagaaatgcaccctccatttatttcagtgggggaaaatattactcaggggaaagggccaaatcatttacctaatggctgctggtggaagtcgatgtaattactgacagaattatgtgaaacaaattgtcatgcctataaatctaaacctccagttctcaaaggcagaggggggatttcagtggctttcatgggctctgcctctggagccctcgaggtggatttctaagagggtgctggcagaaagagggaggttggccctctagttttcttcaccaggggcatgttcttcaccagctccaaacccaagcctgggcagactacagcctgtgagccagtccagcccactgccacctgctattgtaaataaagttttattggaacactgccacacctattcatttacatatgctatatggcccctttggtgctacagggcaacgttacatagttgtggctgagactatactggccctttacagaaaaatgttactgatctctgatccttattctaccagaagaaaaaatgtcaaatattttatatggaaatggagggattaatttaggtcactcctcttaacttctttcaaacaattcaatgccatagtaaggaaattcgaaggatctaggatggttatcacttactctgtattgcttctgcctctattcattgcatcttctctccacaatctggtggctagtaagtattagaaacccatttgacggaagagaaaatcgagactctgaaaggtgttttaggcaag

SEQ ID NO: 118693 - DNA, 1011 bp, Homo sapiens
tgacttcatcactatctttaatccatgtcacaaagaaatagaagaggtgtcttgtgagtgaggatatattcattaaatgaattgggtgggggaaggattatagaatggaaagaaaggaagacaacctgaagaatggaagaaggggaggaaggaagaaaggataacagcaacaataaaattaaacagggaataggggtgctaaagatagagatctggtaatagaaaggaaagaaagaaaataagaatcgtgtgtgtgtggtggggtgcggtatatctcaggtttgttttagtctttttctggctcctcccaaagcagctggaagaatctctgatcgcacgtgtgactctccattctgtgccaagctctgtgtaagctcttgtctctacagcaaccgttcagtgtgtaaggagccaccttcatagaatgccagagctgaatggcaccttctggaatttctatatcaatgccctcattttacaattggagaaactgaggcagggagcagtaggggactcacaaacctcagcactcagatttctggtttgttgctgtgggcacagcccaaaggtacctgcttaccttagccgtgatttttcattaagcgacaggggaatcacagaagacagaatcttagcttacaagaagtaaaggattgatgcttccctggtttgggccagctgggatagcagttacttttttaagaaaaggatgttgatgatactggtgatagatttgctgcagaaactaaggattagcaattctcacctgtagaaaaattgtgagtggttctaccaaagcactaggactgcctccacgtggttgctgtcatgatgtactttttttctcaaggaaaggagctgaaaggacaaacctcacgtgagagtgattccaaggaaagaaccaacagaagaggcaatcagaaggaaaaattggaagatgactccctaaggattccatcctgctgttgggagagtggcagtgccatccaaaggaagggaagagaaaggaag

SEQ ID NO: 118694 - DNA, 2011 bp, Homo sapiens
tgagcagaacccaaacacacattcttcagttgtctgaaagatgcaaatgtacccacatcaataatcttgaaatatttgttcctgaaccacattcagcatcaacagaaacatttctaaagagcctaattatctctcattttcaaccaacatttgggaatccctccaggggacaaatagtattttaatttgatgccccaaattctagcataatttcaaatcaccaaaaacatctgtaactttgtctttcttctggctttcctatggactcagtatcttggatttgaacattaaattccatttgtaaggtttgcagttcatttacaaagtccaggaggttgaggtctgtaatgaaagtgttgatacaatattaacaacagcaaagctatgataacacagcactgtccaaaccaaatagaaatggagacgtttaagtcaatttcatgctccttgcctaaatttggtgagctggacctgagtttttgattcatggtttagaataatattctgatgttttattcatgatgtttcttttttcccatcgttccttttctaattctcctcaccctacttatggtgatgaagcctgcttagaagtgtggcccgcccgccccttgattagcactgcctgttgcgtagccaaaaactctccccacggttggccaagtggaatatcctgctgttgaactgatggtttggcctcttgttggcgtgtctggggctctggacttgaatttttagtcaacgagtcagcttttgattgaaatatatgttgaatcatgccaacgtttctccagataaagggaacatcttgacttttggaggtcaaaatgctctgtctaaagaagaaaactggattttcaagagagtacaaggataacctatgactaatctcttctatctcagtctcattcaatttgggatttgtgaaactgtattgtggatcaagatactcagataaatctaacttcaataatttttttttttttttgagatgaagtctcgctctgtcgccaggctggagtggcagtggcacgatcttggctcactgcaacctccacctcccaggttcatgcgattgtcctgcctcagcctcctgagtagctgggactacaggtacgcgccaccacacccagctaattttttgtatttttagtagagacagggtttcaccatgttggccaggatggtctcgatctcttgacctcgtgatccgcccacctcagcctcccaaagtgttgggattacaggtgtgagccactgcacccggccaactttaataattttttaaagatgaaaaccagtggtagcaatctagagagaaatgaaaaatcatcagttttactgatattgctctaatagtcttcttcctatatctgtctcccactctgactcctttttgttaaaagcacaggcacatacacctaacgtaccacgcacacacacacaaaacctctctataggagaatcccagacagataaatgaagatcctttttgggctgctgaattaactcacagatataatttcactttagtgcaagacattgactattaaattagctcaaattattgggcaatgctatggtgagatattagggattagaaaggcagctgcagtgatggttgggggaagctctttgacttcttggctcataattggtgtttttggtccatagagatgatagtggcagatctgtgtcagagacagtaaattattactgtaaatgttttctggcctccagggagagctctcttttccctggaagagatgtgcatgggtcaggcttccaactgagaccttcagggactttcatttcatgttagaactcagaacagaccattgccaaccaccagttctcaagggcgtagccatcaaacaacattatcttaggaaataattgttaggggttccattgctaatggtattctctgcagatccttttcccttatgtgtgacacttcctttatttaaatgagagtgaaaggtgggagatcattaggtctaatggggct

SEQ ID NO: 118695 - DNA, 1780 bp, Homo sapiens
caacataagcatttcggggagggagggtcaggggcatttcagccttaatcagttcccaaatgtgtgtggtgaatttactaggggcaggtcctctgcaaagtgcttcacctatattctgtcacttcctctcagatttcagaggtagatacaatattatccccattttagagatacagaaacagaggcctagagatttagacagcttgcccaaggtcacagagccagtaactggctgagccaaagttgaaactcaagcttgcctgacaccagagcccacattcctaaccgtgattcctgtactgtactttggagaagttactaactaaagtgccaggcgcctagttaggaatttagtaaatgctagctcccttatctctatgaagccctaaaagagctcagagttgttgaatgactggagccctgtacctctaggtagtgctttctgctactcacagagccctttgcagtcaccttagtcttccaattcggcactaaactttaaaacataactacaagcaaaatgtgtccctataaaactctgcattgatgtgaaacagtgctataaaagtgaaaaaccagtggagaaaacaaaaaccatactacccaaatttccagtggagttattgtctgatgtggtgaaatgataatagcacaacagaaaaaccaatccatcaggctggtgtggggcttcagaggctgcccccctgcctgaagctggatgcggagacctgctcccttgtgcgctggcatggatttcagaggccgggggacggcaagaccagcctcaccatctcatacatggggtcacgttttttcagggacacagccacccaaagctcatggaaaatgtccctgcaaactgagtcccgatttcctgatttttctccttgttcccccaaacgctgaacactgcagtgaggccagccttgtgtttgctttatggcacatgtcatcaattccagagtttgtgatgcttttgaagacaggttttgctttaatctgtgtgtggacagagaatggattatggtggttgctgtgtcattctctctgtagtacctgaagccagagccagggatgaaggcctgggaggtgtcgtctctctcctccgataggatgtgtccagctgagcatagaagcctgcggacttgccacagagttgataacaaagccaacatttaaattgccttgtagattcttgcattacagaatttttgagctaggaatagcaatctagaccagtgcttctcaaactttagtatgtatctgaacacctaaggatcttgttaaaatgtggattctgattgtgtaagtctggaacacgacctaagaatctgcatgtctaacatattccgaagtgattgtgctggcctagcaccacagcagagcaaggacctaggctatggttggttttcaaacttagcatatagaaacaaatatcttgaaaggatggttaaaatgctgcatcccaggccacacagccgggaagtctggttcattagatttggaatggaccgggggatttgactttgtaaataggcaccctaggtgattttgttgtgtgtcacttaggggcatactttaagaaacatcgatctcatatagcccctgttattttatatattttgaaggaaggaaccaaacatcttttgagcacctaatgtgtgctaggtaccttatgttgatgccaactccttcagtcctcccaagaatcctgcatgaaaggtgtttttatgcttgctacactgatgaggaaactgggcttgagtttcactcactcacc

SEQ ID NO: 118696 - DNA, 1052 bp, Homo sapiens
cgaagagaatcattaaatctatttctaaagcttaggggtatctaacttacccatagttgtataactaggatgcaatggaactgggactcagtacacatctgtgtctctgccaagtccttatgttttctaccataccacactgccatgctaattaccgtgggcagctgaagttatgctcaaaaggattggtgatggacctgtcatatatccaagggattcccttaggattttgctggctaccctccgtgcacccatcctcagagccagtgccatccgactcatgtgtgtattagtggggtgtctgtcctcttattctgtgttcaaacacacagaacatgagctatagaatcccagatcttggaagttccctgaacttatatcgctgtggtctgcaaaatgcccagtgaggtctctacgatgcttgggtcactcaataaatatttgtcccctgccatcctgacgtagatcatggtcaagtgtggagactgggcttctgttctttctaggctcttgcagcacctgacccagagcagaggacaggaggaggtagtcaagtgaaagggttaaggggctgcccactgtgtatcctgaaacctttggcaagttacttaacctctcttgtctcaggttcttatcagtaacatagacaatggtagaactgacctctccatgttgttgtgaggataaatgggaattatctgggggaaaataattggcattgaacaaagcacgtagtaaatgctccatggaagatggccacggctgaccttggctggtcagctgatgagagtagtgcgtatgctggggctttgggctctgtggtataaactttgtagcacctagggaaggagtccagtctccaaattagaggagggttggatgaacactgcacttggagtgggaagacctgagtcgtcatgctggctcttctacctgtaagctgtgtggccctgggcatgttacttggcctctctgggcttcatctagagaggacaggatggagcatgatcttgcatggcctatgggctattaatttctccctttgccatcct

SEQ ID NO: 118697 - DNA, 1648 bp, Homo sapiens
cgtgcctggcccatttatgtttttaggtgtgtatttcacatgccagtttcatcactcagtaatagctacacgaagctcatggtgagaaaagttcaaaagtcttgtctggagtccatgggaaggaatattgtgatccattagtgatgtctctccaagactgatggaggtgtggcagcacagcgcatgtgctgtatttttacttttgactgacctttgctttgcattcccaacctgactctaagccccgccaacagggaatataccttacatgtgttgagcagcccatactgaaagacgtagagagtctcttaatgcctattgattgattgactgattgattaaagtggtatctgaatacgtttgatctggtttaatgtccccttgacatccttccattctctttcctctttaggcgcctgaacaagaataagctgcaagtccttccagaattgcttttccagagcacgccgaagctcaccagactgtgagtagagttgccttgtgttctctaccttgtgccttgcctggcttgggtgatgtggaggatgtggtttgtggagcgccgtgccgtgtggagcttggcagttaggccctgacatagagacttggagcagggctttgacatgacgtctacccccaacaaacacttccaggcctgacttcttgctccttctctcagacatcagcggcttgcatgaccagtgaggactagtgatgtgtggtagtccatcgttgccttgcaaggagggaggcgatgcttccatggattgtgggtctgaacttacttcaggtaaattccctgaggtggggtttgagataggtttattcacacgagactgtcagtggtctcagaaggcaacggtttggaccgaacatggcaacctcatcaccttgctggttgaagcagctcctgcctttttcccacttcctagcgctgccagtctaggaaccctgggtctgggggtttatgattttgtgggaaaaggaagaaatgtgttgaattttgctttattctcttcagagatccagggtaaaatgaggagaggggagagttggagatacttctatttattcagtgggagaatttggaagcccaggagctggagttgcaggtgagggtggagactgtgattcatgtattgtagatgtcaggcaagtgctaattaaattatcgacagtgaacctgaaatcatgctggcagtgactcagttcatggggtgtactgaattgcctaaggtacacctttctgaatgaagcgacacagtcctggatggctttgcagtcaggtagcaagatttacagcctggctgggaaggctttaacattgcagggaggctccaacgttgtggccaccattctcattcccagtggttgcatttaatgcctacttgtgcagccaaacactgcatataggctctgggataaattgggaaacatgaaacacatgtcagtgtgtgcacttacgaatgagttctgaattaggaatatatatttctatatgtctatacacacacacacacacacacacacacacacacagagactatatacataaatttattttaaaagggcactttgctggaacaagaacaggcaagggttggctggtattccaatcatgcagtggtctcgcttgccttctctagga

SEQ ID NO: 118698 - DNA, 1049 bp, Homo sapiens
tgcttgacccagctttgctcattgatctcatctgtccagttcctcttggctattgtatttgtggttcgtttcttaaaaccacactgtgttatatgtatgactgttctcgttttaaaaatagaaaaactgaggctcaacaaaagaaaagctattgcccaaagtcacacagcaagtcatcagcaaagctgggagggagacagacctgagcttcctacctggccagcaaagccctgcccagcatcacagaacagccactggtagagtctccctgcattccgagatgctccagccagatcttctgcaccttagagtttccttgaagaaccaaatctcagtgtcccttttgctcaccaggaaacccacatgtcaccagaatggcaagagtgtcctctgagtgtagcttcccagactacatttttcctgcgtctctgccactctttgggctgtgtccaagggctgctcacacactcccacatagccgaggggccagctggtgtgtgtgcttctgcctgagacgaggccgcttgcctgtggggaggatgtgattgctttaggaaattaagtgggagtgattaattaggaaatgtactgaggatgctggaaagaaatagcagaaaagaaaaaaaaaattggaaccctcaataccaaatgcttctggccacatggctaaggatactgcactcagtgggaccaaaagcatttgatcctgttatttctgatgctgctgctttgatagcacctccttgcatgaggattttggaaggaaccataaagtcagctggtccaacctctcctttcattgaatggcaaatgaaggcacaaggagacccccagcggaagctgggcagcttacaagaaacagcaggacttgggactcagaaagacctgagtttgaattcctgatgcatccttgctagatgtataatcctgggcaaatctccgagtctcaggcttctcactgtgaaatgaaggtagcattgatgattgccaaggatttttgcaaggaattagtgaacaaaagcaagcgtggtgactgctaataagtgaca

SEQ ID NO: 118699 - DNA, 1093 bp, Homo sapiens
acttaattttctccatcactccaaatgacggctagctttgccggtggttgggcccaataaaaactgacaccatgtcataggctttccctcacttgaccacagaggtcctgaggtcaagtgagagactttccaagatgctcaacagccaagtcctctgtccagccctcagggccagcttagaggacaggaacaagctagtgaatcatggggtctctctgggtcaaccacggtgatgtggccttttagggaaacacagtgccctcctggacagactaaggagcagctgagtggacccgcctccagtggaccggtatagcctccatggtgctgtgcaactctgaacggattacattacctctctgggcctcattttcatgaaagtagaattcttgtatagtcttagtggttttcttagtggttatagtccactgggggaactgtaagtatccgcctccctagtgtctagaacagtgcctggcacacagtaggtgttcagcagatgtgtatttaataaaggaataatgaacctcaaaactacaagtctgtctttagttcttaaaagtgaaagatgggccattatagatctgcattctggcatatgactaagggatcctcactagtaacctatgacatgagttattaagggtatctaaaatttggattttatgaactaatatttattgccttactagagttaccaaggactcctgttgagtgatctactctggagtctggttgccaggcattgcttagcaaccttgcaaaactcctactgtgcacatgcccatgaaaagaactggaaatcctgagcacttaaaccacagggctttctaatcaggaactcatcagcgtcatcctgagtgctctgtgggttttgattgctgctcttcttgtattaattgataagttctgcttttgttgatcatctggattttctattatttctgcatttttgccgttttgattgttatgttgttttctctccagtattgtttgttgtcacagagttctgtctcacctggaaagtgagaatgaacagtgggttgcagctgtagaacctcttgccttggcaatgtgggctatggcaagaagg

SEQ ID NO: 118700 - DNA, 1050 bp, Homo sapiens
aagtctgtgcagcacatcctcatgctttgtttaacttgattccctgggtgggacaatttttatgagcaggtgttctggttaattaggtgattaatgttcctcaaattggagagccatctccccaatgacagttcttgctttgctcaaatatgagacaaatcttccctgtacaatttggagaggtccgtgatcacgttagtctgtctgccaggcctctcgggtcagcactctggccctgaggaccaagagcctgaccccacacctggctgacttgcctcttgctgcaacagtttagagaaccaagagctcccagatcatctggcttcctctcagaccaggcaaaattgaactggggacatatttctggttcctttctggggattccagtccgtatcacctctcaaagtcagagccattgcctctacacagagtcctccagtttctaaagcaaggcaaccaagccacagccaagggcaaattaggcatcaaaactctttttctccaactgtctctcaggcaaatagaaatgtgctccaaattcacttatactccaccttctcaaaaccctttcccacctcaaacacaattctattcctaccaccctccctctgtttctctcaatgccagaacccttctccctctcgttgacatcagcaaacccatacatacttcaaatgccagactgaattattcagctgtccttcccagcttaaagtgatttctccctcttcagaatttgtgtagcacttactatgtgacccatatcacgtagcatttagttatataccatatcttttctcttcattcatgtatcttaattttgtcttcccaactggatttttgtcagctgtggttgtgtcatctcctgggcatatataaagttcttagtcaatgtttatttgattggtaaattaagctgaatgccacttacacttctggaagatgggtcaaatttagtctctttcaccatggttagtcttgactgggccacatggatgctcactcctgttcctcacatgttccagttttagcaccccagaaggactagat

SEQ ID NO: 118701 - DNA, 2060 bp, Homo sapiens
agtaatcctccccagttgctgggattacaagcatgagccaccatacctgctactatgaggtttcttgattacttttttgttattcccttaattttgattatatggatagtggtccaattatgagaccaaacttaccttaacatattggaagcttagcatacaacaactgaacagttttctgatggtgaactgtttagaagcaaaattaaatgtattctattccactctttaatttttgatcccaaatcagtaacagaattgtcagaacagttcttgctcttggaacaagaatgcaaatttgactacttattagtcaggaagaaaattttaatgtttttatacgacagtagtattgagtagatatgtttcttctgttattgatattattgcatggagttttttgtataagcttaagtagttttatttcctctatttacagttggctaaaaaaaagaaaagaacatggaggcagatataatcacaaatcttcgatgcaggctcaaagaggctgaagaagagcgactaaaagctgcacagtatggtttacaactagtagagagtcaaaatgaattacagaatcaattggataaatgtcgtaatgaaatgatgaccatgactgaggtaggactctggactcctctgtctgcaagagtgtgcttagctattgaagatttgtcctgtttagcaattaatagtagtagtagtttattcttttctgaagattttagatctagttcccgccctgccccgtccctgttaaaaaagaatgaactaaatgaattcctgttattctttccaccctagtgtattcagagtttgaaagatcaagttatcattactctctttgccacatttactaccagattttgctttgtctgcacacttcctagaagacctcacttgttttagacctctaaacatctaagtgccccatgacactacaccaagcccttagttcccccatgaaatctaggtttgtgttcaactgcccactaatagacttctcaaacttaacacagacagaagagtggattccctgtccgttaaccaaatattcttttacgattttttttagcttatttagtaaatataatagcattcagtttcttgaacaccaaaaatctttatataccaaagatttttggtatatttttggtttctttatataccaaaaatctagaacttttagtcaatatcttccctttatttctcacatttcactcattaataagttctaagaactagactacaaagcatgtatctttgctactggcactgtagtccagatcaccatcatcactcctagacaagtattgtagccttctggccgggttgcctgcttccattgttgccattcatgccattcattcttcactcagcgtctaagtggtcgtggaataacacaccaaaggtcatgccacagccctgctaaaaaccatacaacagcttctgattttatttacaacaaaatctgagctccatccttgggtttgtagatccctatgtgacctgacccctgccaagcttctgacctcacctcaaactgctttgccttgttcttgactatactggtcctcccttatgggctttacaccagctattgccttttttttttttttgagttgtttacccctcactgctcttgggttgagtcctcagatttcagctttcatttaaatgtcacttcagcggagaggtcagcccttactatgtaatgtaaagttgccctgattcactttttttttcttttttcttttttttttttgaaacagggtctcactctgtcgcccaggctggagtgcagtggcgcaatcttggctcactgcatcctccacctcctgggttcaagagattctcctacctcagccttccgagtagctcggggttacagatgtgtgccaccacatccggctaatttttgtgtttttagtagagatggggtttcaccatgttgaccaggctggtcttgaactcctggcttcacgtaatctgcctgccgaagtgctgggattacaggcatgagccgttgtgcccggccctgattccactcttaattatct

SEQ ID NO: 118702 - DNA, 1452 bp, Homo sapiens
gctctgcattcattctgatagaccttttgtgacatttctcagatgactacattctgaaagtaaaggctaattcagtatttcttttttttcaactattattactactacattgtgttcagagctacaagtagagcatctcattatcaaactaataattctcatgaggaaagcttaagtgctgttaaatctttttttgttgttagcagagattacttgacttgacgtgttgacataccatggagcacattttacttccttgacaaggcacagaagcagtaaggtatcccttgcatgggtttaacatagtttcgaaatacacctcaggggtttattaagactgattaactacaaagttattccaggtttaacatgtcttcgttatttggaaagcagcaaatgcttgaaataagaatgaaacaattgaagttgaaaactgattgtatgtaatggctttaggctatttttatgtaattgaattgtaattgaatctgttttcagagttatgaacaagaaaaatatacccttcaaagagaagttgaactcaagagtcgaatgttagaaagtttgagctgcgaatgtgaagctattaaacaacaacaaaaaatgcacctggagaaattggaagaacaactaagcagaagccatggacaggaagtgaatgaactaaaaactaaggttgggatatctgcgtatttcagcacaaaatattccatatttatgcagccatctgtaaactttagatgataaagattttcttaagtgtcagctttgcaaaatagccaagatctaagtcttcattatcttaatattgggggtgggaacactgagatacaagagtttgtctaagggacttgtataaattatatcctattaattaaatacaattatttaattttggttgctggatatttgtgaaggtttagtttagtgactagcatggcctccttgctgatagtgggtacagcagccccttgcagaaagcctcgtctcctagccttccctgcagtcagtggtatgctttgtaattctgtaaaacagaccagtagtttcttactagttaatgtgcattacaaatgacactttatagtttgtttactgaggataaactaatacatgtgctccagttcttacaataatattgtggaaaggtaccattatcatttccatataccagatgaaagagccagtgtttagacagactgagtaaattggacacaattcaagaactagaaattctccatctaggtttgaactgaggctgtctgactccaaaggctgtgttactgaatcactacatagtctaacagcatgttacactggctccatttcaaacataaacgcaagataaatgattggtcagtggttttcccttttcccagctagccagtgctttcaggttgcttctgaggaatccagaactttttatcatggatctgctttgtgtatagtcta

SEQ ID NO: 118703 - DNA, 1057 bp, Homo sapiens
gacctcgtgatccgcccacttcagcctcgcaaagtgctgggattacaggcctgagccactgcgcctggccaaaattacatatttaagcttgcttattttttcccagtatacactaaaacaaacatagctatctaaatataccttcatgtaatatataatcatcttgcataccactctgacagataatatcatccagcttgtctgaaactagtcggatttgaggccctaatgactgataatgatgtgctttcttccccctctggttgttatttttatttttgcaatagttttcatcacctaaacaaaaaagagtaataaagggagtattcaggactgaggtaaggctaattatagagatggcttttttttttttttttttttttggtggagcaaagagtacattagtgaaatattttgttttactgattttctcaaatcacttatgccaaaatttggatttttttaataccttttcttctcttatttttcacatttaattcatcaagttctaagaacttgacctacaaaacatctatgacgctactgccactccaatccagaccttcatcatctctttcctggactactgctgtagccttctgaccaggttgcttgcttccattgtttctcttcatgccagtcattcttcacacagtagccaagtggtccgcatcatagtgcctccagattgcttctgaggcatccagacccaccccgattactcatggattatttctatgtttattaaacaaggtgtgtcactagctgttaaaagatgcctaaccttgggcaaataggaaactccaatagtatcatcattcagtaagtttggttcaatcagttcaatcagtgattgtttttagaaagaaaataactttcaatttatgacttttttttttttggctttagatagaaaaactgaaagtggaattagatgaagccaggcttagtgaaaagcagctgaagcaccaagtagatcatcagaaggaactcctctcttgtaaatcagaggaactgcgcgtaatgtctgaacgtgtgcaggaaagcatgtcttcag

SEQ ID NO: 118704 - DNA, 1024 bp, Homo sapiens
aggaaattttccgaaaagaaaggtaacaaaaatatctttgtgcagatattcatgtgtgaatacatttgaaagactatttcctcctttgtccatttcctttcaagaatgcatgagtattttttaaatttaacactactattgttaaggattatttaaattgtttattgtttctttgttactaaaaaccccagaaaaatgtatttttaactaagaattcaaatatgcgatgaaatatttataccactacacttattatatgctgtcttaatactcgttggttctccttttttattatcatagcaaagaaattgaaagcactaaaggtgaattgtccatacagcgaatgaaagcattatttgagagccagcgggctctagatattgagcgaaaactttttgcaaatgaaagatgcctccagctttcagaaagtgaaaatatgaaactgagagctaaactagatgaattgaaactaaaatatgaacctgaaggtatatatgtctcatatatttttgtcttttaaattatgagtaacctgaaattatatcaaattattttcttactgtagttttatgcaactctattacaaactcatttgtagttatatacctatagttaataaagcaaatttattgtgtaaaataggtaggaaaattcagggagaactggatactgggtgtgcctgaatataacatgtatcctttttggatatctaatttcatcatactgtatagtagaaacttgagatttgagactttcccattttaagattacagtattttatgtcatacctaatagtttaattatgttgaagcagctgatgtttggaagctatacgaggtaggactgtttatagaaaatctaaagtaatggagactttaaaaaggtgggtctttatctctgcctctgatggaagtctggaggaggccttccaggactgggaaagcactccacggtatcaagattcaggcttcttgtgtttgttggtctgctgccatcctgtggagcagaatttagtcatgcagcc

SEQ ID NO: 118705 - DNA, 1288 bp, Homo sapiens
atacgaggattaggattcgaacctggactctgccgctgtctcttcatctccacactgagatcttatgaaccacctttttcaaaacaccaagagagaacagtgaagcattcatgcctaaagtcaaaatattgaattcccaaggaaaaatatatagccaaataaactttaaaatatatagtttatatagattccatgataaagaataaaaggtagaaacaaaggatgcatttcagtgaggagatggttgcattttaaaagaatggaaaaaggtatacatataactagttctggcttcttgtgttgattgtgtctttgttttcttagattttttcttttccccactcgtttttattctcagagacagttgaagtgcctgtactgaaaaagaggcgtgaggtgctccctgtggatataaccaccgctaaagatgcatgtgtcaacaacagtgctctcgggggagaagtttatcgattaccgcctcagaaagaggagacacagtcctgccctaacagtttagaagataacaacttgcaattagaaaaatcagtttctatatacacaccagtagtcagtctctctcctcacaaaaatctgcccgtggatatgcagctgaagaaggaaaagaaatgtgtgaaactcataggagttcccgctgacgctgaggccttaagtgaaagaagtggaaacacccctaactctcccaggtcagtgtcctcttttcctccaggcagccagcagacctctccatctctcctctctcgctgcatgaactgtgctgtctgtttctttatctactttcttacaattgcatgcagtataattcctcagtttcatctacctaccttcaacttttccagaactttaagaaagactaaactgattgcaaagggaaaggactcttgaataaggcaatcacattaaaaagttacacgtttctgtttcatgaaagggaatatcacagtttaacacatctctgaatgttttatcagtttgaatacatgtactgttatttttctcctggttcaagcatggccatgaaagaaaaattaacttactttctcaaagggctttccagtagtctaagaaatttcagccttctaggaaacttaggtgaattttttatgtcttttgaattgcttatcctaggcattcaaaaatgggcttcaatacttattttgacatttttacatatcaaagctaactcattttcattgtttccaaaacttgaaagcctctagtttctgcataattgagtttgtgactaaaagaaatagcgtcagatatgtgt

SEQ ID NO: 118706 - DNA, 1108 bp, Homo sapiens
ataaaaaattcacctaagtttcctagaaggctgaaatttcttagactactggaaagccctttgagaaagtaagttaatttttctttcatggccatgcttgaaccaggagaaaaataacagtacatgtattcaaactgataaaacattcagagatgtgttaaactgtgatattccctttcatgaaacagaaacgtgtaactttttaatgtgattgccttattcaagagtcctttccctttgcaatcagtttagtctttcttaaagttctggaaaagttgaaggtaggtagatgaaactgaggaattatactgcatgcaattgtaagaaagtagataaagaaacagacagcacagttcatgcagcgagagaggagagatggagaggtctgctggctgcctggaggaaaagaggacactgacctgggagagttaggggtgtttccacttctttcacttaaggcctcagcgtcagcgggaactcctatgagtttcacacatttcttttccttcttcagctgcatatccacgggcagatttttgtgaggagagagactgactactggtgtgtatatagaaactgatttttctaattgcaagttgttatcttctaaactgttagggcaggactgtgtctcctctttctgaggcggtaatcgataaacttctcccccgagagcactgttgttgacacatgcatctttagcggtggttatatccacagggagcacctcacgcctctttttcagtacaggcacttcaactgtctctgagaataaaaacgagtggggaaaagaaaaaatctaagaaaacaaagacacaatcaacacaagaagccagaactagttatatgtatacctttttccattcttttaaaatgcaaccatctcctcactgaaatgcatcctttgtttctaccttttattctttatcatggaatctatataaactatatattttaaagtttatttggctatatatttttccttgggaattcaatattttgactttaggcatgaatgcttcactgttctctcttggtgttttgaaaaaggtggttcataagatctcagtgtggagatgaagagacagcggcagagtccaggttcgaa

SEQ ID NO: 118707 - DNA, 1027 bp, Homo sapiens
cttaaaaaataattggcccagcgtggtgcctcacacctgtaatcccggcactttgggaggctgaggcaggtggatcacgaggtcaagagatcaagaccatcctgaccaacgtggtgaaaccctgtctctactaaaaatacgaaaattagctgcatgtgggggtgcgcacctatagtcccagctactccggtggctgaggcaggagaatcgcttgaacccgggaggcggaggttgcagtgagccgagatcatgccactgcgctccagcctggtgacagagtgagactctgtctcaaaaagtaataataacaataattgagcctattgatataaaaagacttttagacagccagtgacttaatattcttacagtattagagtcaactatattttttttccttgaataccatgccttattggaggcccattatactgggggtttgtttcttcaatccttcataaccacatttgaattcagagtggatgctttaatgcctgtaggttagctgctgaatcaaagcttcaaacagaagttaaagaaggaaaagaaacttcaagcaaattggaaaaagaaacttgtaagaaattacaccctattctatatgtgtcttctaaatctactccagagacccagtgccctcaacagtaaagacttgtctttaataagagtacggtgccacttgcctcaaaagttactatggtgcttaagattgtcttgatctgacatatatcaccttctgggttatttactcattgtgccaggacctggcattttcatgtgcctttgaccaagtgttcagaatttgcttgactctaacctggagagcttcttaagtgatgccccttcatggagcttctatgacagtgaataaactattaattgaaggaaaatgttataattaatgtatctatttgctgcattgtatatggattaaatgataaaaaacaagtaatctaccctcagagccatgtatttgagaatgcttcaatcatattttcctatgtacttttttttataaacttagttt

SEQ ID NO: 118708 - DNA, 1008 bp, Homo sapiens
gtttttctcctctttattaactttattttttacctctcatcttctgtcatctactaattgcttttagttctatggcatctgcattttattataaacatttatcctcttctacattatcaatcgactcccacacccactgtgagcagcgggtagggactatatcataaatattcctgcttcacacagatgagagtttgagtggcgactagtgagtgatagaaatctttgctggttctcacactttgataataataatgatgatactgcctatagtaataatgctagtaatcataataggagccaaagtttattaagtggttccagcctgacaggcgcttttctgaaagatttatgagtgtgtcacctcgtttaaatcttacagccagcttcttaagtaatattattagctacatcttcttaagtaatattattagccacatattacagatgagaaaatcatagcccagagaggttaagtaatttaccctccaacaaagatgcagaaaatggcagagccagcattgaaatctaagccgtctgttttcagaatgcaagctcttgtccaccatgccacactacctaaattatcagaccacccccagccactccacatgggatttaaggggtcccggtacttcagataaactctgaacccataagattctggatctcatccagaatggggaatgttgatgtgagctttaagaagttgctcactgctgactgcctccccgccccccgaccccaggagcaacggtttctggctctttcaccatctgcctgcacgctctgggagctccttccaatccctgtgccccagtgcagccaatcaggctcagacatgggactgggaaacagaaaggctgtcctggtcgttggcccagaaaggatcatggagggtggccaaggccaggcttgagatcatagcattcacataaaggtccctgttcaggcaagacaagggtagtggtaatcggggacatctccaggccagaaaatagggaagaa

SEQ ID NO: 118709 - DNA, 1048 bp, Homo sapiens
tcactatatagcagttatcgccactggatgttgtatcttctttgtttactgcatctgtgcctaactccccactaaaatataagcatcatgaggtcaggactctgttgggcttatggctgtattcctagcacctagagcagttcctggcaggcagcaggctccagaggtatttgttgaatacatgaatgagtgaatgaatgcatgatattttccctgacccacagtgaagaaagaggaacatagagaagggcaggcaggagggaagcagttcagaaggctatgatccctggaggaaggattcctgttatttctggggctagctgggaattgtcctctgggccacttggctgtgcttccatctcctggaagcacagtgccagccaccttctcccatgtgagctactgtgctaggaacttcaccttcctcacttataaccctcaccaccatctcacacagcagcattagcccagtttcacagacaaggaagcaggctcagagatcttgtgtcagtttgccaaagtcaaacagcgaataagtaactgaaatgaaattaaaacccgaattggtctgacctcccaccccaaaacaactttccacaaaacgataccacctcataaaataaccacatctaattttatatgccaggaacttagtgcacttggataggtggaaagagtttcttcaaagaagtctgagggttcaggcgaacgggagaagtgttcaattgccgagaggcggcaatatcaaggcaagccctttgagagacgctggtgtttgtgttcttcccactgacccactgttggaagtaagacctgtactttgatggctttgtcagcaactgggctgggttgagccaagccttcctcactctcctggtcgtctttgggatgcacatgtatttgtaagatggtttcctagagctgggctctgtaggaaggtaactttcatgactcaaaatatcccagacaatgcttaatcctaagatcaagggtgttagtagcatcattagtttggccaatgagtcaaccagtcaagcaaagccacttt

SEQ ID NO: 118710 - DNA, 1013 bp, Homo sapiens
ttcctagcacagtagctcacatgggagaaggtggctggcactgtgcttccaggagatggaagcacagccaagtggcccagaggacaattcccagctagccccagaaataacaggaatccttcctccagggatcatagccttctgaactgcttccctcctgcctgcccttctctatgttcctctttcttcactgtgggtcagggaaaatatcatgcattcattcactcattcatgtattcaacaaatacctctggagcctgctgcctgccaggaactgctctaggtgctaggaatacagccataagcccaacagagtcctgacctcatgatgcttatattttagtggggagttaggcacagatgcagtaaacaaagaagatacaacatccagtggcgataactgctatatagtgagataaagtggcgtaagagcatatgatggaggtgacagaagcctattaacatcaacggtgagtatctgatttttagcatcacctgcacacacacacagagtaaggagggtgggtccctgagtttacagagccctgttatgaggaaggagcactgagtgagggggacactcactcatatgaagggactgcatggagtgggatctaagaggtaggaagtggttggaactatacccgctgcagagtagttgaggaagaaaaggggaaaaggcaggtaggtgacatgaagtagggagagaatggggaaggaagatggcagctgccatgtggcaagagagagggaggctttggagatctctcagttgatggaacatgcttctgggtgtcctcatggagcctcaggaacaatctgcatgcctcactgatgcttttgccgtcagttttgggttttttagacctgggacgcttgacactgaccacaaggtgagggccaggctggatttgtatgtttgttgttttaagtaatccaaaccttataaacacatgtaaggagaaaacccaaggctctttccctgttccctatattccagtctccagaagtga

SEQ ID NO: 118711 - DNA, 1041 bp, Homo sapiens
cagtatgccgagattgcaccactgcactccaccctgggcaacagagcaagacttcatctcaaaaaaaaaagaaaagaaaatcccttttctctctgtggctggaggtaaagcagcataattttgcagggcaatttggcatatgtattatttaatccatatttctttcatttatcagaatatcaaaaaccatttatgcctggttgaatccacttctgggagtctatcccaaggaaacaatcaaaattacagaaatacctgtctgcatcaagatgttccatgcagctttatttatgtgctggagaaccggaagtcatctttatgtttaataattgggagatgcttaagtaaactgtagtctgtctactatccaaataatgtcatgaatcctttgtattagtaaggaaaaaatcataatgcgataataaattaaaaatggaaaggtaaaaaacttcacgcagtcctgatagattgcaaaaatggccacaatattttgtagttcctccatcaagaaataaactttctttaccccactgagtctgggctagcctcatgatctgcttggaccaatcaaatgcttgtaagtgacagtgtgagtttcaagcttggacctctagaggacttgcagcttctgctttccctactgcttctgcatcttgtcaccatgagaacaggctcgtctagcctgctgagaaacacatggcatagtcactagcctgtcacccatgatagccaggcaaccacctgacacaagggaggcccctgggaccgactgactgcaagtacatgagtgatcctagctgagatcagcctagcccagcccagaagaaccactcagcagaatcctgagcatctggtgccactacattttgaggctgcttgttacacagcaatggataaccaatacaacagcctatgatgataactatgtacagaaaaaccatttacaaagggaaaaaaaaatcttggaaaaaaatttataaatgcacatagtacatttattaaatggtagaattatagatgattttttattagtttccaatt

SEQ ID NO: 118712 - DNA, 1792 bp, Homo sapiens
tagtgcattctaaaaaagattaaaattacaaaagttgtgcttggttgttagaaaaatttaaatattctataaatataaaaagaaaaattttcttatcccctctcaagagtaaccattgtgtatggtgtgcctctcttttgtatgaaaaatatgcacacatacataggtatcttaatatgtaagagagactacctgcataattaatgctttttaattattattattattatttttgagacagagtttcactcttcttgcccaggctggagtgcaataatagcacgatctcggctcgccacaaactccgcctcccaggttcaagcgattctcctgcctcagcctcccaagtaactgggattacaggcatgtgccaccaagcccggctaatttgtatttttttctccatgttggtcacgctgaattaacgcataaggaacatagtgctaagacatttgccacttcttacatggagggtttttcctatggcatttgtaaggaactaattgtttagaaaggtaacagatttggtaatctgattgcgcacagatgttgttttatcccccacttggctaagtaaatttaccacaagaggcattcaagactcatggctgagcttttgctgacctcctgatactttgcttctcttcctttactctcctggaaccctaaacaatttagaatttcagaacctccacacttggtccagtgtgcagactgttgggcctcaatcctggagtctcagcagacagattgaacttcagagagagagagttctatctctagagactgaggtgtcagagccaccttcaagaagccaggccaggtcagggaagtttacttctctttatatggagatgtggaataatggacctagatcccagctctgtcacctcccagttctttatttgggaaaagttattaaatctttcagagctgcagttctcttacctgcaagtggagatcatactgacatcacagggtcatgggaagggctaaatgagattagacgtgtgacattgtctttgtggagtggcggcaatggggagtgtaagagaagtgcctgcctagccggacatcctgaaggtgttcatcattggttatctgtacaaagctcccagcgtcatgtccatcagtcacgtaataataggcgctcaataatggcatttcccttcccttccccctctcttccgtaatcctagctaattttggaaaagggacaactttattcaccaggctaatagatgcaatagcattcacttgcaataaataacccccgggggtacctcaggggactgtgataatgcattaaccaggaagaggccaggcggatttcaaaagaagcttaaaaacatctcatcggtaggaatacggcaaggcaaactacttattaatctaaggagactaagccataggatataggtaggaatttgaaaatgaagtgttagagccaatgcaattgaacaataattgaatgttaatatctggtgggaaagggcgagatctttgagggcacaccctggaaggtgctggagtgacctggtgctaagtggctttctgcccctctgggcagcaaggtgcagctctgagacgagaagcctggagtcagagacaggtgtttgaattccactcaggccacctaacagctttgtgatcttcagcaaatttcaagtttctctgtgctgcagtttctcttctttttctgtctttctttctttctttttttttttgagatggagtctccctcttgtcgcccaggctggaggtgcagtggtgcaatatggctcactgcaac

SEQ ID NO: 118713 - DNA, 1048 bp, Homo sapiens
tgggggccccaggcactgtggctttgggggcttaaccccagagatattcaattaaaggtcagttatgccctcacagtggagattgcattcaccaggcctctatcttcctttttcttcagtgtcatacatttttattcagcatccttatttattaagcactgtgctaggtacttgggggaaatggaggtgattacagaatggtgctcacctccaggatgctcactcacactccctttagggagacagagactaacaatagctatggtttactgagtgcttactgtgagctagtccctgggctgagtgctttgcatgcattacccctttgaacagttctactaggtaggaaatattttaattctcattttactgctgatgaaactgaggctctgagagtcaagtaacttgcctaaggtcacagagctgctgagggacagagcagggacttgtaccaaaatctttatgattctagagccaggctattaaaacatcactcattatttgtaatccttacacaatattgattgtgttgtgtgccataatacagacagacacacatgtacacacaaatgcatgcacacactcacacatccacattcacacattgctgtgggaacatggggaaggggaacattaacgatgattggaattgaggtcaaaagagaagtctaattatgtttcatgagacaagaattgggctttgagatggtctttgcaaaactcagtacagttgaggcatgtccagaaattcagtttatcggttagctcaacccttgttttataactttagactcttacttaagattaaacatcagccccatgaatatttggctcctggcctcctccccaaggcctctgggagctttaggtttgcacagtccttgcacaggcagggatgagtcctgttccatccaacccggctccattaacaattgggtgaaaggaacttgagcttcaggaatttggggagatggcaaaggggagcccatggctgcaggtggcagagactttggggcactgcaccttggttttctctacaaacatgact

SEQ ID NO: 118714 - DNA, 1054 bp, Homo sapiens
ttaggagatatacctaatgtaaatgacgagttaatgggtgcagcacaccaacacggcacatgtatacatatgtaacaaacctgcatgttgtgcacatgtaccctagaacttaaagtataataaaaatatatatataaaacaaaaaaaatgaaaaaagaaataaaataaagtctttgtgattttttagacctaaaaatgtagccctggacatatttgctgacaaatgatgagtacattgatgaaaagtccatgacctttttcatatcttctactgggacctgtggctgatatgatcttgggagagtaagggtgggtgggtggcaaagaacatggtcatagaactcatctggaaccacagaccctttgagagttagtaatcagatagatggcataaattaaatattaaaagtttaggtctcaggggctagtctatatttgttgtcaccgaaatgttttttatgaaatgattgtcccacaaaacgcttatgaaagaagattccatggtttaaaacgtttgggaagtgctaccactccttcttggaatttcacgtggaagtaacttattagagcccgttaaaaactctgcagcaggccaggcacggtggctcacgcctgtaatctcagcactttgggagactgaggcaggcagatcatgaggtcaggagatcgagaccatcctggctaacatggtgaaaccctgtctctactaaaaatacaaaaaattagccgggcgtggtggcgggcgcctgtggtcccggctacttgggaggctgaggcaggagaatggcgtgaacctgggaggcagagcttgcagtgagccgagatcgcgccaccacagtccagcttgggcgacagagcgagactccgtctcaaaacagaacaaaacaaaacgaaactctgcagcaaagaagaatgttaatacttaaggctttatgagtcatctggtctctatcacaaatactcaactctgccactgcagtacagaagtagccacagacggtgtgtaagtacatgggcacgactgtgtgtcagtaaaacttccttagcagaaaca

SEQ ID NO: 118715 - DNA, 1220 bp, Homo sapiens
taacaatgctagggagttcattcatcacacatcaacctagagttaaatcctcattcttcatcacaggcaaatccccaggttacagtttagatgcccatttactggcatgactgtgtgagctttatatctatcaagcaattttttttaaaagttggaagcacgagtgataaatgtcaaggatggctttgcatatttgccatcccttctgctttgttccttcttgtacataatcctcatcttagcagattctgagtcccactccttgtctcttggtccattccagctgatgccctatgtctcattccaagtgacactttccctaggaaaactctgaccccccccccattacttttcattgttgtaactcattctgttataattatttaaagtcctgcaccctctattagactgtagagttctcgaagactgcagcattacttttatctgtgtattgcaaacatctaccacagtacctcacatagaatcgtcatttaatggttgaatggatgaattgaatgtatttaaatgaggatagacagatggaacccaaccagccatccagactggctggagactttagtgggacaatatataaaactaaagtattagaatgagaaaaaagactttccttagcagacacaggaaaggacaaacactggtcttggtcctaggtaatgcaagggaactggcacagggatatgtctgggactactgtgtggtaatcaggttgcaattcagttgaacattctggcaggatttggggaatccaacaaaagcgtcacatggttactcaatttggggaacaatgatgataataaatggacactggagaaattgggaaggaggtattaaaagattttcattatctccatattactgtttaaaagcactttatggtatactcaggaaaaataagcagctcagatcacaaacaagccactggaacaaactccctatgtgactctccagcccagtggaagggctattagagttcagggaacttgggaccttggggccattccacctgggttgaagtccccgtgcggctacttcactttcccttgggaaaattgccaaatcctaatgaacctcaatttctctatctgcaagatgggaaaaacaatatacatatctctcaggattgtttgcaaggtgtctagtatagtgacagacatggattaagtaattgttaaatggatgctacagtatttattgggaaa

SEQ ID NO: 118716 - DNA, 1048 bp, Homo sapiens
atgagttctttcttcatagtgataagtccaaggacaatcccatgcagaacttagcaagatttcccaagtgcaattgcaatgtctgctctgaatgaagtgacctgccaggacgatttgccgtcaattgagagctggtcttgtgttaggtactgcgtagatctggtggatgataagtcattagaagtggcctccctcattatttaaattacatttattaagcacatatctgtgaacacgcaaagatactgcctttcaagattgtataatagctctgatgatattttcagggacttaagaactgatctgttcatatttctatattggcataaatgcaaaaacaaaaacaaaaaacctgctttattaaagcctgtaaaaatgcacgttagataagtctcaaagcagtttaattaatatacttgataatagtaacaatagttaccttttgaacatttataagtactttatacattatgtcactaatgttcttgtaaacttgcaaggtagccatttctatatttcctcaattctaagatggacatttctttacattttctgaaattgaactggatcttgtagttgatttatatctatataatatataaatattataatatatataatatatataatatataatataatataatatataatatataaacgtatatatgtattttaatatacagtaaagcttatattttttcctgaaatgttattattcaataaatgctgttccatagaactcagtcactataatgattttcccacattattcttgaaaactctcagattcagaggggttgcataactttctcaggataacaaggcaagcaagaaacaaagttaccttaggaaagtttaatcccaaagtctatgagtgacgatgataataatacctatcatttaataagcaattgcatttccaagtgctttacaacattatcatctcatttaaccctcaatgtatctctttgagaagatacatgaatggttcataagcaaacaaaaagatactcaacatcactagtcattagggaaatgcaaatca

SEQ ID NO: 118717 - DNA, 1794 bp, Homo sapiens
gctgtttaactgcaaggcaggtgttgtggtgcagtgatgtcaaagaaaacattggctatgtcaccagcatttactatttgcttggcagaagatattaatggtagggtttatatgtgtgtcttgagcatatatgtgtaccgtttggggttgggggaacatgaggatagaaggatgtgagcccattgagtttgtactgtgatacataccttctccagattggatcttataacaatcattgtatagatgaccacttgatttggtgggtagctaatatggtatatttatttcacagtttcacatctttatcattgtttttatataaaaacaatgcttaagtggggtttcagaacagatatttccttttaaactttttttaaaaaatcacaaatatgattggctcatacaaccacatttcacctcttttcaccagcactcccacccattcccgttagaaatattttgttaaaaaaatcaggtgatcaaactcatagaaactgaattgtgagaagtataatgggaaaaggaatgagaacctgtggctctagggagttacagaagggaaatcatcttttagagccttggtttatttctgacaggaaaggtaaagccgtgcatttattagaacaggaagctaagaaattaaagatggcgagattgtctaaaataactgaggctgaactggaagcctttaccctggcacactcaaaaatcacttttggtactgttggctgagactggccgaggaatgtgcatctctggctggatttggagagggcagctcacccgcaacctgaacataggttctgtaacgtatctcattgttactcagaaagttcagtactcagggccagcacgctcctgctcatgcgggataagccactcatagcagaccagctggaaggatcagggatctgagcaaagccaagtttacttaagctaagccacttgttcctgggtcaagcagtttgttttctaataagcatcattcctgatcattagagcaaagggatgaatgctcctcttggaatgatacaggggatctgccactgggagagtgttgctcagtgttagagtagcagcaatgacagaatgacagcgactctctgagtcaacccagtacttttagtaccccatcactatgtgaataaaggcagctagaaaatggactcaattctgcaagccttcatggcaacagcccatattaagacttctagaacaagttaaaaaaaaatcttccatttccatccatgcatgggaaaagggctttagtatagtttaggatggatgtgtgtataataataaaatgataagatatgcatagtgggggaataaagcctcagagtccttccagtatggggaatccattgtatcttagaaccgagggatttgtttagattgttgatctactaattttttcttcacttatatttgaattttcaatgataggacttattggaaattggggataattctgttgtggtattaaataatattcattatttaaaaactcatcttggtattgagttagtgcattgacttccaatgaattgacataagcccatatttcattttaaccagaaacaaaaactagaaaatgttactccctaaataggcaacaatgtattttataagcactgcagagatttagtaaaaaacatgtatagttactttagaaacaacttctgacacttgagggttacccaatggtctccttcccattctttatatgaggtaaatgcaaaccagggagccaccgaataaacagccctgagtacatttgtaatcttgggctcc

SEQ ID NO: 118718 - DNA, 3571 bp, Homo sapiens
aaatggaaacccagtgtttgatatccactctttgtttttaaggctctcttaaatcaagaggcgtacggccattaggtgccaacaaaaaccagttaagccagaaactgtgaattttgttttgtttcaccaataatgtgccttttatttttatatagtgacctcacagccaaagttccaataaaaaagagataacatttatggagcatgcaacaatcggccaggaactgtaagtgttctgcacacttggtatcgttgtgtgcactgcacacattgcatcattggaggctataaggacatttttcctattttacagagaaggaaataaggtacaaagaggttaagtcaggtcacacagctaactggtgacaggcagagccagggcagaaacctaagctgactcaggtcaaagccagcctcctaacctctccagtatcctccctggattcttcacagggtcagtttgtttcttcccatcacccttatgagttactggctttggagatggaaagttcagtggacatttctaaggtgggaaagtgaaaggggcatgatcttattattgtttgcatttctttcatttctgttattgtctagcttggatccagattctggagacttctaacaacttgtaagaatgaggctgtatggtgtagtggatgaagcacaggttttgttttgttttgttttctttttgagacagagtttcactctcattgcccaggctggagtgcactggcatgatctcaactcactgcaacctctggctcccgggttcaagtgattctcctgcctcagcctcccgagtagctgagactacaggcgtgtgccaccatgcccagccaatttttgtgtttttagtagcgacgggattttaccatgttggccaggctggtcacgaactactgacctcaggtgatccccccacctcagcctcccaaagtgctgggattacaggcgtgagccaccgcacccagcccaggcagaagtcttgaggccaaatagacctgggttcaaatcgaagctctgccacttcccaactatgtaaccttgagccggccattgaatctccttgaatcactgttttcccctctgcaaaatggattaatatcatctaccttataggactattgtcaggatgagagatagggtaggtgaggtgcttagtacatagttgtcacataaaaaattgtagctattaactagcatttatacaccatggacttccgtcctttcatgcaacttgtaacatcaagtctctctatctgagaaaaagcaaaataaaaaaataaaaacacctctgatggactgcactatggtgattattcttaatattttcccccagcaaactgcataaaagttactttactcctgtgttctatttggaaaacattacaaaactttgagcagacagtggtgctgtgacaacacagtgcttaccaaagcacagtatgcttttctgataaagatgtaactttattgccctttatgtactctcttggttaatatagtaagcaaatgggagataatttgaaatacctttactaccatttatagtgtcagaacatacaacttgcctttaaaaatgtgaaagattcattgcaatagaaggcattgtgtatacatacaaatgcatttttaaaacaatcaccagtggagtgctgagaggaatcatgagctgagatctttcacctttgtagagatgaaataggatgttcttgttaactgtgttcttggagcagtgagccaggctgctccaatatgcactgtgggcaagatgccagcttttgtgatctcctttgcaggaacttttagatggaagaggtgaaaagcagggtcctctaggctaacaaatgactttaagtcttttctggggaagaatgatctgatttgctagtaaagattccagagatgcccctgcctcaaatttctggtgggtgggttagggtgtggaacagttctggcagattgagagagatcatcaagacacaggccacagataatgccattcaatctttatgaggtcgcggcttgctgttgttctatagatgttgtaatcttgcagccctgcttctgcataggctgagcatgaagctgagtgcacagaatcctttgaggaggtcatgggattggtgaaaagatgctaggcctagaagacatggcttctagtcttggctgtgccctgtttgattttggacgcatcctgtgtcgtctcccaccctagtttctactaacatgacatataagctggctgcacttcatcaagtcccagctactgattttctgggagtatgtaatatgtgtataaccatgtatcagattgattaggacccatttgtgtgactgatatcacatgtccaaaatagtttcacatttataatcttaatttttaaccatactacaaacctgtgagatagaaagggtgaatatatttgttccctttgacgtattagaaaacttaggcaaatagagattcagttaatagtagagtccaggtctcttgactctcattcttgggttcccacactaaattaaactggattagtcttttgggataagtctgaaatggaatgcaactagattctttgtggaaaaaataacttaataaattctattcaattcctaaatgagtagataaaaaacaaagttgtatttcccttgttgagaatttgcctttgaatccctctgtgaaatgaattagaatgttttcttaggatgtaagaaatatacaaactcagaaaaagcacatctcacatattttttaatggataatttctcctgggacttctttacattctgaaaattcactttattattgcattctaaagtttgtggctttaaatgccatggcatctgagtctaacttttattggtgatatttgtggttatcagtttccactgtcaccctgtcccatttcctttgttttgttccatagatatgatttggtttatgaatgagggcttttcgatccttcaagatatgtttttgtgaattggttcaataatttgttattgaaaagcaaaatccatcagagacatgtttgcctacttcctttaaaaagaaatattttcatagagaccaactgtctattcatcattcatgcctcttctttgtatgttttaaggacatagccacaattcttgttcgttaaatgtgtccatgaatgtattcaacctgaaatcccagcttcaaaacttctaaaatttggaaattacacaagtgtcttagtccaaaaagaaactgcaggcctctgccttgggtgcagacacagagtaagttggcaggccagactcaaagaggccctgagaaggagaaggaagtctgactctcattcttgggttcccacactaaattaaactggattagtcttttgagataagtctgaaatggaatgcaactagattctttgtggaaaaaatttggagttgcctttttatgtcacaactctgatgatcgcatatttctcagctgagtgctccctcctttcattactctgagttcttagtgaagcttttgactcagacccctgaccttgagggctacctatgaggcatcattcaagccagctgcccc

SEQ ID NO: 118719 - DNA, 2022 bp, Homo sapiens
tttcaaagtccagggcttgactctgacacaaaggtgtggagaaagctgtggaaaagggggtaggaggtggacgctggttgctccagtgttctttctaaagaattgatcacatcttataccagtgaagagaactactggggctaagggaggtctaagcttttggcaaaagggaaatgcatgaggaattcaggccctaccaggtctccttacttggaccctcctacactgtggctgcccaaatgaaacttggcttcccagagttggctgacagagcaagagcttgtttaatttgtgagtactggacaccaaatcattatttgtggcagctctgatattggcagatgggagatttagctctgtcctgtttatataacagcagttgatagatagtgacttcatagttggatatttatgagaggtttcatttcaaataatatagttttggcccatggcaatgctaaggctcttacccattattactgagaagctaaatctttaggatattgtaactataactgcagggtccttttgatgtacccggaagagctacaaaagttaatatttttcgaagcgatgaaagctttattataaaaagtctcattaggaagttatctgtccctaaaacatatagcctatcagaaggtcgggtatatagaaaggcaacatttcatacttttctttcactctgtgacttctatcacataacaacgtaattaaaaagaaaaaaaagtctcctgctttccattacagaaaccaaatgccttgccattgactgagtagcagcataaccatcgttgacaagcacctcattttaaaattcaccttaataaaaaaccgcttaaatccaaagggcatcagcctaatggctaaggtcagcatgaacataaaccacaaataacttctccaatcagaaacattccaaactcctccctgaccagagacatgctagccccaagataaccccccaccagctgggaggatgccagccttgagataaccccactccggctggaaagatgtcagccccaagataacttcccctccacccagagacattccaaccccaccataaacttctccttcacacagaaacactccaagcttgtgataagccccctcaccctaaaaccaatatatactgttagtctgcaagagaaagtgctcctgactgaaattggccagaagcccctctcagggttatctctctaaaataaacctgtctttgactgttaagctgcgttttgtgtttcctctctctttctttaactcttacagccatgccctctagccagttcctggttttgagggaagctggtgaagtccatcctcactgttttaggacaataaccatggctgtgttaggcgctgaggctgttcacagtcctgtaagctgtcatcagatagtgagtgtcctgtgtttccccagttgtgaaagaagattatccctattttaacactactggaggagatctttgggattctgtgggttttaaatccttattctgtgatagcagacccttggcagcagtggaagtggcaggatctgaaaaggatgattgggttaagtggtgcaaagactctttaaggataggcactgggaatctgtggagaagcccgatgctgctcagctgttcccaaaaggaaggtagaggcactggaggacctgagtcatggtggctctcttggtttgtgggagacagagcaagagttaaaatggttggaggaaaattgggcaagaaatgatggtgatgggtaacttagcagagggcttaaatttttccttttcatgggccaggcaaggtggctcatgcctgtaatcccagcactttgggaggctgaagcaagtggatcacaaggtcaagagattgagaccatcctggccaacatggtgaaaccccatctctactaaaaatacaaaaattacctgggcatggtggcacgtgcctgcagtcccagctacttgggaggctgaggcaggagaatcgcttgaacccgggaggtggaggttgcagtgagctgaga

SEQ ID NO: 118720 - DNA, 1393 bp, Homo sapiens
ccggcagcacgctcgctgaccgcggctttagtgttgccagggcaggtgggagtcccagctgggccggctttggcgcgcctcgcgcggctgccgagcggtggagcagccttcccgccttcccgccgcgtcgccggcgcggctctatcgtcagcctccctccacacagttgagccccagccggagcgggggcttgggatccaccgaaggagcggcggcagcggttggactttaattggccagaggagacaggggctgcgtctggggggagttgcgagggagggctacgcggccgcctcttcggaggaggaaacccgggccgggcgcgggcgcgggcgcggacgcgaggatcgcagaggctacgaagatgggacgcgtgcttgtatatcctcgggctgctctgacatccccgttcagttattcagcaaacatttattatctccccactgtgtctcaagcattgtggaaagttctggggataaaggatgacatcttactatcctcgccctcatacagttaacagagaattacagtacaagtgaaaaatgtatggtagaaatagtcacagtatcatagcacagaaaagggggtagccagccaaatgtgtatgttgagaaggagtgaagcagagctgctatgctcttagctgagagatgctttaagattctttgagcctccattcttccatttattaattattgagcgcctactatgctaggcgctgaagatacaacagctctgaacaaaactatggtttctactctcagggaacttgcagtctactggtccttgaaagagtcgtagttgtttgccaggtgaagaggaagggaaggatatggaggtagaaggacgtgtgagccaaggcaaagaattgtggaagaacatggtgtactgcagaaagttgagtctggttgggacaaagggatgggatcaggggaggcagtgggtggcaggagatgaccccagggagggaagggaatttcataatatggtgacagtgtatctaagaatctcattccccttgtagactcttttgaaccccctgtgatcacactgatttataacttggctgatttattgattcttctaaagggtcttttttttaaaaccagttactgtctgataatcgacagttctagaatgttatgtagtaagcccgacacattaccttttgacttcatgccatttctaagggtcctcaggtcaaaataatgtattaccactttagtaaatatgccctctgggaaattttcacaggaagaatcttacaaggaggatttatggattgtaaataggtaatcagatgttcacagagcccgagtaaatcttgagagtaaattaaaaggtatggtggaactttggaattttttcatacatggaaaggtgatgtacagtt

SEQ ID NO: 118721 - DNA, 1030 bp, Homo sapiens
tgcctcccgggttccagtgattctcttgcctcagcctcctgggtagctgggattacagttgcaagccaccatgccctgctaatttttgtatttttagtagagacagggtttctccatgttggccaggctgacctcgaattcctgacctcaggtgatccgcccacttcggcctcccaaagtgctaggattacaggagtgagccaccgcgcccggccctgtttgcagttttaacagcaaggcttagaaaggttaaattatttgcccgaggtcacttaataagtgagtggcagattccaaaggttgtgtccactctgttggaccagtggttttcaaatcgaaccatgacatttctaagaccccactactctctactcgcattcccagagcagcttgagaaatccctggccctggcagccacagttagaaaatattgcttgatctactgtctgtgaatatcagggggaggtgttgagttgagtctttatagaagaataattgggaggactttatgacaaattaggtatgtccctggaattagccatactgagattagagggcagagtccacaagactgccctttcttctcagaccaagtgcaagtttgggggtttcccaaaaccaccctcaggttcagtagttgactcacagaattcaccgaaagttgtcatactcagttgcagtttgttacagggacaggatacagattaaaattggtcaaaggaaggtgacacagggcaacatctgtgcaggtttcaaaactaagcttctgttggcctcaggacatgttgtgctccctgcatcaatatatggcaatatgcactaattattgcaaactgggtgagctcacctagacttcattatacagggtttttactggggcttcagttcttaggtatgattgattgattgtccacgtgtttgaaatcagtcctaggttgactattaccttgtgacccaaagtcctgatcctaaacatgtaattggtgtttctggtgtggccagcccccagcctaccactattgggtatggc

SEQ ID NO: 118722 - DNA, 1050 bp, Homo sapiens
cccatccatctccctaacctcatctggtatctccttgctgtgtttatcagccgcactgacctttaatgctttgagatgactaaattccactctactgaaggaccctggtaaatgttctttctttgcctggactgccttctagtctttttaaaatctgattcactgttgtaggtctcagcataaatattatttcttgaggcctacctttccaaatccttgttgtagacaagttctccctttcttgtacttttccattgcagaactatcaatttgtaagtaaataatttggggagtaggagatgggcctgttttgtttgcaactgtatcccctagtaagtagttgtatatcgataaacatgtattgaattaatgaatacacatgtgatatttgtatcccttgttttttgtggttaaatatttacctcatttttttcattgaagtaaaatgttaatttttttttctttgaagagtttggctgaattggaagtgttatgtactcatctctacatagggactgatcttacacaaagaatagaggctgagaaagcactcttggaacttattgacagtccagaatgtctcagcaagtgtcaacttttattagaacaaggaacagtaagtatttggtaacaatgattaaccatgaaagatcagtagatgtatgtcattgttaatgaactcgtgtgttagcaatggtaactgatagatattgccacatggtttttttgtttttgtgaaactatagtttcactgtcaaaggggttaatcaggaaaagaattggaaaacctggaaagcaaacttagggaagagccaggaaatgaaataggaatgaattgagatagtttcttgattactattggtctctttttatgtctcatattagtgggcaaatttacatttttaggaagttgactaacaacttaaaaaaatctagataggggaggcagattgtaattacctcagaaacatgaaaggatgattcgaaagcatgctgattacctcttgcctgcctcccatctagatattcatagtctagacattcatattc

SEQ ID NO: 118723 - DNA, 1113 bp, Homo sapiens
atttgctcccaccagaaactagtaatcttattttctctgcacatataactttggctgctgtaataaaacaatgttgatttaattaactcatcatcggtaaatggctgtgtgattggctaacaaatgagccacttggaaactttggttgcagtctcattttttatatttgtaaagacagtctactatgatgagatatccaattttctattttttctgacttttgatttcctgagttgggaatattgtgatgggaatattggggatattgcttggtctgatattgtcagcatgtattgtattcttttaggacaaccatagtaccattacataaaaagcacattgttttgctatgtaatcaatgaaagaatagtccatactccattgtgccttaaaaattagatatttgaagtccatttttatcttttcttatttcgatatgatagacatgtgctggtaataataaaaggtatgtgtcatgtcatgacaacacccatggctctctaggcactgtagagttgtagctacctcactgtggtttatgatacgctgagcagcagtaggaagcactgagcgccacatgtggtctctgttttagctattcaattctgccatcgtggcatgaaagcagccataggcagtgtgtaaatgaatgagcatggctgtgttttaataaactttatggacaccaaaatacagatttcatatatttttctgtcacaaaatattgttttgatttttttgaacagctgaaaagctgtttaaaattgcaaaaaacattcttaggtcacaacccatgtaaaaacaggcaggatttggtcaagggccatagtttgccagcctctggtctagagaaaaaaagagggagtatctttgcaagaatttctaggaggtggagtgaatacatgaaccaaattttcaagggtgagcatgcgtttagacagtttgagtatagtattaagataattgggggccagagagaatatagtcagacatgggtttcaaggaacacggaggtcagggtggggaagatttggaaaggaacctaaaggctgtcatggtcagagcaaagtcaagaatggaatcagatgaatttgaagagataatcagaggcca

SEQ ID NO: 118724 - DNA, 1306 bp, Homo sapiens
tataggaatatcactttcaactagaagaatttttctgtggctaattcagttttcttattcatagacaaagttagaatttggagattatcttggagatttctcattttacaggtggaatgtgaggaacagggaagttgttactgcatgatataaaatatggtacatggtttaggagttaatagtcttagtatctatttttattttataatctgtgttgtttatactgcctctgaaagtgtgatgaactttggtttttagtattgggatcagtacgggttgtaggaagaacattaaattgaaacagtctagaaacttgggttctactcaagtttatttccttttttttttttttttttttagtaaattttggtttgctttttcataggtctggttaaactaatttcatctttatctttttaggttgattattctagaccttcagcaaaacacaggaaaatagctacctcatttcgtgatacttctctcaaagacgttttagtgctagcatgctctcttttaaaagaggtaagttatttgataattcaacttcctagttagaatatttgggaaattttaagagtttcaaaagaatttcagttgaattttccccccagttttgccttttaaagaattattgtggacagacttaagtatagtaaatttgcataagtctgtaagcagttccaaaaaattcacttttactcactgggcatatgataaggtgaaatccaaagggaatctaataacttatcttcaggtagtagtttcattgccttcccagtgtagattctttaattatagaagctacttgagtattagtttctttatctgcttgcttatattttgataggatgcagatgaaaaatgaaatgacaatattttcctgattcatcaactatcaaaatttattcatagtttagccaagatcgttgactttaacaacttctttgggaaatagtatttccccatttgctacttagtgccctattgaatattagtgatagcatgattcataatgatactgtattctcttgtataatatagggactccatcatgctattcaagcctgataattggtgtaatatagcattgctgaaagtatgcttcaataagcactagtttccatttatttcaattctttggtttagtaacatgacaactgccacactatgtcagacccaaagaccttctattatcttaaaatttttcttttaacacagaaaattttaacatacacaaaagtagatagaatagtataaccagttaacctgtcagccagttaaacagtagcaactcatggccaat

SEQ ID NO: 118725 - DNA, 2419 bp, Homo sapiens
aagagatgtcaacatatctttcagggttataaagagaatgaattagattaagtgacctagaagaggagagttgcaacttgcttatagaaagggataccaagaaaaaggaagctaatttgttctcccatgttccagaaaaatggtggcacctaaggtacctctgaactcagaattgggaaatggggctgacggggtttgataaaaagtctgtactctgaacagttaaactctccaggatcttctctaccacctgtgcagctaggtgactgccttttcctcccttttctctacctgtgctacttctttactttccaagaccagagtttttttcctcaagaaataaaattggagaggcctcatattcatggataccagatataatagaggaacagtattaattttgtgaaaaacttctaatatggagatcagagactacaacaacaaagggggactttgtgttctgtatcttgactgtggtgatggaaacatgaaccaatacatgtaataaaaaatttcacagactgaaaacacacatctacacacacatgagtacatgtaaaactgggaaatctgaataagattgtggattttatcaatgtgagtttcctcgttgagatattatactgtagttttgcaagaaattaccattgtaggaaaatgggtaggagttcacggggtctttctgtattattttttgcaactgcatgtgaatctacaattatctcagaaagtttaattttaaaatggagggtagttaatagcaacagagacaaggtgaaagtagaaataaacttcagaaagatataaagaatatgcccagagagatgttgagataatgcatccctgaaacaaggacaggatattgttcagagaatgttccaaatttacaggacagttgtcaaaataaaacatccagtggaaaagttgtaagacaaagttaacccaatctcctagaatgtagaacaaaaaagcaaggagatgtttgataggaggaaaaaaaaaccaagaaaactagaagatgaaattaaggaggtgtgacggttaggagttctagaaagagaggatggagaaagaaggaaatttgcaaacagatagtaccccaaaatgttctgagttctgaagggtatgcatttttggattgaaagatcccaccaagttcccagcataatgaatgaaaaaagatattcactaagctttataatcatgacattttagaatagtaaggataaagaaaaaaattctaaaacttaccagaaagaaaaaagtaagtctcctcctacagaggattggggtcaagaaggtattagacttctcaacagcagcactgaaagctagaaaacaatagagaagtatcttcaggcttctgagggaaaattgtttccaaactagaccaaacttatcaaatctaagatagaataaagacattttcagatatgcgagtccttccaaaatttatcccttatgtacttgctctaaggaagctacttgatgtacaagcaaagaaagtggaagataatggaatttgggaaatgggcacttcaacacaagatgacagtgaaagacatagaaaggctacagttgtataacaaagttaaggagcaaccagttcaagttgaaggctctgggaggtaggggtgggtgaatgcaaatgatgggttatttgatgctattgatggtgtggaacatgttatgaagaacattgtgccagtctctcagagcatttggagagaattagtgacagatacacaactaagcacagaaaagatggtatgattaagtccagcgagtattagaaatgtgatgtaattacagctcagccgttaatattatttacatagtcataataaatgtaaacacatagaattgatttaatcacaaattgtgataatagtggatgggtttttgagaggattgattgtggagagagtggtaggggtggtagggttgtggcattcgtgattagacagctaaagcgttacacactgtaataggaatgcagttgatgtctaaagtaaaacaatcaaatgaagaaatagtatacgctattatttggaaacatgaatgtaactatagctaagttgaaaagcagttggaatgggatagggtacagttttttttttattgtaagctttttagtactgtttactttttgatactgtttgaattctcaatgtttatattacttgaatacaaatgaaaatagtaagaagattctcccagttcaaactgtagtgctacatagaggaagtgctacatgaggaagagcctggctagttaatttctctctgtattatttcatctttcaaaggaaaatagctaggaattaaaaataggcctaactggaaggaatggccacatgcagaggccttggatttctcagtttgtgtgatattgtcttactttgttaagatcactgaat

SEQ ID NO: 118726 - DNA, 1134 bp, Homo sapiens
atatagagatacagtttttcagctaaaggcacataataaactcatcatgaatttattatgattctggaagaaaacatttagtatcatatatatcttccttagagcttttttttttttttttgagatcaagtcttgctctgttgcccaggctggagtgcagtggtgcaatcttggctcactgcaacctctacctcccgggttcgagtgattcttctgcctcagcctcttgagtagctgggattacaggcttgcacccaccacctctgctaatttttgtatttttagtggagatggggtttcaccatgttgggcaggctggtctccaactcctgacctcaaatgatccacctgcctcggcctcccaaagtgctgggattacaggcatgagccaccatgctcagcccttagatctcatttgtggtggagatgggtagtttttaaaaatggatgtttccatggctgacttctgtgtttctcttatttttttcttttaggcaaatatgactagagattatctatcttactatgcttctgtcttttaccattgtattacatttctttgcttgctcttaaactactgaagtgattaattcagtatgtccaccttatgaactagaagacataatataaatctgaatgttaatattggagcaagtggccttaaattatgaaattatgttttcttgccctcttgtggacaagtaagagtttgtagattttaaaattttttctgcattaactttagagcttcattgccaatattcatttcagagaattgcaaagctgctattgagtaatttgggtgcttacataaaatattttgttttactttttattttgattttggtttaaaatatctgtaaaatacagatttttaaaggttaaatgatttaaggaggtttacctaattctcttggttattaataaattttggggggtgacatatatcttcagtaagaatgttctacaaaaagcaattgtttttgcatattctcagaagtgttttatgggttatgcatttattttatcttttcaatgttagtatagttgtgaaattttctgttttgctgataaagaggattttaccaatatactttaaaatgtttagttgtttaactcactatcatcaaccaa

SEQ ID NO: 118727 - DNA, 1573 bp, Homo sapiens
ttcattacagggttttaggtaaaaaaattcattgaaatgtatataataaaaattgagaagctatttaaatatctaataattgaataatggcttgagaaactataataaaatctatgtgaagaaataaaatttttacagattatattatagaaaagtttttaaaataattttaagggagagattataaaaccatgtttttcacaggatgtcaactctgaaaaatattcatggaatgattagagggaagtagagtaatattttaatgttactctgggtggtaaaataatagagatgttggtttctttatacttttttgcatttataaatttgctatattatgtgttcattagttttatagtaagaataaaagttaatttaaaaatgtatgtttagtaattttattctgtaattcttattgtaggaagatgtaatattttaaataacttctgctttatttctttgtagcactgggaatttgctcctaacagtgttcattatttattaactctgtggcaaaggatggtagcatctgttccttttgtgaaatcaactgaaccccacctattagacacttatgcaccagaaatcacgaaggcctttatcacttctcggttggactctgttgccatagttgtgaggtattcaaaaactaaatgtttttgttgtatttccttttgacacttggaattttttaagataaagttataaatttaaaattcaccccttttagcgtacagttgtatgatttctgacaagtgcacacaattgtataactaccatcacaattgagatatagattagttccatcaatccagatagttcttttggctcctttttcagtcagcccctctcctcaccctcatctctggcagttactgatctgttttgtgtacctgtaattttttttttgtcttttccagaatgttgtataaatgaaattatacagtatgcagctttttagtctgatttttttccacttagcataatgcatttgagagattcctctgtgttgtgttagtactttactttcattgctgagtagtataccattttgtggatatatcagtttgtttaccaattcacctgttgctggacttttgagttgtttatgtttttggccattgtaaataaaactgatgcaaatactcctgcacagattttgtacaaacataagtttttgtttctcctgggtaaatagctaggtgtgggattcctgggatgcatgttaaatatagtatatattttacttcgtaaaagctgccgaactattttccaaagtggctgtaccattttgcattcccgctcacaatgtatgaaagactcaattgctctgtgttctcactagcacttgatattgttagtttgaaaaaattttactcattctaataactatgtagtggtacctcattgtggttttcccttaatgactaataatgttgagcatattttcatgcacttatttaccatctgtatgtattcattgctagtgtgctagtcaaatccatttcccattttttaattgggttgtatattttctttttttttttttatattgagatttgagcagtctgtg

SEQ ID NO: 118728 - DNA, 1014 bp, Homo sapiens
tttatttaacatgaagtttatttgtggtgaataaaagtgcttcacattctaatgttgtctgcaaacttattctgtgtttgcagagatcacttagatgatccactggatgatactgccactgtgtttcagcagttggagcagttgtgcacggtcagcagatgtgaatatgaaaagacatgtgctcttcttgtgcagttattcgaccaaaatgcacagaattaccaaaaacttctgcatccatattctggtgtaactgtggacatcaccattcaggaaggtcagtaaactttatatgactactgagtattatgttgaatattaagtaacatcattaatcactttaatagttttactgcaagttatttttatgtattttccccaattcctggtcccctaataaaccattaattttattaacctcctgggtatattggtaatttgttggttgatttttttttttttcagttttcctctataagattgataggatatacttctctctggaatcaatatgaagaaaaattgataatggcccttgagcagatagtttatgaacataactatcttaactggttgtgttttcttctttgctatacttgattgcaaactcagaacccaatttcagccaataaaaagtatataatatatcattgtgattttgcttttaggtattagccttcgttatggctttactattatttttattcctcaatttctttattttgtttttaaccctttattgacggaggaggtatttatttctgtatatccttttaggtcctttcaggaacatagggagtaaaaataaatgtatttttccaattttcttgttaagatgcactacaggaatggaaatttctagtagaaagcactttatagttctgaagttgttttgcatatttgtttatcttgtattggaaagtgagtttagtaagagatcataatcaaatttacttccagtgatttcccattttaacttaaaaaaatttttagaagattatcctttacatttga

SEQ ID NO: 118729 - DNA, 1267 bp, Homo sapiens
tgaacaaagaaaattatatgctcttgttatgtgtgctttaatttagatgcttaatggcttttaatgttacaaaataagtttattattatattatgatctcatttgtattatattgtctcgctcttctgtatttgtggtgatatggtcatggtttacgaaaacaataatccgtaagaaataggtcattaacagtagttaacgtttacttgtgatctatggtaatgactgatttctttgggattactgcagttataaaccataattacagattattacagcaataattattttgttaaggaaaaaatgttctatgtttgaacagctgctaaaacaagcaccctgaacatttcaggataaatagaaaaatggaaaattataatggaaatttagtattattataaaatgagatttaaaaaaaattatagatatgaaacttatgtagcagatttttttctctaaatgcaatttagatacgtgtatttacatggttctttaaattttgtgaatgtaattatgttaccaaaataacattttttgtatatatttaaggtgtacggcatgatgttttgataaatacgtagcgaaatgactactacagtcagccaaattatcctatcaccttccatagttaccatttttaaaatttttgtggtaagagcacttaaaatctaatcttttagcaaataaagtattactaactatagtcctcatgctgtacattagtagacttactcctcctgtacaactgcaagtttgtaccatttgacctaatttctaatttcctccctttccttacctctagtaaccaccattttacactctgttcctatgtattctacctttttttaaggttctgcatatgagtgagaccgtatagtatttttctttctgttagtagctaatttccgaaagtagcttcttaacatttactgttttgaacactgtgagtctaaaattgttcagggttaggaaatagtttaacgtttatgagaaatactgtttctctttcatctaaatatcaaaattgtatttgacagcttaataagaacgtctttttttgagacagggtctcactgtcacctaggctagagtgcagtggtgcgatctcggctcactgcaacctttgcctcccaggttcaagctattctcccacctcagcctcctgagttgctgagattacaggcgcatgccaccatgcccagctaattttgatattttttggtagagacagggttttgccatgttggccaggctggtctcgagccca

SEQ ID NO: 118730 - DNA, 1011 bp, Homo sapiens
tacaggcgtgagccactgcaaccagctccaataataatgtctttatatttcactgttcatctctaacattaattctaactcattcagtacttgctcgatttttaaggtttaagaaatatcttcttttcatttctcatacaatagaaaccattgctttctaaaacagagtaaatatgtactctatttttctctaagtaaacttcctttcaaaatttactgtaattttagaagaaaatgctcataattaatcacatgctatctttgcacagcattctttgatctaataagtttaattccaaggtcacagaaattagtacaaatttaaattttgagaaattcacattttatatttagatactttactcattctgtttttaaacaatggtgctcatcatactgcattgcaaaaattattgattttttcctctatcttatctgtctctcactaggctcagttccctgagcatggagtctctctctcccctgccccagcctttcccatacatttgtgtatttagttatatccctagcacagaacatgatacaaagtagatacttacagcagatgtttttctggaatgtcttttacttggaatttttttttttcctggttggagggtgtttgttttactaacagcattagaaagtgtatatggctagtcgtaactagctttaattgtaataagcctctttggtagagaggaaagaacttaaaaattcttattgtgtgacttcattttcttgagcagcatctgacgtaaggcacagaaagaacatggatgttacatattggtatgtcttatgtttttttgtaggtatgatacagaaccacgttaaaaaggggatgacaatttaataatagttacactagccaacatttactgagcacttatagcacttactcatatattttacatgcaaaataccagttggtgcttgtcacaactctatgggccaggtattattatccttgtaagattaagtagcctagtgtaaataagtactagaggc

SEQ ID NO: 118731 - DNA, 1054 bp, Homo sapiens
gtgataggctcatggattgaagattcccagtaaaacaaaggattatggagttgtgagattcatctttgtagatattgaaatcactagtgattatgatataaatattgttggaaagactgacagccaagaaccaatactttcaaaaaacagggggaaataatctgcaggagagtagataattgcaataagaagggatatttgttagtgttgttgatgatgtaagatgtaaaggtgaatgctttcatgatgaagaaagagaaaatattaagtagaaatgaggaacgtgaagatcacctactccatattcaaggcccaagatacacgagaagtggaagaaaaagcagctaccacttgatagagcctacagagaaagcagggtcatcagagtagagcttctatgatagacttttatattgaccctaaaacactgaaattcataaggtaactttctggatactttcagcttcctacatgaagtttttgatctgttacgtttttcatgaattgtatgtcatgaaacttgagtctgtttttcagtggattacttgatcaaattagtgttcttactctcctacttaatctatttcacattcctaatgtataaggctgtataattggtcagttctggtttatttttgttttgtgagagaataaaggatgtgaatacttgccaggttagatttctaatttacaggaatcttgtcaccctaataggttgatatgtctcaccaaaaattataaaagagttgttgattaattgtagtataataatgactgctagtatccatgggagaacagaaagaatttgttctttttctaacttttatttgtcctttctgagtcttctaacaagcagatagcctcttttcttcattattcagttccataccttttaaaaaaacatttttacttgaaagcgtttcttaatcagaaacaattgatttcagtattatgaaatagccctctcatctttgaaaaatcagtctccaagaatagcataaaatttgtttttagcaagataattttatgttgttaattatttgtaaaggtctca

SEQ ID NO: 118732 - DNA, 1028 bp, Homo sapiens
atataaaataatataccttaagcaaaaatcattgaataaatacctccatttctaaattagtcaatttcagctgcccccaaagtaagatttatgaaaactgtagatgttgccatttgtgccactgccttaaatctatttaatcctctactactatcagctgtgaagttaactctaccatcaaacaatgtgaaatcttggattttttaatacatcatgcataaaaatacagaaggaacaaatttattactatctattatgttccaagcaggggaaatatttaaaatgatcacactggtactatcatgacattgaccattcagaaaagatgctggtccttggatcatgagagtacatcctgactgaataacagatctggtcctagacagtttagtgttttgtactcaaatttattttcagtcatgtcttcatggtagacattgttttttccattttacaaatgaaaaccctaagacttaaagagataagtaacttatgcaagatcacatagcaaattagtagagctgggattcaaattagttttatttggctctaaattctatgccattttcagtgttctactgccttgataaacttaaaaccgatctgctttctatccagaactgagttcacaataatttatcactcatttggaagaacagatcattgtgctgattttggaatttcccccaagataagctacgtttctatgaatacttactaaacttttttcttccttattctatattaggacgtcttgcatggctggtatacttagttgggacagttgtaggaggaagattaacatataccagtacagatgagcatgatgctatggatggagaattatcctgtcggtaagtaagagctatgtaatttactgaaattcactaaatagttaaaaaaaattagttattgaactagtattatgagtgaagacattttgtatgtggccttttgaggaaggtattatttccctttttattggtgagaaaaccaaggctcaaaggttaaatgatttgtagaagtca

SEQ ID NO: 118733 - DNA, 1033 bp, Homo sapiens
atcaccttgtagtttatttaaggtaaaattttattattcattaagggcaggatataacttttgttagatgtacctcttgatatttttttgaactttgagtcatgacctcaaaatatttaattatttagaaatacaagattaagtaaaaaggtgaaatacaagactacatacttaatatccttcttcttttactaaaaatttatagtaaatttttactgtagtatagggttttttatgtgtatgccatgcatttattttatcagtttttagtaaaataatatctgtatatacatacagagttttgcatctatatgcatgtatgtgtatgtcttaggaaaaaaaggctagaatgaattagaccaagtagtaatatctctcagtagtaggatttcagatgattcaaaaaatattttctttatatttttttattttcccactttttacagtgattatatgttatattacatttatggtaaatgttttaatgttgtttctctaaggttttgtactgaaggttttttttttattttcccttcatgaagagtttttcagcttatatctttaatggataccggattgcctcgatgttgtaatgagaaaatagagcttgcaattctgtggttcttggatcagtttcgtaaaacatatgttggtgatcaacttcaaagaacctcaaaggtaggtttctactagagagtttaaaacatgttattggggatgaagaaagatgtacatatataactgaatgatatatttgggaaatttctacataagacgtgtaattgattaatgaattgatgaattggtgatgaagtgcaatgtaaaattaagttgcttgttttatacctagtttaccattttctttaaagattgagtggcagagaggtaatgaatatgttttacatggatggtcattaaacagttgagattattttaaacactaatcaattttgccttattgtatttcaagactgaaagcataagatttgcttttttagtagttccagggttttttggacacttatttatttat

SEQ ID NO: 118734 - DNA, 1043 bp, Homo sapiens
tttcttggcatttgtacatgattaaataatgaggactaggaaaattagatgtgtccttaggagactgcatataaccttaatgttaggaatactcatagtatgataattgaatgtttagcatcagtaagttaagatgacttgatcttaaagtataatgaaagattattaagggcatttatgtgaaacctaagcagatatttagtagcattagatactgacactgagtaaaatcttcgccataagaagttctaaggatattctcatttcatttgaacttagtttgttttagtgatgttgtaggattttttatttgaaaattctaaaataaactttttatactcattttagctgttttatcttaggaaatgtaaccttcagtttacttaggattttctgataataataattgtgtagtagtgtgaaaaaattttttgtttgattttaagattatcctttagtttatttcaggtaaaatattcttttttaaggaaatgatgccattttataatttctttctcaaatatattatgatattatcatttaggattaatatcaataaaattctcttagaatttagctgccaccaaatgagaccatttggaagaaaaagagtagctagaaataaatgttttaggttgtcagtaagacaacttagaatcagacaataattacatactataaaatttatataacagagtgcctttttaataatcccagatgtgatacttgaagattgaatataaatcaaatgatgataaattttcttgtttaatatgtccagagagtatctttgcttttgcaaaagggttactctcaaaatattgctaatacagtatccatttggtgtaggtcttaaatcaaaacagtataatatggagtagaaaatccttctaagtgttgttttgaaggcacctggaaggaactatgtaaaatgagactagttgttttagggctatgggatttcggattttgtttcaaaacttttaatataaggtaattgtgaaaaaaagcgaattacagattagtttttcgtttttgaaaaa

SEQ ID NO: 118735 - DNA, 1102 bp, Homo sapiens
taataaaggatatattcttgagttggaaaatgatgctgacttgagtgaaattattcagcagttataaataaggtgtaatattaagcatcttgaacattttataaaagcctgtatagacaacagaatataatttatagaagtaagttcttcaggaaccaaggtggaattactaaagtgtcctaagtgatgtatgtgatagaagtcctatatgtgagaaagaatgttgtaaatagtagccataggcatttattgagcaacaagtctgtgtcaaatactttgctcagaacttgaaaggcattatataatttcattgtcacaaaaatgctatgaaaatagcgattttgttaaaatccttcctttctgtagacatggaaattgaggtttagaggggttaaccaatgtgtttaagtggttcaacctggatttgaaccctaggcacctgactgcagagcctgagctgctgaccactttggtatattgcctcctttttattggatctttccactgggatgttgaatgggcccttgaaacttatttccaaaaaggaactcactatcttttagaactctgtcttcctacttcccatattttaaagaagaatgacattgaatttcccttttgtacctcttgtatccaatctgtcacctaatcctgtgaattttacttttggagtatctctcaggtgtactcctttcttctgcccctttctttttagcctcactttcactgcttgttatttcctatggaatttcaaaagtattctacttgccctctttgtttccattttgcttctccccactccactctattttccatactgccactggagtatttttttattagaaaaccaaagaataatgtaataaacactcatatgcccatcattcagttttgtcaagtcttaatgctttgctatatttgcttcagatctgtatatttttgagttaaacatgaataatcctgttgctgctctgatttcacttctctagcttcttgccccactgtcctaaatttagtattattctcatccatgattttgtactttttctacatttctgtgtatatataaacaaaacacagcactgttaactttatataaaag

SEQ ID NO: 118736 - DNA, 1021 bp, Homo sapiens
aaagtgaagtgaaaaaatcagtatgtgttgtggtagctgcttggataggggtaccatcttgtctgggagtgtatacctatgctagtttcctcctttttattttttgccttcattcttctgaatttacatatttcctaaaaatttccaaattgcttttcaggaagattttcaaggcattgggaaggttatgaagccagagggagtgaaaacagaatagtaatttataaataaagttaccatacatccagatttgcctgagatttccccagctcacgcttgttgtcttggcagattgttagttaatagcttcatctttcattctcaaaaatgtctctgtttggatgataaattatatgatctccttgcatataaaccacaagtttctaaagaggataatatagtaattcataaataagtttgtaaaggccaggaagtgaacctttccttttgactctgtggctctcagtacctgagtaaaagccttgtttataagtgtcatgaactagtgatatataagcatgtttagatcttttttgtggaataacttgaaatttgcattaagccgataagtgctccagtagtgtaactatagtgaacaataatttattgtatattttaaaatcactaaacaagtagaattggaatgctcctaacacaaatggcaaatgcttgaggtaatggataccccaattaccctgatgtttattacacactgtatgcctttatcaaaacatcaaatgaaccccataaacatatatatatatatacctgtgatgtacccataataattgcaaatctagaaattttttaaaagataagttctcattgatgtattttcaaattgtccaaaataaaaacggggaattatctaaactttcaagctttatctgtgtatatggatttctaaattgttttgtgtaattacttattattcaacctttttcctactgttgagtacacatatgaagcagcagatggcattctttccctgcaattgttatgtcttcctgtatggtatgtt

SEQ ID NO: 118737 - DNA, 1783 bp, Homo sapiens
agttactaaattttacgacttgaaaacccagtccctccatcagtctgtaattttttttaatagtcattggatcttgtggaaatcatcaacaaggcaatcttcgtccacaaatcagaaggctagggccacaaatatgcatattttccctgataaaagattttcataattaaaattttatgtctacagttcattatatatgtattatacatacatgatctttgcacttatgtgatagttcttgcttctggaataaggatggatgttgttgaacattcagagactctgccagatacctcttactgtttattatttttgtaccaaattaaatatgccattatttgactggaaaaaaattagccaggcatggtggcaatgcacctatagtcctagctactggcaaccagtttgtaagatgaagatgggaagccttccttaccggagtcttgggtagaatttgctatcttaaaaatattcaagttgcttaaagtaagatcatgtgtgaatacacgtcagtaactttggtatttcagtaataaagtcataggcaaaccctctactaagtttttactagaaatatgttcacctgtaatggtggtgctaaaattattatttgtcaaaaatagttgtcagtgagaatctcatactacatacttggaagtattttctaatgcttataattgacttaagtatcttgcttgaagggaatcaggatgagatataatctatcctacttgtgctgcagaaacgctgaagctattcagtctgtgtaaataatccatcccacatctttgcttcctcttcagtgaatgcttaacatccatatattatgatggcttgagtatcatttggaaacataagtcataatagctacaagtttgtaatcgaaatattgcgaaaagaattttaggtttcaagatagtgatcctttaatgtcaaatgtttcctgcaaaactgaatgaggaatattgtggattatttaatttttaatcatttatttcatgattatttaaaagttccctatattaattaatcacttctatactaatatgttatactgttttggtaggataagtgtaagaagataatcattggatattattcccaaggcaaattagtatttggagaatagatacgtttagcctgagagcttggtattaagtagtttaaacatcttaataatgtattggagtatgtgtgtttttatattttttcctcagatgtatactggtctttgctaactcatgttcttatctaatatccaggaaggaaagttaagaagttaggcttactgaaaaatatatatgactgttaagccagaatttcagactatcaactttcatgtatacagtatgattacaaagatgtaaaacaaacaatgaaagctaaagtattagcaaaaggacagaggaaatatgacaaaatatttattgtctttagtactaaaacaatgagcatgtattttcttgttttttatattttcacattttccctacttgttatatacatttgggaaaatcagcaaagtccaagttaaagtgcttaactataattgtctaagtttgaatggtattgccattgttcagatgatacttttaagcaacaatttaattcatagcatagtttgcaatttattgaataaaaatttaaaaatatggtatcaataattattctccaattatactatattgtcttataactttagattctactacacataaatgaatgcaatgtgtatttattagattcccactgatttcagcgaaagttgtggcttactatattt

SEQ ID NO: 118738 - DNA, 1134 bp, Homo sapiens
aaacatagctgctgttattggtaagaataagaagaactatttttaaaattttaccactatttaaatttaatgggaaaattctctttgaaagaattatgtgtaatctttagaacatctaatgtaattctaaatttgtgttggaaaccaaccaatttatcacagattgatttttggagaagaatttggaaacagttggtctttggggcatgtatttatggtgattatacatgttgtttcctaataccaggcagaacttggaattaaaaccagacagtttgattctaaagtcaagactctagaaaaagacaaaagtgtgacttctggcctgatgaaatctgtaatgagttcaaaagctctgcttctcccctcagttgcttttgatgcttgtgttgcatttgtgtttccatccattcctcctcttttgctctcctctgctatccttttcgggggtagtagtcatgaaataaactggctattaactctatctgtgacactaattctctcttttgttttccttgccagtaaaataaaataataatattcattgctctttttggtaattgaatcagtgtaatcagtgtgttatgccaacatcccttcattagttatgttgcctcttttgtcagaaaataatttgaataggaaagaggagagagcaggaaagacatttcataattaatcaagatatgaatactgtactaccttaaaaaataagcattgcccagtctacttaacagaattatgaatgctaaataaatatactgtatgtgaaagtaagttgtaaactataaagcattgtgcatatctccatggtacatgtcaaatcagcatactacctttcacctgcttacaaactgaccaaaaagaaaattaaagtggtgattctgaagagaaggaaaatgaatgggtttgtttctgtggagggtataggagagtgggagagaatgtcagagaggaagaaaggaggtaagatttttatgtatatcaaaggggatggggttttaaaaggttagaaatgttgaattagagtagtggcctcaaactgaggtcccagattagcagtgtcagtccacctggaaacgttaaaaatgcaaattctcgagccctgctccacatcttctgaattagaagctc

SEQ ID NO: 118739 - DNA, 1051 bp, Homo sapiens
tatcaacgagtttaagctctcttttcataaatgactcattatattcactttttactttttgaccatgacgttgttggatttattctaaagggatagtatacctataatttaaacttaaatctagatcttatgtcagaaaacatctaagaatttgtaactggtaaatgttgataatatttagaataataacattgcctttataactgatacctattcaaggcctataaagacagtaagaattccctatgaaatgagaattagttctggtgtatattcagatgtctgctttcaaatattcctagttaaatcagccagttgaagaaagtcaaactgtatattgcattaattaaattattaagatttttatgatcttacgtggtgattttatgtgttacagttgaaacatttccgagacatgttgtatgcatatcttttctttaagatcttgacatttatggccaagctacgtacccatttttgcatttaccatgttgtcttttacaaggtgtcaattagcatgtattttctatgtattaggttaaagatgggtttgtgtggtttttactttcaaagtaaattgttctccaatttattttgtaacctacttttattttgtaacctacttttctttcctgttttgacttcagagaaaccaaaccaaataaaattatagtatgaaggtccttaaaaatattcctatctgttgacacagtgtttcatgtctggaagtgcagtctgaataaataatttgaaatacagacaaagctttgtataccaaggtattaatcccagtgatatttgatagagtcgatggttgattaaataggttgtacagccatatgatgaaatatgaggcagataatgaaacttgtttactgaatgtaaaaagttttgttctttaccccattgtactccctctttctaggcataaccactgtatcactctagacattttcctttatgaaaaatgttttacatgattgatgttttgcatataatcttacatttaaaagggagggggtgaacaaattataaacatataaatgttttt

SEQ ID NO: 118740 - DNA, 1485 bp, Homo sapiens
cctatatcagtgtttgcaataattaaattttaagtatatttctataattgtaaataaaatcctgacatttgttacaggatggggttttctttcatcatatttttataataaaaattaagcagttataaaaataaatagcctagtttttcaattggtataagctggctttattttatactgctaataaaggcacattatgttcaagcattgcaattatcgctgaaatgcatgtccattaactgaaacattaggctgagtatataattactgtctagagccaatatctttgtgaagctgtacctataatgctattaaactataaacaatatttgtaaactaatatttaaataattcagaattgatataatctttttgtaaacttaaaaatgaatgctatatacatttagtttgattgtttttacgtgcttagaaaaatatgggaattctcaaagataattgaaatatgtgtcttgagatagatgaatttttaatatagttgctataacctaatacctattattctttctgaagtcttttgttccatattttttattgtggtaagaaatatacaacataaaatttactatcttaaccattttaaagtatgcagttcagtgatattaaatacattcatattgttgtgcaaccatcaccaccattcatctccagaagtcttttcatctgcacaactgaaacactatacccattaaacaataatttgcatcctcccaccagtccttggcaactaccattctagttattgtctcagtgattgtgacaaccctaggtacttcatgtaagtggaatcacatggtattagtgtgcttgtgactggcttattttacttcacataatgtccttaagggtagcttatattgtagcagacatcagaatttttttctattttaagactattattcccttgtatatgtatatcacattttgcttatccattcattcatcagtagacacttgggttgcttccatgttttagctatcatgaataatgctgctatgaatatggatatacaaatatctcttcgagaccctgctttcaattcttttggagtagaattgctgcatcatgggtaattttgtgtttatttttttgaggaacctccatgctcttttctacagcagttgtaccacttaatatttccaccagcattgcacaaggattcgagtttctccacatcctcaccaacacttattttctactttgttttactgaagtcttttattcatacaaaatatgtataaattctgtttacaaaaaaaatgatgtagctatagtcaagctttttaacttgaaaggtcttttggggcctatcaatgcaaaattgcttttaaatctgaatatattgactattgaaatctactgtgtcacacgcatccgtgtcatgcgcgtccgtgtgaagagaccaccaaacagcctttgtgtgagcaacaagtctgtttatttcatctgggtgcaggcgggctgag

SEQ ID NO: 118741 - DNA, 2260 bp, Homo sapiens
ttgagcaagagaacatttctttggctggaaaggcaactttttaaagcattcattatttggaaccatgttactgttggaacctaaataaagtagttatttacttgagtctatattaggacaactaagttagtatggacttagaaattgttgggtacaaaccctgtgtttctatctcgttatgtttgtgtaatatgtgcagaagaatcaaaatatttattgggtgttttaaaatgtctccagtggtatctctcttgaacagaaaagccatttatttaattctgcttcagattctagtagaaaattatttcccactagatcataagtgttttaagatgattaggttcctgtatgtgcattgtatgagtatgtgaacatatcctaacccaattttataaatatataaagtaatttaaatatttagaaatctcaacattaaaccaagaatgtcatccacattaaagtgtgtattaaatatttgaatctgtattgtaatgaactcagtaggcatgtttcaaagacttaggaagtagcacagatttccattatgctcttgggctgggcaagtcaattacatcctcaaagggttgtaattttgtagaaattagcagactacaaaggatgcttgatggttgtatctgactggctttggaaatgcttacatttctaagactgtgaatttttaaataatctttcctactttttttcctacttttatccttcttgtatgtttttgtaaccagtagttttttaggtagacacatatgtgaactttaaacatttccatatttatagttagtgtaattattacaacatctgtttcaatatatgaatgaactaaaatttggaaacttaaaagatcagtttttagtctttaaaacattagagcaggatgagctcttaatcatctacacaaagatttacaggctttaaatatgtagatttagattatctgtgatagcattttcattctataccagttaatgcatttcagagacatgtggtgtgtgtattaagggacatgctagctgattgtaccttactgtaagcaaaacaaaattataaaagcagatttgttatgaaaaataagaaatcgatgatttccaaaatcaaaaatgtgactttcggactattctatgtgttgttggattgatctgccttttcttacacaagagcatactgctgaccccaccacaagctttacctgttaagtaaaatatgttgtgtttggaatatagcatagcctagagccaggcattatggagatgatatgctgaaattggggtttcttttcttcattctccctttccagttaggatttgattgcattactgtaataaacattaacattgaaatcatgttttaaatttcttcatgttcattttctggcctctgtaggacacacacagaaaagaccagtgaatgccatttcatctaagaagctctttaaatgcatccaagatgccagaaataaccctttcatacctcctgagtagtagcaacatgtaatggtataggaagaaatattccacctagcttttcttttggtggtgtcttgccattaactcataaaaacgtatatcctactattatctctaccataccttcatgtcattggttagattgcctgatggctactaatgtctcaagttaatagccacagaatatttcagaaaggtggcgtccactttataaaatgtgtctatgattgccaaagtcttatttggctagaaacaactaaatttagttgaccgagtaaaattgtatattcttagaatatgtcacttaaaacaaacaaatagtgatttactttcagttctgaaaatatttagaaggatttgttatctcttgcagaccttcctgcagactactaatgggatgaacacaatatatcacttttataatagtgagctattaaaggcaagcataaagcagtctgaagcccataagtgctgccaacagctcctgctttaatgaattcccttttagatgtccattaaatgctcatggcaaatgtactcataatggaaatggcaaatctaaatgggtagatatgaataatccatggagtttaaattctgtttatgatcatcttcacatttagttttcaagacaacgcagtttagttttcattacagtttggaataaagaggacagggagtaattgattgcttcaagcagattaaaatcaatggttttcttttcaaagaaccagttcaatgcagtaattccaactttaaacattgatttagaggactcaaca

SEQ ID NO: 118742 - DNA, 1918 bp, Homo sapiens
gtgaggctctgtctctgctaaaaataaaaataaaataagagctgggcatggtggcgcattcctgtagtctcagcttctcaggagactgaaacaggaggatcatttgagcccaggagtttgaggctctagtgaaccctgatggggccactgcagcccagcctgggcaagagtgagacctgtctctaaaaaataataataaatgaatgaataaatatcaaataatataaaatgaaagccagaaattagcatatgttcatgattatgaaacactttatgtataaatactttgccaaagcaatagtaacctcttgttaacttagaaaaggcaacatattcttccaaagaggacagcttggtcccaggttgtaattacaagccacttacacattactcttagggttatcatatgtaattaccaccccctttgtaaagcatatattttatttataacacatactgtagttgtagtggtataaaacctgaatgcttgcttaccaaagaactgcaatgagacatgctgcataaaaggaaagcttagaattggctgaggggactatgcctaaatgatgccccagccaactctacctggtatattcttcaatgaagaaaactgtaaaacatcctaatcaaccaacttctttccatgcttgccagagtatatagccactttgaattacatgaatgtttttgtgactcggttcatttcatcacttcatgggagcaccttccatgttaaaaacagatgcagtgcaaaagcagaaagccagaaataatagtgagaggcaaagttagagaaatgtgcatattaaatctttaaaatactctatgactttttcctgcccagcatcttttgggggaaaaagagagaagatgaataaattaaaggtttttttctttctttgtttttttgagacaaggtctcactctgtttcccaggctggagtgcagtgttgccatcatggctcacggctcctggcagcttcaacctccaggctcaagtgaccctcctgcctcagcctcctgagaactgggaccataggcatgagccaccacaggtttggtttttttttcttaataggttggacatatggctataaataaaaaataagaaaattaaaaaagagtaagtgctaagaagaaaaataaaatgaaattataagtataagaaatgctagatggggttgttatatatatgattttttgtagaaggcctttctgataagatggcatttaaggaaaaatctaaataaagtgcaggacaagccaagatatttatctatggtaaaaaaatatcccaggaacagtgaatgtaagtgttctgagagagaagcatatttgatatgtatgcagaacagcaagactgctatggctcagcagataaagggggaaacataagaaattaaacatgataccttagtaattttttaaatgaatttaataacattaaagtctttctgtgtagttaggtttttgctattagagaggtggttctaagtcaaatgatgcttctaatatctttcttaatatattggatatgaccttgttttttaagtatttaaatatgcttgaacatgttaacccgatcatgtatcttttgtggaggtctagagtttttttttgttttgttttttagggtttttttttttaatgatacaggctttattatcttccccattttgcagatgagaacactgaggcatttacccagtggcttataagctgataggtgctaaagccaggaatcaaattcagaaagtgtagcccagattctgaacttttagccattgtttgcactgtttgtttctttttttgtttttttttttttttttttaagtaatttcaacttttattttagattcaggatatgtgtgcaggtttgttccatgggtatactgtataatgctgaggtttgggatac

SEQ ID NO: 118743 - DNA, 1057 bp, Homo sapiens
cctggtaccaaaatctggcaaggacacgacaaaaaaaactacaggccagtatctctgatgaacgtggacaaaaaaaatccccccaaaaatactagcaatccacatctagcatcatatcaaaacgttagttcaccataatcaagtagacttcattcctgggatgcaaggttgtttcaacataatgcaaatcaataaatgtgattcaccacttaaacagaatgaaaaaccatataatcatttcaatagatggggaaaaagcttttgatttttgttcttgataagatatgacagaaagtctcagagtcagagccagggactttcttaaataattttagagcttttagttgcaaaatgtctttgtttttactgctggcataaataggttttccatttatttctagcactcagtaaaaacatattatttaatttactggctcttccaatgtagtatatgagtctgctaaagtttgtgaagtcttgttcgtttatttatttaggttgctgacaagtggaaataggtgagatatgaagttttggggattttaatcctgtagaaggggtccttgaattgaaaaaaagttttgagaaccagttgccttcttcccagggagaagatggagcagaggtcccaaacatggtaaaactgaggtagaaaagaagaccttaggagaagcttgaggttcaaagagagggaataagttaaaaatgtaaaaagttaacttttgaaacagagaagaggaaactagtgaagaaggaattcttcctcgctgcattctgcattagttatctattgccgcagaacaaattacccctaaacttagaagttttaggaaaaatcatattctatttcacagacttcctgaggcacaggaatttcggaatggcttagctgagtaattctcacttaaggtcttttatgaggtttcagtcgaaatgttgatccagggctgaaaattctgaaaacttgactggggttggaaggtcagcttgcagaatggcttgctcacgtaactgttaacagaaggcctcatcagttctagcctgttgttgacaggag

SEQ ID NO: 118744 - DNA, 1095 bp, Homo sapiens
atgattgtaataacccactctagggggggtcatcatctttttgtcaggacaatcaggtttacggataggctcctactcttaaatttgtgctttgtacagagggagtatatattacagacacttggataaatcatttcataaagtattttctgcagtatcttctaaaatataaagtaatttgattaaaaataaataagattgtacttagtgggcacaaaagtggatgaatatgggataacttcagaaaaaagagatatagctgatggtgtgtattgattgatgactactttcctgtacttaaacagtttatactgtgcaaatattgacctgtatcaagtgactgactacagtattttcatgcagatattccttgaattacttttgtaatcagtaattctttttgagacaaatatgtaaaatgaagtattcttctttaagaaaacctaggatctttttatttttatttaaaatattttattccgaagattccaggaacatacataggataaaatagtggtttcaaactggtttacaatcagtggaactgtttcttcaaatgaaattttacatagaagcaaatggctcagactgaaatgaggatgtggggttgcaagaagccagatgttccaatggttcagttcttactctctctgtggtgcccttggggtgtctctctggcatcctaagcctctaaggagtgcattttgagaactgtggacatatgtaggaatttgtaattcataggccatatgccattcatttgggtgttagatgacactgcctcagtgtcattgttagatcacataggctagccaacagtaaacaggaatatatttattgcatataaaagttattattagtgaacatgtttgtctaattgacactgataattagatgtgtgatgtggggtcagacacttccaattctcaatttctttatatgtatgtaactagagggagttggactagggtaagcagaagctcctggcacctgccattctatggttctgataatatttattgaccttcaatgaagagtctagaacttttctgctatgagataaagaaaaagtcttaagccatggtttggaactct

SEQ ID NO: 118745 - DNA, 2515 bp, Homo sapiens
ttcccctggtgcctatgagtattaatatatattacattttaattttaatgcccccggtgaaatctgtattcttaaagaactagaaatctgaatttttcagctttaacagattgtattgtttatgagtacaaattaattttttttcacaaggcttttcttaaaatgaattttaatataacattaaagtcatatatatttcagcatattaaagaataaggaagaattttttatgttggaaacttattttaccttattagcaattttaattcattaagccttatttttgcttttgtaataataacattttttcaaaccatcttaaattttgtagagaattttaatttatttgatctttgactataatattcaaattggttttgctttgctcacaaaggtaaagagaattccaaatttactcataataaaaatattagagaaactgtcaataaatttactgttataattgaatcacatgatatctaaattgttgataatatgatctgctcgttaaacaatagtgtctggagaaaatgatggattaattgactgatggctaaagtttccctcaaatataatggtttacccagtttgatttgatttgtgtaaaataactttctctaataaacaatttgctcagaggcaatagaagaaatgaatggttatcaaaccaaacttaattagtctatcctagattgatattacttggggagtctttgttttaattgtggagtgctggatacaaagagtttggttcattattttttcctgtataaacactattgtgtaactacctatggaataataacatgtgaattcattttaataaatgcttgtaaagtgaattagctaattataccaggctaaaaatgattcctttaattattttggatatttaactggtacttcagttttattattgtttgtctgtaaatgtgatttgtattagctctgccaaactaattataatgtataacttaacaaacaatttgagcagttttgtaatgcttatattgttctcttctcttatgcaaaagaaaacattatttctagtttgcatgaaaataaaggtttgatacaaattcacatggaaatatatgtgtaaatagagaagaaaaacctctcaatatgcaaggtagtacttgatataactatatgaatgagaagaatgaacagatttccttcaggagaagataagccagtgactcattagtttaacttaaaatatgatatagcataagagatttgattgttattttaaagctggaaagatgagttttcttcatgccctatctagagagtgaaaaactcgatcctcattctcaaaaagaaagatttatagtaataatgtattgtggatgtcaaaaacaatatgcttcttaatcacttttacttaacagactaattgtctttaaatcagaaataaatgagaacaaaggctttagtaataaaaaatacagattccaagtttaggctttctaggggaaaagcaaaatagcctctaaaacagtatgcaatgtaaatcattcttcttttaaaaattaatatacagtaaaattcacatttccatcttttctggtgtacagttctgttttaacccaagtatatattcatgtaaccactatcacagtcaggatacagagtagttctgtcccctgagataaataaataaacaaacaaataaataaataaagcctccctcatggtgtcacatcttccctctgtccctaacacttgggatccactgatctgttcccattcactactgttttgccttattccagaatgttatgtaaatggaatcctataaaacttgaccttttaaaactggtttctttcactcagcacaattcctttgagaatcctccatgtttttacaatacagtttgttttctgtctccttcttcccaaattatagcaacactaatatcagtttttgaagtaaatataaattatctgccccatatggaaacttattttctccatcataggatccctaaaagaactggaacttgattttttaccctattcatgcctatagttctgccttttttttttttttttttgagctggagtctcactctgtcaccaggctggaatgagtgcagtggcatgatctcggctgactgcaacctctgcctcctgggttcaagcgattctcctgcctcagcctcccgagtagctgggactacaggcacgctccaccacgtccagctaattttttgtgtttttagtagagacacggtttcaccatgttgggcaggatggtcttgatgtcttgacctcgtgatctgcctgcctcagcctcccaaagtgctgggattacaggatgagccaccgtgcccggccagttctgcctttttaatggctgcattgtaattttatgaatgtaccatacttggtttaagctgtctccaacatagatacttagatatatttttttaaattatcttcagtgctacagtaaacatgcttatacagcatatgatatgtaagaatagctgccttcaatttctag

SEQ ID NO: 118746 - DNA, 1646 bp, Homo sapiens
ctcagtattctgaatatattatttctgtccaatttgagcagtttcagcacaatcttaatttttataaatctcaagtttgtcattttatttttgccattttaatgggattgtagggcatctcattgtagttttattttgccttttttttttttttttttttgagatggagttttgctcttgttgcccaggctggagtgcaatggcacagtctcaactcactgcatcctctgcctccagggttcaggtgattctcctgcttcacttcccgagtagctggaattacaggtgcccaccaccacacccagctaattatttgtatttttagtaaagatggggtttcaccatgttggccagactggtcttgaactcctgacctcatgtgatccacccacctcggcaccccaaagtgttgggattacaggtgtgagccactgcacttggccttattttgcattttcttaatgggtaatgatgttgaacggtttttttttccacaaacttaattgcctccatatatcctctttggaaaagtatcttttcaagtcttaacccttttttttttgttttgttttttttttttgagatggagtctcactctgtcgcccaggctggagtgcagtggtgcgatctcagctcactgcaacctccctccacctcccgggttcaagagattgttctgcctcagcctcctgagtagctgggattacaggcgcatgccaccacatcagctaatttttgtatttttagtagagacagggtttcaccatgttgggcaggctggtcttcaactcctgacctcatgatccgcctgcctcagcctcccaagtcttacccattttttaagttagctcatttgttttcttgctattgagttttgagaatactttatatatagattttgactacaagttctttgttggatatgtgatttgcacatttttttcctctaagtatgtagcttgtttttttcattctgaagtatccattaaatagcaaaagtttttattttggcagagtctaattattacatttttatggatcacgcttttgatatcatatctgagaaatctttgactaattctggttcacaaatattttctcctaaaagtgatagaattttatacaagtcttttgggctatcttttttccttttgctttaactgacttgcatctttacatttaatgtgagtttctgatagatttttttgttttttaattgagatagagtctcatcctggagtgcgatgacacaatcatggttcactgcagccttgatctcttgggttcaagtgatcttctcacctcagcttcccacgtagctgggaccacaggtgcactacacacccaactaacttttttattttttgtagagacatcttctttctctgttgccctggctggtctcaaactcctggactcaagtgatcctcctatctcagtctttcaaagtgctggaattataggtgtgacccaggatgcctagcccaaaagcatatctttaggtcttgtttttaatctgttcacacaatctgtctttcaactgctgtgtttatatcatttgcagttaattattactgatgcttggatgtagatctacccttttcttttttttttaacttttaggttcaggggtacatgtgcaggtt

SEQ ID NO: 118747 - DNA, 1048 bp, Homo sapiens
gcctactgattttaaaataggaaatgacagtgtaaatgccaggataaaggacaaagtgctctgacctgttgccaaacctttttttccacagctacagtgcacctatattctataatagtcagtgcaactcttttttgtgaattgtttacatgtctgacttcttgtttggattttacttggtgatttgatatgaatttttaatgtgaaagcacttagcgttaggagtttgacattttgtctgacctgaatcaccaagaggatcatgtgaggtttattcagtgggaagagaactgttacagctctgacagaaatgatgggaaataagtaaacagccttttaaatcttcaccagaaatcaatagggtttaaagatgatggacgttggtgttttttgctgcttaaggacttcaaccttttacgggaaaatatcttctctacgtgtcagcagttttttccatgcacacaatgaatcgctgctgcaaatagaacattctgcatagaacactcttcatcattattataagaaagaagctgtgtaagactggccttggtaatgtagagccttttggggcatttttgtatgaaaagagaggaccatatcttacaattttgttttcatcataagtgtaatttatgtgccaaactttttcctcaactaaataataacagtttttatatactgagaacctcctttgtactgggcattgactgtgtgatgttttaaggtagattatttgaccccactttatagatgacaaaattggagcccagaggctctaagttcgtctgactagtgatagaactgatacttaaaaccctagtccatctgagtttaaagcttatccttttactactttccagctgtgtctctgaggacaggcactcaataggtgttcttgcccttggttctatttcttcggtagtggtatctcttattttctttctccttttccccctagtcagtaaaactaatataagtgatggccttcacatcatttaataagaggataagagctacatcatggtcattgaataaaagaatatgggtt

SEQ ID NO: 118748 - DNA, 1055 bp, Homo sapiens
ggccaactgcaggactggaatatgcacggattttggtatatgtgagggatcctggaaccaatccccagaatacactgagggacaactgtactataggtttttatgtttaaatattttattttgatgaagtgatctttaatggttcattctagtaacccaaggatatgctttaaatttattgaagtcaataggaaaatgtgatttaatacttaagaaattgcagtaaaacaaaggaaaaaaatttcctttctgagaattcttatttgcctttgatatctaattcttatggttaccatttggcatttagtgaacccctaataatatattgaatgatacttcaagttatgttacagatctaagaatacttggccaaactgatctatgactacaaaaagaaattctgttgcagtgactcatacaacaaaaatgttcccagtttgtgagtgacgctctgtgttatatttacttccctaatatatagtcacctttcataatagtgtcagcataatatactaagacaaagaggatctactgaaacttctcttgcaaccattaggacaaacccggtataagactatgcctccagttacctgggtgaccttaccctgttaaagtcttatttataaaatgagggctgacactggattattgctaaggttctatctatctggagaaattatcaaccaggagagcttaatggtatttgtcacctattcttatttttcctaagagatctttttcatatgatagtgacatgatcattctgatgaagtccttccagcttctaataaaatctaggaaacacagttgttattcaccccatagtaatgaagaaacctgtcctgtgcactacaaggagcttcttatgttctgagaagaattgttattcacctttgatctctagtccttaaactctgtagtcggcatttaatggatgtccactaatatttagtttggtttgtgttgcatattatggaaagcactcatctatatttaatgtctatgccactgcctgtgaatttgtgggaagacaagtgtattgtaaagtcaaattc

SEQ ID NO: 118749 - DNA, 1111 bp, Homo sapiens
acccactaactcgtcatctagcattaggtatatctcccaatgctatccctcccctctccccccaccccaccacagtccccagagtgtgatattccccttcctttgtccatgtgttttcttcctactggtacagggagagtttctttcacttgagagtttgatctgctttcaggaagaaaaagaaaggtcagagtattcttcttgtatctgctgttttttcagtgccgttaactcaaaatattctttatgccaaagtagcatattttggagtagcatattctgctactcatctttcttactcagtcatttctaagatataaccattcagcttctccccagacttctctcccttttgctaagtgaatgtcattcttacctcagtcacaaaatgaaagatgtggaagtcatctggatgctttatcttcctatgttcttttgaaaacctttgcttttttcttttcccttctgccacaattcagacctttatttcccatctacctcttaatgggttcccctaattctagtcttggctttccccttcccagacatcctagacagagctgttagtgcagtctctctgaagtgtcagtctttcagtgagccccatttctttcaaagtgaaacccagacctccaagacctagcccaaaacaggggttctgagctatattcattccacctctcactggctttgctgaattatttgtaactctttgatgtgctccttcactacttttgggccctcctacatgctcttccttttctctggaatgctctctaactttctgtgatttcttctctgcattaggtattcctccaaattggcttaacacatagaacaaagcaatcaaagaatttatcatactttatggtaattgtctatttccttgtctctggtcccctttaggttatgagccacttatacttagggatcatgccttatttatctctgtgcctctagtgcccagaaaaatggcagacacccaggaaacactgaatgaaaaagtaaacttgatggaaaaatagcaaattacaggtgatgggtaatgtttttataaaataatatgtatggctagttattcttctgttcttattatacatagcaaagtcat

SEQ ID NO: 118750 - DNA, 1928 bp, Homo sapiens
aagtgagtcctgttgttatctttcacaatcatatgaatagtattagatggagccagaaaacaataaaaattctacaaaaataatgaaactaatttgtgcaacgtgagaaaagaaaatggacattttgcaaatctatttggtgtcagggctctactttttaaaaggaaaatcaatcatggtctgtggtgtacatgttaagggaaggacttaaattcacagtaataggtattctggttacagcatggaagaactatatcattgttgaagtaaaactcaccgaggcttcagcatacaactaaattgtactttgcataagaacattaaaacaattcttggaacactctcctcccccatcactaaccacccaccgaaatacaagaaattatagtaagaaatatcactctcttggaataagcacaggagaagaaattgcaaacagattattagaaaatgtcattcatcattttcattttctttggaaatttagcttttctccctgaatataatgttttcttttttctcacatttttaaaatatgctcaatcagaatactttaaaaagacttttttttttttttttttttttgagacggagtttcgctcttcttgctcaggctggagtgcaatggcatgatctcggctcactacaacctcctcctctggggttcaggcgattctcctgcctcagcctcccaagtagctgggactacaggcatgcgccaccatgcctggctaattttgtatttttagtagagacggggtttctgcatgttggccagactggcctcaaaatcccgacctcaggtgatcggccccacacccaaccaaaaaaatacttttttatatatatgtagaaacaccgttttatttgtaaaatatgtcaggtgctttttattaagaagtattttgagaatacagatacatcatcaaattgactgttatctttgtataattgtattacaagttatgttgtgaagatgaaaagctagtttcccttctagctacttttggtgaatagaaattaggagtgttacagcattttatttataataaaactatagtatacatgtttatgattatttaaagaaatttgttatgtttcacatgttcagagacttttgtctttggaattcctttgctaactctagcaataataagggcatgaacttttcagttacacagaattgggttcacatatggttctgtcacttagtagcctttgggcgaatttttcaaactcagatcctcagctttcttgtctacaaatttacaatagtaatatttaactcacaaggctgttataaggattagaggagattacctgtagtaagctctcaaaatattagttctttttccatataaaatataaaattctccttaaaaatattaagattatgtcataaaggtttctaagcattgcaagtggttcctatttatatctgctactattgctttccagatccagaaatagcttgcaaataatgggattcctgtagatggaataatgttaatttacctagctcactgctactgtattgtacagcttgggaaaatgtgctgtttttgcagtctgttcattcagatggcttatgaattaaaagcagaggcccatcatgttctaagatccagtagttcattattgcaaaataaaatatccatttattaggcaaggattgtctacagtgcaagtgtaaagagacccactcataagaataagtgttgccttcaaatttgtactgaagtatgctgaaaaacatgtatactatagctgtgataatgagcagtacagtagaaagaggtgatttatgatacctgtttctgacagctatagtgcagagattcccagggtagctgatcatggcattagcatgctgacagctcagcatttagaacattatggtaatttatcctgcctatgctgtcacctgc

SEQ ID NO: 118751 - DNA, 2896 bp, Homo sapiens
aagaaaggagagaaaagaaggaaggaggtaagggaaggaacaaaggaaggaaggctggcttaaattattattatggagcaagttgtttttctgactttagttgtttttttttttttaattgtctgcagggacaagactaaaatttgttttgataatagtttatttgggctgagcagggtagctcatgcatgtaatccaaacactttgggaggccgagatgggaggatcactcaagcccaggagttcaagaccagtctagggacatagggggaccccatctctacaaaaaatttaaaaattaaccaggtatggtggtgcatgcctgtcgtcccagctattcaggaggctgaggcaggagaatccttttagccttagagtttgaggctacagtgaaccctgatcacaccactgcactctagcctgggcaacagagcaagaccctatctcaagaaaaaaaaaagacttcatttgaagtcctttcattcactctgtactgacagtttttcaactcttttcgtttactctgattttctaagctatagtaatttattattccagaagaaaatgtgtttcaactaaactgttaaataattcttgagattagtcagaatgtttgtcttttttttttgagacggagtttcgctcttgttgcccaggctggagtgcagtggcgcgatctcagctcactgcaacctccgccttctggtttcaagtgattcttctgcctcagcctcccgagtagctgggactacaggggcccgccatcacgcttggctaatttttgtatttttagtagagacagggtttcacctttttggccaggctggtctcgaactcctgaccttttgatccacccacctcagcctcccaaagtgctgggattacaggcttgagccaccgcgcccggctgaatgtttgtcttttaataaattaagctaacatgttaaaataatgtggagttatgttttttgaaaaataatacatttacacatattatttgcttatatctgacataatttgctgtaaggagatacacagttttcagaactctgatgtgactattatagttaatagttaattagctttttaaagtttctataaaaaatgccaaataacttgatacattttgtttgcaattagtgacaagacagtatttgccaacttcatgcatttcaagtatcattatgtaaagattgtttcctaattctttatgtgtaaagatttattcctaattctttataatttatttataaaattatagtttcaacaatctttcatatatactaagagaaaataaaagattgtttttaggaaattacatttttgcagaattttcataaatgcttgaaaagatcatagaattgctaaacccatgtgggcataggctacccggaattttcagctcatatttagatggtaggaaaattgacagaaacttagttactgtatttctttgtgcttaaatgtatgaccaggagtctggtgaatgtgatttcccaaacattggagtaggaacactagcagttcttattttgaaaaagaacattgtacttgagctttcaggttgtggctgtgcattgtaatgcatcaggagctgcttttacattttatttaagagaaaggtcttttaagtatctatacatgtactgcctttatttgcacatttggatcatttaatgaattttgttctatgaacaaatggtaccatctaagataaatacttgaaacattgatgttaaccctacctcagttaattttcatgaaatattattttttgaaaatgaatacttattgcataagtcctaaagtcctaaatggaatatgctgtttttaatggttattcatatattctttggattcctttctaaaataagccattgttaaaagatggatatacattacccagtgggctcttcttcccctttaggtgtagaaatgccttccatgaagactaactgggaattgagatgatcataaatattgggattttattaagtttgctagtagtttgttcacattgtttttccagcaattttagaagatacaatatttagcctaataaggattatcatctttcagagggatcaaatatctatcctgtacttatggctagattgaagaaatttttcattgaaataatcagattatatatgaagtgatgatttgttaatggttggcatagtcaaagaatctgtttttgaagttgtgggaaatgtctctgacaggcattatcagttaagtaagggactaaaagtagaaagccctaagttctaacccaaacatttttccctaatagttattttgtcaaataaatattgctcttgcacactgaggtattagggtgagtaatagtgagcattaggccagtgtaatactcttttgaatattaaattataaaataagcccaggtcgaggcaggtggattgctttgagctcaggagttcaagaccagcctgggcaacatggcaaaaccctatctctacaaaaaatacaaaaattgactgggcgttggtggctcacgcctgtagtcccggctacaggggaggctgaggctggagaaccatttgaccctgggaagcagaggttatagtgagctgagattgtgccactgcactccagccagggtgacggggtgagatcctgtctcaaataaaataaaaataaattaaattcccaaaacagaaaagtaagtaagtaaagagaaaagtttaaggctgggcatggtggctcacgcctgtaatcccagcactttgggaggctgagatgggtggataacttgagatgaggagttcaagaccagcctggccaacatggtgaaatctgtctctactaaaaataaaaaaaaaataataataattagccaggcatggtggttcacacctgtaatcccagctac

SEQ ID NO: 118752 - DNA, 1048 bp, Homo sapiens
ctatttctgtattcctgcgtagtcaattcctaaatacgctttcttaagatagcagttttaaaaattataattactctccaccctgaccccttgccccacaacaaacaaaaatcactttgagttgttaatgttgaaatcacaagttacaagtcttcctttgtccttggttaaaaaataattataaaaatagagtaaagagaaaattctttttctctttactggtcagttctatagaagtaatttaaaataccgtatattgaattctttgatcatttctcctgggtggattgggaaagaagtcctagctgaggcaattgcttctgggctctctttctgtgtgcctggtaaatgaaacacaaggaacctcaccaaactacatgactaatggcaacctccagtgccgcctgcaatcaaagattaatttgctttatcaagtttaaagaatactgggtgataaatcatgtcaaaaagaaataatcagtcaaaggctgatgttcttttctacatgtgaggacaggtgctatgaggcatgcacttgtcatatacagttaattttcttttcatgcatttatgttcatcttaattactatttagttgatgcttgaatcaaataatttctctcattaagatcaaccagcatcccaactgcaaggctgcagtattatagattcaaaataacatttttttccttttaatttgtataagggtattttcacatgagtattaatcacaaatttttttattcaaacatgagaatgccaagtgggaagcgaaattattttctccatttcaagatacccaagaatatcaactggatgttcatgtttataatatatgtctgtgtgtgtgttatatctacgtattttatataaaattttcattttactcggattttctcacctttttttttcttttcttttcttttcttgaaagagagaaagctagagtctctaattctgtctcctgggttcataatgcaggactcactttaggtaagattatattataaagaggtcatctttcaggacttttagcagcaaacacattt

SEQ ID NO: 118753 - DNA, 1383 bp, Homo sapiens
tccctggccactgtacaaaggcccctttcctcatttgatatctaccaacatccactgttagcatccctaacctcttttggagataccatggatcttttttactgttccattttttactgagctctgagctatgctcatttttcatgtgtccactgaagtccacatagttatatatattttctccccaaaatcccatatcacacaaataaaaatatctaaacaggagaactgtttcctatcttgggttctctcaacacatgactgttaattttattcttttcacttaccgtatttcacttactgtatcagcctccttctaaattatatcataatctcccttaagtccctagattagtttgttcagaggcaaaacaaaagtgaaagattttgtgagaaatgcatagtttcattacacatctggtaaagacacgctatgattgctttcttacagtgtccagaagctaatttatggtactttctttgtttattgtacttgagcaatatagagtatactctgcagacatggtttacactttgaattagtttgcatctatctatattaatgtgttttgtaagccaggccttaatatctctttattgtgctcttttgaaaataattctcttaaatctatggaacgtgtcttacttgtgaagaaagacacatttttccacctttctaagattaaaatagtgagagaaacctcaaagaagaggaaatcctattttaaaataacagcgatctcctctgtagactcttggtttgcaggttgttagtcttcatcctctgtgtcaatttaatgtatcacgtaagtactagtgaacagatgtgggggtagggggaggcaagcagagtgttgaagcaggaaccagcagcattggcaaactggcaaatgcttctgttttgctaaacacctgcttttcttgtattcagattgtctgaaccatctgtttttatattctgtttacctactgtcagccattttggagttgttaaaatctttgaaagtagttgggaatttttcacagtaagctgggaatctataccactctttaaaaactttgtgtttttagggtattcccatttaatcctccagagaataattactttttaatttaggtgcaatgtgttaaatattatataattaaaatgtttttctcccttcccaattacttattcttagaaatcaaagtttaaattgtctaaataggtacttggccatagtgtgataacactaataacagattcgtaatgatagaatgtaaatattaatttatatgtcccctctcattaaaaaaagaaagaaaaaagcattacacaatttgatgaaaggtactaattttttataagcttacctactagatgatatgcaagtgatattctca

SEQ ID NO: 118754 - DNA, 2513 bp, Homo sapiens
tcacttttctagagcaaagctcacataaagaccaccgaaatcaatattatgaaagagtcaggcctctttggcctaggaatttaaacacttgaaaggcaagatcaggtttttggttttttagttaggatattggcaggacttgaaaatttctgaaatatttaaattcaagagtcgccttaaatatatgttaatttcagggaaaataagaagcaattccactttctctggtcaataataaaatttacagaacttctcccaagcaatggcacaaattaaaaatataaataggcttaataagttcatgaattaaagattctcaacaagttattatgaaaagatataaatatctgggctacatttctaaccctgtgaggttaatggtcattggtggaaggtagttcattgaagccttaatgagagacagttatgaactaggtgagccattgagctgatggatggcattcttatataattaacctagcagtggtaatcgcctccttcaagttcctagcctttctcgaaccaaggaaaaagagccaaaattgttgccattttgccaccttgacatttcttttcaattgccaaacctaactacctttcttcagtaatacaactaaaccagagagggctggtttttctgcattcagaactgtggatttagggtcattttggtatatatttaattgaactcttgggagcagatgaactcccccaaggaactgggtatatgagggcggagggcagtttcaattcaagaatgtgaagaatagaaatttctaactgaaaataaataattagaaagtgagaaaccagagtaagatgtccatgaaactcagaatatcgaggagaaagaacacatggtaacagaggcaataaagggccccagaagctgggcacagtagctcactcacgcctgtaatcccagcactttgggagtccgaggcaggaggatcacttgaggtcaggagttcgagaccagcctggccaacatggtgaaacttcatctctactaaaaaaaaaaaagtaaaaaattagccaggcatggtggcacatgcctgcaatcccagctactcgggaggctgaggtagagaatcgcttgaacccgggaggcggaggttgcagtgagctgagatcgctattgcactccagtctgggcgacagaacgagactctatctcaaaaaaaaaaaaaagggccccaaaaagatacaagctttacccctctgactctgaactatcatgcacaatgtagtcagacaaatcttaaacgtcactcttgtcctagggttcttcccacttagaaatctccctgttgctcatgacatcaagccagtactctggcttttaaggttctccataatctagctccatctactgtccagtttttggtttccacagctcccttctgtcatgctgactcccatttttaacttggatcatactgttctcttcctccttctgcccacactcatacaaactcatacctggatcatatttgctgttaaaacttaataatggcaatgctcgcactcatttattgtttattatacaccagtcactatgatgataaaccttctatgtgcattatatcttaataagtctcaaaataatcttatgacgaaggtgtcattaacctcatttctatagtagagtaactcaactaagagtacataggtaggaagtggcattcacaagatttgaccttaggtccttctaactctaaatccattaaatgatgaagtgtaattcctgatcttgctcctaaagcattttatgctctgtgtccttattttcttagcaaggtttgagattcttgaggaaaggggcagtgtctatacatatcttgtatctgtcatacaactaggacagtgctagattatcacctattttctcattgattgattggatattgattagagtgagatggtcagactttatggtgacagaaggagagaaattttattctgatcctagtcatatttctgaagtaggtgttgttaattagagcagcatcttattaagaaacagtgggttggaaccagccagtgtttagttttcaagaattgtacattagaaaaagatttatacagagtctgtaagaatgttatttttggctagattagtggcactcttttttttgtttcatttattatacaaatacttatcattacaaatctgtttattatatgctaaacagtgggacacactattgcctagggaaagatattcctgccatcacagactggtggagaacacaaagttaataggtaatcattgttcaatgtaatgaggcccatgactgatatgcagaatactgggaacatattggaagataactgatgaaatcttggggaagacaggggaagactgacacccagggggtgcttgggtttcttttagtgtcattcacttctgcatataacatacacagggaagtaagataggaccaagagttgcatattagtgcaaaaagagaacagaagtgttcagcttcatgttttccacttttccattc

SEQ ID NO: 118755 - DNA, 1053 bp, Homo sapiens
agcctgggcgacagagtgatactccatctagaaaaaaaaaaaaaaaaatatatatatatatatatatatatatgtacacacacacacacacacatatacacatatatgtatatatatggagttaatgatacctagctgtgcctattttgattgtacattcttagcgatgcaagagggagaatacaattagccttcccccagccaaaaagaggataatccaagtaattaaagatttaaaataaaattttatgaatgagatgtaggaggtagagaaagtagccatagagaaagtggatattttgtcagttatttttcttgatcactatttgagaataatatcatttaatatcaactacagtgtgggaaaaggcaatgatgatttcagcaaatgagcatttactattaaaaaagaagcaaaaataagttatgaaatatagcagagttctccacatacattgatgttatacaattatgatttatgatgataataattcccctaattccataatctgtgaaaatgaaataaacttatttccgtgaacccttcaaaaaagataactcccacaaattcctaatcaaactgattttaaaagaaaagagaaaaagtagatttgaatggagaaatcgagtgctacagaatataaaattttcattcatttgtatagtggattgtcatcttgaagtaaagatgaaatgaaacaaagttgtttgtgctttgaacattgaagcattgttcatcatgcataattaacaaagttgaaattttgtaagtatgaatcatgcacaaaagagccacagctatgatagctattacaggaaatggaggaaattaataataaaaggcaatacactacctcataaatacattctcatcataagattggagcatgaaagcattaagaaaatgccctgattaatttaacaacttaatcctgtaaattggagtatagttatttcagaattcatttgtacatagacaaagcagagacacaaaatagcttactttcattaagattttaaaagcaattcttatggatatgtgaagataatatt

SEQ ID NO: 118756 - DNA, 1019 bp, Homo sapiens
acagtgtgtcttataaaaaatatgaatgtacatctgcatgtatatttcagtaagttttacacccggcaagattatgtcagttgactcattcattaactaagtattttattcttcagtaccatttcctagtttttgatattacatcatttatatagggattgccaaataaggtactgtatgtaaagctaaacccacactgatgatctggactcttcagtgatgaacattgaaacttgtctttacttcttaaaaagggctttaaaatatgagcatttctactaaaacaatgtggcaacatatttgctgatgaaagattgtatttaccatattgaattgccttagaaaataattgcctctacaaaaggaaacatctgtatgatagcgcatggttaaagctgccatcaatttttaacatttgagggttgagctatgaccttttatgatgactgtgaacagtaactgcatccattagccataagttttgtttctttattttagtagatggtctagactgtaaatattagagaatctaaaataaatcaacatattatcctaaggatacaaaatgtaagagctatttgtggttgggaacctttgacagatagtttggatgaagcagatgattgcctgcctagcgtatctggtctccattgctatgcctgcaggcagtttagtgctatggttgtatattgatgtcagggttagtactgagtggctagcagtgacagatgtctataattacaggcaatgcttccagtatttctgaaaagccagcctatgttgaacaattatcttatttctgccttgccaaagagcatgttccaattgctagtattagcaatggtgaatatagtgctttatctgctgccttgggacaaatgtgagaaaagcacttggttataaaacataaatgcaaaatattttttcaacattttaaattagttaagttcagtgttttcctaatttttatctccccataatgtttcttttgaaggagtcttgaaatataaaagcacatt

SEQ ID NO: 118757 - DNA, 1019 bp, Homo sapiens
attgcattttctggttgacacccattacaaaattggaaatgcatttccatggaaaatctcctatgcccagtaagtttagttggaaacttttaacaagaaaaattataacataatagaaaattttgaaatgtgctaaacaccttagtactggtggctttccatttgctgagaattgcaattctcaagttttgttgtaaccttttttttttttcttaagcctttgaccatttattgtccatttctgtctctcaattttcatggtcacttccttccttgctccctcttggcccacttttctgactcattagaaatgttttcatgcttgttggtgccagttctcacctgccctttttatctggtcatttgcattcatgagctatgggctgtcataccacactttccagcaggtgcggctgcctaacacatgatactctctaaccttcctaaagattaaggtgttgggggttaaaacattatccatgttgtaagttatgaatcctgtattttcaggtaatgtagaatgagaaatatctaggaaatatcacttgagaatgcagtttatcttcaaccttaatctaacctgcaatgggtttctgctttgcatttaaccactttgctgaattattcattacattttctcatttagtcttctcaacaatgttctgtttaatatacatgaatatcattttgcagaaatatgaaacaatttcagaattaaaagcttgtttagtggcaggcccttggtttcaaccagatcatcttactctgaacccagtttgcttttcgctgtatcacattggctatgtatgtatttaggcatgagtccaggaatgatcagtttcagagtgtgttgactgataatgccaatatcataagtttcatctccatactagctgttttacttcccaaggaaaagactcatttctttaactgaagattggatgtctagtcctggctcgccatcagtcacaaaagaactaagctagatccttgatattttatgtcctacaataggagaa

SEQ ID NO: 118758 - DNA, 1711 bp, Homo sapiens
aataaatgtttaacattcagatgtattttatacttccataaccagtttttctttatcagatgctgttccttattcaactgaatgaggcaagcaggattattcaccttttaccacttgatttccaacataaattatggttttaaaatcaaattctggcaaaagatttttctgtctaatttcaggcttatatttagtgatgttatttgaaacgatatggaaaaattagtcacccaggattaatgtggatctattcagtgtcactaagtttgtgtatttaatatacagcaatgatgtttgtaccattaattctcttgttatggtgataagttaattgtgattatcatattttatcctgcttcaaatgttaatgaaagagctaagtacctttagttccaaatggtttagatccaagtcattaaatgctctattctttcttacacctctcctcctccctcctctactaatgcctttcacattgatgaggtctttcttatagaaagcactgaattgacctcaaaggcacttgaagcctaaaacaaaaatatgaaaattgatttcttattcatagtaagtgatttcatactgtgttcctaaattctcttcctaaggaacactaatgctttcattatattggatcctttccagtgacaggttttgttttaccaatttagaaccagttaaaaaccttcattaataagtcattccaatagattgaaacaatacttgaaaattcacagtaatatttgggggatcttttgtggtatcacttttgtattacctgatatgtttttgagaataaattggttcagagaaggtttgtcatccaatggcaaaatactttgttgttgacttctactgcactgttaattttctgcattgagcctgcttaaacaatgcactaaagctctttgagaagttatagcatcttaaacacttatagaaggcctaagggtattaacttactataattttctgaagattcattatccaaaatcttaattcattataaaaactcttttgaaaacctatagaaccagtgttttctcttattttcttatttgcacagaatgagagattcgttgttctttttaatttgtttcatgtggtgcttttgagtacatttcataaaggactgttattgaatttctgtgactgtcattatatatccatacaatctttaggaactaatattctgggtttcccagttctgtaatctactccaaatttaaagattgacataattagtttcctcagagttataaccagaatgttagagacagtgctccagatacctaagactaaggattaggattggtaaaagaaattttaaaaattatttcggcacatgctttttttattctttattaaatgtacaactcaaaattatgttgctatttgtagtttatgtccgcatctgtttttcttacctagttccctttttaaaaccatatgtaacatcttttaagctacttgcaaattctacaggcaatatttgtcatttgatgagttgagaatttggagaatgtattggctcattgaagcattatgtactatccaaatgctcttttcttaaatttataagaacctttgcagtaaaataaatacggctaagaaaacaaatatattaaaacagttttttaagagcatgccttctcaaatctgtaataatgataattccttacatttctaatcactttccatatttcaggag

SEQ ID NO: 118759 - DNA, 1150 bp, Homo sapiens
tttataagcttaatgtggcttggattgagactgaaatgttgcaccccaaactctgcaaccaacactccctaattggaagcttagtggattcccaggccctgatgttttcaacagggaatccctgagcttgggatttcagtgtcaacatgaaaagtaagacgtacctgtatatttggggaagcttaattaggtaatatttgaggagaatttctataagttaacttcctttgatttttttaaatccttatttttataactgccttaaataatcctgaaatggttaatattttgctgaaatctagaataggtggaaaatttttaagtgttggaaccttttgttgaagtactctactttccagccctttgcatacctactcccgtcttccagaaaggggtggtctaccactttgagaaaaaaaaaaaatgtgtgtggtgtggtgggagtaaaatggatatatgagtgtgtttgtgtgtaagcgtttatatatttcaaaataggagcgatctggaggaaaaagttagcaaattttaaaattataagattctttttaaaaaattcctttgctctcccacccactccctacttcagtgtggataccacagtgcattaaatcttatgtttgttcaattcgaatagtcttttgaaaatatatgttaatagtaaaacttttaacaatgaaatgttttaatgcaggtatatgctcgtatgtcagaagtcttaggaataacagatgacaaccacgttctagagacgttcatgacaaaaatgtgagttcttgttttggtctttaatttttcttttgttgttgttttaaatgtaatagatctttttattgtatttaaacctttttatatattaatttttaaataaaagacttaaaattatgctttgttagaatgttagcattgttcttaattgaaacttaatttcacatattgaaaagtcaccatccaaaggacattgtaatttgtcaagtttccatacaacggcagcgtgcagcatcagatgatgattttaaaagatttacagaccttgactcttcagatcaattgggcagcatttttttttatttaaaaagaaaagcacgcgatttgaaagaccacgtgaagagattattgcaaattgaaatcattgagagaggtctgatag

SEQ ID NO: 118760 - DNA, 1045 bp, Homo sapiens
cttactaaagtctagttgacagtattgtcatatttctaacaactagagagaatcatgtagattttcttttctacattagctatcaaatatataggacttgtgaaagataagtgttggattaatcactaagattagctgatcttttaatatgaggacaaattctgaaaatggtggcattgaatggaaacctttaatgtaggttcattccaggaatatgtttatgttagttaagtttaaaattgtattccttggtaaaccataaaagatttccaaagtattagacacccacttttgtgctggaatttaatatgcaactttttattggaaaataatcgtccttgtctggcaaaatccaccatgcaatatttctgttagtaggtataatgcaataaagccagggagggctatttatcactacaaattttgaggatttcaggattctttttattattttaatatatttctttgatattaaatcagaaaaatgataaattacacctgtctaggctgtttttcctttttactggaaagtgatgtacaacccaattccaatggtcatttggctttttaagatatgtattttttcttattaaaaaaaaaactcaacccatatttttttctaataataatgctgaaatactctttatttctaacatatgaagtggtttataagtacttcctagtattgcaaactctggccttttcacaatgaattactttgaaagcatattatctgcaaagaagcctcagttattttatagcatatatctattgtttagatttaccctatttttttaggttgaaattgatatttagtataaaattaatttgatttgtattcttttagtataatttgcataatgcctaatttatttgtatctgctatttaagatctttttctatcctattaagcctattatatattctttaattcaaatattatagccttttattttacatgctgtttattgcttttgagtacttctcaaagtgaattaaaaaatcatattttcagaaaacttactagataaaagtttaaaagcta

SEQ ID NO: 118761 - DNA, 1524 bp, Homo sapiens
ttagcaattatttcaggtttgcatatttagaaatatatattagttcaatttgatttcagtgctcagttatttgaattataaatcattatgtcccttctagctgatcagtcatgaaatatctttgaattcatttacataatggaatatgtgagtggtgtatctgttttagtgcagttactggttacctaatgcatgttttgtttttccaatggatttctttattataatgtgtttttcagtcttgattttaaagcaatacattatttctatattaggaataagatgacattcttcagcaatagaaacacgcaagatcaaaaccatcacctataggcccttgttattggaaatctgtttatatattaatattcaaaatatttttatttaaaatattagaagtaaatgaaaagcatgtttctcactatgaagttttttaatgttctttatttatagtacatgtcttcagatactttctgttttattttttctattttatctgcttcagatgaaccttactcagtgtttatggtgctcaaagccagtctctgaactttggtggtcttttatctgaccacttgttagaaattgaaatcacacaagacccccatttttaggaagtattaaaaagcctttggttgccttaaagcagtagtctcagactttagtgagcatcggaatgtgagtgctttttaaaacacaaattgttaggccccactccccagagtttctctttcaggaggtgttaggcctaggcctgagaattgcagttttcacaagcctcatgttaagttggtggctccaggaccatactttgagaacttctgtctttaggtagttagaaaatagagctgcattgtatgtcctgagcagaaaagtctggtacttccctcacagacactttttcataggacttcataaaactcactagacttacagttttagagatagtctagttcctaaataatgatgtggggacgtaagtccccagattgtaactggatgactgttgcattttaccccagaattgctgtttgccaaatttgaaacttttcaaattggtaagattattgttattttaaaatccagtgacctttttgacagaaagttaatgttttcccatcagattcattacatgggtatttataataaatttagcaaatacatttgagtaactgtttaacatactctttatattttcaagaccaaattccaagaatttctgaagtagcttttttgaacaggcacagagctgaaatgactctgtacagagccagcccgctgtgttcaagttcagtacttggggatctttcccttctttgaaatgtttcctggtcagaaattttagtttctgtctaaatgggaaaaggagagattgttcaaatgattgaatcaaggaagctcctgggaaaactggagagagaataagggtcatacagagcaatcaagtaaacttacttattttaaatgctgaaaacggagaagagtatcacattttatccaaaattctgtttgttcggtaatcat

SEQ ID NO: 118762 - DNA, 1046 bp, Homo sapiens
tggcttttgttgccattacttttgatgttttagtcatgaagtctttgcccatgcctatgtcctgaatggtattgcctaggttttcttctagggtttttatggttttaggtcttatgtttaagtctttagtccatcttgtgaataaatattgatgttattacccaaattatcagaaatggccaggtatcatatgaggataactaattagtatagtttttggcctatatagtctcccttagtacttttataatgggtagttcttcctcctattcttttctttatatttgcttaaaaggaattttgtctgtttgtgtgtgtgtatatgtgtgtctgtgtgtgtgtctagtagggttcatgagcaaaattccacttttgagataactaaacttacatttcagttactctactttgtgcatataacctaagtacagcaatttctgacatgtaatattgtcatctgtgaactttcttctttcatcaggatctaactctgtctgcaaaaagtgtctatgaacatgtatgacttttaaatatttgcccagattcagtatgattacccactctcttgtacttagtgaatatcatgtatctagtacactaatataattctaaatgaaattttttcacgtctttacacttttgtaaataggatatatcttataattgatggtatttttaagtactttttcttagtagtacatattatagtggtttttttgttttacaatcagtggtgttttagatttgattaaatggggtaaatactcagaaaaggcctggtactgtgaattgaagtcatacttggtgttactgtgtcaagcagctactgaattgtgtagtactcctgtaacctaagaaagcagttcattctcaatttagtatcctccttttcaaaagatatagattttcagaattttcagccatctatgagattcttttcttgtttttcttcatgtgtcatcctagctatcaataagactgtcttcaccctcttcgatgttttcataaccacatggctagagacagggattttctgagaatttagt

SEQ ID NO: 118763 - DNA, 2765 bp, Homo sapiens
agtattttccttgtaacatcaatggagccatataagattattacagccttcaagaaaggcgtgagtaggtattagggaatggccgagagatgctctagctgtggtagaaaacacatgactatggtagagtaagagaagagggtatttgcatactgactagatgtgtttagaatccacatcatacctgaaattatttagtccttgtattcatgtttccgatttcttaactttatgctccttctaagttgaactgttcagatgataatgtggtacagcagaaagaacatggcctttggaaccaaactacagttcaaatctcagcactgtcaatccatggctgtataatcttgggcaagcaacttaatttctcttagctcctgtttcattatttatggactaaaaataataaataatacttaacagtgtaattgtgaagattaggtgaattaacatatggaaatgccttttacgtactaggcacttgagaaatattagttcctttaagctgtccttctatacttgatgacatgcagtctgctatatcctcctaattatattctgatcttaggtttctaccaagagagctcactatttcttagaattgaataattttctcttttttgatagcctattatgggtcttttataaaattatttcattatgaaataacattaagtaagtagaagttcgtaagttacacccaaaatataaaaagggatcagttttaattttccactatcaagactttaatagtaaaggagttcttgtcttaattataaaattcattctttctttccataactagaatatgtataagatagaaaaagtaattgcattggttaataatagattatcattcttaacagaaggaaagacgtttctataggaatgctctttagaaattatatttttttataagtagaaattgatgccactacagttcactgttactttgtgatttattacatactgatattacaaatatatttccttagattccttaacttctattacttatatccttttaaaaaaacttgtgaagatagatgctgtgaaattcatgctaaaaaaccacacggtaagtcttatttctttaattaatgaataacattttacgaatagttgaggtaaagtgttagtaacttggattactcttttgctttcattagagtgaacacttcccttttcttggcatcagtgacaatcatagtctcagcgacttcaggtgtcgaacaaccttctacacagcgctcactcgccttctgatggtagatctgggtaaggttaagaatttaaactcaattaataagggatcagcaatacacttgtgtgaataaagaagtggagtactagtgggtacaacatttaacttattagaattagcgtcttctgacagttttctacaaccttctaagatttgagtgttcacttgttagcattagagccaaaagacaaatatttgtacttaaggtggcatttttcacttcacataacacttgcactgattttttacctcacagcttactttctgcctatcctttgacacattaattttactgctatgaatctaggaataatcttaaacagagaaaaactttacacacaaagattttcgtcatagtgatgtctaaactagagaaaaagtagaaatgatgtaactgtccaacagtagggaattgtaaaattatggcacgcctacttacttgtagaatgattggcacgcaataaaaatgaagatttaaagacaaggcaatacatgaaattttatattataacattaagtgaaaaggcaaagtgttacactggtgcaaatggtatgatcatgtatgttggggatggggggacaatacttcagaaaaggcttaagtgaaattcttcaaaaatggttagtacagccattgtgaataacagtgtagaggatcctcagaaaattcaaaataaaatgactgtacaatccagcaatcctactactgggtgtataggtatccaaaggaaatgaaatgagtatatcaaatagttgcattcccatatgtttattgcatcgttattcacaatagccaggatatacggaatcaacctaagtgtccatccacagatgaatggataaagaaaatgtggtatatatacacagtgggatactattcagccataaaaaaggaaaaatgtctgccatttgccacagtgtggatgaacctggagggtactatgttaagtgaaataagccaggcacagaggacaaatactatatgatatcactcatatgtgaaatctaaaaaagttgatctcatagaactagagagtagaatggtggttactaagagctgaggactttgaggtgatgctggtcaaaagatacaaagtttcaggtagaaagaataagagatctgttgtacgtagatggtgactatagttaataacaatatattgtattcttgaaaaatgctaagagaatggatgttaagggttctcaccacaaaaatggtaactatagaggtaatgcatttgtcaattagttagatttagttactctacatcatacatatgtacctcaaatatattgcaggtttagttccagaccatcatgataaagtgatacagtaaagcaagtcacaccgtttttgttttctagtgtatataaaagttaaacttactgtactgtagtctattaagtgtgtaatgtcatgatgtagatacaatgtacatatcttaatttaaaatactttattgcggccaggtgcggtggctcacacctgtaatcccagcac

SEQ ID NO: 118764 - DNA, 1755 bp, Homo sapiens
tttctgatcatttgaatttttttagtgtattacttttataatggtaaaaattaacttatttttaaaatttgttactaaaaagctaaagttagtgagaagtatttacagataggcagtaccttaggatgggtacttaagcttctttgtagtgaccatgttactctagactcccatttctcatatttgaatactgcaggttagaccagttatacatgagagggttcagtcagtggcaatatcatccttagacaataccaataatacttttttctttgtttctcttgaagtctattactacatcaacttaaatatgaatttttaaaaatgtgttcatacaaacagaagaaaaataatttttttgcccataaaaggcattgaatttttaaatggaaaggggactacacccctctatgtttcttgcttttttttcatgcttttccacagactaaatcaccagaaagacaaactgccaaaaagttgagagacatgcaactagaatgattaaagagcttagtgggattgatttctaaggaaagattaaaagaaccatgtatgtataacttggctaagtgacaactagggctggaggcaaagagaactatctataaatatttgaagagcgtaaaccaggcatgcaaaacccaatcatctgctaccttaggcaagtcggagatgtaactgagtgacagcttttcgtactgcatcctggcctattttacctcttggctgctgtgttggtgagaagaggcgcagccccagactgtgtcattgcccttgacaatcatttagaaagcacagtgtgctaaactctgagggcaagacaaagatgaatcaggcatactgggtcctggcctcaaggagcttgtcttcttgctttcccagttgtccaagcattaaagagaccttgaaacatttgtctggacttaatttatttcccaggccttaaaaatgctcttttaataacacggtcacacagagtgaaagaagtggggagaccaaaaagagaagtatctggaggagagtttttaaaactaggtccgtgtcactcacattttcagaacctggaaatggaatgggttaacatttcctttttgatatggtcatcacagatagggaacccactatgtatctgtggtaggttaaacaacaggatagcactatcggagcctgcacacagccccaactctgtattctcagtactactgtacttattactgcattgataattgatattcatgatgatgcccagaaagacattgcacactttttggaaagcaaatttgctcttatttagtattgcttaatgtaaactatgaggtatgagaaactgaaataaacacatataatttgaataattggattttattagtttacccaggattctattcctttgaaatacttaacccataacagtataaagaataaattcacatttttagttcaaagtttttttttaaatgtaaatatctgttgcattacaagcactttttagacaccttgagagaaacagaaagaggctatggtggaagtgcttggtgcatggtaggtgctcaatataagtcagttgaatctggatataaataaaatttaaaatcatagtagctaccctcatagaacttccacatgtttgaaaagaaactccttccttatttatcagtaatttttactttttaaaataatgaaatgtatgtgataagcatcaagttatgattaaaagcatcaagtatgatttgttgtgtaaactaccagagctgc

SEQ ID NO: 118765 - DNA, 1955 bp, Homo sapiens
gtttatctgttagaaaactgaggttcagaggccgggcgcagtggctcacgcctgtaatcccaggactttgggaggccgaggcaggcggatcacgaggtaggagatcgagaccatcctggctaacatggtgaaaccctgtctctactaaaaatacaaaaaattagccaggcgtcatggcgggtctctgtagtcccagctactcgggaggctgaggcaggagaatggcgtgaaccccggaggcggagcttgcagtgagccgaggtcgcgtcactgcactccaacctgggcaacagagcgagactccgtctcaaaaaaaaaaaaagaaaagaaaactgaggttcatagagattaaatgacctgcccaaggtcagccatgtatgtagtggccctctgaccacatattttcatccacttttactaaactattacttcatctttcaccttatcaaccagtggagaaatacaacttttttccttcatttttatttgaactatttggtccaaatgattgatttggggcttgggggcagtgaaagaaaatgagaaatgattactttctaagcgtctatgaaataaacagatagatgcatgtttattgtttgttctgtataggtatattatagtttgatggtgagtgaaagtcaaatgtagtttttaaaatttgttcttatgcctaataattggccaaagcgtatttcttctcatggataaaggaacacagaggtggatatctcaggaaggtttagcaagtgaggggcttgatcagaaatagctgatagataggaagaatacatcaatgtatcaactgtgtccatgacttggcagagattatctgaaaaatagacatggggggatgggggagtgggcagtaaggggtaaagaagcagctggaaatacttaaaatctgtaatgagataattaagactaattagctggccctgtaggcagaaagcagcccattaagtccagatccagttttaataacttacctggttttgaggctagacagtccagagcaccccagggaatgagatgtttcatggatgagacttttagggtgggattctttgaaaatgggtagctatagtctgcagtgggcagtgtattttttttccgggaactaaaataaacactctggttccctagggagaagaattaaagggcacctcagttttctcttctgttaaatggagaaaactacgtagaagagttgtcatgtggtttaaataagataaagatacataaaaaggcctagagcaattcctatcacaaagcaagttcttagaaaatattaagaaacgtttattgagtgcactattagaagaagcattgactactgctgggacctcaaaatgaggcaagtttggctctcttaatgccatctactctgccttcaatatttagggctattattttcctgtggaagtaagatctgatgacacttcccaacacatactaaaatatcctgacctgcctgaagccacaggtcatttcaaaactagctagcactcctaagcaatttagagggaaactgaaatgaaaaacaaattgtggcccaagtttcaggggccagttaagcacatttctcaaagttttactgtaatataacttagaagtggtatcttaatgaagcattgggaaatagcagatgatctgggcctagacctgcagaagtcatcagctcttctgagattgcccattgttacttggttttgaatggtttattttcttcgcccagtgcctatgtctccttgtttatctctcctcttaattttccttagtttggaccagagcttcattacacctactttcttgcaaaagtgttggatgtgattcttggatggaaatataaaacattctaattgcatcctacagaaataaattgaatatgtcttgtatataagccatgcacattgcagtgattagaaagggggaaagaaattgggtgtcacatt

SEQ ID NO: 118766 - DNA, 1185 bp, Homo sapiens
gggggtgggggtggttggcaataaagctgacctttactgactatattggttttctgttattattgctgtaacaaattaccacaaggtagtagcttaaacgatactaatgtattattttataatcctggaggtcagatgtccaaatgggtctcagggagctaaaatcaaggtgtcagcagggctctaaggaagaatctgttcctttgccttttgcggcttctagagaccacctgctttccttggctcatggcctccctttctccagcagcgtcaggccaaatccttcccatgctgccatctttgtggttctttgacttctgcttccctcttgcacttttaaggacccttgtgattacattggacccacctggataatccagaatacttttctgttttaaagtcagttgattagcaactttaatttccctttatcacataacctaatatacttacaggttccaagaattagaacggatatctttgagagggtaattattcgtattctacctgccatattgatttatcacaattgccaaagtgtttcacacagtacttatacagtaaatcctcagtaactgttggctaccatcatttacagttatcatatcatttctattacttgcttctccttgcccacttcccccaactccccagtaatccagctgctatttgcattcaaatttaaggaaattagaagtttcactgttttgtgtacatttcggagggggagcaaacccagatttttgttgttggtattattgttttagattcacatgccataaaattcacttttgtaaagtacgtaattcattggtatttagtatattcagaatattcataaaattgtgcagccatcaccattatctaattctataacattttcatcacccccctcaaaaaccctgtaccattaagtaattgcttctcttctcccctcccccaaaccctggaaaccactaatctgttttctgtctgtatggatttgtctattctggacattaatataaatggaatcatacaatttgtggcctctgtatctggcctcttccacttagcatgttttcaaggcacattcatgttttggcatgtattaatactttgttcctttttatggctgaataatattccgtagtttggatgtgccatattttgtttagccattcattagttgatgaacatttgagt

SEQ ID NO: 118767 - DNA, 1002 bp, Homo sapiens
ctctgtgatggaaatagaacaatttccttcccagggaacttacgtcctaataggataaacaacaaatgaataaatatgtcaatgaatggccagtatagtaagtcccataagaaaagtaaagcaggttatggggttggaaagtgatgtggcgggaggggaactgtgattaccattttagatagagtggtcagggaaggcctctctgaggaagtgacagttaagtagaattgctgttcacattactgtatttatagtatttgctccttgacttctccctgcacattttggtggcttgtctcttgtgctcctgctatccttgtttgccttaaaatttgaatggagaaagagacggaatcagaaagtttttttatctgtcgctcagaatattaagttaggagttgaaatgttaaaagtctgaatttgtctttgttctgaacaagcatccttaccttggaaaactttgttcccaaaggaagggcactgggctggcaatcttgcagttatactttttttgatcaccgtaatcacctctctaagtccatgttagactcaagacaacaatagtgctaatggctgtcatttattaagtaccagacactgagcagggggatggggcgagggggtggttacagatgttttgtcatttacttaattctcatggctaactttatgaagtaaatattatgtctcttaattacaggtgagcacactaaggctttgatgactaaagtgactttatccaaaaccagacagctaacagtggcagagccaggattcaagcatagataaacttttttttcttttttttaagagacgagatctcactatgttgcccaggttggtctcaaactcctgggcccaggggatcctcctaccccagcttccaagtaggtaggattataagcattcaccactgctcccagctaagcttagataaactttgtaatttcaaagcatccattctttctagcaccattacatgcctgcagtggtagttaccac

SEQ ID NO: 118768 - DNA, 2203 bp, Homo sapiens
ggatgacagagcaagactccgtctcaaaacaagccaggcaaaatgctatgggaatccaaagggagaagggagataacttgattgggatttaggaaagcttagcttagacattgggaaagatattatttcacctgggccttgaaaaataacatctgtataggtctatgttatcaccagttaacagagaagagtgtatctaagaggagtcacttggtcacacagccagttgacagagaagagattataatttggtctgccttactctttactcaggatactgaccttcgtttagaacggcacaccagtaaagatttgttggccctttggcatctgtttgtaacaaagctaagtccccaattctgttgtactcctgaaacaatgtgaaattgaaggaaagagataaatcacagaagattagagtcagccagatcagccactccttaagagtcaaaagatcttgatcctgccaggacctccgttactttgtctgaaaaatgactatagatgccagtgtttttcgaacattcacaggcatctgaatcatctggagggcctattaaaacaaaattgctgggacccacccccagagtttctgattcaatagatatgggatggaacctgggcatttacatctcacaagttcacaagtgatgttgatgctcccaggtcaaggaccaaactttgaggaccttctctgagctcatttcctctctaatactctattgaaaaactctactgttagaatagaaattaggaggtctgaaccatgtcgttccacctccaactaagtattccaccttaagcaagacacttaacctttctctgcctgtttcttcagtagagtgcagctcgtagctccctgtgacttaggatgaatgagtgaattcaatctctcatttaaaagaaaccccttttgaaaaagaatactatataaattatcaattgtgcatatccatgtgtgaagtgaagattctgctttgacagaatccttgaggaaactgcagtctacctttaaagtaaaaagttaataggaaatgtctcttttccctcttctctatttaaaaaaaaagagaaaaaaaaggaagcttagtgtaagaagtgtacccatggagaatgtatttaaaatccaaatgacccataagggaccccatcctttttggcagataaaagtttccctgccatttatttgataaattaattaaaaagaacataaataaaagagaataataacttagagctatctgggcacctgagtctttgagccctttagggccttggcacccaaagagaagggggaaaaaaaaaacactgcgtctctgaggctttgaaagtggtcttccttgaggcattagagaagctctaggggccctaggagctaaaggactgagatgcctggggcatgagtctattagatccactaaagaaccaggaaaaaaaaaatggctggtaagtaattttgctatttcatttgatgcaaaagagaaggcacaacaccagaatattcagtgagcaaaagtacaaaatgtggcatggatgtgaatgcaggctgaccccttctcgggaatatttctaagcctaaatgaagcactcaatgctgaggacaatgtacaattctatgcattttaaaccgtagtgacccttttgtttctctgataggtgaagatgaggatgaatttgagaatttcatgctgcctcttacagttgcttttgaaacagtattacaaatattcaacaacaactttaaacaagaagatgtaaaggtgggtttgtttccaaatatgaggaatgacagttttgttttttctaggatatctagatccagaaaagggctttgcatatctgtgtgtactctttgcctcctcagacctgctttcccaattgcatgtctttaatttttacttttatttaagcatttttctagtttcttagacaaatggactttgaggtcagcaaatagttttggacagtcagttcatgataagatgacatagatttgtttcctctggcagttactatctttaataggatatttcttgtgggtacaccactttaaacacccctattccctcatctatcctgcactgttatgttacaacagatctatatggaggaatgcacaaacatacacatactaaaacactacatctctaaatatttttttaaacaagaatttatataaatcaagactttattaaatggctag

SEQ ID NO: 118769 - DNA, 1061 bp, Homo sapiens
atgcagatttcaggataaacttaaacattaaggacctgtgttgccaaattgaaatacagttgttagaggaggaaatgcagcaaaagtgttaaatttatagctttattttcttacttattcttaataaaattgaagaaaacattgaaattttgtcttgggtttttctcttcaaagtaaaggggaaaaggaaaaaatactctgacaaatcctagctttagagtactctttcaaaacgtatgtttccccctataattatgtccatggtaaaatatagtccagtactcccctgactcgtgcatcgtttttgatttggtcatgacatcatcagtttcaaggaaaatgaatgaaaacttctcagagaaagagaagcagttaaataggaacctgctatctttagtccttttgtaaaaactccacaatgttaaattatttaaaatccttgattttcagcatgcgcacattaaaagttttcgcactaagtgccaaatgttgcaaacagcactttaacagaatgattttgctttgatccctgtagcagttcctgaataatttatcacaggttattgccttaattctggagagggatagagcaataaaggcagatgaaaacactccagttgaaacaccttggggcctgctcattcctctgacacggctcttttgttggaactatttagaggttattaagatgtgtcttcagaattaagagtatgctgtaaggatgaagacagccatcttaattctaaagacaaagcacaatgacccttcaccttctttttctttgttgttattatatagtagaattatgaggataatattatagctgcccccagtagtgccactacagtaaagggtctgtgagactttccattagaaaccctgttttgggggtcagggtggaaggagcctcgtttcagctgtttcccagcccattcgtctcacacttggcacacagacaactgttcaccatgcagcagactgaagaactcagcagtttctccctaactacccaaaaaggaatccatagggttagatctccagacatatcccactccccaaaa

SEQ ID NO: 118770 - DNA, 1057 bp, Homo sapiens
gttgaccaactataggagagaggcaacttttaaaataaaactctttgcactattttaaatgagatggtaaactgtagctcctcctttcctcaaattcaataagatcacctcttacgctcaaattacttagtaggctggttgagctcttagttaacagctttcctttttcatatgggggctggatatgttttggctattgagaaaacactctctttagtgttgtttgtgtatccatgtagattattgcagtattatctgctgctttgagataaaagatattgtttgagcataagaaatctatttcttattcacattaacactgaatttttctgttcagttgaattcatttaaaacattattatatgcttcctctgtagtaacattttctagaatgaaacattgatataatttcatagccacattttgccactttaaaaaaaaagccaatagatttgagtcctatagaccacttctattaatttgatatcgtttaaggaatgaaaaaattgtgataaaataaaaattaatatttttgtataacgaggatagtctaaaatatttttagagccctttgtactagacacaaagaaagtaaaactcatggttcttgttgactaatttagacttaaatggtagatatctcatgtgtatgtggaagcttaaaattatttgaagcatagcctgaaacttgtaagtgtacctaataaaaatagaacaaaaagcctactttaatagaaacactgcaaagccaaggagtcagaatagaatagtttgaagaaggcttcttagaagatgtattttgttctggaggcttccaggagtgtgaaaagctgagaaagagaggaacaggcttcaggtggtgaaaaaaggctatataaaaaggcaaaatgtttaaaaacaagcagcaggttacatgagggaactacaaggaggccagctggttatagaaaaataagaactggtgagagtatgagaaaaaaaggagtaagtaatttaaaggagcagaaacaaaaattcagagttttcaagattcagaaattcagataaccatcattct

SEQ ID NO: 118771 - DNA, 1833 bp, Homo sapiens
agaagatgagaaattctagatacttctgagagttaaactattatttgctactttgaaattaaattaattgaatcagccattaagaggagggtcaggattcactgtttgcttaataataatttgaactccttcctaaagaggttttcatttattaccaaagtgtgagaaaggagaaaatctggtagaaaaaaaagttcagagaccattttctagctgagtatttgcaatgaaacagtatctttagaagtcacagttgtatatctcaattatcgcacccccttgttttgtaattatgtttatttgtgctctttgttccgacattctagcatctgttcatgggttttctttttctcttcccaagcatcaacctaaggacagcttaattaagagtccagagtacaagtcagatctcttctattcaagagtcaagtttttgttttttttctctaaaactaaatacttatggaacatttactgtgtatcaagctctgctaggcattttcacataaatttatcacatttatttggcacagtgcctctgtgagaaatgcattattagccccttttatagatgacaaaagtaagcctgataaattgccttgccttaagttttaaagctgggattcaaattcgagtcttatgacatcaaatatagaactcttttccttacatcttcctcacttggggaatgtgactgccattctgcgtatatcatagtacatgtaggtcacttggccagttttattttgtcctgaagttattaaggatattcattaggaatttttaaatgccagtgcctttctaggatagactctaaattatgttgtggggccgcttgcatgcaagccgatgttcaagatttgctgttattaaataatgtctagaccctgtacatatctgttttgtgtaattatcaatcctcatcttttttttcagatttggcattattcagaaacaaagtatattaagactctaaatgcttagctacactactggaattatgacttagctaaatttataagaagtaaagtggagttgatcagcagatttgatggtctgtttaaagagtctgtgcttttctgtagaaagaggtctgaacgagacattttagctaatgaatcaaaatcagatatgtggtcattattgcctgattattactccatctgctctgcgctaacgtgaaaatcaattactgtgtctctttcccactgacagcgtatgttgatcgggctggcaagagatcttcgagggattgcctttgcactgaacacaaagaccagctacaccatgctgtttgactggatgtatccttattacactgtgacaataccagctctgtgcacagagggatgccaggcccctcgctttcgtttaatagtatggcacagtagggaagaggaaacaaagctaaatgaactaatgtgtaatcagctaaaaattacagcacagtggcagcagagcagataactgagcacagtatttggagacccagctcagagaagtcacttttttggtgccgttaaatattgataacttaaaaatgacttcccccaaatgattgtttatgttggagttgaagggataatctggctaacatctttagggatcaatgaatcctaccatttgacatttttgaggggagatttgaatctccatctcaattagcaaggctgggaagatcattttatctcttcaaggcctaacccatcatgccacagtttttcattatcatgaagataatgaatggacatggaaagggaaaaataaataagtcaaggtttgtcatttggtgtaaaatttgaattgacctttgccaagggttagtacagacag

SEQ ID NO: 118772 - DNA, 1207 bp, Homo sapiens
tcatgcacatggtttttatctacatataatatgtacagagattatgaaatttcaacatggaaagtcttaaaattctcttaacagtgacagttaaactggaattatatatgacccttttatttctgccttttttttaatttttaagatacggggtcttgtatgttgctcaggctggactcaaactcctgggctcaagcgatcctcccacctcagcctcctgactagctgggactgtggtgctacaggtgtgctccactgcacccagcttgactcttttatttctctaaacataaagagcaactctcaaaatcaaaattttcattatttgaaaaataataaaagtctactttgggcactgtaatatcgatggtgatcttgaaaccagtctacaactctaggctatctagtgattaacatttcatgtttttctcttcaacagtttcaaccaagagtcaaggtcagaaaccttcccctcagtgtcaaagaagaactatctgccgtaattgatactgcccaaaatttagagaagatactgtattgttttccatttccttatttagctcctttgggggtagcgggggaacctttctgaaatgaaacttttgtccagcagatggcagaaaatagcaaacggaaaatcttgggacttaatgttttcttgtgaactagaaacctttgtctcctccatttgaccatagatgttgaagttatcagggtcaggggcggagagaagtgtcagttatgccagaagctgtgttagattgccaaatggggtggtttggtactggcgttgcttataataattgagtttcagtagcaaatcagcttccttgggaaaaggccaagggcttttcataattgtattgacaacaaaatgaatatgataaatggtgttcattcagttgagacaagatttatagttttcctttgggcgagggatgaagagcaaatatttataataatagtaaaatttgtttaaaagttatattatttgataattcaaaaagctttattaaaatattttgaaatactttaagcagtttcaggtgataaagtacagattcttttcaaagtattcaagtaatgcaaaaatgaataagtatgataaaaaaatgccatggatatgaaagtcatttatttttcctgaaatattgatatgtcaaaccgtcagtgatgatttccacattactgctggggaaagtttatt

SEQ ID NO: 118773 - DNA, 1916 bp, Homo sapiens
cacttaaactgtgggtcttgagtaagctacttaatatcccagaatcacaatttcgctttccataaaacaagactaataaaacctatctcacaggtatgttgtaagaagtgtcatgattctgtgattatgtaaagggcccagtacagtggctgacataaagtaaatactctacagctgttgttagttctgttccctgatacataatgagacaaaggaatcccatttgctcacttattcagcaaagtgggctaagggctgtgctaggttcatgaggagtatagatactaccccaaacaaagtcagtttcttatttacataaattactataatcaaatatagaaagtgctaagaaccataacaaagatacaaacaggacagtgagtgcatttagctggggaatcaggaagggctctctggaaaggtgaaggtgtttccttgggtcttaaccaaataagtaggattggaccatatggaaataggaagaaatacaggttttcggttggcctaggcatcaggtttagggagtcagtagtgaagatgttttgttacatataccactcatttcatggttggaaatgtagtttgtttgggactcttgaatatcagtctaaggaatttagacccttattccataggtagtataaagaaactaatggttttgattgactaagaaaatcagaattgttttcaagaagaaagtaattggcagtatcattttgggcaaactgaaatagagaagaaagtaaagctgaaaattcactgttcagcaagctatttttttttagttttatttctgtgccagacaaaaggaatgaaagaatgaataaaatgattgctctttagaagcccactctctagttgatcacacatgactaataaacaataaaatgtcagtgcgttataacagagatgcatgcaaagggctatatgagcatgtatgggaaaaagagcagtgctttttgcaagatatagaaagcttctcaagagaagtgaaagttgagcaaagccttgaaagatggataggcatttgccagacataagaggaaaggcttccagcagcagtccccttgtgaacaaaggtccagatgtttacatattcatggagtacctttaagctctgaactggcaagctatttctattctggaaccacatccccaaacccttgtctcctaacacttttaatgaaaattcttttgccttctggtattaacaactgatgaatagatggacggacggacagacggacggatggatggatggatagatattgtaaagaagcaaacttgatacttttcacattttcatatttggtatcctgtaaggcagtgtcacatcattaatgcctttgatttttaatttatctgatgtggaccttagaaattcatagagaagatctcagtgaaagcaattagatctgtgcttcttctacctaagggctcccattctcttcttcctactcatatgtacatagtcctcacaaggccattggaaaattaaactcctagagtgggttctggttctcaccctgtaattgagcctggcactctcactctgcagcccttttaacctctctattgtgctttccaataatccctcattttctctgtggcagtcacctctgtcagaagcatattagaattggcaccactctcattccacacagaaaaaggagcatccccttatatctccctgccttatcccgtagtgaatactgtgtgctctgaaaaatatcctggtcctaatgccattataggatgccttgcagaggcctatgtgtgcctctgatattcttaggttctgagatttgggttgaatccattttctcatgagccttccagatgcattcccactaatgagtttgtgctcaggaggtcccttggtggaatattttctcacctgtacccctgtggcattg

SEQ ID NO: 118774 - DNA, 1024 bp, Homo sapiens
tcaaacaatgcttgttatagaataggacttcagaaaatagttgataagaaaactgtttcagtatatacaaatgcagccttaacatggtatgtctgtctaataggagaaagtgttgctttttgcacttttaggaagcataccactcttaaagttatagatgccttattttcattgaacatcatgtgaactgttttctaaagctcccaagtgaaatacacaattaaatagttctaatcaaataagctacacttcatttttaggttgcaagtttatagcaacaagtatgtattgaaatctattttgtgtcaggccatgcattcaataagtacttagtatatgccctcaaaaagcttataataggagagatatacaagtactatgattgtgctagcaccgggttccaccaccatacacaggagacactcctaacccattagggagaggtaggaggcaagtgcatgtgatgtcagagaaggcctcctgggataattgacacctatattgaaatctgacattcaaatagaaattagcaggaagatgatagggtctctgctctttagaaatgcactatctaatggggcagacaaataacacaagcaaccaaccctaacatactgtgttgtaagagagatatggtcatgagtgctcattgaacatagatgaggaagagactgatgcctttggataaaatagagaaaacatcccatgggaggtaaaacttgagctaggtattgaaagacagggatatgttagagagaagaagtggtttataagggaatggagataagagctggcattagtggttttgcagggagttatgaaaagctaaatcatagagcagaaatgctaagagatgaagctggaggtagccaagaaccaaatcttaaaggaccttgaacaccgtgctacggagtttgaaatttattctaagagcaaggaagaaaattgtgatgacctcaccatggagatttctacccggaccacactgaaaagaaacaccattaagtgatttagttgagcattt

SEQ ID NO: 118775 - DNA, 1061 bp, Homo sapiens
cagagcattcttgcaaagaaaagccagtaaggagttttcttacacggaagaaagatgagattagagtaaggctctgctcctcaatttagactaatagtattggtagctttcactttgttataagcttttatagtcctatattagaccatttaccatacattaccctgttgaatcctcaaggtaggtattatatgctactcactagttaatatgaccttggttaagttgtaagcctctcttgcttcagtttcttgttagagaaaatacttcatgcctcaaagacatggttgtgagaattcagttaggtaatgtatggaaagcccttagactagttaacgactgtgattactgttgtgaagaaattgaagctcacagaggttaaaaaaaattgccaaatattacatagctagcaagtagctgaattggaatttcattcagtcatactgacagtggtcttttcatattctttactgcctcttgggagttgccaaagtaagattttaccatggatatttatgatgaagcactgttctttaaagtatggtgatttctatctcaaaacttaaaggaaatcaaagtttcaatgaaaaaaatgtccttcaactgggtcaccagtgactttgacagtgactttgatacatgcactttacatagaataatagaaaaatgtttcttaacctctactgattctcttgctggtccacatcagccatctgatttgtctgtctttaccttctgtaatgttttattacccaggcttttacctctggaaattctaatatacacattggaggaagatcatgtagttgccattcaggagtctagaagatgagggaaagagtgactgggagggcacagaagagccagcactgtttatctctttggtaagcccaggtgaaggaaagggaagccagtggaggaaagaggccagaacattctgtgatcccttctgtttccatcctcactgggttcttctctgatcacctctcctgagcagtttttggttatgatcagggcggtgcagagagggaaggaagcatttccaaatgcaactgacttgt

SEQ ID NO: 118776 - DNA, 1023 bp, Homo sapiens
gggatttagggacatgttgcattattagagtggtcaaggtaggtctcattgaaaatatgacatttgagtaaagacttccagtaaatgagggagttagtcacgtggattccttgaagaccagtctaggctgaggaaacagcaagtggtagagtcttaaggcgggagtgtatctagcttgtctgaagggcagcaaggaggtcagtagctgaagcagattgaacaaaagggagagtagtaacaagaacagtatcatataaggcctgtagcccactaacatcactttgactttaactctaaataaaatagagggcctctagaacatattgagcacaggaatgacatgacctgacctaagtttttaaaaaattactcacgctgctatattaaggatagactatagaggattaaagttataagcagggaagtcagataggacaatattgcagtaattcaggcaaagtttgatactggctttgaacaaagtaatagcagtgggagtggtcagattctggatatattatgaaagtaagacaaatcaaatttcttgattcattgggcaaatggtaggacagaaaaaatgtagtcaagagatttgagcacaagcaactagaaagaagtagttgccatcaactgagatggagaaggctaagatgggtgtgggggaccaaagttcccttttggttatgttgaatttgagatgtccattaatacccaagtagagatgttgaatgccaatatggatttttgattctggagtttggaaaataggtctagggagtcctttgactcatagatgatatttaaagcgcagaactaggtaagaactaggaatgagtgtgcatgcttcagcacacctactacaactaggggtgagtgtaaatatagaggaagacttaggtttgagctctggtgcactccaatgttggaaggtaagaaagaaggaactggcaaagaagagtgagaaggagcaaacactgaagaaaatcgagagaatgtgtcttggaagacgaggtagtcacctat

SEQ ID NO: 118777 - DNA, 1052 bp, Homo sapiens
aagtaaaggaatgtcagcaagttgcagttctcttcgcataactgctccttccaatgataagtgaagacattcagcctgtacagttgtcagctagctatcaaattcactttaaaattttagagattaaaagagaaaaagaaaaggtaaatcaatgtgattgattgctttgtaagccaagaaataacattgtttatactgttagtttctcctggtataagatactacggtggtatatcttatcccttgcatcacttttctaagtattttgaggcgtagcaaattggtggaatgggaagcaaatagcaaaactgtaatcccctgcagctaattctctattgaagaaacacaagaggctgtcaaatgatagagtattgaccttactttgaattgtgtaaatgaaaaggactagagggaagtgacattattttataccgcacacactcagcttcacctcctcctctttttgaggctatagttcctccaaatgtgaacttacaggaaaaaaaaaactgagccccaagtactgtgtattgtcatagtttacatttatagagcactgtgccagctactttacatatgctgtctcctttactccacgtaagagccttgtgaattataggtgttattatcctcattttgtagatgaggaaactgtgaagtacacaagttaataatctgctcagatacctagatagtaaggaaagatctaggattcaggccaggtcagtatgagtcaaaagcccacactgtaaatcagtaccttctgtactatatgtttatcttctgttacaatattatcttattatgtagttctccagctgaggcctgtgaaagaaagccattcttctttgggtaatgggagtctcttctgaagaggaagacatcctggagtcagtcactcagcaaaaaggatgggtctcaggagaaaaaataattttaaaaaaatacacctgagagtcggtcgcagatgagcaggagatgtgacatcttcctatgtgtatccctctttaaaagtacatcttgcaagttgtctagaagggtacttctgagtg

SEQ ID NO: 118778 - DNA, 1234 bp, Homo sapiens
ggcttttaatgtatgtgattattgagactatcatcctacaaagggggaaaagatattgtgaacccaaactgaaagattataattattacttgcaagtgggaaaaatgtatttcttcatattttgatacatagtcagttatgttttaatcagctttactgaggtataatttacatacaataaaattcagtgactttaagtggatagttcagtgagtccttgtacaaatgtgtacatgtacacaaacataaccaccacgaccaatatgtagcacatttttatcaccacaaaaagctcctttttttcctccttctaatcaatcccttccccctacctctcaccccaggaaactaatgctttctctcacaatagttttcttttccagaattacattcaagtggaattgtataatatgaagttatttgcatctggcttctttcatttagcatagtgactttgagattcattcatgttattttgaaaatcaattagtttattcctttctattgctgagtattattccattgtatgtattattagtttgtttattcaccagctgatggacatttgggttactttcattatttgactattttgaatacagctattatgaacattcctatacaagtatttatgtaggtaaattttttttatttctcttgggtacatacctagaagtgggatttctaggttatatgctaagtgtatttttaacattataagaaactaacaaactgtttcccagagtgacagtgacagcattttgctgtcaccaacagtatatgaggattccagttgctctgtatactcactaacattattaacatctttttcatcttagccatgatagtgggtgtgaagtagaatcttcaagttgactaatcttttcttctgtgatacctaatattctattaatactgtatttggggctgggcgcggtggctcagcctgtaatcccagcactttgggaggctgaggcgggtggatcacctgagatcaggagttcaagaccagcctggccaacatggtgaagccccatctctattaaaaatacaaaaaaaaattagccaggcatgatggtgggcgcatataatcccaactactcaggaggctgaggcaggagaatcacatgcacccagatgcacccaggaggcagaggttgcagtgagccgagactgcaccattgcactcagcctgggcaacaagaatgaaattctgtctcaaaaaaaatattaa

SEQ ID NO: 118779 - DNA, 1326 bp, Homo sapiens
ggtttatgtttttttaacattgatcatatgtataagatttataataggccaggcgcggtggctcacgcctgtaatcccagcactttgggaggccgagctgggcggatcacgaggtcaggagattgagaccatcctggctaacacagtgaaaccccgtctgtactaaaaatacaaaaacaaaattagccgggcttggtagcgggcacctgtagtcccagctacccaggaggctgaagcaggagaatggcgtgcacctgggaggcggagcttgcagtgagtcaagatcatgccactgcactccagcctgggcaacagagcaagactctgtctccaaaaaaaaaagatttttaatagctgttttaaggtccttgtctactgatgtgatttctggatctgttcctatggatttttctccttatgggtcatgtttttttcattcttaatataacttgttatttttgaatgtgtgccagacatcatgaattttacatgttgaattttatttctgtgctagattttggtttttattttttggagacagagcttcgctcttgttgcccaggctggagtgcaacagcacaatctcagcccactgcaacctccgtctcccgggttcaagtgtttctcctgcctcagcctcctgagtagctgggattacaggcatgcaccaccacacccagctaattttgtttttttagtagagacggggtttctccatgttggtcaggctggtctcgaactcccgaccttggatgatcctcttgcctcagcctcccaaagtgctgggattataggcatgagccactgcacccagccaattttgatttttttaatgtggattttattctatcctgcagttgaataacttttggatcagtttgactcatttgagatcggatggcaactcttattttggagtaactgggccccaccactaaagtgttaaccttatgacattccagtgctccatgtgttatgaagttcctccacaaatgacttccagcttgtaatcttcaggaattatttggcctattgcttttcagtggttctttacccagccttgggagtttcttctcatactttttttttttttttttttgagatggagtctcgctccatcgcccaggctggagtgcagtggcatgatctcggctcactgcaacctccgcctcctgggttcaaacaattcttctacctcagcctcccaagtacctgggattacaggcatgtgccaccacgcctagctaatttttttgtatttttagtagagacagggtttcaccttgttggtcaggctggtctcaaactcctgacctcaagtgatcc

SEQ ID NO: 118780 - DNA, 1540 bp, Homo sapiens
gacgaaggcagtggcggcccagcgggctcagtgtgtgggtccgtggcggctcggggtccacccgcgggctgcggtgcgagcaggtggccccgttcccctcctcccgcgcccgcccccgcctctgtgattgggtggaagatggtgctggccggatgtaaatcctaatgacagtctccaaattcgcttccatctgtaccatgagtgccaatgcttcggcattagagaaggagattggtccagaacagtttccagtgaatgagcactattttggattagtcagttttgggaatacctgctactgcaattcagttcttcaagcactttatttttgtcgtccatttcgggaaacagttcttgcatagaagagtcaacctaggaaaaaggagagccttcttacatgcttagcagatctcttccatagcatagccactcagaagaaaaagttggagtaatacctcccaagaagttcatcacaagattacagaaagaagatgagctttttgacaactacatgcaacaagatcccccatgaattcttaaattacctactaaatacaattgctgatattttacaagaagagagaaagcaagaaaaacaaaatggccgcttacctaatggtaatattaataatgaaaataataacagcaccccagacccaatgcgggttcatgagatttttcagggaacattaactaatgaaaccagatgtcttacttgtgaaactatgagcagcaaagatgaagattttttagacctgtctgttgacgtggaacaaaatacatcaattactcactgcttaagggctttcagcaacacagaaaccctatgcagtgagtacaagtattactgtgaagagtgtcgcagcaaacaggaagcacacaaacggaggaaagtttaaaaactgcccatgattctagctccacacctgaagagatttaaatataaggatcaacttcatcgatttacaaaactctcttaccaggtagtttttcctttaaaacttagtctatttaacacttcaggtgatgccaccaatccagacagaatgtacagccttgttgctgttgtggttcactgtggaagacttatttgtagacttgcttcatatgaaagtgtggagggtgtgtgcagcctcattgtcagcattggtcccagtcgaggccattgtattgtaatagttaagagtcatgatttttggttgttgtttgatgacgacattgtagaaaaaatagatgcacaagctattgaagaagtctacgggctgacatcagatatctcaaagaactctgagtctggttacatccttttctatcagtctcgggattgagggggaaccgtgatgaagagatactttctgccgcatttcttctctggttattttggaaaggatcaagcactgatttttcaagaaaagagaaaatgcaggaagctctgggggcagtagcacactttgcacacgataaagcaaagacgatggattgacaagcccttccgatcacagtagttgatttatttgctcaggtatcatgctgtctgtac

SEQ ID NO: 118781 - DNA, 1001 bp, Homo sapiens
tgtctggaaaatatcatgatttgaatctcacatagtagcttgagctgcaaataaagaaaaccaatagttaacacatagtcttcagcaccattcattctgtttttgaccaaatgccctgtgatccttatgattccacactttaaaatctaccttgaaaataacatttatctttttcaaagtcctcaaccataaatcaaccataatggaagctcttcttgcttttattgcgaggatatatgctccaatcttcgtggctaaagtgtttacctggctttttcacagctgactcagtagatgggaaccttttaatgcaacctgcatggcatgtggtcaccaaatctatgtgaagtctttataatttttatatgattgatagcatattgcttttcactggtgaggggaaccatatctgcttcctgcttatctttgtagatgtcgagttacataatccatttactttcgtgactgggacttgaaatgtagaaatatgaaggaaaagagaaaagcaaccaggctcaacaagtctgtatttgacttttaggcctagacattttccatttatactatgctacatcccagagttgtaaaaccaaagctcccttttctacaaagtaacccagttaatacggagagatgcagaagaaattaactaattaatcagttattgattaatcaatcaaatgccatgtctttaggagggaaagctctatttttggcttttattatttttaattgacacttgataattttttatatttatggagtaccatgtgatatttgatataggtatacactgtgtaatgaccatttagggtatccatcactgcaaacatttatcatttgtttgtgttgggaacattcaaaatctgctcttttagctactcaaaaatatataacaaattgctcattatagtcaccttattagtgctacagaacactgcaacttattcctcttatctggctatacttttgtatccattaaccaacctttggaaaagctc

SEQ ID NO: 118782 - DNA, 1007 bp, Homo sapiens
ttcatcctgttttcagttgttttcttttgccaaattacatccataatagtttgtaatttgcaaatgtaaacacatcaatagtgtgttgctatatgaccgttagggagcaaataagttgcctgcaatcatcagaaaatgttggccgggcgcagtgactcacgcctgtaatctcagcacctttgggaggccaaggcaggtggatcatgaggtcaggagttcgagaccagcctggccaatatggcgaaaccctgtctctactaaaaatacaaaaattagctgggcatggtggtgtgtgcctgtattcccagctatgtgggaggctgaggcaggagaattgcttgaacctgggaagcagaggttgcagtgagcgagatcacaccactgcactccagcttggcgacagagctccatctcaaaaaataaagaaaaagaaaaagaaaatgtcactctatatcagtaaatgatgaaaatagaatgagacagctatgaaagaaggttccttcctggctgccattttttgctaatatttaaatgaaattatgtaaactttatttgtggtaatgtttcagttaaccaattattttccagggataatggatgtcattcatattttgtgtaactaggcaaagggctgtagacttataattatttggtgtgaccctggaactgttacaacatgttggtaatataaaggaaaaaggaaggtatctcacatttagtgagaacttattatgtgtcaggtgcaagagctattaagattcacgagatataatttctctccttacaaaatttcttgccatgggacaaagagacaagtaactcaccagttatttgatcatttcattaatatagtgatgacaaagaaagtaaaattcaaggggagggagtattgtcaaagagttctcctcatttagaccccacaacaaccctgaaaaatggatatcagcatccccattttacagatgaataaattgaggtacagagagatcaactggaaagtggtagag

SEQ ID NO: 118783 - DNA, 1129 bp, Homo sapiens
agtaatgtggttgggcaggagacaaatcaagtttgtctttactcagaattagcgtgcatttgttggtttaagtaatttctgtgtgttaataatacttgttaatccttcactttatagcatatgactaagtagtgatatatctttattaacagtggaatactttctatttatttggaatgtaggctttcagatagcattttaaatattaatgactgggctctggtagtcagcataaatatgatttgcattagcactaggttatatcatcttgagtgcctctgatgtcagctattaggtatagtaatatctgacatcatctccttaggttactgacaactttgacctctattcttatgcacagtttctgtcgtctcaaaagctcttttgaattgatttgaaattttgactcttccctttatgaggcagtaaaattgataattattcagatgggaacagagtgctgagtgaaaaatcaattccacccgctctctgctgcgtataaaattacttctgagtcggctggactgaacggatggccagagtaaaagcggcaggcaggagtagtgggaagaattagctggacagaactaatagcctgaagggatggacttgaaaaagagggagtgggccagttgggggttattattagcagggatgggtcccattgatcatctgtttacatcagctttccaagaccttataaatcagccctgaagaggagcagaacccaagattcagcctgttaccagtgggattttgtattggattattttcattttcacactcagatgaaaagtgagccattgattattcattggttgcccattaaatgctgtttttaatagatgatttgcctattgcagaaggtaatgaacaaggttgctgctttataacttgaggtttcagttttcaaggcatctgtgtcggttaagtaatgcctaaccctattaaaaggaatggattacaaattgcttaacagtgctgaaaaactagaccctaatgactaattgtgcttggagtttagagagggtttgtcagctctttaaactaaactgatgcaatgatactgcaattatttactagtttgaactgtttttccccccaacctggtcctattttgctggaagca

SEQ ID NO: 118784 - DNA, 1091 bp, Homo sapiens
tcctgaaagcttctctaaatcagaattccagttaaaactaattgctctagaaagagtaacaccttccacagaaattagcaagaactattacgcaattaatttgttaagagtgtatttttagcaattatcgtcttgaaaaccttaatatattgcataaaggaattagagcagttagggttgaattcatcttactcttgtctatttatctattttgctcaaatcaactgtactgaaatccaaaagaaattctaattgtgattttctttctctcccttttctcccttttctccctcctttttatgttatttctttttttttttttttttttttttttttttttttttttttttttgctaacatggcatttaactacaaattgtgaagagctgtcaggagctataaaaatcatacttcagtagggacttaagctgaaagaacattcacccttttcctcaatcagtcagtcagtcaatgaaaattgcttttgtatagtgctcttcatgacatgcatcccaaagtgaattacagcaaaagggaaatcatctgctcttttttcatttctgtgtttagactgaaatgatattgctcaacattttgacatactaaccaagacatctttcatacttaagattccattccataatactgagtaggagaaaatgcagtcgcatatttaactgatgttgagattttggcctacaggaaccttagcaagactattacagtcaaaaacacttaagcagatgaaatacagtcatatctcttgtcctcttaaaaagaatagtcagattttctaatgttaataaagacatttccagtgatccttaaataaaaaatatgctctttatgtaacccattagctctctctggttgatttacaactttattctcaataatacagtagtatattgatatcaaaaacaaactgaaagaacattcacaactggatcaggtaataacggatttaaaaagtttaaaggaagccagggatatgtcattagacactgaaattggaaaataggaactcaaatttcataacagaatttttgcacatggtgctacaatcttggttttaacagcaatcaatgcat

SEQ ID NO: 118785 - DNA, 1022 bp, Homo sapiens
ttacctatataacaaacctgtacatgtaccccgaacctaaaataaaagctttaaaatttagaaatttaagaaataaaatttttcaaatgtaagtgcttactatctgcaagcactagcttaacttacttacatatgcattatctggtttaatcatgacagtatctttgtgaaggtgtagtattatcattaccattttacagatatagaaactgaggcacaaaaaaaaataggaaacattcccaaggtcacaaagtcagtaactggaagaactaaaattttagctgaaatctgtttaactgtggggttcacatgcttaaacacaaagctatctctgttcctttgtttagtggcttctaatctaaagtatgtatgttttgagcacataaaatgaggcaagttgagcttccagtaagtcccactggggccatccttaaggtagaatggtttaaagcagtcattctataccccagcattatactacagccaggacaaaacagatgggcagtgacccaaagaggcagcgggcaagagagaaggaagtggctttgcagttgctgcagaaaaagccctgtggctcccaccaccaccaagacagacctaaccaagcttccactttcttacgctacacccacacccattcattaattttatagccagatgttgaaggtatataatttagtaggacacgtagtcttgagaaggtcagaatctagttgtacagctgtgttataatgccctttgtgacttttctttaatgcctccgaggtagctcttgaggtttaacctgatttttccaggacagaatcaatatggcagctgtgaaatgatgatagggaagcaccatgtgctttgcatctctctcccgtatccagcacatctctcttcattgtcctgactttcaccactgattcatcagcatagaatgccatttttaacctctttctggttgtaaactgcttctgttttctaaaggaaatttctgctgttgagtaccattaactctatcagtggtcattcttaag

SEQ ID NO: 118786 - DNA, 1012 bp, Homo sapiens
cagtttaaggatgtaacccattgatagcataacttgccttattaattgaaagggatggaatccaccagatgtacccaaaccagcagagagttgggtgactaagcaacagcaaagacaccatattgagtgagccagaatccagtctccaagtcatttatttcagccagtgacaatacatttaaactcctgtgcctcagcagtgattgatggtttaatatcatatataatttttttaatgaaggaaaaccatttaaatatgttaccatttgcactggtattctcctatgtacataactgcatttaatcattatggggattgtttttatacttgtgtaatttgtatccaagaaataactgtcaaagtcatctcatgctgttgctggaaatggtacagtgtgcttcatacttgaatagattcattcttcctgtacataattaagagtattggagctttcactattaccacataggaattccatgtttacatttcggagaatgaaaaattagccacaatgtgctttttcaggttcccattttctgaggctatgatatttaagcaccttagttttgtgccagtgtatgatttgaagagtttgattttaagacttttaatattaaaatacataataaaattttattgtctaattacaagagggtttagcctcttattaaagttgctaaatcaggcctagattagcattataatggcacagtttgacatggaatactcaaaagtcaagttcgagggagcagagggtttttttgttgttgtttttggtggggaggttcccctacccccacccctcacacaaaataacatggatgaaatgcacgtatggaaacaaacaaggagcaatttggaacgctgaagaaggagtggaggtgtcagtctaggatggtacccttaggcaaggcagctggtatatgtagccttttgtttatctgctactggtttatgtagcctttaggccggcaccagaaacaatcactcctacagggtcagctgctggtc

SEQ ID NO: 118787 - DNA, 1235 bp, Homo sapiens
ttgcttttatctgttgacattcagtgatttttggtttgtctttttttttttttcttaagaattctcagaaaaagaagcactgcagagaacatctgtgtctttatgctaacataacacagatagcagcatttatgtctatttcacacatagaagttatttaggatttcacttgcactcccaagttttgatacaagtgcagcctttctactcttattgtttttatgacataagaaaatgacacctaggatcgtctccctgcatcacacgaagctagcctaagacttaccagacagatcctaaatctgtatgactaccacaaaaaggatggctaccttggccagaaaataatgattcagtaatgttttcttaccatactattccaaagaaccttcatacatccttcttgaagacctaagcatttccttcattctgtaacagaagccttatttcctgcagggtttctgggacataagatgtcgctatagaaggaaaacctcaggctcgaacagagaattttaataagaatgattatgatgaaaaaaaaaaccactagaatcaattatatgctaggctgtgtgctaagtgccttacgtatacatatatgtatgtatatatatatatatatatatatatatatatttatgtcttacagctctgtgaggtaggtattttatctccattttgtaatcaaaatattgtaattatagctctgagaagttaaaaaactcacccagtatcatacagctaataagtagcagaacctgtgctcttaaccactgtacagtactattaactaactggcctagaaacaggattggcagtgatggaagagtggcaggaagagccatacagcattcttcaatcaagaactgaattgagtcttcagtccttgagcctaggacttctttctttttttttttttttttttttttttttttttgattttttagaactgattggacaggaggtagacatttgacccaagctggctcagtttgagtcgttcctccctagatttagaaactggcacttaacagatgctggttgccaggcacagtggctcatgcctgtaatctcagcaatttgagaagctgaagctatttaggatttcactaaaagctgaagcaggaggattgcttgaggccaagggttcctgaccagcctgggcaacatagcaagactctgtctctacaaaaaaaattaaattggccgggtgtggtggctcacgcctgtaa

SEQ ID NO: 118788 - DNA, 1838 bp, Homo sapiens
ctactaaaaatattcaaaaattagctgggtgtgatggggcatgcctgtaatcccagctacttgggaggctgaggcaggagaattgcttgaacccaggaggcagaggttgcagtgaggcgccattgcactccagcctgagactccatctcaaaaaaaaaatttataaagatgctggtcagccactagtcctcacctaaattgaagacgtgaaaactcaagagccatgaggcagccattccctgccatatgctcagagaaatagccagtcctagaggagagaaaaaagaagcagacatgccgaggatctcaaatgagaggccaagcagccccagagaaagaaaaagactgagaaataccctgccagctgccttgtccatggttccaagcccttgagagacttaactgcactgccttgtctgggggtgaaactaccccttatagacttaagttttatcagagaccactcttgactcgggagagttgtgaggacaaaatgaaccaatgagtatagacttacctaacacaaagaaagtattcgataaacacgtaaaattcgccttcactttgaaaaacgatatgcaggtaccacttttttgtgtccttgaggggaaaatatccctgctatttatactataaatgtgaaaaataccctttcaggagattccaagcccaagacttcttttcaaagataatttgattttgaagccatatcactgagatctttcctggtcccatccctgtgttttgcctttcttaatgttctttctgtgataagcattctcaaaatcacactcactggactgggtgagggcatggtgtggtgtgagtttgaaattcttggccccaaactgacttttttcttacctgttcctcctgcatacttcaggcattgccttgcagtggccaaaatgaaataaatctaatttcttagtccattatgtgctattatagcagaataccgtagattgagtaatatgtaatgaacagaaatgtatttgcctcacagtcttggagactaggaaacccaacgtcaagggtctgcatctggcaagggccttcttgctgtgtcatctaatggaggtgggtggaagggcaagaaagagcaccaggaggccaaactcaacctttttataaagaaccaatcccagaataatggcattaatccaagcatgaaggcagagccctcatgcctaatcacctcttaacgctgttgcattggggattagtttctaacatattctttttgggggacacattcaaaccatagtacctcataattcttcccattcatataatgtcttcatacctaatgtctctgattctcacaataaccctaacagggagataaggccaacacggattttttttttctaactgaggagtctaggtacatcaacaaatttaatcctgcagtgactgtatgagagacctatgcagagattcagagatgtgtgaaagaacttgcccaagtcacacagctaggaaatagtagcatctagattataattaaggcttcttatcactagatctcacacagtttttataataccacactaagttttcgcagggccttaacctactatttctctgtggcatttcttcttaccttttcatccctgtctaagagagacagcagagtaaatgagaaggtttcccctgccttcatttctctgcatggaattgtgagtggtgtgagaagctctttgaatttcttcaaagaatggcacagtataaagtaagagtgggcttaataaatcacatgacttatttattttacagttattactggtttttcacatacttgcaggttagattatgtgattcccaaagtgtagtgt

SEQ ID NO: 118789 - DNA, 1029 bp, Homo sapiens
ggcgtgagccaccgcacctggctgaaagctgcatcttcttgggaaaaatcagatggcccagacctcctaaaggctcagaccctgtggagaatggttaaaccagcagttcactaccacatcactgccagaaagatttattcagctttaatggcaccccatttcctgcacacaagatctgcgcccaacctatgtaatcaccctcatctgccaccagtactccccatccaccctttccattcccacagaactgctcctcattcccccagactcctctccaaacctttgcacctgcttgcccttcttcctacctgactgtcaaacttctcttattctcaacaacagatccaaatgtcaccttctctatgaagccatccctggctgcttccagccctaggcagggttagcctcctctggtttctaaaagccccttgtgtaagcttctgtttatggccacttaaactgtatcttctgccattgtttctatactgtgtatctcctcccctactcaactgtaagctctttgagggctgggactgtgacttgttcatctgtatattcccagggtttgacacagagccttgcccaaattaggtggtcagtaaatgtttaaatgaggaatgaggttctattcccaacgctttcagtcactagcattccttgggctatgtaattattagggaaaaagagcttccaaatctcagtagcgtctttgaatcatctccctggcctcttggccagcactttctgtgccattagataactataaataaaaactctcaaatctgaaaattctgcatggtttaaatataaactctaatacttaatggaaaatatttctgaagggtcccatgaattgtccacaagaataattttcccccatatgaaaaatgaaaacattttggatcctttcgtagttcatgagcatgatgattgggtgttcacgtgcatatgtgaaccctaagcagtgtgcatatccatgacagagataactataagcacatgtttgtattattcagtaataaactctaa

SEQ ID NO: 118790 - DNA, 1036 bp, Homo sapiens
agctgctttatgagatctgcagccacttgaaatatgatttactactcgtaaaaagtttcaaatggataatgaagattcaggaatgagactcacagtggtgtagtgtagtcaattttgttgctgttgctccacagtacatctctgccattgaaatgaattatttatcataatttatttcaaccatggaaaataaaactgctttcattgtgatgtgtgcagtaacattcagaatagacacattacatgcagtactctcaattaattaatcctgaagtttcattctaactttatcttctttcttacaagctaggagactgacaggtaattctttccccagtaaactgtgattaaaatggatgttttgagaactaggggtaatgttggtaatagagtaaattgaaacagcaaaactaggttgtgtttttccttagatgtaacaatggttggaagagtttcttaatttttgaagcaattaatcactttgagcaaaagcatcccttagctttccgtaaggaggggatggcagagtgggggatgcttttagttgagatgtggaagcatgcagtgctaatatatgaccaaaaccagctgagtttcctggtcctgaggtgcttttgaggtaaaaagcttctttttttaacagcaagactagcattgtgcaaagaacaagttggcagggatccccagtgattccaggggagagcaggtcatctgtaattgattgcagtcttgtttttttaaaagagaggtgcacctcatcctgcatttcatttgacttttttttaatttaaaatgctaaatacttttattataaggctacaaaaacactataagcagttagtaatgttatttttatatatagataattttaaaatttaatgtaacttagatggtagaacttagttaatccaggcaggaaaatataactaattatatgcttatttatccattatgttcatttttcatagcattccactaatatcacataggcgaatagcagacagagagaacaattgatttcttttccctaaagata

SEQ ID NO: 118791 - DNA, 3106 bp, Homo sapiens
tccagcctgggcaacagagtaagactccgtctcaaaaaaaaaaaaaagaaagaaagaaaaagaaagtatgacacagcgtatttgggtaggaaagtccaatttgctttatgcttgtgctttacatcccatgttagggtagaagaataagagaagagttggggaatgaacagagatacagatcacacaacattgctttgttttacttttccaggtcagatatttgtagagtaattttgtgttttatttagaattacaggttttcagaacaacagaaacattgtcattcaaaatccttacaaataacatgtgccagatcaaataaggatgctttctgaactgtttcctattttggttgtatatgtgtctgtgttttaccttaaccctcaacaaagttagatagttgtgaagagactataatctcatttatctgtatctaatcaggacatgaattggggcccttcattgagcgatgaaattccactgggctagacctgagagagtagctgcagtagcagtgaaggagcagtagattgaatgcctactatgtggcaagcacagtatcaaatgcttgatatatatcagagaagttattcctcacagcagccctttgaagtagctgttattgtcctccattttatatgtaaagaaagaaaggctcaaataagtgaaatgactcgcccaatgtctcaagttaagtggcagggccagattggggctccattctgattggctccaaagcctggctttaccataccacgttggtttctcttcattgagagaaatttcctaaaactcctgccaaatcctgtgggaagaatggaggagaatgaggaagcagctgaggcggtgtggggcatgcttttcctaagtggaccaagtcatacaactctgcctcagaaatgggccctttcctggtatggcagaatagctgctcagggtaatgcagtagatatcgtatgtgttttcagacataggccctagaaaatgtagcctaggttgggcacatttgtttaattttattttatttagatatagacctccagaagctgggcagatttgaaacagccattccagccatccctgtagcagtattggaagtgagcagaagttgaaggattggagccccagctcacgcagccattccttgtaccaaatactgatggtaccttgtgactcaccgtgggccgggtggtgcagaattgccaagagctgtctccttttagtattcctgtatttgtgtcgttaaccacagaaagcctcccaccagagatttcatatgacctgggaagtgattctgtgcttaagcatttcatccagtattcttccacatgccccttctccagaggaatttgcccccattggttggctgtttcccccataccctactgtaagatattacaaaaaataattctggatatgggttgccatgtcagtaccatttaagctgatttgctcactaattttcgtatttccaaaagaataaaaaagaaaaaaaaatcacccattttagcacagtttatttttagaaaagtgttttattcaaacatatccttacttattacagacataaatacatgcattcagacaaatgaatacacaggagaaccatataaagtaattggcacatcacttcaagatgctttttcagttactggaggaatttgatgcctctaactttaatcttttccattaaaatatccgttctgccttcagattgtgaagcccataatattttagactgtctagatggatctgttagttttgcttgtcagtttaatttgtggctctatgactttgggtggcttgttagattgtacatggaaactcgtgatctgcaaatgatgttcaacatcccaagcttaagtcctctccccagagagactggacataccataaatatgcaattggcagatttcatttgcaaccagcctaattgatatgatgatgtatagaatggcagacgtttagaacggcaaagaagctcattgctgttactatatcccttaaatgtttatagcactttttactctttgcaatgcattttatgtacactatctcatttgattctcagagcttccttgtgctggattattatttccctccttatagttaatgaaactgagacacagagagaagttcagtaacttgcctgagatcacaggataaattggatttcaaaaaataccagaggacaaaaccaactgtgttccaaacaagccaggccaccaaagcccagtaagggatggtgtgtgcagtggtctttgccacgtaattgccgtttcccctgccctcttttggggaaaggagttctggagctgtgggaacagaagagcttagaggtaggaggtaaagagtccaagaagcagaaactatcatcagctccacatgaatgacagaaacctgtttcacagccacttgcctggactatcgcagcagcctcatccctggtctttctcctttagtttcacctgcacagtacacattctacatgtccccaaagagatctttcttaaatgcaaatcagagcatgtctcatctgtgctgcaaacatatcactagctccccactaccatcaggatgaaatccagattcctcagcagggtcttccagtctggcactggcgtctcacctctggcccacctctcttctctcctgtcatgctaagtttcttaccatggcagaaccctttgtgtgcatccccaccctccttttttgatgccttctttgcttagaacacatttataatgaactctttaaatgttaccttctccgtgcagtcttccctgacttctcctcaaggacccagagtcatccctgcctcctcgcatgcccactgcactttgcccagccctatttcctgttatttctctcctaagtagtctcccccaggaggtttcaaactacttaatgtcagaggttgtggtaaatgcctgtataatcttatctcccctatggatcttacaggctgaatttaagagaacggatgagtaatgtacatgtaggaatgaatgagtgagtgagggaattagtgaacgaagagtgaagagaaacctcgaacagcctaagccagcaggaaacatgatgttccaggatcacatggaatgtg

SEQ ID NO: 118792 - DNA, 1071 bp, Homo sapiens
aattatgtgtgttttttgatgtaagctgttttaatgtatgatggaaattaaatatcatgcttttggggctgggaagaataaatgcatgactggcaaaatgttgtctttgtgctgaaattaggctgtttccaatgattaggagctgtgtttagtatcagaacttgtgtgtgtataaaagcccacagtcctcagcagagaagaaaaggctgtgcaggtgtttgtgagcaggcctgacagacattttccttagtgccacaaagctctccccaaactaaagcacgcccctctagtaccccacctcagaggagtaaacccattctaacccccaaggacagagacttggaaaaaagcccaaagtcatttaaggagtgactcactgaagccaggaaagatgataaggcctgaggaaagacccttggccttgccttcagtcacttaaaatgctccctgggcatttttagttattttcttcagtctgggggcccctcccatttcagtctttctgtggttagtagagatgagagtcaggaaaagcatgcattcagtcccccacagaggaggcaaggacttcatcagcctaagcagtgacactagaacaattacagcaagacattttatggaaggcatcatagaattgataactaggagtgtctctatggcatggattttctctaagggcttaaagttcaaagtggacctagacaaaaactcctctgagcattagtgagccctgagtagatgagagctgctctatccatcccctgccagctgtcttcaggcgggacttggagtcggagctctgacactattctgtctcccatcagtatttcagtgaactgagagcaagtttgataaacagccagcccctccccaagcaggaggtccttgcccagtgcttcagaaacctaatggaaggagtggagcagaacctgtccgtcaagaacagagacaggtgagcattgcccagtagtgtgtcactgggggaagtagacattccaggtttgttgaaaataactctctcgtgcttgacacagctcacacatggatgtcccttttctgttacaccttgtg

SEQ ID NO: 118793 - DNA, 1055 bp, Homo sapiens
tacaattctcatttcctaatctctttcagtgtgtatgcctcactgatcaagtgacagcaggtaaattacaagggcagcaagaaattacaacctcaggaacaccaaatacatatcagaacatacctggccaaaacagtgcttagaggaaaacgtatgcccttgagtgcatttatttaaaaagaaagaaaattgacaaattaaattttcaactcagcaaagaaggaataaatctttttttaaaccgcaacattcacgaaagaggtggcatcttaaaaggggataatgacatcaaaggcttttttaaaaaccaacaaaataacaaacctttggcaagtatgatcaggagaaggcatgaatgagcgacacggggaatgagaagtggaaggcattagtacagattcgtatgagagttgcaaattctgagagaatcttcccacaatgttacaacaacacatttgaaaactcagatggaatggaccatattctgggcactggcttccagagttgagcaggcatcagaatcacctggagggcttgttaagcacagactgccgagtcctaccccagagtgtctgatgccgtaggtctggcgagggtccaataatttgcatttctaacaaattctccagtgatgctgatgctgctgctctggaaacacactctgagaaccactgtcctagggactaaccaagttccccccattcctgagctgcctaagagctatctggataggaagtgaaaggaggcttataattagtggcccaaagctccttcatctgtatgacagggctggacgatgagggaccgtggatctcaggaagccggaagccaagcagtgaagcagagccctgacccgtgccaggctttacctggggcgcttatttaatcccatgaggtttatttaccagatgagaaaactgaggcataaagaggatgaataattccctgagtccacagctggtaaactgaggtgggaatcccattcttaagcacacaagctgggagcagcgctgtgccacccacgccttaattctgtgccacaaacctctgtgcgg

SEQ ID NO: 118794 - DNA, 1749 bp, Homo sapiens
tcctgaagtgattacgcctgtttggaggcttgcagggcactaggggatggggaaaggtgaatcgaggtgctctctggctcattcgcagccggctaacccgccatatcttacacagctaagggctgccgacgccattttgcagggtgggctgcgcagactcttggcgggaggccggcgcgcttgagcgggagaggacgtggaagggttggaggtggggagtgcgcgttacgactggaaagcacgcgtgcgcacaggcgacagcagcggaggggtggggccagtgtacgagtgcgcgtgctcggtgggagcccgcggagtacctggaaggaggtgggggcgaggtagaaaggagtggggttgaaaagcgcttgcgcaggacggctacggtacgggggtgggagggcttcggagcacgcgcgcggaggcgggacttgggaagcgctcgcgagatcttcagggtctatatataagcgcggggagcctgcgtcctttccctggtgtgattccgtcctgcgcggttgttctctggagcagcgttcttttatctccgtccgccttctctcctacctaagtgcgtgccgccacccgatggaagattcgatggacatggacatgagccccctgaggccccagaactatcttttcggtaactgctggggggagctggagcgaggccgagcggggcctggtggcggtgagggtgggggtgaggggcgggaatccggctgcaaccgggtctggtggagaccgccagaccgacgggaggcctgagcgggtgggaagagctgcctgagccctggacctggagggattggagccgcggggggagccggtggcgtgaagggggaggagacgagcggcctgaagcgtctggggcgtgagcggtccgaggcccggggcctgaggtaaagtggaaccggccgcctggaagttcggcctttgccggggatacgtggcggagctccaggcgtggtttattttctaacggcggtggttcataggcttctgatgccaggccccgggttggtggtcctggaggctgggttcaccgggaagcatgggcctgcttgttggagcgggtagatgcacagcctggcgttattctggcctcagagcctggagctgccggacgtagacttacctcgcgtgcttcggccagttactgggggtggggaggcgcggcgcggcgtgaggaggccgcaaccgctgggagcacgtggttgccacgtggttgggggagggaggggggtgtgggcgctacatccgggactcaccggcgtgttgccactcgtgagccagggatgctgtggctctgttgaagtgggaaatgttaagaggctggtagcactagggttctggaggtctttgttcagtgcttacagcatgtactgtgatggcagctctcatttttttgagccccttttctgtctcactgcggtaggtggagctagccccactttgcagatgaggatactggtgcccagagataaactcacttaacgaaggttgtacttagtaaaggcaataagagactaaatctaaaccaagacgcttgactccgtagctgctgcttcgtgaatattaatgaggcttcgttttagggggacgtcctcgcatgccgccatttgtgcggcattgaccaaactgcttttctaaatacaagaaacacgtagagtgttcggtttgagtcagatcaagacctaagactattcgcagaattttgggagcaccacccccctcgacttgcgg

SEQ ID NO: 118795 - DNA, 1196 bp, Homo sapiens
tttgtcatttttcttttgtaatagtaagctattcatgtttgtaaccgttctcatttcgaaattgccatttgggaatttaggtaggtaaatcagctgttttaaatagtgggaaacttaacattggacattacatttggtttcagataattgcttcaggttgagatttactaaaccattgagcttgtttatgcagaataacagtacctatcagcgtagttagagatgaaatatggtatgatgagagaatggaattatagtcttttatgggtgtctgtagaggtttctgttcaagaaatctaggaattgatcattctgctttgccctctggtagctaaaatagtgaaaaactagttcaaaagttagacctgacctttttggttacccacacttaagtttcagtgttatttttctccttgttagagttgcttttttcttcatttacaggttgtgaactaaaggccgacaaagattatcactttaaggtggataatgatgaaaatgagcaccagttatctttaagaacggtacttaaactttcaaaataaactacttaaccctacttgatttcagccttttagtttctattcatgtggcttgagactttttttcctttgctgactgcttataaaatactatttcttacacctgggtattgtgtgtacctcactgtctgtacatctttgaagaacttggcatctataccactcatttggtaaccatgtaaattccagtcacactgttcaacttgccttattttcttcagttgaattacaaagcccttgtaaaaggcatcgataatctttcatgtctaccagagactagccttctgctcaacttagaagttgctcaataaatatgttaggtggtctatattgtgtgtatgcatatttatgcatttcttaaattttctgaatatgagaaactgatttgccaagatcacaaaacctgaggacaacattgcacaaatttgttttccagggtaatagtgagaggtttatacttgttttttaaaaaaatcacagtcatgtgcctcattgcaactgctgggtcaacagatggatcgcatatacaatggtggtcccataagattattataccttatttttaatatacctttcctgtttttttttttctttggaggcagtctcgctctgtcacccaggctggagtgcagtggtgtaatctcggctcactgc

SEQ ID NO: 118796 - DNA, 2426 bp, Homo sapiens
gatttccgagttcaagtaattccctgcctcaccctcccgagtagctgggattacaggcatgtgccaccacacctggctaatttttgtgtttttagtagagacgaggttgttaccatgttgtccaggctggtctcaaactcctgacctcatgatctgcccgcctcagcctccctaagtgttgggattacaggcatgagccaccaagcccggccctttcctatgcttagatgcacaaatactgtgtttcggttgcttacagtattcagtacagtaacactgtacaggtttgtagcctaggtgtgtgtagtaggctataccatctaggtttgtataagcacattcttatgattgtacaaagatgaaattgtctaacaacacatttctcagaacctagccctgtggttaagtgacgcatggctgcatataacatttagtgggggggtgtaaaataggtggaactcaaaagttgaagtagtattttttttttgttcacaggtcagtttaggggctggtgcaaaggatgagttgcacattgttgaagcagaggcaatgaattacgaaggcagtccaattaaagtaacactggcaactttgaaaatgtctgtacagccaacggtaagggcacttacatactttggatgttgtgtcaaggtttaattctgttttaaggtaggtttggtgtcatttagttgtgccaaggagatagaaagtggttctttatcttctgtcactggagttcgatggtcaactcttgaacatgggggcttctgctgctacttttatcagaggtggaaaaacaggttcactggtttgttgatttggcttatgtgtttgcctgtaatgtttattgttcattttcttcacatgtttagtgatgaaaaatttctcccttctaggtttcccttgggggctttgaaataacaccaccagtggtcttaaggttgaagtgtggttcagggccagtgcatattagtggacagcacttagtaggtatgttatttttatatattatactacttagtttgtcctctttagtgcagttgcttggttcccagtttggacttaaagcatgggtatagtactactgtctttttaataggttccaatgtgagtctagaaattggagaggacaaataaatttttggggcgggggggagaggaaatcttgctgtcacccaggctagagtacagtggcacgatcttggctcactggaacctctccgggattcaagcgatcctcctgtctcagcctccccagtagctggggccacagacgtgcaccaccaagtccagttgcgtttcatagttatagtagagaaggggtttcgtgatgttggccaggccgatcttgaactcctggccttaacgtgatctgcacgccctggcctctcaaagtgctagtattacacgtgtcagccactgtgcctggcctaaaaattattttttaataaagacagtctcattataacggctggagtgcagtgatgtgatcatagcttgctatatcctcgaactgctactgggttcacctcagcctctggaatagctagaactacaggcacactccacgcctggctaattttttttgtatatgtgcagatggggtctcagtatgttgcccagattggactcttggcctcaagtggtccgccttggcctccccaaagtgagattacaggcatgagccaccctccccaggcttcttgcatttaaaacctggcagtgaacattaggcctcaaaatacttttgttaaaaagttccttttcccatgtgctctttttttttttttttttaaatagaatagaagtctcagtttttagagtatttactatcagtgttctttttttttctgacttcttgctgcttgagttttataatgtctaataaattgtattttagctgtggaggaagatgcagagtcagaagatgaagaggaggaggatgtgaaactcttaagtatatctggaaagcggtctgcccctggaggtggtagcaaggttccacaggtagagatggcaattttattataggttttgtattatagcttttagtttggtgatagaacagctcttgttcatgagtacgtatcttttcttttaaaagaaaaaagtaaaacttgctgctgatgaagatgatgacgatgatgatgaagaggatgatgatgaagagtaagtatgattttagaaacttgatatacttccggaatcttgacaaaaaaaggaatttgacatagttatatgcatgagggttttataaaagtcatttacaaaaagccatcctatgtaatagtttataataaaagggcaggtggtcatctgttgtcagtttaagttaaatgagctgagttgaaaggatattgggtctgtgagcctttacaatgctgtgacttgtgactcttcagaagggtagactatagtgtttgtga

SEQ ID NO: 118797 - DNA, 1769 bp, Homo sapiens
gaacatggaatgtttctatttaggtctttaatttttttttttaacacaaattcactctgagtgtacagtttaatagaactatacattacttaaatatacatacattatacagtggtatagtgtgtatttatgcaaaactactcattgagcaacttcatttcccagcccctagcgatcacaattataccttctatttctttgagtttgactacttttagatacttaatgaatagaatcatacagtgtttgttcttttgtggctggcttatttcactttgttcaaggttcagtcatgtagcatgcaagaggattttcattgtgtgtacatatacattttcatttagtcatttaacacttgggttgctttcacctcttggctgttgtgaacaatgcttcgataaacatgggtgcacaaataatcacttcaaggtcctgctttcaattcttgtgtctactcccaaattttgaaagtgcttaatgtcttgacatttcatttgtagtgatgatgatgatgattttgatgatgaggaagctgaagaaaaagcgccagtgaagaaagtgagtagatacaatgctacaaggttgttaaactaacaatagaaatggtgattttttagtgctatttgcttgttttgtagttaagggaagctggtgtgggagatcatctcatactgaaaattagtcctgaggaggattacagaaaacttaagagtggggaatggtctgttttctttatccatgtggccctccacccagtttgttagtcttgtgtaaccttttgtccaagtggttgctgctttttccttccttttttttttttttttgagacggagtctcaatgtcacccgggctggagtacagtggcgcgatctcagctcactgcaacttctgcctcccgggttgaagcgattctcctgcctcagcctcctgagtagctggaattacagactcatgccaccacacccagctaatttttgcatttttagtagaccaccatgtcggccaggctggtctcgaactcctgacctcgtgatccacctgcctcggcctcccaaagtcctgggattacaggcatgagccaccacgccaagcctgtggttgctgcttgtcttacatggcttggacagctttgtttgcactgttgttggggtcagggacagtgattaagataaatttctaattgcagtctatacgagatactccagccaaaaatgcacaaaagtcaaatcagaatggaaaagactcaaaaccatcatcaacaccaagatcaaaagtaagtggctacatttacacgtgggtctcattgatctagttggggaaaaagattctactgtggaagaatctagtgtgtctgaaatttgataggcctttatagaacccctgtaattgctgtttaaaagttaaaatcagcttgctgcagccaggctcagtggctcactcctgtaatcccagcactttgggagggaggccaaggtgggtgggatcacctgaggtcaggagtttgagactagcccggccaacatcgtgaaaccctgtctttactaaaaacacaaaaattagccaggcatggtggtatgtgcctgtaattccacctactcaggaggtggagacaggagaattgcttgaacctgggaggtggagtgcagtgagattgcaccactgcactccagcttgggcaaaagagcgagactccgcctccaaaaaaaaaaatcagcttgttgtgtgttgtaggtacacacacacacacaaacatactaaatgtaaggtgg

SEQ ID NO: 118798 - DNA, 3855 bp, Homo sapiens
ggcagaggctgcaatctcggcactttgggaggccaaggcaggcggctgggaggtgtaggttgtagtgagccgagatcacgccactgcactccagcctgggcaccattgagcactgagtgaacgagactctgtctgccctgatttccttttttgaactgacttagtactgtgcataaaagcaaactcccaagttactctttttttttttatttaaagagatgggtggcctactcttgcccaggttgaagtacagtggtatgatcatagctcactacagcctccagctgctgggcttaagcaatcctcctgccttagcctcctgagtagctgggattacaggcatgcaccaccatgcctagctaatcatcttattccttccttaaaggaaagattttaagaacaaaattatatggcgtgaatttattgatgataattccagttgtataattagctttataagggagttttgtgagaatatttgaggaaatccagatagaatgggttttaattaggaattgtatttattcttatgaccttttggaaattcatttctttttcagggacaagaatccttcaagaaacaggaaaaaactcctaaaacaccaaaaggacctagttctgtagaagacattaaagcaaaaatgcaagcaagtatagaaaaagtgagtaaagttatcttaaaaaaactttgtctcccccctcaaattgcacgtgtctggtttgcatagacttgaatgtttcttgtttttttgtttgttttggtttaatatacttgcctggttcgtggtatgaattttttcaaaaatttcttataaaacatttataatcgtgtctgtggtgatttttgcatatgcaaaattaaatatgccttattttccattatgcaaggaacgtagtgcactggttgcaagataacattctgaccttccatgttaaaatagatcagtgaaaaccctttgcctattctggttgtaagatatgctagagaaccaacagagggcgtatgagacttcattaaaattacaaacagctggaaaagtagatgctggctgttgcttggtattatagttaatattcatgattgaccctagtcagaagtgattttcagcagattgagacatttctctttgccctttacaccaagttgtcaccagttaatacatgtagtaatagctagatttcgtgaatgactaataggcttaaatctagtttccttttgtcttaaataatggaaatgtgggaagagggttaggtctctcatctgcttgactgggggatttgagtaggatatggaataaatggtttaaatgccttggaagcacatttgagagaagctttaattctatgaataatacttttagactccaactattgagagcaaatgtggggtggtgaaaaattgccaactcatttccccatgtttttcttgtaatctatagatttttcgtggcttcagtagattccttgtacagtgataagtccactggaaaaagaattttagaactggaacatatttcttttagtcacactgtaaaccctttagccttcctggttatcactgatttttgtcccttggatacaatgctaaaatgacatcttttagatgcccctcccctccattttaatatggtcctatctccttggtttaattgcaggcgcattgaacagtcctgggcactacatgtaaattaagcccaaagatggggagaaaggaaaaggagagacaaatatagtccatactgagtgtcatcaacaatccagactgaagtcttctattttaatctcaatccccttttctgatttgccacccatgcctcttcaggctggaaacaatctcttggttccctaaagcactttcttctgactgctgtgattcagtgaaccttgccctttgctttctattacttgtgcatttgcctcacctgacaatgttttaaatcgcctttgtatctccttagctgctcaataaatatttgaatgcatcaattaagaatgtatgtgacaataattttgaaatggaaattgtgaggtttattttactaggttattggaggcagttaagtttcttaatgctatacctgattctgccaaagtcccttggacatttgaaaaccttttcaatcttttaaaaatgcataaaagatacttagagggaaaggtattaattaaatttagtaaaaacaaatatattcaatgctttaaattccaaagtagtgataaatacaaacatttcaagatatttgcaatagtaatgttttgaaattttggttacaaagtcacaggtcttgccaatactgttgtagtttcttgcctatatccgtaatttgaaggaaatggtgagagtgattagagaagtgtaattactgtaattttttcccctattgtagtttcttgcctgtatccataatttgaaggaaatggtaagagtgattagtgaaatgtaattactgtaattttttccccattcaactttatatatctttaactgatgaccagatcattgttgttctgaaccagtttgtggtcagcaagtgttttgtggggttttgtttgtttgtttttaaagaacagtttgggtcacttgacatggttctccaaagggatgttatgggttgtatttggttctgggtgataaccgacttgttagataatttagataagcaaccgagttgccatgtttgtttgtcgaatctcaagtgtagcttatattttatgttcctagagaggttgtcagggaagatttgaccctttggcaaatctgtttgaatagagatactagccatgctgcccaatagggctttctggccctgaaaaagatacggagtattcttggaaagttgaagggaaaaagaataaactgatccatgtagtagcatgcagattattgaggaattttctaaaggtatctctctcggtgtatttctctacttacctgtaataatgcttttgtcttaatagggtggttctcttcccaaagtggaagccaaattcatcaattatgtgaagaattgcttccggatgactgaccaagaggtaactggattttctggggacatgattaaatccaagtttttttgtgatttattatgattctgcctttaccctttttaagtgttggctctttttaaaaagttcctaaccacagataatatttcatttaatgaaatacctgaaaactcatgtatttaatgaaatgcatgaagaatacagttggcagtctgagatgataactttagtatatttttcccagatttcctatagttggtaaattatttcttggttattgaattcagttttacttttttggtactatgttggttaaggaaattgctgtggttttccttgctgttccatttgactgcttggggcagtctggtcttggcttttttgggagttggtagagatcttttttttttttttcctagatcttatgggaaatacattatgccaaaatcatcctaacatgaaatctggaagcaagacactaaattgtggctactaccagatacataagcttgagttagctgttagattttacagttagtacatgtgaaagtcttagtcaacataaagattatgcatttatttttgctcttatttacagttgactcataagtgtaaggacaatgtaaaagtggttaaatagggatgttaggtatcgtgtggagaacggatgctgcatttaatggtctttaggtttcctgtggtcagcttttttcaaaaaattaggaaaatttggcaattagctggttttttttctgccatagtattttgcacttcaattatttaattgcacttcaatttttagttttcgggttcgtaaaaccctgataatggttaattttgagtttagct

SEQ ID NO: 118799 - DNA, 1350 bp, Homo sapiens
tgagctgaagtgatctgcccgcctcagtctcccaaagtgtagggattacaggcgtgagccaccatgcctagcctcagcatatagttttttctaaatgtacacatgcccaggcacacatgcacaggcaattcagaataagtttctggtgtttatgtaactttatttgccaaatctggccaactctaaagctgatctcgggagatgaagttggaagtaacattggccatatgggtctctgttctttctgttgatttccttaagtaaataatgctaaactattaaataattattagtatattgttcacatttttatgactgattaaagtgtttggaattaaattacatctgagtataaattttcttggagtcatatctttatctagagttaactctctggtggtagaatgaaaaatagatgttgaactatgcaaagagacatttaatttattgatgtctatgaagtgttgtggttccttaaccacatttctttttttttttttccaggctattcaagatctctggcagtggaggaagtctctttaagaaaatagtttaaacaatttgttaaaaaattttccgtcttatttcatttctgtaacagttgatatctggctgtcctttttataatgcagagtgagaactttccctaccgtgtttgataaatgttgtccaggttctattgccaagaatgtgttgtccaaaatgcctgtttagtttttaaagatggaactccaccctttgcttggttttaagtatgtatggaatgttatgataggacatagtagtagcggtggtcagacatggaaatggtggggagacaaaaatatacatgtgaaataaaactcagtattttaataaagtagcacggtttctattgacttatttaactgctttatactttgtcaaagaaataattaatgtagttaggaatggcaaatagtcttgtaaaattctatgagaatgtccctgccctccccttcaatattctctctggagctaaccactttttcatcataaggatttagtgctgtgttcccacctcctgatgatagttaacaattattataactatgcaacatgtttccaaatgttccattagacctcctatctgcctattctagcctcacttgcaaagaaaatgtggcatgttaaaacagcttaaaagcagcctttcaacctgtatggttttttcccctaggctggagtgcagtggcacaatctcagcttattgcagcttctgcttcttgggttcaagcaggtctcctgcctcagcctcccaagtagctgggattacaggtgtgagccaccagcccggctaatttttgtatttttagtagagatggggtttca

SEQ ID NO: 118800 - DNA, 1024 bp, Homo sapiens
aaagggagccgacttcagccccgattagaaccagaccagggctgcctctgcatggtgggggtcggggggcggcgggcaaagggaataggaagcgtcagctccccaagcccccacccacctagtgctgcaaggggccaggccaggaggaactggacacaggtcaaaagagggttgtctgacccttccccctcggtggaaggcaggtggctttccgggattagagaagattcttagaccttagccttctggattgtggagatccccagagctagccttgagcacaggaaattggtggttctcccggttttctggctcaaggagtgttgtgtgccttgagcactgcgcgactcaacagccactcgcagtgtttggcggtggtgggcctgctatcttccttccacgcccaggagagggttgttaccctcctgataggcactgagctgggggcatccattggggcttggggatggaagggtggacggactgatgggttctttcctcctgttggccaggctggggtccccagtgactccttgaatcaatataactggagtcagtaacttaagactggctgtttgccaaagcagatgtgacctgtgtggtgatgggggtgggggtggggaacggctggtgtcaaagagggaggccagtgccaggcatggcctgcctggtctgcagctgagtccccaagcagagggcaggccctggggtcactccagggggtctgcttgtctgacctgggcaagagctcttttccagagtgctgtgcctgggggcaggagggatgaaatgggcaaggagtagcagggaggcctgcggatgtgtggctcaagcctctggatgcctgctgctgttggttcttcttgaagtagggcccaggaggggctgctgtgtggtctttgtgttctccgtgggagctggagggagggagtgtggactctgcatcccacctccacctcctggccagagctagagccagcatcttgggaaagagctgggtggtctgccctggttaggtcaagag

SEQ ID NO: 118801 - DNA, 1369 bp, Homo sapiens
tttgatttgcccttcgccattgtttccaaagatcaaggaatgtcaataacattttaaaggaccaataaacagcctcctataaagtaaacctcttcccgtggaagcacactctactactaaagggaaggccctgggctctgatttgtcctttgcattgagaacggtgtggggatcagtgtgtgtgtatgtgatttgtttattgagttggctttgcttttttagtttttcttttaaaaataaaatccttccttcccatgttactaaattaatttatgtttttgagaggttgagtctcaaagtgtaaacaataaacctccattcataaggtggatgttgtaagcttgatggtggttgtgaaagtgatttagctttgaccacttttcatcctacagcttcaatatcaaactggttaggaaagcccagggggaagggagggggcaggggaggaggcaattctgaatgaatgaatggattttttgttgtttttgcatgtttaatatagaagttcccctcgttccttgggagatgatggcctttgaatatgcagacaacctttgaattgtgcctactaaattatagcaggggactttggcacccaaggagttctgactttctgggattataatagtaattcccagccatactctggactttattttgctaaccataactgagcaaatgtaaattactgctatattaatgttttaaagcactgggatagtctaattctaacttgtaattaattatgtttgccaattatctgtttgaaataaatttgtgtctgaacagctattgaaactgttaaattgtacagatattattcatgacagctttgtactgtggaatgtgcttaataaaaaacaaaaaagtttgacttttgtccagtaaattgctaagtaatgtcaataaatcgagtatgggtattatgcagtgcacctaatctggcttcatgcaattgttacttcagctactgattcaaagccaatactcttaataaagtgttgcaatactctgacgttctgttaagaaatttttcaaagaaactgttaagtgctgttaggaattcagtgacatacaattaaaatttatagatctttagaatcatctgttctgtaaaatgagtttgaaggcaaactggttttggcgtgtgagaatgttgtagtagatgatatgattccttgtcttgggcttttgccgaaagctagcttgaacttcaggagttagctgagggctagctaagaactcttgccctgcaaatctgcttcccacacataattaattgcttcacaagttactgtcaacatgaaaatggcctctgagacatcccaagtggctttcaggtgtgagtggatcctccccttcttgaaga

SEQ ID NO: 118802 - DNA, 1065 bp, Homo sapiens
tgattccggctctcctttgagaaggagaccttagcttccccggcttcaagtagaacagaagcccgtttccttccctcatcagtgaaaaaatctaatgtttcaaatgtaaattgttcatagaaaaggaacatagaatctgttttacagaagtaaatcgaccgtcaagagaagacttggcctctaatttatattgctttgcactttggtttgatattaagaaacagcattcttcttcagtgaaattttgggtgccaaacacctacccagaatgtccagggctttcattttcaaaagttagcattctccttttgaccgtccaagtcattatgaattctgacttgttgtattaggaacatgttggacagtggaaaattttctctggattgttttagtaatatttttgggattatacttcctttctgtaccaatttcttttaatttaaagaactataagtcagttatattatctaccaacaggtaatatagctctttcttttattaactgttctctgtcccccaaccatctcctgatatttggtagagtaacacctttatacgtgtgcttgcctcctaatttaaaatactgtattcgcatgtagatataatgtacataacagtttaacctcaaagttgctggagtcagggccccctgtgcttgagacactaatacagagtgtgttcgcacttagccatgggctgggctcaagaacctgatacctgggttgatgtggattacctagaacccttcctgcagtattcatacagtgtttttattttgttgttgtcattgcgtgtgtgtggtttgtgtgtgtttttaatgagaatcttgttttaaaatgtaatttctaaggtttaacaccaaaatgttttatttgttgtggagtatatattatacaatagagaggtaccttaaacattttttgttcttattctttttctcataagtactcctgagtacaagtggtcacctcccatagtattcatttggcttcgctgtcaaaaatcattattctgtgcagtcgtggccctgggaaggggaaataagaaggccctgttgacgggctg

SEQ ID NO: 118803 - DNA, 2070 bp, Homo sapiens
ttccagatgaccttatatatacttcccaaatgggttagttggtctgtttgtactcctattactaacttccagcatttgcttaatttggagaaaggtatccttggaatttcacacagagccctagcttctgtcagcagcacctactcagccctagagagtcccctgatgaatgaatttggtgacataggttatcaagtccggaactgaatttagataacctgaagttgttttcttatctcccttaaaataatatttctttaaaatttcagcaattctgagaatgtgtaggttcttaatttttccaaaatcaagtgtaattggttcagatgatttgtaaaaacataagcatgttccccattagcttttataaataggcagttcagatgcactactttttttcaaggaaatgtttgacagcatataaattgttcacttttccactaatcacatctcattttcctttctaggaaaattaaagtttgggacttgcaagctgctcttgaccctcgagccccagcaagcacattgtgtttgcgcacattggtggtatgtgatctcttgagacgggaattggttccctgtgctggaggatgaccatttgcagatagtcctgtctaggtgtatcacaggaacgcttgtgtgtctcacaagatgccttcagagaatttcagtcttcattttgtttagccaaaaccagagaatatttgatgtttacattactgtgagcactttcctaaggggagacataatgcagcttaagatatgaaggcaggcttcctgatttgtaggtggactggtttcctcatagggcaagcaatatttccttcttgtaggtttggaagatttcttaatatggctatttgtggttatgttttaataacagcacatttttatactatatataaatttttataccatttataagtactgttatatttttgaagagatagtcatttggaaatattggtagatttaaaaaagattttagtagttttatttctgtttcttcacttcttgcatttactagaagatgcagaactgtcttcttgattttaatgggaactcttatattattatttcaccatgaattttgatgctggcagcaatttgaggtagatcctggtcatgttaaaacaaactgtctttctggttctaggttttccagtggatttttagagtgtatcaagaatgggtattatgtattgttgtttacttttataaggccctttttgagatgatctttgaaatattggtagactagagtctaagatacaaagtttaatgaaagaaaaggcctagcaggaaaagaaagaagaacatttgttcttgggatgaaggacacagttcagtgagctctgtacagtcgtttaggaagtctgtttaagtggctgcattttcatcttctgcccagtttctcattgtgagatatcaggggctgtaaagatctcattttattcatgaagttttgtatttcataggaacattctggacgtgtgtttcggctccagtttgatgagtttcagatcatcagcagctcccatgatgacactattttgatttgggatttcttaaatgtgcctcccagtgcccagaatgagacccgttctccctccagaacatacacttacatctctagataacagtctgcactttcacccgtttcaggtgagtactatcctctccccttccaattttgctgattgaattcaccttccctttggggaaattttgtgatttgggttccttggtgatgtgtgaaccaaggtctctcttagacgtgtcaacttttgcagagttcaagtgtaaggctggatctttatagtcacatccatacaaggcttgagttggaatcctgcctattgtgtgggttttcatcttggcagatgatgaacatggttcctgtttttaaaaactgttcctaaatgatttcttaggtcataatcaatttaacaccagtaaaatgtcttgaattttattttggggtacaagaatcttctttttctctttctttcctgtccttcagttcttttattaaaaaaaaaaaaaaaatcaccatctgacaaaacattc

SEQ ID NO: 118804 - DNA, 1008 bp, Homo sapiens
ccctcctatgagaatggcaccaagccattcatgagtgatacaccaccatgacccaaaacatctcctgccaggccccacctccaacattgaggatcaatttcaacatgagatttggtagagtcagacaaactatatccaaaccattgcagacccagacagagctcagataccagaatcatttcctggctgtctccataattaagcatcatgcttttctcttctctcctagagtgtgggatgtgaacacgggtgaagttcttaacacattgatccaccacaatgaggctgtattgcacttacgcttcagcaatggactgatggtgacctgttccaaggaccgctccattgctgtgtgggacatggcttctgcgaccgacatcactttacgccgtgtcctggttggccaccgggctgccgtcaatgtagtagactttgacgacaagtacatcgtgtctgcctctggtgacaggaccatcaaagtaagtatgtctgcagtcataaccctacctgttcctgtcccttttagaacagagacaaagcagaggtggcttataccaacctggtacctggcaagatctttattctcctctgtgcttatgaacccttgaggccatcccactctgtatatctgtagagttgtaggcaaggtaggaggaaaagccatcggtccagaagagagaacagtcttctgtttcatgacatgaaattcttgatcacctttttaaggggaagagtgctaacgtgttgatcatgtattgtgtgttgggagctttacattatggtctcagttaacactcagcacttttaaggtaggtgtggccccattttacacatctggctcagagagtaaaggattgtgttggtgatcatcacagctagttagtggcagagcttagatgttttatttattcacctaattttgaggactcgcagtgcggtggactctgggccggatgctagggatatgatgatgaagaagacatgtccttgccttcaagaagcttagca

SEQ ID NO: 118805 - DNA, 1645 bp, Homo sapiens
cttttaaaatgcagaaacttatttgagaaaagtaggctttttataagtgttgagaagctaagccatttgctaacttctgttcaacttagaatgaaagtctggtatctagcagagcttttgagaggtcctgttccctagctcttacttgagggttggggatagagggtatagcccagcctttaatgttgttgtcgtcctctgtccagacatctcaggggactgatgtatcacaggctgagtatgtacctgaccctggctcctctgtgtagtcttctctgctgcgtcttcagggttttgggtacagttaaagattgtaaccacatcacccacttctaggaaacattttagagcagcggagagcatggagaaaattctttttggtatagagattcccccccatcccctcttttaaattaaaataattgtttccccctcagactctcatgcggtagtaaatgtgctttttctagtcattgaaatatagagcataacaaagctacttactgcttcagtgtcattttaaagcaattgtatacctcttaaacctaagaacagcttgataacacttgacatatatgtaaagacatattatgtattcatctctgtcatacttgtaatatgacatcatacattctgtagcaactctgtgggcccccagagggtataacgtgaacattggtaactactgccaagagtcactggccacaaattagacttgttaccagtacatctgcctactaaatcagcattttcctggagtgcttagcatgctgagatggcacagtcactatctaaaaatacattgtttctctaaatgattccatgcgttgagttctgcttaagaaatgcctgtattctggacctctttttaaaaagtcgcttatccggacagatctgttgtctactttgatagaggtagcagagatggttgggttagttttttttttttttttttttttttttggttttgaagtgtgcttttgtatgtctaatattttaccaagtcactagagatgatgacccaggctaggaagttctgatttggtggcagatggacaaatgagtatttcccctctcctggcatctccatggcacctccttgtatctcctgagcattggaaatataccatcctgccctcaggatgtgtatgggagctccttgagggaagataccgtatttccaggactcttgctgagcactggggccacaaatgatggaaataatcgctttttaagtatacgtgtatcgatatctccaaccctccatttccttttctataaaatgcgaacaatgattcctgcttcagagtcacgattaaattagctacaaaacatataaagtgagtggtatagtgttagaaaagcatagtgcctggcatgtagctttcagtaaattgtaacattttagagtgcacagaaggatactatcttcaaaataagaagaaatacagtttgttagatgtcagcagagccagtaattaagtactccttcaacaaagcaaataattagacttttagctgtacagaaataattagctactcagagagaaactatatcctgaactgaagtgtaacaggttatagaaatccctgttgtcccctaatttcaaggatcaagaattcagactttagttactcttagtag

SEQ ID NO: 118806 - DNA, 1064 bp, Homo sapiens
cagaccccaccacccttccaggcagatgtgaataatggaatcattccattaatggtaaatctgaatgtgactggaatatcattatttaaagcccaaactgtcttgaatattctgctctctgaaatgatctataaagtaaccctttaaggaggttaaataaaaactttcactagataaatcataaagtttaagaattaattgaccattggcagttccaaacttagaataagttgcccctacagtgctagtggctgagacatggtgttaactttaatcttaggttgatgtgtgtgtattgtaggggagatggggctgtctcttaccccaggtagttgtactaaggcatttcttatgtacacatcttataaactacattaccctctgtttttttttttcacttgatgaggggcaactatttacaaagttatttccagacttctttgaataattttatcaaaaaaattctttgaaaagaatgatgtttaaagttaattatgaacaaacaggaaccttgaagaactctgatcaggttgaagatgtggcaacatagatagtttgattgaatcctcatgactgctgttagaattgacaatgtgaattcagtattctgtggcatgacagtatctgacaccacctgccatcatcacttcttcaggctgaaatgatagtttaaagtaggagaggaggcaggtgtgaggggaaacagctctgtgggaaaaccctgtgcgacacagcctctacatcatggtggtctacccagtggttcttaaagtgtggtttggaaaaacccactggttggccacaaaagtcttctccagatttttgtgggctagacctcttgatataagggatgatgtttatactttgatatatgtgctactagtaataatcataaaagtaatgtaccactaatagcatttacttatgccagatactttgttaactactttataatgcattttctcttttaacattttggacaaaacctgaaaggtaggccaagtacttatttaaatttgaggaaaccttagaaggttaaaaaggttaaacagtttagtcaggat

SEQ ID NO: 118807 - DNA, 1792 bp, Homo sapiens
acatgcaggaaaggacagtggtcccagtgtagtctttattcttagaccatagcttgggtctttgatctagtccagagtaagagaattttagtatatgaaggacctggaaattataaccaatggtataataatagtcattcttagaattgaaggaactttagtttgtaaagcatttttcatgcatcatctcattttgatattttcagaatcaagtagagattatcgtaatcttatacagatgaggaaactgactctgaaagtttaataatttacctacatctggcctttcaacaaccaagtttagtgctattatactacttctaattattttgagaaaagagaacagatattaaccttgtagagtgcttgtctataaaatgttttcataaaactgttgaatttgattctgacagacagtgtaagaaaggatagttgttactggtgattaccattttgtatgttagggcacaaaaattcaaggcacagggatgtttcagtgtttgtttcatgtcatagaactagtaagtggtgaacctgggacttgaaatgggaattttctgatgataagttctgtgttctcgtccctacacagaataagcttggggagaagctttatttcttgcaactgtagaagacatacttaccgccacaggatgggagtttacaggtggcaacagtggtggccatgttgatcatcttcccattgtgaatgtcaggcagaggctgaaagtggttttctttgagagtatccttgtatcgtgggaggttgaagccaatgacctctaagattctaggatttgtagacatggggctattgcttttgaggattgtcccatctgtttaggaacagaaaatggatactcacgaaagggagatgaaaagattgacaaaaatacatttaagcacaatcgactttaattcttggattgccatttaacttttcataagtttttcaagatgagtcggtgttttgccttttttgtcttctgatctcccagggattcacaccgggtatggattaatggggatatgatttgttatgagagacagtgagtaagatgggaatgaacacaaactttgaagcaagaaatccgagttccagtagtaaagccaagggagtgtaaaatcttgagttctttacctttctgtgcttcatctgtcaaacttggggcgtcattgccctataggagtgctgtgagagttatataaaagaaaatgaaaagtcttatcttaatatttgacaaataacagaactgtccaaggtcagcttttacacacagagaagagttgctatcaattgttttatcgtaaaaaatcagaaccaaaaagaagtgtatatgtttatgtactcatggatttgagtatctgtagaacttttgatatgactaaaatattttacttggttcaggatttctttattcctcttatctttaaggaaatgatggctggtacctttctatctctcttcccgttccttcattcccttttctgttttgtagagcaaggcttagatcacatagcagaaaacattctttcgtacctggatgccaggtctctgtgtgcagcagagctggtatgtaaagaatggcagcgagtgatctcagaaggaatgctttggaagaagctgattgaacgaatggtacgcactgatcccctatggaaaggactttcagaaagaagagggtggtaagtacttgggttgcttgttcccttgaaaaaattttattgacatagagtcagcttgattactcaaaaatgcaattatacttgcaaatgtgctggcctattttta

SEQ ID NO: 118808 - DNA, 1276 bp, Homo sapiens
tgaataatttgtcaatcctagtgatggagaggcacaagcagaaccccacgtgattatccttggatttccctgattttaagtaaacatagaagatggaagaaaggcagccaggcgcagtggctcacgcctgtaatcccagcactttcaagaccaaggcaggaggattgcttgagcccaggagttggagaccaccccgggcaatatagtgagacctcatctctacaaatgataaaaaaaaattagctgggtgtggaggcatgtgcctgtagtcctagttacttgggaggttgaggtgggaggattgcttgaacccaggagtttgaggtggcagtgagccatgattgtgccactgtactccaacttgggtgatagagtgagtccctgtgaaacctttgagaatggtaccaagaagaccaaactccaaataatgttaaattgtccaaaatgttgaagtaaattgaaagagttgaaaacaaaataattaactatttggagccagattataaaggatgaagggatagtgtgcttagaatagatagtatagtgataatagaaagaaacaacatattttcactcccattaacctaatcccaccatccccccaacccaagaataatggctttaaaacaaaggttagcaaagttgtgtttgagaaagatgtgaagatatttagcaatcacatagctcctatagacaagtaggcctaaatacattgtatgcctggatagtggcaaaacctgtggttgtgatttttcaaattgtagaacattgtgaagcaattgaaaatcagtatgcagaactattgggtacaattgtgccctgtacagcttgtacagttgcacatggtagtcttgcatgatagcaccagagatgattgatgagcagacttcctggttttaagaactggagaaggtgtttttgggggatttagctattaaatttgatgttgtgctttagcagaattcttagatgagtttcaaaggctaatcagcctctgaaaagattgtgtatggttgtgtaaacctagaaggatgtatacagaatgtgaaaagtggttcccttctctgggaaatggggtttagggatttaaaaatttttgctcatctacactttataaattttctataatgaacatgaactagatatgtttaaaagggttaccaagcagctagtgtcaacatgtaagtgaaaaattgcaatacaactttatgtagtaaaccccagcacgggaacatgaaagcagccataccctcctcaccttatttcctttttggat

SEQ ID NO: 118809 - DNA, 1323 bp, Homo sapiens
aaggaaaattccttaaattggccccaagtactgaatgtaaggattacaactcagttcaataattctcacttttaattatgagggagggatccagggagggggagatggagacatgcttttgattgcgtgagagagaattacaggtgaatggaagtaagatgaggcatgtacatatgatgcagcttctctgtatgtgcagaactcaaacccagaaacctatagaatcagactgcatctcacaccaagaaaagacagagtctttttttaagttggtgattgtatttgtccctcataagtgattttaactgatgagaggatgccttcatttttctcaagcaattcaatttattgtttgttttccaccgttttggttttattttcttccctgtaatttgcttctcaaacgttttagagggccagggaactcaccttgtatttgcagagtagccacaaggtggcactgttgaagttctcttgatttttcagagtatagttcagaggcaaccccatctcttagggagtatacagccttggagaagaagcagaacagatgaacatgtgttatgtatataaatatggttagtataattgcatacaattcagttttcattacagcgaatgttaaggcattgtccatatctctgttaaagtggaattttgtggtattgaatattacatgaaatgaatggaccattggctgggacatggaaatactttagttaaaatgctatttgttttaacaggacttgatctgaacatatatacatatgtcagtgtatatcatacatatgaatctaatagctgaggacgagctggccaagttgattgtgttagttagtatctagtagacctagattaaacatggcattagttccttaacacagactctgctttaagagcatcacaggagaaacaggtctgtgtccatgttcatacttagatttaataatgtgtggagcaacttatgaatcattatactagtttggtgtttcatttttactgtacatcatcttgagtttgaggtttttacactattgaaattgacagtcaacttacgacttcatttgattgtgaaaaccattaattctgtaaaaattataattatagcttttaaatgcttgctgtgaatatcatacctgtcagtatagggaaaatggaaaatgtttgtggtctctggctccttttggctcagtggaaaaagtgataattatgatatgcctttctaaaaatcatagtaaatgtttagtctgcaatgtcaatttctgcaggctgagtttgcggtttgtaagaactgttgttaatgggaaaattcataccatgtaa

SEQ ID NO: 118810 - DNA, 3232 bp, Homo sapiens
gaaatgcattgttagtataagagtctgtgagttgtccataaaccacctacgtaagatgcagagcttttcaggtatacatggtttatttaccttgggtcactttctgagaaggtaatcaaaagaaggatgggaaagtctaaaccgttctgccagattagtagccctgggaaagtatggaggagattgaaactgttgggtaaaatgaagctttttggattgaattgctttcaggtttcaacacaacacagcttatctttgttatatagacctgtggttctcaacatgtggtccctaaagtgtagtctctggacgggtggcatcagcattgctgggaaacttgttagaaatagaaattcatgggctccactccagactaataaaaccgaaacctctagggtgggacccagcaatctgtgtgtttaacaatccctcctgttattctgatgctagctcaagtttgagaaccattagcataaatgtatgtagcattaactttgaactttgaggaagtaaaacaaactgttaataatcagttgccactttgccaagttgagcagtttctctaagatggttatctccagcattagctatctttggagatgataattcatatatatcccgtgtatagagatacccagtatatacctttggagcatcattttgtagtaagcattggaaaatgataatttaaggtgccttttagaaatagctacaattttggcatttcctgtagtgactaatttgaggacacagaccctgaatacatttttaattcctgaatgaattagtaaaggaatgagtttggctttagggtaaaagtggcattttaagattaaatacacagggtgaaaaatatttctaatgaaatattaattaggtttctttccttgttaaactaattttttttttgtttttctaaaatagataagtaatggaacatcatctgtgatcgtctccagaaagaggccatcagaaggaaactatcaaaaagaaaaagacttgtgtattaaatattttgaccagtggtctgaatcagatcaagtggaatttgtggaacatcttatttcacgaatgtgtcattatcagcatggacatattaactcttacctgaagcccatgttgcagcgggactttattaccgctttaccaggtaactgtacttgtcttttcaaaagctgagcagttgaagaatgcccggcccaaggacctaggtggatatttatgaaatgattgaatgagtactgtgtgaggcagcatttctttgggacgcatactttaatatatggaactcgaggaattataatttagtatctatctaggaaatataggcagtatctttaataatgttcattcctggccaggcgcagtagcttaacagctgtaatcccagcactttgggaggctaaggcaggtggatcacttgaggtcagaagtttgataccagcctggccaacatggtgaaaccctgtctttactaaaagtacaaaaattagccgggggtggtggcagatgtctgtaatcccagctactcaggagggtgaggtgggaggatagcttgaacccaggaggtggaggttgcagtgagccgagatcataccactgcactccagcctgggtaacaagagcgagactctgtctcaaaaaaaaaaaaaaaaaaaaagtgttcattattggtcataactgttgcttcatttggtctgttgaatgagttaatgatatgctttttattttgatgtagtttagagtctgcactttgcctttgtatgtaattttaaaaaaactggtactcttttcccttcaaacatagtttgtatgtttgggaagtgtcccaaaagtttagggcattcatttgtatctgaagtggcacttaaggaatggcaaaaatacattgggaaaactggtagcatgtctttattatatttctcaaaagctgtttctgcatcctctccctcactactgtcttcccatatatgtctcatacacacataggtgtgtacatgcacgcgcgcacgtgcacacacacacacacacacacatctggttaaatttactttgatttttaaaagtagactttatatttttagagcagtttgaggttcagatcaaaattgaagggaaaatgcagagaattcccatattcacataacccgttccctcagcctgccccactatcagcattgcacagcagagcagtacatttgttacaattcatgaacctaagctgacacatcattattaccccaaattcataggttacattagggtttactcttgctgttattcattttgtgggtttggtcaaatgtctaatgacatatatctgccttaagagtctcctacagaatggtttcactgtgctccacctatttatttccctttgatttttaaaaaataatttaaaatttgctgtgttctgtaccacctttttgtttttctcaacgaggtggcatcttgctgtgtgggccaggctggccttgagctcctgggctcaagtgatactcctacctcagcctcctgagtagctggtactacaggcatgcaccactgtgctgaactcccctttgaatatgattaatcatgaatttttttctgtttctatattgttttttaaaaaattctcaatttaaatttggctaggtaagatatagagatttcactcctatagagaatgctggccagaatgttttcctctgatgtggccagtgtagtgtgtggttaaaattgccatgtcaaaataagcctagaagtagccagggatgagccagtaccattaccacaaccctagcccttgtcagagctacaggatagcttcttaaagagtagctcctcccttagcctatctgtgatttatagaacatcaggactccgtgttctaagtacttccacagcaaacaagactcatgttctaagtacttccacagcaaacaagacccaggctcaggcctcaggcctgaaacctgaggctgcaaattgacaaaccagcttctgatttctaatctctcttccaaaacgtgtaagtttaccttctacaatgggagttttaaggatatttgagagttagcttagaaaaatttgacactgccgttctttttatgctgaaatctagcatgacttgctcatttcttccattagaatctctaggaaagcaaaacgtaaatcctctctttctagaatcatactatttaattgctgaaggggatcttagccatcacttagtcctgtttttcattgt

SEQ ID NO: 118811 - DNA, 1048 bp, Homo sapiens
ctgagtagctgggattacaggcgcccaccactatgcctggctaattctttttgtatttttagtagagacagggtttcaccatgttggccagagtggtctcgaactcctgaccttaagtgatccagccaacttggcctcccaaagtgctgggattacaggcatgagccaccatgcctggccaaaatcttactttatatgctagttttagtggcttacattatagctcttaatggtgatgagttagaatttgttttaaatagttgcctgtaattgggcagttatttctaacttttccttgttatattgtggtggacattcttatgcttaaagcaacttagatgccccttattcttgccaatattcatcacagcaaagacttttcatctctgttttgaactcttattttttggatctgttaagactcaaatgtcttagtaaaagcaaaatttcaaaatccttgttcaatgcttccccctggtggtacctggtgtcagtgagcttttcctcacccaagatacaagggaagaaacattcctcgacagtggggcgctaggataaattgagtggaagatagatgccttcccatctcatacctctaaatatggacataagaacttcagacaagattttgtgtgaaggaaaactgaagactcctttggatatttataaaggatgttttctctgggatggatttagtccactttaagttaggggacatactgatagtgaaagctcttggttcattccatgtaagactcctgagataagttcctaacggaattaataggtatttgtaattcagctcttcagttcttagaattatcttttgtgttattttttctggtattatgtatgaggaggctgtcagaatagtggtcaatagatagcttgacaaatgtttgacaaaagtattgaggttattttgtttttagacagggaggttactgcacttcatagtagttgtggtttgagtctagtgattgagattatttttaatgttactgtccagatgcagtgtatgtagtttcagttttaaaaaatatgtact

SEQ ID NO: 118812 - DNA, 1750 bp, Homo sapiens
tctaattgcggattccttggggtgcattactgaatagcagaccttctagtaaatgttttgtgcaatcatcggaaacctcatgggtctttggaatttcttgtcacaagtacaaaaacagtgatgacggaggttgagcctcagccttactcccacaatttagcctttttttctaagcacacccaacctttgtaaataatgactttatgcttgcttttgtctaaccactaactttatcgatttatgaaagatgagcacatctcccttgacccaaaatggcatgtgttagccacaaagccaaatagttcttgggtttgtattggtacactctagtttgggttttcaaaattatttattgtagttatttaggatttgcaaaacttggtataattcaaataacctgtttttccccccctagaacacttcagttatggaagatcaaaatgaagatgagtccccaaagaaaaatactctttggcaggtaggaatgacggcgcacagattagatagcaactgacttactgtagataggatgctccctcagttaatgtcctcagtggaatcaagagccaagcattttgttttcttttgtgcagttttgctagtttcagaatccaccctaatttatcttcattccatagggaattgtcattacaaatatgctaaataattttggagtttccacaaagattctgaagttggctgtagcctaaaatgttctgtctgtggcctctgcctaagccaaagatggacagtgatggcatcctttgtcaccagaatggcaccatgccacacaccagtgtatacatggatgaccttttctccttttgctctcaacctttactcttctctcccatttccattggtttgccttttccttttaagcttgtctccttctcccttggctctagtttaaggtttgccagttttcttcccaatttcccaggttgtgtgtgtgtgtgtgtgtgtgtgtgtgtgtgtgtgtgtgtgtgtgtgtgtgtgtgtatgtgtgtgtggttgggggtttggggagcaagcaaagtttcacgatttggtggtttatcaaccatgctggtacacatggctttccccttcatgaagacaggattaaaagcaaaacaaatctaaatctgaagataataatgtaaaaataaattctctgggttcatttgatttgaaactgaaaagatagattagttagcaggaacaaagtgcatccaacacatttaagaggaaatgaagcaaagaaaaacaatgctaggaagagcttgctgggctgagcacgtggctggaaatagcatattgaaaatgtgctatagaatagtgcacatgctgttattttcttcttaacactgtgtacagactgagttttgtaccctccacgtttattattttgcagtgggatgctcttcatttactatgatttttcaattggcagtggttcttcacactttagctttcagtttttctttcatttatctttcagtcaactagttaatagttatacaaacactctagggaggccagatgattaggaacttatctgtaaataaaataacacttttgtttatcaaatgaattaatggctgtgaaagtactttgtaaattataaagcagtacacaaatgcaagttgttatcattatatttaacctgttatgaaccattattttggcaagttatttggaatcaaatatagaaataaagggggaaggaaagcatacatagttttttttcttaagataaggcactttt

SEQ ID NO: 118813 - DNA, 1049 bp, Homo sapiens
ataagctaggcactattctgtctgttttatatgtgaggaaactgaactgagggagagagagcttgtgacctaaacaggggtatctaccttctatgtagtggagccacgattcaaacctagtctttctagttctattataccttactgcctcttaaagtagaaactattttcatagggatgatttttatattttaagttgtaaacagacttttctaaatcccaggtcaattacgcaataggaatgctatttatgttgttataccagtagcttgcatgatcagatatctcctcttcagagagaccttttctgaccacccaattgaaaatagcttcctgctttccactgttattttatgttgctttatttttttccttcatagtgcttagcactgtatgaaattatattccatgtttgtttgttttcctcctgtctgttgtcttttcccccaccagaatccaagttctatgagaaaacgggtcatgtcttctttttcactgcttggtaaacacatctgtttctaaaacagtcccagcaggtagtaggtgctcaataattatttactgaatgaagaataagcataataagctggaatgtgaaggaaaggctatttctaagcttggttaggattatctggtataatattatttgctgtcatagttaggactactttggacttctttctttgaattctgtgaatgtaagtattcctgtgagttgaaagattatcttgaaaaaaactgattttgatttgaaagtcttcaaatcagactgtattttgttttgctttaaaaagttctcttttgattgtaaaattaatactatttattatagaccattggggtaaaagtggaaagaaaaatgagaaaccacagtttatggagtaccattcttaatatttttggcatgttttcttttagttgttttttttttttttttttttgagatggagtctcgctgtcgcccaggctggagtgcagtggcgcgatctccgctcactgcaggctccgccctgccggggttcacgccattctcctgcctcagcctcccg

SEQ ID NO: 118814 - DNA, 1034 bp, Homo sapiens
ttcaagcgattctcctgcctcagcctccctagtagctgggattacaggcacgtgccaccatgcccagctaattttttgtatttttagtagagatggggtttcactctgttggccaggctggtcttgaactcctgaccccgtgatccgcccaccttggcctcccaaagtgctgggattataggtgtgagccaccatgcctggcctacatttttatttttaaaaataaagtttctatttttttaggcggggtctcattctgttgcccaagctagagtgcagtggtgtgaacatggctcactatagcgtcgacctcccaggcccaagtagtcctttcacctcagcctcccaagtagctgggaccacagacacacaccagccactcctggctaatttttaaattttttgtagagatggcgtctccctatgttccccaggctggtacatttttaataactgcaatttcattgtctgggtatacaataatttaatcagtctcttattaatggacattaaggtcattaaactttagtgtacattcatgcttcataccttagattatcttattcactgaaaaaattctgagtcaaaggaagtggaccttgtttttttttttttaataattgagatggggcctccctatgttgtccggactggggtcttgaactcctgagctcaagtggtctgcccgctttggccttgcaaaatcctgagattacaggcgtgggccaccacacccagccctggactttaagccttttaatctactagcaaaaacattattctagtttttaatatcatcagcaatgtatgattataatagaaataaatgcccaatgtagaaaactgggaaatataggaaaacacaaagagtaaattaaaaatcagtcttcactcttttgttttttcttcaagcaacaaatgacttatgatgttcttactatgtgttaggcatagggcctggtaatagaggagtgcacaaaacagacaaaaagccttgttgtctcagaacctacattttagtggtgaaagaaaat

SEQ ID NO: 118815 - DNA, 1044 bp, Homo sapiens
atatggtttgtttagttattaatattatttgaaaataagaaaagaaaaacctgccaaattctgtagaaaaaaaaagttgccattctttttgccaaaatgagccctcctgaatcttacagctagtgaggttcctgagtggactttctgcaaacttaattccataaatatttactgagcaattggtatgtgccagggcctctattggttatctctcaaccaagctgaactgagtcagtgtttcatttgcctcagatgtcctgattcaaccagttgattgttatagcaaataatcaggaattcagaccatgtggattattgatttgcccagattcctgtggcatgagaatcataccaatgttaataatagtatgtatcatttattttccacgttctttctatgtgttggactctaggaattggattatctcatttgatcttttatggaaaagttatctaccttgccatttttgtatatgaaattatagaggtgaattgacctgcctaaggttacacatttatttaagtggcagaactgggttaggaacataatctggatgactgcaaagccagtgctctagtcaccagtctgtagtgacaactgccattttaacttgcaactgccatttttaggttgaaacaaattccccttaatttttggagttaaaaatttaaagccaacacagcagcatgatgtaatagactggcaagttgtcttgggaatgtcatttgcagcctcagctgggggagagtgttagtgataagccttttgctggggtaggactgattgcttggaatgacagtgaggatcacgtgaattgagtttgagtgcctccttccaagctctagtgcatatagtgctgggcagtaagtagcacaacttcttgacagctgcctttcttgtttctttttttacttttaataggtgtagtgagccacagtggtctgagaatgccacagaacttatcatagcttttgatataagagaatattttttagaggagggagatagcttggtagaaagaaccctggctttggtgcagacaa

SEQ ID NO: 118816 - DNA, 1050 bp, Homo sapiens
cgacaatctcaccactaatcttgttttgcactcaaactttcacagttccctttggtgggtttttgtttaaacattctctctgtccctcttgattctattcactgtaccctgagaaattagtggttggcagcagaaacctcctttccatagaacatcaagtgggccctcccccaaggtttcagtgagctgtctgggaccatccctaacctccaaactgccaagggtgcaccccctgccccaactaacattcaagttgcctgtgtgaaggagtgatttgttgcggcctctaactgcttcttctcttccttcctttttgtcatcctgcagtgttctgtgccaaggtctttgtggctaggctgcgccaacctggtagagagcatgtgcgcactgagttgcctgcagagcatgcccagtgtcagatgtctccaggtgcctctcttctttcttgttgtaaatgtgtttttacgtatgccatgaacatttgttgaaacttgcagtagtgtgtttaatccaatgttaagtctgctaaatgttctgtgtaaccctctgctttcctccagcctgggtgccccacatggaggagttagtaccaagaggggcccttttgagcaaacgggtctttggctgggccctgtcctccccttttctgctcctgctttttactcttttcccctcaccttgaggttgtaattctcatgtttaatagttgcgcatgtgccaaaaaaaactcctgacattttccatttggctacctttaacagttctttgttgagttgggagggtttcataattaaagtggtgatttttttctattttgaaactcatccttttggcttgctttctctcccctcttcaaaaaaggagcggggagggaatcactactggcataaagcctcaaactgaagtttataaagatcatagctttatgctgccaataatttgtcagtttgggccacctcccaaaggccagatctgacacctgtcctcagggtccacccagttttccaggccgaggccggcagagaattccacagataaaagtaaaacttt

SEQ ID NO: 118817 - DNA, 1091 bp, Homo sapiens
ttggtattattaaggtattaatatgagtactaggtggtcattggagaaaaatcggaaaatatggatgaataaaaatttgaaaagaacattacccttcatctctctaccagagagattacagtgaagatccattttagttttaatgcttttgggtactgatatctttttttttttttttttatttttaaagacaagagtctcactctgttgcccaggctggagtacaatggcatgatctcagctccctgtaacctctgcctcctgggttcaagcaattctcgtgcctcagcctcctgagtagctgggatcataggtgcgtgccacctgcctggctaattttttgtaatttttagtagagacaggctttcactatgttggccaggctggtctcaaactcctgacatcaagtaatctcctgccttggcctcccacagtgctgggattataggcatgagccatcttgcctggatgggttctaatatcttaccttagaataattcaagatgaaaattgtttggacattaattaaaaaaattatagtggtgtttaagcaaagtttggcctctgactttgagtcctgattccactacttttgggctgttcttgaatctaaaaacttggcagatagtaaattttggttttcctcattcttctcatccttattttttttctccccttcctgcctacttctctgcatccccttttcttcccttaacatatatcccagcctgaatataccctgtgatataatattatgacaagaacataattctagaatacagttgctaagaattaaaatgtaaactttttggttacatgtcacatgtttactatcaaattctgttataataaaatgccattataaggaaaagaaagtattttgcacattagggtaatgggccaatattcagttctataaaaggttatagaaaatgccttaaaccgtgaattaacttttatttaacaacctgattgctacattgtgattcttggttttaaaaacaatgcatttatggtggtgagagtgctctttcttataggttgccatcagacattaatagtggaagcctaggttctgaattttagaagac

SEQ ID NO: 118818 - DNA, 1651 bp, Homo sapiens
atggaggagagtgtctttgttacctcaaagtgcaaccaaattctttttttttttttttgagacagagtctggctctttcgcccaggctggagtgcaatggctgatctccgctcactgcaagctccgcctcccgggttcgcaccattctcctgcctcagcctcccgtgtagctgggactgcaggtgcctgccactgtgcccggctaattttttgtatttttagtagagacgaggggtttcaccgtgttagccgggatggtctcgatctcctgacctcgtgatccgcccacctcggcctcccaaagtgctgggattacaggcgtgagccactgcgcccggcaaccaaattcttatagctgtcctaaccctacctgctctccaccttcattaggagaatggtctactacagtcagggggcaagttgctatgataagatccctaagtaactgtggaaatgccaatattctgtttagaggtggctcagaggagagggaatggagaagtttgagctgtcaattgtatggcctcatctgaaaaaatatggcagcccaaaagaataaaataaaaatcacctgtgtttaattccagatttatatgtgtgtgtgtgtgtgtgtgtgtgtgtgtgtgtgtgtatatatatatatatatatatatatatatgcatttttttttttttgagacagagtctcgctcttgttgcccaggctagagtgcagtggcgtgatcttggctcacagcaacctccgcctcccgggttcaagcgattctcctgcctcaacctcctgagtagctgggacttcaggcgtaccccactacacccagctaattttgtatttttagtagagacggggtttttccatgttggtcaggctagtctggaactcccaacctcaggtgatccgcctgcctcggcctcccaaagtgctgggattacaggcatgagccaccatgcccggcctatgtatatattatatttattaaatgaacatgggatcataatgtaagtcctggtttgttgcctttattcacttagtgtttcttgaattctttccgtgtattgtaactttctttctatgcattaaacttcctttagtgtctgtaaatatattcgtatagcatgatttctatttagcagaaacacaatagtttgtcttatgggtaatccctaatctgtggaacctgtccctttggttagcattttccctttgctattatgaacagtgatgtgaatgacatcttcttggctatatttttggacatttctttattttgtctccttgataaaatttcttacatgtgaaattgctgagtcaaatgatgtgcatgagtttcaagtcttgactatgtattgcagagttgcataccagagattgtatcaatcagcaatatagatgagtgacaggtagataaaatttgaaaataaatcagggaaacttgctgctctacggagtttaatgtcaggtaaaggaagtgacgggcaattatagataagggaagaaagcagggattttagagtcagatagaatgcagttttgccattcttgacctctggcaagtgatttgatgtctgtggtccttagtttttcttgtctgtaaaactcagctgcttgtttggccagaggtggtatgagagttaatgagtacggtatagc

SEQ ID NO: 118819 - DNA, 1051 bp, Homo sapiens
tttgggtggggacatgaagccaaaacatagcagaattcaaaagattttttaacagggccaacttttattctgcaggtactttttcagagctctcaatgagacaagtagcatgttagatggactttcaaagtctttggaagtgttaagtctacaaaagatgttaaaaataccactaattaagccaggcgtggttgctcattcctgtaataccagcactttgggaggctgaggtgggcagatcactggaggccaggagtttgagaccagcctggccaacacagtgaaaccccgtctctactgaaaatagaaaaaattagctgggtgtggtggtgcacacctgtaatcccagctctactcgggaggctgaggcatgagaatcacttgaacctgggaggcagaggttgcagtgagccgaaatcatgccagtgtactccagcctgggtgacagagcgcaattttgtctgaaaaacaaaaacaaaaaaagctgctagttaagttttaatactcttgaaggcagtggaactgcatttatttaaaatgtttcatactttaggaatttagccatctttttccgtttagcaaaccaggaaataatttaagcaatatggctttatttgcagaaataatttttaataccagaatatatagttttgagaatttttgtctatcaaagcatttagtatacttgatgtttagtaaacttttttaaatgactaagcagtttaaaatgaaaaagataaaatagaaatatgatgtagtctgactataattgggtcaaacctttattgagagaagatacatttctcaggtcatcttccagaaagtggtatctcttcttagaaaaaaatgagaatgttcattacatcaggagaaaaagttttcccttccatacattcttttttttggggggtgatgggggacagagtctcgctatgttgcccaggctagagcgcggtggcgtgatctcagcttactgcaacctctgcctcctgggttcacatgattcttctggctcagactcctgagcacctggggttacaggcatgtgcca

SEQ ID NO: 118820 - DNA, 1037 bp, Homo sapiens
ttataagacttttgtaaccttagatgataaatatattcctttgtgagaagttccagagtgttgttttctgtccatattcatgtgtacacatgcaaaaagcatctgtaaacctatagattgactttattgttgcaggtgttaagccataactatctgctgttaagactgggtgctttcaagtggtgtgtactgacagcacagtgtgagagatttagaggaactagactagaaaaatattttaagaacatggacaaaatggtctataaagtctgtaaggtccctttcagctccagcatttagcgaaattccttgcttcaagtcgtgagaactccccttttccagttgcctgcaggattcaaacaatgtgaagggaatcaaagacatccttgctgtgcagcaagcagcaggagtcccttactctaaggctgtcctagcccctgcctgaaagacaaattaatttcttagagcccagtggactgtaaggcacacattttatttttatttgaaaccaaggtcagcttaggatataagaacaatgaactatatgaagaagagcaagtgtaaactttactgtaaaattaagggatgataaaatgtgccactttattatctttgacaactcgcttttcatgctgttcttagctaaagaagcaaaatttttattaccattgttttccaaatctctgtgtgggcgtatgtatataaaattaaaacactactaacttggaacatgtatttatttggtgtaggggcctgttaagtctttgaaaataaatgttgtatgtattcaagaaatgagtagtgtttataaaatagtagagggcttgtttaaatgatgtaaggtttgaatttgtattagtttgttctcatactgcataaagagctacccgagactgggtggtttataaatattaagaaaagaggtttaattggctcacagttctgcatggctgggaggcctcaggaaacttagaagcatggtggaaggggaagcaggcatgtcttacatggtggcaggtgagagaggaggaactgtc

SEQ ID NO: 118821 - DNA, 1051 bp, Homo sapiens
gaatacagaacagaatcaaatgcataccttgcttccagaagcttgtagtcttttacataaaaaagtataccatagtgtgaaaacttgtaaggatcacgggaagtagacaaacagtgttgtaggagttagaaaaggaaggaaatttcataagggatattttaaaaacttacccttggccgggcgcggtagctcacgcccgtaatcccagcactgtgggaggctgaggtgggcggattacctgaggtcaggagtttgagaccagactgaccaacatggcgaaaccccgtctcactaaaaatacaaaaaaagtagctgggcatggtagtgggtgcctgtaatcccagctgctcgggaggctgaggcaaagagaatcgcttgaacccgggaggtggaggttgcagtgagctgagattgtgccactgcactccagcctgggcagtagagtggcactccgcctcaaaaaaacaaacaaacaaaaaaaacccaaaaaaacttaccctttgaggctcgagcagaagttagacgtaaacatggatgtattgggatagtggagcttcatagcaaagggaaccaagtgaacaacggtttgcagacagtggtgtttgttgtctatctgggagacaagtaagtaattctgtgtattgccggagtattgcttgtgtggaagggagtatgggtgatgaatttgaaaaggcaggttataactaaatcttgaactttatcccgttaggtcattggtctccaacctttttggcaccagggaccagtttcctagaagacagtttttccacagaccaggcacggggagtggggatggaactgttccaccttagacatcaggcattagctggattctcttaaagagcatgcaacgtagatccctcacatgcgcagttcacagtagggttcctgcttctgtgagaatctaatgcctgggctgatcatctgacaggaggcagagctcaggtggtaatgcgagtgttaggggacagctgtaaatacagataaagctttgcctcctgctcatctcctgctgtgaggcccagttctt

SEQ ID NO: 118822 - DNA, 1834 bp, Homo sapiens
gtcactttaattgccttacctacaatatgaacaatcagaacatctttaagagtcattgcctgtggactgtcaacaaatcttagaatttaaaaattacttgggttcagctggatttgagattctttgtcacagttacaatctttgctgctaaacacaaagactacttgagtaccattatagtatgtcttgccacagtcttttttttttttttttttttgagacggagtcttgctctgttaaccaggctggagtacagtggcacgatctcagctcactgcagcctctgtctcccgggttcaagtgattctccttcctcagcctcccgagtagctgggattgtaggcatgtgccaccaggcccggttaatttttgtacttttagtagagatggggtttcaccatgttggtcaggctggcctcacactcctgacctcaagtgatctgcccgcctcggcctcccaaaatgttgggactacaggtgtgagccatcgagcccagcctataatgtgttttgttttagcattaatattgtgggctttaggctgggcatgggggctcacacctgtaatcccagccctttgggaggccaaggtaggcagatcgcttgagcttaggagttcgaggccagcctgggcaacatggtgaaaccctgtctctacttaaaaaaaaaaaaaaaaagacaagaaaaaaatatcatgggctgtagaattgcatggctctttgttaattaaatgcttttttaagtggcaagatctagggaattaccctttcaggatggcccaactgattcatgtaggctgaaatatttactcttctgtattttcattgttctccattttgatgttaattaatttaggacctttgagagtaaagcttgatttcttctcctctctcagaaatcatgggctttctgacccttgaactgtggagtccatagtgctccatgaaaagggcatgggctctactacctagtagatgtgggactttggataggttacttctttctgctcatctttttttgagaattaaatatgggtaattaatgtaaagggcttggccagttagtagcttttcaataaggtaggtattactataattactgcaggagcattttggctataatgtagcaattgtggaagtagcaaatttatgttcgagtaagttcagtctttttgtttttatctttgttgttctgctgaatgctttttctctttcccttttagtttgtttagaatttgcagtctaatttgatatggtagaaaaagaatattgatataatatggacaggacttaatatttaatggtgtcacctagtaaattgtatattagcgttctttatgatttttcccagtttacgtgatcattggccattgtacgggactggcctttactgagtcagaagttcagtcttcagttatatgttttgaagcacactatattttagctaagggtagaggatttgggtaatatgtagatatgatgtcttatatgtagcaaaccaaaacattttgttaggtacgtaaataaatatctttatggtagatatttgagccctctcgtatcattctttttggctgacaaactatttttctaatggtggaggagctgtcttagaaaatggataaggaagttcagtgtagctgaatggtctaggacaatttatatggatgatagggtaggtattttttagctgctctcatttggaagttgcatgctgtttatcatgagtaaatattaacattagggatgttccattatttgttacgagttttgtatcctttcaacacagaggtgaggaatgctgctgcaggcattttatgccaaatagctgactc

SEQ ID NO: 118823 - DNA, 1008 bp, Homo sapiens
tctacaaaaaataaaaaaattagccaggcatagtggttcactcctatagtccctgctactcaggagcctgaggtggggaggattgcttgagcccaggagtttgaggttgcagtgacctgtgattgtgccactgcactccagcctgggtaacagagcaagacactctcaaaaaaaaaaaaaaaaaaaaagaaaagaaaaaagaaagaaacgaataaatgaagttactggaaatgttgtctttttttctttttggatcttttttttttcttcctgtcattgactttctcggggtgagtggggttgtttagtgacttcatcaagaaattggatattactttgtcaccacctttctcctcatgtagcacaccactaggggtgctaacttactgaatgcagactcagtggacacaggtttcaatagggtccaaatgaataaaccacacacacacacacacacacacacacacacatttatataaaatatatggacctcactgacctgcctaaagaggcattggctcaaatatatcaatttttgcccctgattttgcagtaggttagatatcctttcagatttgacatggataaacatgttcctgcacacaagtcttggcattctgggctcttgactgctatagtctgtctcctgcaaatagggagctagcccaggagaatcactcagccattacatagattcacaacagcacatatatgcctcttactagtgttgtttgagcctgtgaattctagaaacaaaattatctgccctgtaagatctgtgggatcctgggttctaccttgtgatatttgttcttcatagaaaacaaagcattttaagtcctagtgattccaattccagtcttcctttgtattccattctcccttatggcttttctgcctactttccttgcttactgtatattctagcacatggaggaccatggtcctccagattctgctcacacgtttcctttgtcagcactgataggaatggacctaagcccattt

SEQ ID NO: 118824 - DNA, 1238 bp, Homo sapiens
ccgcctgggcctccgcgtcctaggagaggtctcagcacccactccccagcctaggtctgtgtggatgccaggataggccctacagagctgggggggcagggagctttcgggtttgaggctgtggcggataaggaggcctctttcccgggcccttgtggtgtccggcttctcggacaaagggtttcctacccggcggagagggatgtttgcatagcaagggcccaggtactctggattccatcctccaggaaagagaaggcgcaacttcacgttttccagagctgctttgggaaattggagatgactggggagggagccatcctcatcactgccgcgaggtctttcttctcagaaagaaaaaaaaaagaggggaatccttggcccccgggggaagcgaccactcttctgttagaaaccactggcagccaggccagactcccggtccgtggacaccctccaccctcctccgaagctttaggatttgaaaccagaaggggtttttaggaacaggacagtgagagagtggctagaagtgaagaatttgctaattgatggatgatttggtggaagaaataaaatatggcagatattacctgccaacgtgaacatgagggaaatcaaattgggctctggagagctgggaagaggaagtctgcatcagcaaatggacatgtccaggatttcttcctatggaagccttgacagtttctttgtatctttcctaacacggtaacaacttcttccccagggttgagaggagaggtggaagaatctacttaacccagcaaaatgttttcctagccagattttcttcagtgtgaaaatgtttattgagtcagtgattccactgggtagggttggtgacatcagagccacttcccccatttaacgctataaataataaatggtgacactgaaagtctgttggatagctgcatggtttctgtggatgatggtgtctggggagttgagatgcttgttttaaaaatggaagtacagtagcataaatatggaggcagcttaatgtttgctgtcctttgcataattcacagaactggacttctctagcattcttgaaaactaggagggaaaaaaagaaactgatagtttttgatttttgcatgcgtgtgtgtgtgtgtgtgtgtgtgtgcacgtggggttgttttcaaagggatgtcacatactgagtgatttttccttttcagcataatttatcatacttgtagtcaagtgtttgg

SEQ ID NO: 118825 - DNA, 1408 bp, Homo sapiens
aacctgtatatattttgtatgtgatatatatgcccatgtaatgtgatatatggatgtatatacacatatgcacgttaaataacaagatctagtaataggtctaatagctactgtaatttcaaagtgataaaaatattttgagatctctaccacagctgcaatgtgatatgaaatatctgggatttctactggtgacagtcacagctactgctaatactactacagtttgtagtaaaactaaagaccaaatcttttgccatccagataccaagacaccctgaattctacatatggatccattgtgggaagagtctatggacccaaagttaagaaagcctgaatcgtgtttcagaggcatggcagacagattcttttaaatacggcagggatggctagtggctaggcatctgtacgacccttgattagttcaagtggcagttgagtgagacacgggaggtatgccagaaacacctctggcagaaggtccaggtttgaaccttataggcgtcacttacagtgttttgagaactggcttgacccttccctttgcctagtgcccatttcctcatctagaaaatgagaatgagcctggtgtggtggggggtggctcacacctgtaattccagctgtttgggaggctgagacaggaggattgcttgaagccgggagtttgagaccagcctgggcaacatagtgatcccccctgccctgtcgcctgtctccacaaaaaaaagccaggcaccgtggctcatgcctataatcctagctactcaggaggataaagtgggaggatcatctgagcccaagagtttgaggttacggtgaaccatgatcatgccactgcactccagcctgggtgatagggagaccctgtctctaaaaaaataataaatacataaaatgggaatgatggtgtcttcctccgattgttgaaaggattcagtacattaacaggtgaaaactttttggggtcaatgaatgtttgttgttaaatgagaatgatattaaatgtctgtagagaacatgccccatgacatgctctctctcagccaagcataatgtctttccaaagagaaacccgaagtctgagctgccgtatgacctgggaggcacctgcgtacttggaagataagccctttcttgccgggtgagtatggttaagtgtgccctgctttccaccccaatccaaaagaacaacctgaacggcaaataaccttgttattttattagaagcatatttacattcttgtagttaactttccagagaacattttacaaaaattttgtataaagtctggaaactacataaaaataatttctatctttcataaagggaaaataaaagttagttacatttactctaaaaccagacagaggaaaaaaacccagttctgtctgtcccttatac

SEQ ID NO: 118826 - DNA, 1040 bp, Homo sapiens
cccagttctaccaggccaggccagcgttgggaaccaccagacagggctgctttgggctttgcttacagtatttccatgtgtagcctggcgtgtgagaaagtattaggtgaaatgccagtttcatggttcaggtgaaagtctgtgatcattcccctcgtggctcgtccttcacatcacttttgcccttcaaggagttgccgcgtccccgctcagtgccgcctgagccctcagagctcccctgtgcttttctggatggggactggcggggtcacctagcctcaccgtggagccaccgtgcaatgcccatctctgagaggcccacgcggtattcctcgtgccctgtgttagtgctttctgtataagggacagacagaactgggtttttttcctctgtctggttttagagtaaatgtaactaacttttattttccctttatgaaagatagaaattatttttatgtagtttccagactttatacaaaatttttgtaaaatgttctctggaaagttaactacaagaatgtaaatatgcttctaataaaataacaaggttatttgccgttcaggttgttcttttggattggggtggaaagcagggcacacttaaccatactcacccggcaagaaagggcttatcttccaagtacgcaggtgcctcccaggtcatacggcagctcagacttcgggtttctctttggaaagacattatgcttggctgagagagagcatgtcatggggcatgttctctacagacatttaatatcattctcatttaacaacaaacattcattgaccccaaaaagttttcacctgttaatgtactgaatcctttcaacaatcggaggaagacaccatcattcccattttatgtatttattatttttttagagacagggtctccctatcacccaggctggagtgcagtggcatgatcatggttcaccgtaacctcaaactcttgggctcagatgatcctcccactttatcctcctgagtagctaggattataggcatgagccacggtgcctggcttttttttg

SEQ ID NO: 118827 - DNA, 1069 bp, Homo sapiens
cagctggagcaaatgcataaacgttttgaacaggaaatcaacgtgagtgcgagaaaagatgggaccctgcagggcttcttgcctccaggtgttctctcagtggaagctacatagtgggaatgattgggtagtggagagtaattcacaacaattgcccaattcctgggggcttcccgatcttgttaggcagtgacttgttaacacagaaccccgtgaaggtcacagcgatcctgagtcccacaggaggatctccagaggggaaataacctgtattgagcaccgtgcaacaacacatggtctggtctcccttttgcagatgaggaaatggagactcaggctaagtaacttgccccaggtcacacagcaacggggtagtagagctgggattcaagcttaggtctgatcacaagctctgagttctccccattccacttcccatgtccctcccaggtataaagtgacttcgctaagtttctcagaatttctgctcctttcaggccaagaagaagttctttgacacggaattagagaacctggagcgtcagcaaaagcagcaagtggagaagatggagcaagaccatgccgtgcgccgccgggaggaggccaggcggatccgcctggagcaggatcgggactacaccaggttccaagagcagctcaaactgatgaagaaagaggtgagtatgtgctcagtgggggcaggggcatctcggagtattaggggccttcttggttgcaagtgatcgtggcctcaacctcaccttggcagcagaggggtacggctgaagagctcgggagcaggtgagcctggatctgtgtgcccaagctgcgccatgaggagccacttctccatcttctgaactctgctttcctctgtgttgctatggctcagggcaggcctcaccctgtggcctcaggcagcttcctttacatcctcccagcttagcaacccctgccgagaaagagcggggaagaaggaagggctggtggtccgggggaatttgagatgctgttcccagaagggcgagtgggtgctgggtgggtaggcacatacaacatgccctctatg

SEQ ID NO: 118828 - DNA, 1067 bp, Homo sapiens
gcgattctcctgcttcagcctcccgagtagttgggactacaggcggtcaccaccacgcctggctaattttttgtatttttagtagagacgaggtttcaccattttggccaggctggtctcaaactcctgacctcaagcaatccacccatctcagcttcccaaagtgctaggattacaggcgtgcgccaccacacccggcccaccccttagtattgcttccttccagaaggctccttggtggggttaggtgccctctcccacaccccatcataagcatgctgtctcgtcactttcagtagagggctgtgtctctctagctagactttgagctggccagggagagggttgctctgtgtctgtattgtgggcaccctgtgcagggctggcccagtagtgctctgttaaatgtctgttggcatctggtcttagagacttctaagtggtggagattgtagggagaccttgtacagtggtggaaagtgcagaaaattttgacgttagaggatcctgatgcaaattctggtgccactcccctagttccaatcacatttcccctctaaacctggacttgcacgtccgtctgtggaatgggggaaactccaagcctcgggtccctgtgatgacaggaatgaatgctcattgtcatccatagggtgctagatgtgcaggaataacttggccagccggaatttccggtgcagtcaggttccagagttgttatggaaggcaagggtggagcgtgatcaatattatccttaggaaggtgccacggtggagactaagctataatatgttcattcagtccagaggagctcgttttccctgtgctttgcaatagattgctgtttaaggtctccagatgagcagcgtgcttttaggggccttttttttttttgagatggcatctcactctgtcacccaggctggagtgcagtggtgcgatctcggctcactgcaacctccacctcccaggttcaagcagttctcccacatcagcctcttgagtagctgagattacaggcatgtgccaccacacttggctagtttttgtactttttagtagagac

SEQ ID NO: 118829 - DNA, 1016 bp, Homo sapiens
tcagataatttgatcctgggctgggcgcggtggctcacacctgtaatcccagcactttgggaggccgaggtgggtggatcacctgaggtcaggagttcgagaccagcctggccaacatggtgaaacttcatctgtactaaaaatacaaaattagctgggtgtggtggctcatgcctgtagtcccagctacttgggaggctgaggcaggaaaatcacctgaaacctgggaggcagaggttgcagtgagctgagaaagcgccattgcactccagcctgggcaacagagcaagactctgtctcaacaaaacaaaacaaaacaaaaacaggtaagttggtcccttctgtctctgggctaatgatgctgtccaagggagtgttacgcaggctatacaggcaatggcaggtttcctagtcacctcattcaaaccagaggaaaaatagggaaatgaattttaatggtatatttatcacttcagcatgtaataaatgcagaattaaagcaatgtgttgtattctttttcatgcgaagtctttgaaattggtgggtgttgcacttatggcacatctccatctgcaccagccacatgtcaggtgctcgatagtgacatgtggctagtgactgccatgttgggcacgacagatctggcctctactgttgcctcctcaaacccagtggtcactggatttgggaagtgggcatgggccagggccaggccagatctgcaatagcatttgggggcgtggctcattcgggctgccgtgacaaaataccataggctggatggcttgcaaacaataaacattttatttcacatagtttggaggctgggaagtccaagatcaaggctcccacagagttggtgtctaacgagggcctgctctgcttcatagatggtgccttctcgctgtgacctcacatagtgggagggacagaaggacagctagccttctagggtcttttctttttttttttaaagactgcactccttcatccaggctggagtgcagtggcatga

SEQ ID NO: 118830 - DNA, 1024 bp, Homo sapiens
gagccctcccaggccgtcttgcccgtccctgagccagagtcttctcctttcacctcctctcctgcctactagtttgaaagcttgggtttccacttcctctggggatggggaaggtctcagtcctcccctcctcctccggaaagagatctggccccaggcagtaaccttgtttccgctcagccaagtatttttaaacccaagtccatgctattgtgagtgggtttctaactcgtgactcagccctcatccaagggggtctgaacttcccgtggatgacgcccttcggcttctgcgtggggccctgcccacagccctgcgggtctgatttcacactggccgttctgggaattttttttggctgatgcgaaagcaagctgcggtggaagggatcgaaacaaacagatggacccgccctccacctaggactctcctgtggcctggcctgccaaggttacctagattagggggactctccagaggttgtcaccccatagcccccagaacagccctgggtggtcactctcaggccccctgctgctgagggtagtggaacagggtggtggtgaagggaagagatttggggctcagtaggatctgggtcctagtcctggccctatttgaaccccaaataggtgaccacctcctcctctgaacctgaatcttgtgtctgcaaagtggagttggccacagggctgagaggagttgaggaggtgatgtgtttagcatctgattctcacccaggaagggctcaggaaatgacgatgaggtgttatgattgctgctcttggtgtcagatggagaagctcctgacctgtcactatgactttagggacaaggcaggaatacctcggtgttgatagcatagccctcataccagcgcttcctcacctggcactactggcattttgggtggggtcgttctttgttatggagctgttacgtacattatagggtgttccacaggatccctggcttcagcccactggatgccagaacacctccttgcagttgtggcaaccaaaag

SEQ ID NO: 118831 - DNA, 1051 bp, Homo sapiens
agcctgggccacagattgagactcagtctcaaaaaaaaaaaaaaaaaaaaaaggaaactgggtaagtacatactggaaatgtatatacggtaagaaaagacctcagaaggttctctgaggaaaaggatcattgaaggagtgaggcatttgagctaactggtgattctctgaaaatcaccagctagagcaagtgaggaaaggaatgccaagaagggatgcgatgggccacatctgtcctttacgagggtgggcagagtaggagggcggccaagaggctggggctgcctcagggagaagctgttgaaaaacctgaaccattcgggaaccaaaactcattttccccaccacccatcttttcttcctctttttagtgaaaggaggaaaacttctgatgcattcctaattcagtgctcccattagcaagaggatggcagcagccgcgcggctacttgcctggtgggccagcagcatgcacaccagcatgtagaacttctcaaagtcgatctcgcccacagcgttccagtccagcatgtcaaacacaatgttgatctgtgcctttttcaagtcagtcacatgatgaaggaagtgatagaacagcacatctgttaaggtgggcaggtgaggagatgtgttatttggatatagttccaaaatgctaaacagctagaagccatgtaaatggtagtgatgttggaagcttattgatctaggaagaatgatgataatattttgtttctggctttgccactgtactttctatagttcctgaaaccttcgtcgcccttgagcttgtggaaaagcactggacctggagttgtggagaatgagatcgtggacagggcttggctcctgcccccagctcacacactccatggagcagacagatatgtacacagcactgataaaaggcaaggcgctaacatataaaatgggcacaaagtgctccttatgtatgaaaggagagcttaattctcactggggactgagaacactttcttggagatgctgacatttttcctttgcctttcccttgagataattaaaatgagga

SEQ ID NO: 118832 - DNA, 1122 bp, Homo sapiens
acttacagagtgctacgatgaactggggaacagatatcagcttccagtgtattgcttggcaccgccaatcaacatgatagaggaaaagagcgacatagagactctggatattcctgagccaccacccaattctggatatgaatgtcagcttcgtttgcgcctttccacaggcaaagacctcaagcttgtggttcgcagcacagacacagtattccacatgaagagacggttgcatgcagcagagggagtggaaccaggtagtcagcggtggtttttttctggcagacctctcactgacaaaatgaagttcgaagagctgaagatcccaaaggactatgttgtacaggttatagtgagccaacctgtgcagaacccaacaccagtggagaactgaactgagccctgttggccagctcccacatccctctgctcctttttatggttcttgttgtcatttcctactctgcggcgtgaaatctatttcactgctctaaattccctatgaatggatttagttctgaggaattaccagtgaaaaattccatctgtgatggagaccaacaaaaataataaaacacaaagagccaggctttgagactcatgtaattacaatttctaatttgaaaggcagttaagaaatagataaccatttattttagaacactcaacaactatgtaatggctatatttcagtgacttggactgtaaatgaaacattgcatccatgaaggacagcaccaagcacctttttgaatacagaatttttttagaaaaatatatcaaattatataatttccagaaaccataaataatggatataaaacttaacctttttgttttgttttgttttgttttgttttgttttgttttgttttggttaatggaaactgaaaagagcagtatttgaggttgcttctattctggttttttattcttagctcaattaatatttagccataaatgagtagagactggcaaattgtgctttagtgttgctttcctcatccccacatcttgagctccttatttacattcacactaaattttggtgccttccagcacattagtggcaggcacccttctggaacactaggcaataatttcatcaatacagtcaggtct

SEQ ID NO: 118833 - DNA, 1116 bp, Homo sapiens
gagagcacagagggataaacagtgaggcctttaaatgctgaaaaatacatctttctttctaacctgaaagagtgcttgaaaaacagtataaagcattagtcctaatgacatttagtaaaggtattatttgtcagctaatttagttttatcgttcttattttctagtggaatattttgaggcataatttaaaataatcatagaagaaaacagttgaccaaggaaaacagaaacatctgagccaatcatctagataaaagataaatagaaacaacttcagaaaattatgtatgaaatcagaacagaaggtggagacttggcagctttcttcctaccatgaggagctttcagggcttcctggcctggggaaatgatgccctggcacttatttagcctggtggccatctgtctctgctaggacatgaagccaacaataggtttgtgagaagaaaaaaaaaaaacctgtccttccacagaggatgttaggtgagcaatctgagcaatcctggctagaactatgttaaaactagtaattgctaaatgaactgcacccttggtggccagtgggtggtaattaaaacgttttgtaaaattttttgtaaattttgtaaatgtagctaaaagtgattttggaaaaatagaaaaatccctgtattgtcaacttttagagtgttccttcccttttgtctttaaacatactgggtttctttaagcaaacctctctgtattagtctgttttcacactgctgtaaagaactgccggagactaggtaatttacaaagaaaagaggtttaattgactcacagttccacagggctgagggggccttaggaaacttacaatcatgatggggaagcaaggccccaaaggggaagcaaggcctccacatggcagcaggagagagaagagtgaggagcagagcgggaagagtcccttataaaaccatcagatcttggccgggcacagtggctcatgcctgtaatcccagcactttgagaggcagagacaggcaggtcacttgaagtcaggagtttgagactagcctggccaacatggggaaatcccatctctactaaaagtacaaaaattagccaggcatggtcgtgcatacctgtaa

SEQ ID NO: 118834 - DNA, 1048 bp, Homo sapiens
ccagctactcgggaggctgaggcaggagaattgcttgaacccaggaggcataggttgtactccagcctggacgacaagagcaagactctgtctcaaaaaaaaaaaaaaaaaaaaaaaaaagaatttttcatttggccaggcatggtggctcacgcctataatcccagcactttgggaggccaaggcaggcagatcatgaggtcaggagatcgagaccatcctggctaacgtggtaaaaccccatctttaataaaaatacaaaaaaaaaaaatttgtcatttaacaaagttgataagttaattcataaacataaagcttaggaatgaaggcatgaagatatatttacacaggagatgggatttttgctggactgttgtagggtttagaaatgaaacagggccttaatgaaggatctgatgactgattaaccataaaataaatgttatatcatttttctctctctatcctcaaacaaaaatagttcagggttataaattgtaaatgtattccagtttatctattcctctgctgttgtcaaccttttccttcaattagagcaataaaggcctgcaaacagctgaggtgagaggttgtccctgagtcagaaggcttgtctctgaaaaagacctcctttttatgccattctgggtagtggaggtagaggaacacagggtttctacatggtcccagggagtatgttataccaacttctacttctgtaaagccagatcagctttacacagaccactgtgttcaggtgcttctagtctgctccgttatcccttttagagcactgaaaattaaagatcagtgtcccccttaaaactgtggtgcagtgttacacaagctcttaatcatgatttgcctatcatatgacatcaacaatacgtatacaggttaagccacttttcacttatgtttactaaaagagatgatagacttagtttttctgaatgccacagtcttgatggctgatttggtagtttgagatagctagaccttctgcttctaaagcctgattgccaaatataaacttgatatatataat

SEQ ID NO: 118835 - DNA, 1036 bp, Homo sapiens
caggctcaagtgatcctcccacctcagcctcccaagtagctgggaccacaggcacatgccaacatgccaggctaatttttgtgtattttgtagagatgggggtctcaccatgttgcccaggctagtctcgaactcctggattcaagccttccttccacctcagcctcccaaagtgctgggattacaggtgttgagctactgcactcagcctgtaattctttttaatgatcctgtggagggtgtactgagtggaaaagagctaccaatttgttttgcatagagcagtctaatgtctctattcacttttgtagttccaaaatgtgttagaggaatttcaggatgcacaaattagctagcaggtaaatttctggctgtgattttgatgaaataatccaagagaggaatgaccagataacttttgatacatattttataaattttgggtttgatctcagtcttttatttttcttttcagttgctctaggtcgtaaccagcctttgaaaaaggagaaaccaaaatggaaaagcgattatcctatgacagatggacaactacgcagcaagagggatgaattttgggatacagcaccagcttttgaaggccggaaagagatttgggatgccttgaaggctgctgcacatgcttttgagagcaatgatcatgaactggcacaagcaatcattgatggtgcaaacataacattaccacatggtaggtttggtgttcctcaaggacagaggaaacataatcaactttgtttctgatagcaagaaaccaaatgggagagtgtttttccttgctatgaattattctaacttttttttttaatgtagcaaggaatagcattcctctttttttcttgtacatctttcagctggagacaggttttactttgtgtgtttgtgtatacgtatatattttttaaatatatcttaatttcagaaaagaactcttgatcatctaaaaagtttccgtgtaacctagtcctccatgaagacctcttccctccaccctcccacccccacctcaccagcc

SEQ ID NO: 118836 - DNA, 1078 bp, Homo sapiens
taaaatttaaaaattaaagaaaatgcatttggaatgattttccttaagcaacataaacgcatcatctgttctttttgtgggactttgttcatctatgcttagtacaaacggagagaggtgaaatgaacctacctcacatttgtaaggaaggtgttttacaatttttccaaggtactttgtacccttattatgattgtttttctgttggcttcctcttttcaaagtcctcttcctttcatttgctttagttttaggtcctgagattcttctgtagaggttttgttgtttttgtccatgctttgtaattctctcagaatgacaggaaaaattatactgagttatctctcatgcatttaatacatatgaggccagataattctgtagaaatactcagacccaaaactttattcagataaatatcttactgagtctacctgcttactgtgccatcttccacttcctggtcagtaagctgagtgttgtctgtaaactgtctctaactcatctaaatgataatgtagcagaaaataaaatcaaccttgcattccatcgtgttggtgcaatcagtgggttgtggttatcagaccagattctgaacatcttctagagaattatgctctagctgcattgtctgtattatttggaagaggtagggaaaaatcattagtatagactgtgtttctcgcatttgaattaaatgtaataggcacatctgtagtgttactcccagtagacactcagtacatatttgttgattaaataaagagacttggattctgtttccagctctgctactaaatggatgggtttcctattctgcttcctcaccctttcagaactcacctgttttgcatttcactaggacaagttagagggcaaaaagtatttgagttaatgctgagtgttttaagtggaaaacagctagtcttttggtgtgccaccctgaggggagaggacagaagagacctgacctggcagtctttattgagaatatagcctggagagtagagatagcccagggtctggagtcattttattttctgttttgcatagtccaaatttcatctggccctgggcc

SEQ ID NO: 118837 - DNA, 1055 bp, Homo sapiens
tggtgcttgtcccaaggggtaagttgaaggagattacatgaaagtgttctctctgctcttagaatatcagcatgtggtcatttggggtcaccttctggttttatagttgataaagggagcagagacattcttgcttcctaaagtgtctcacttagaagcgggggagggggaacctacagtggtcctgtaatacagagtttcattatcatagcttgtacgttttctgatagtcacccatttctgtcttgggcagttacctggataataattttaacttgatggtgattcaagagcttttaaggctttgatcattgttgtattgctaaacattaacacatagggcctattcaacaaaccctggctttcactgctctgggtttgtgatggctgcatcatgtcacagagatgctcttcctaaatgaatcggagtagttcatattctctttaaattctcataattttgaagttaaaagttgagatgtgccacaacatataacaagtaggacatagtgaaaaggaactttagaaacaataaaatgatacccagtacttctggaatggacatcgagtgagacacttaacctgtaacaagagctctgagaatgggaagaattgcttatctgttattgaatgaaatgacatgtaatagtcttggaagcaaggagactatctttctgcattgtatcagttgtagggtaggaataggttattgtgggtgtttgtatttttgttttttatattttaatactaaatttgctgactaaaacctatgatatacctgcataaggcaagcacgtaagtgaaaaaataactttttttctataacaagcaatccttaagcattttaagaagggaataatcaataggaacagaacttatacttcagtggtaaagataggtttttcagctggggacaaggatggatactaacagtcttatctataggaagtttcataattgctcgaagagggaggaaagaagttttcagataaaacattaagagagagtaaggaaaattaagatgtattaatagaataaaattcagtttccaccaa

SEQ ID NO: 118838 - DNA, 1150 bp, Homo sapiens
ggcagtactaggctgccagcaagcttttcttgagtcactggtagttcaaggaccataggctgagactttactaatgcatatgtacttaaagatgcatttgtgttggccaagaacaatcagcatgtatttgtcttgcatcagctactttgacatgccgtcagcaagaatcaagtttggtttttaatatatccgtatattgagctgagcggttaaatactgctgagtgtacattgggtgttgtgatgcctatttttgcatgtttgcagtgaaacttagaagtttccattattgctctgttttctgaagtggaatttctgttgaagttagacatctaagaaaaatgaaatatttacatgtgaaaatcattctaaatgaattttatttgagtgtgaggtcataattatatttacatttgctcaaagcttgactaagtaatgaattagtgacttgggcttttctcattgagttcttatcctcacagtaaaacctttaagttttttttgcatttattgtagtgggcttttaggtataagcaaggtgagactatttctttgcattggttcagatcatttccatgcttgtgggctatgtgacagtaccaaaggagtggagtaacaaatagttcagttcatttaattatgaatctgccttcaacttagggcaactactttatttcttgagttaagatgcttcttcctgaaactttaaaaaatagcctccattattccaactcccagcacttgacgctagctgtaattagagatgtaaataaggcctgctgtatattaagtaccttatggcctactggaggaatcatacatttaagtagaacttaggtaaaatttaaaaagtctctagagcaatgaatattatgtaagttcaaggaggagtggggggcagggtcagaaagcatcactgaaacagtgatacaagaagttggtcttttttttttttttttcttttgaggtggagtctagctctgtcacccaggctggagtgcagtggtgcgatctcggctcacggcaagatctgcctcctggggtcacgccattctcctgcctcagcctcctgagtagctgggactacaagcgcctgccaccacgcctggctaatttttttatttttagtagagacggggtttcactgtgtt

SEQ ID NO: 118839 - DNA, 1049 bp, Homo sapiens
tgacttcagtgcctgtgccctcccctctgtaaaagacaaaccaggcagggaagagatagaagctggctaagtggtggccaagtggcttcattgtgaggggggtgagggggcattcgtggctgctcccacacccaccatccctccagcccacagcagcctataccaaaggctgccctggactcaacagctgcatctccatgacaggagaatgccagggtcctggtggttgacacagagccctgttccctcttctaagctgttgccccctggggaatagagcttatggagcaacgggagctgaggtggcctcgagggccagcctggagggctctgagcatagcatgcagcggtcccatagggaggcaggtaaccaagggccaggcagagctgcttcctgtgcctctccggcatttgtaatgtttttttcttttttcacgcactgccaaatctgttttctcccttgaagaaacccagggcagatgtggtcatctgtcaaactgaggtctggagaggcatgactaaatcactgcagaagcaaaatcaggacccagcatttctagctcccagcccagagtaagagagcagagcagaaccccttcccattctacccgaccgaggcagccctgccctgccctgccccgcccctccccaccctgccctgccccagagatctccagttcacagtgttcatcaggcgagatacttttggacccacaaagccagttttttggggggatgctcagtgtctacctgcagtgccaaagttttgcttgaacagccctcttctgccgcgcctcccagctccaccccctatcacgtgggtgctggctgcttctgcgtgaggagcttcctctgatcacctgtagcatctttagtgccttcgtccagtcggcctgcaaatcccatttcccagagaggcttgggcagggcccacttgccacttggccctgtgcccagagcgttgggggcagatggcagccaggggaagaagggaggtggggaagggccgccaccgcttgagggtcccctcccttgagaggaggccccat

SEQ ID NO: 118840 - DNA, 1078 bp, Homo sapiens
atcttgctgcataataaattgtcccaaaagttagtggctctggaattcagcagtggcttaattagactcaaggtctctcccgaggttatagttaggatgtcagtaagggctgcagtcatctcaagatctgactgatgctagaaagtgacagtcaggatttcagcccattcccttctcaccccagagcccagtcagcactgcacatcgcctcccatcttatggctctgtgtccccaaacaatgaactatgtcaaactgagcgtgtgggttatatacagcctggcactttctaattaggatattccctctcagagcatattttaagattgatagacactaaactgcagatttctacctccttttaaatttgcttccagtcaagagagacctttttttttttgcattaaaacccaatgctatttagttcttaaattaattcttgacaagagattcagccctgccattgggtctgttcaactttccccaaaggtctggccacctgtttttttgggttctggtaaatgtttaacaaccagctctccaaggaaaaatactctgagttacagtgtttgccagttgccatggtgcaaatactgccaccatggtcaatttcaagctatcagtgtgatgtcactaaatgtagagattgggagagatgtgcccaactggctgtcacagctggtgtgactgactgcagcacacccctggtctagattggcccctctggtcattgctgttaaactgaattctggccaagcgtggtggctcacacctgtaatcccaacactttgggaggccgagacaggaagatcacttgagtctaggagctcaagaccagcctgagcaacatagcaacaccccatctctacaagaaataataaatagctgggcatggtggtgtgtacctgtaattccagctacgtaggagactgagttgggagaatcgcttgagcccaggagttcaaggctgcagtgagctatgatcgaaccactgcactctggcctgggtgacagggagaccctatctcaaaaactgaatgtctcctgcagaggattaagagatgatgacactcattgaa

SEQ ID NO: 118841 - DNA, 1084 bp, Homo sapiens
ggcagataaacagcacggtgaggattcgactcaggtctgaatccaaagcccatgcatgctgttggttatcatgcagaattgcttccctagccaaccagtcatccatcatggggacgtgagggactgactcaaatagtctatagcaggactatttggtcctactgcacagatcaattttgggagcacagatcccttgcctccaaggaaaaaaggtaatggccacttaacagagttcccagcttgtgctggatttggacttcacctagaatctcctatttattcatcatcgcagccccatgagggagggagggactgtcattatccccatcctaaagatgaggacatggcggttgttaggagttttaaatttattttcaaagaattaatatgtcagtgtgttcaattctttgccttctacttttaaacttaacttctggggaagcggcggcaggcgccatgtccggccgcgaaggtggcaagaagaagccactgaaacagcccaagaagtaggccaaggagatggacgaggaagataaggctttcaagcagaaacaaaaagaggagcagaagaaactcgaggagctaaaagcgaaggccgcggggaaggggctcttggccataggtggaattaagaaatctggcaaaaagtaagctgttccttgtgcctgaggagatggtgaccctttatttcatctgtatttaaacctctctattccctgccataacatcttttgccacgtatagctggaattaagtgttgtcttggagctgttgtacatttaagaataaacttttgtaaaaataaataaataaataaaaaataaacttaacttcctagtaaagcaacctttttcgattatctcctccaccctaactcattctgatcacccgctccactctaattcgttccgattacctgcttcaccctaactcattctggtcacctgctctaccctaactcattatgattacctgctacctgctctgccctgactcccgccaaagcactcaccccgtcattctctttaaattagccagtcagaattagtttaacctgcacagtctaatcctagccaatagggga

SEQ ID NO: 118842 - DNA, 1047 bp, Homo sapiens
gctctcttggccatccgctgccttgggtctgttgaggtgggtgcccaaaggctgccttcttgaccagaacctgctgtgcgcttcacagaacctcctcttcattggaaatgctgggcacattgcagtcagtgagctgctgccaaaacggcgttaagtagaacccccagaggccccgccggttggtgatcaccctcaggtcctgccagggagacacagtgaggaggttggctaattgctgctttcaggccctggaaatcagtcgccaaggcccaggagaaccccggtgagtccgtccagttgaggcagaggcaataacctcccattgctcggccctgcgcctgccccagtcctggcagggggcaccggctcaggaacatgcggcctcctggcatttctcggtatttaactgtctcgctgtcttatccgagtccctaatgaaacgacttgtgtgacaatctgtctgtgccttacgaaagtgtctgtgcactttttatcctttttaaaagcaacttttaaaagtggatggggaggggggctagcatacgtggtagggttctagaaatctgtggtcatcgctgaaatcctttttgcatcatgttttttgatgttggagtgatgaagtgtacatcccccaccccacacaccactacctgtgtacagaccttttaaaacatgtcttctttttctgattcaatactgtgacctctccgatacagtctaatccttggggatctgtaatcaaggttttaaaacctgggaagtgggttgggaagggtttgcactggtcttgagtgttgtgcttttctgtgttgtgtgttttgatttttgtctttttatctgttttatattgacataattttcctgtttaaaaaaatacaactttggcttgttaaaaaaaaaaaagtcttcagaactcaatttttaaaatcccacttacatacactgatggggagtgaaggtgaggatccaaatcattgccagtcttgaggaaataagttgcaaaatggctatagaaccccgacaatgtttgatgcctttgccaaataa

SEQ ID NO: 118843 - DNA, 1719 bp, Homo sapiens
gatgtcccactttacagatttgcaaagtggggctcacaaagttgaattgactggtctgagatctatctgctaagtggaaatccccagtctgagtttaaatcctgtgccatcctttgcacagtgcccacgttgcctccatgaacagtatccatgtgatggcatgtggtgatgttgaccatttctagacaagacacacatgacctttctcagatacactgtacctgggcttggggtggttctcctgaactctcaagtaaccagccgctcctttggttttccagactccatcaagaatgctggaggaagggtgtttgtccactgccaggcaggcatttcccggtcagccaccatctgccttgcttaccttatgaggactaatcgagtcaagctggacgaggcctttgagtttgtgaagcagaggcgaagcatcatctctcccaacttcagcttcatgggccagctgctgcagtttgagtcccaggtgctggctccgcactgttcggcagaggctgggagccccgccatggctgtgctcgaccgaggcacctccaccaccaccgtgttcaacttccccgtctccatccctgtccactccacgaacagtgcgctgagctaccttcagagccccattacgacctctcccagctgctgaaaggccacgggaggtgaggctcttcacatcccattgggactccatgctccttgagaggagaaatgcaataactctgggaggggctcgagagggctggtccttatttatttaacttcacccgagttcctctgggtttctaagcagttatggtgatgacttagcgtcaagacatttgctgaactcagcacattcgggaccaatatatagtgggtacatcaagtccatctgacaaaatggggcagaagagaaaggactcagtgtgtgatccggtttctttttgctcgcccctgttttttgtagaatctcttcatgcttgacatacctaccagtattattcccgacgacacatatacatatgagaatataccttatttatttttgtgtaggtgtctgccttcacaaatgtcattgtctactcctagaagaaccaaatacctcaatttttgtttttgagtactgtactatcctgtaaatatatcttaagcaggtttgttttcagcactgatggaaaataccagtgttgggtttttttttagttgccaacagttgtatgtttgctgattatttatgacctgaaataatatatttcttcttctaagaagacattttgttacataaggatgacttttttatacaatggaataaattatggcatttctattgaaatttcaacgcttttatttctttggcaaccacacccaatccctctcccactagtgaactagggaagaatttcgacaagggcctgcagaatgtgttgagatctgatcccatgccctgtggtggcccgttggtcccatgaaatggctgggttgcaagggaggaagacaagtgagtatcatgaaacaccggacgctacagctgaactcttagtattggatcagtgtgtctgcccatgcccattttagcggctctgtaacctaccatgtcacccaggatgccaaggtgtccccagagccaaagctaggaggaaatagccacttgtctggattgccttcttcatttaataccctcctcaggttaatataaaaagtcgccttcccatctctgagctgtgctggagttat

SEQ ID NO: 118844 - DNA, 1712 bp, Homo sapiens
tctggctcggcggcgcctggcctggcagggcgggtgacgtcaccgccccgtcacgtgatcaccattcaaacaaacaccccccctccccctgcgcgcgggtctggcccgccccgtcccccagaggccgcatataaacgcgctccccgggccaggctcgctgcgaaggacatttgggctgtgtgtgcgacgcgggtcggaggggcagtcgggggaaccgcgaagaagccgaggagcccggagccccgcgtgacgctcctctctcagtccaaaagcggcttttggttcggcgcagagagacccgggggtctagcttttcctcgaaaagcgccgccctgcccttggccccgagaacagacaaagagcaccgcagggccgatcacgctgggggcgctgaggccggccatggtcatggaagtgggcaccctggacgctggaggcctgcgggcgctgctgggggagcgagcggcgcaatgcctgctgctggactgccgctccttcttcgctttcaacgccggccacatcgccggctctgtcaacgtgcgcttcagcaccatcgtgcggcgccgggccaagggcgccatgggcctggagcacatcgtgcccaacgccgagctccgcggccgcctgctggccggcgcctaccacgccgtggtgttgctggacgagcgcagcgccgccctggacggcgccaagcgcgacggcaccctggccctggcggccggcgcgctctgccgcgaggcgcgcgccgcgcaagtcttcttcctcaaaggtacgccctcggggaagctcggggcgggccgcacacccctgaggttttgcccggtacccctggctctcggctcccgggggatcgccccacctgcagcgcgtgggcgctggagtacatttatctctggaacttgtcattggctttgtttggctctggaaacaaagacttgcctgggcctttccgatgtaaacttccagcccttggtgggtgggggagttgtatgaaggtgccgtgtcccggtgtcactaatggggaaaaaaaatgtctttgtattcccaggaggatacgaagcgttttcggcttcctgcccggagctgtgcagcaaacagtcgacccccatggggctcagccttcccctgagtactagcgtccctgacagcgcggaatctgggtgcagttcctgcagtaccccactctacgatcaggttagtaggtgtccctgccacagggaagaagtaagaactggcaaaggcatggaagagtagtgccagggagaatatagaaagtgacctgcagcattatttataacggaggggacacagggatatgatttattccacagttaagtggtctgacggagccgagtctccaattgtaggctctacggaaatgaacttgctggtcctgcccaggcaaatgggcttagttccctatttatttatcctccagcaacagaactgagttcactcggtatctgaaattgacttttccagcagaaagtttttgtgggtatgggcactggccttggctttgagcaagcttgatgaatgttggatatttctggatttcagggtggcccggtggaaatcctgccctttctgtacctgggcagtgcgtatcacgcttcccgcaaggacatgctggatgccttgggcatcactgccttgatcaacgtctcagccaattgtcccaaccattttgagggtcactaccagtacaagag

SEQ ID NO: 118845 - DNA, 1036 bp, Homo sapiens
catccctctcctccctctactgagcctccttggtggaccccacctcagctgacaggtggggcagggcacctggaatgagtccggaggggcctggggccccatgcagcctgccggcagctggagggttttaagtttctatagcctgaggctcccccaggccgggcagatcgggaggcctgcccccgcccctccctccctcagccccagccctgtccgctgggtatgggggcaccatgggaaggggaggaggcgccttgggcaggactctgcagaagggccaccggggtctggccttggctttctgcagtcaccacaatgggtcctttgtggggtccagctgcctcatggtctaggttgcatggggcattctggaagcctgcgggggaagagatctccaccagaggttcccttgaggtgtggagccccaggggatgtcctggcctgaggcagccacacttggtgtctggctgggaaaagagcagggctttaatgcagggaggagctggattagaatcctggctctgccctttctactgaacagctcggtatattctagaagttaggggcaaaggctctgggttcagaactccctgtcgccgctcggctggctgacctcagcaagtctccgagcgccctcagtttcaccacctgcaaattggggctaaaaataaggtctccgcttgtgacgactgagtgcgtgaaacacccttagcagagtctggcatgatttagagctcagaaatagggcattagtggatggggggtgttctccaggaggggttttccacatccacaaaatagtgattcagatgcctgtgccacaggaggtatttcttcccctcttcttgcatgtgaaggcagtgtaaagtgacagtctacccagagagaaaggcccttagcctgccatgacccccatagcatgggatatattggggtttaggcccaaagaggacactggtcttggacctcttgattggttgacatggttttccagcctgtccgggtccctgataccagctagcaaatgtttgccggc

SEQ ID NO: 118846 - DNA, 1304 bp, Homo sapiens
gaaaagggagagattggaggggcccaccatcctgtcagctcttttaagaattgtggggagtggagaggggtataccgtgattagacctcctcccccagttcaaggccagggagaaaaccagccgtcctgctcgtgttccccttcttaaaatcagaagcaggaaaaatagtgcactcttgcccttccctacggatacttctgattttcttactgcctgtagagcctggtgcaactgagttctgtgttttcctgtctgtgaaatgggaatgaggagagtactcaccgaagtagaacagttgagggatgaggcagtgcggaaagcatttagacacagagtaagcgcctcatccattttggccgccatatttatttgtgtcattttatttaagcacccatcatctcctaacacattatataattcacttaattatcatgctgcttctctctccctcccattagtacatgagctcctgagggcaagaagtttttatcaggcttcttcaaggttgcatctccagcacctagaactgtgcttgagccaaactcgatccttggagatgcctcttgaaatctgtcaaggaagccatagacatgacgtgacttgatatgccagcttcagtgggcagattttcagccattagtggagaaatctcccctctccacccttgaatctgccgttcctaggttgtttttggggttaaggaaggaggcagaacgcaggggagggaggctgagctttcaatgatttattgtgtttgctttgctcttgttaaattgtttcactaatggctggctgttgcagttgtggaactagccttgtgacccacatccgtgtgtgttgtttcgagttccggctggcctggggccagtagcacctgctgccttctgcacaccagcccagggtgggtgaggagggaagataacagcatccggaagccctgtgcccaggcccagtggtgcctgagcactgccttccgggaggtgcaggtggctgctgtcccacagtgacagcccccatgttgaaaacccaaggcctcgggggtgccgctgcactggcactgaccagatgtgctctgggaccattgacttcccctctcggagcctccatttcttcattttaaggaggggatgtaaacttcgctgcctcacctggtagagtagatgtaggggcaagtgtgatcaatgcacacttgcaggatcaatgtgcaatgcaacttgcaatgcaggatgaggcccataatttgtggggcccagtgcaaaatgaaaatgtggagtcccttgttgaaaaagtattaagaatttca

SEQ ID NO: 118847 - DNA, 1063 bp, Homo sapiens
tcttctggtaggtggacgtggtaaaaccagggcctccggggtttgcagggcacagatacaatcacatgggaacacctgagatggtcagacccagagttagacccctctccctttgtggtacccacacagccatagacgtcaaacaccagtctgtggtaagggagaaagtggccagagggtcacacactcaggcgcccctacctatcagcaagtacctcagtcggtgattgggcaagatgtgggccatggccacctggagcgcgaggccctgtggggaagggacagctgacatgcagctctgttgcttactgcctacagatgccctgatttttcaagagacaatgaaaatctgataaattgcgtgaaaatggttggccactgatctcaattttatttctgttaaacaccaaacaaatccttctgagggctgacgatagcctatgacaggcagggtgccgcctctgtgtcgcacatggcagtgtgaccaggacaagctcggggtgggcaggaccttgggctcgtgggaggtggcctggtgggcatggacttgaggctggaggcagaggagtgagggacccacaagtcaatttctttgggcacaggcagcctcggggccccatcccatgctaagccccctcccacccggggcctggcctggccctaggaccttgattccttcaggtttcagctggggctcccctcctctgatggtgtgggaatggcaccactggcccctgccattggacctgctgtcctctttggtgatcctagggctggcccaggtccttttggagtgacacacccttcctgcacatccttcaataccttcgtccccggggtgtctttcaggtgacttcccagggctatgctgtgacaacagtagtgcccacaatagtcactgcttatcaagtgctagactaaaggcttttcttggattccctcagtgcatcctcaagtcaggtaggagccatttcccattcccatcttcttgaggaggacgcaggggtatataggggggacaggacttggccgaggtcacacaaacagcaggtgatgccgctaa

SEQ ID NO: 118848 - DNA, 1084 bp, Homo sapiens
tttctcatttgcaaaacaagagtaatgcgttgttagtaagcaccatggtaagcactccactcatgtcagcagctcatatgagtccatcccaagtaggagatttgcccgagatcgtctttgagagatgtctttctaaaggttcctggagagacaggcctgtgtctggaaatcccaggcagggactctgacggtgatcaggcctctacctgtcaatgggtgaaccagccaaaaggagaccgccaaagcatcaggtgcattgccaggggcattgccatgatttgattgggagggagtgtcagtgttgcattttttgtacccccactttgagccctgtgcttaaagacaccatcaaggccatcccctgatggtcttgggaatggatagagctgaaaagagtgaggcccagaggcagcttttcgttttccaaaacgcaggcagggtctgcccaggtgccctctgtgggcttgttagcctgcaggagctggtttctgctggctgatgttaagtcaaagaggtctcctggctctaactcagacacttcctcatacagtcttcttagtgggcttcctgctgacagtggatgccagggacccaggcagggaggtctcccttttgaaaggggccactggcctttgggaaatagtagagaccagtgattaagagcttgatctccagagcccctcataggccgtcagtgacatgagagcagagaccggctcagccttgttctctaccaggtccccagggccaaggacactgaaagccctttttaaaaaaagtgttgaatagtaaatgagcagggtcttcctcttgggtctgaacctcagctctcctacttgaagcctctcttgacttgccaacaacttaccgtgtcatcagcggggatggtaatggtaccttcctcctgggggacagtagagtttcagtgagataacgtgtacatcactcagcatggcacgcagccatgcgacgtgctcagcacatgtggctgtgatgactgtttggtttgcacaggcatttctatgtgtggaccttgacgcaggttcccacaaaggactctggccccatgggtgacggtgtcaca

SEQ ID NO: 118849 - DNA, 1031 bp, Homo sapiens
gctggagtgcagtggtgcaatcccagctcactgcaacctcagcctccccattagcagggactacaggtagcacaccatcacacctggctaatttttgtatttttagtagaggcagggtttcgtcatattggccaggctgctgtcgaactcctgacctcaagtgatccgcccacctcggcctcccatagtgctgggattacaggcgtgagccatcgtgcctggcctagtcttctttttactaaaaagtgagattattaagtgtaaaaagacctactagtaccaaatgagatttttttctaaactcgattatgagaattgaaagaaaagtggaaaaataatcacttcttctgtgggtgatttgtgttatttgctgcccaatctgggttccacctaaaaccgtctcaggtacaccactgcgcagcctcccagaaccacccacctccttcctgacggccaggagacaaaggacccttgggcgcgatcagccgcaccttcaggctgagtggccaggagtcctcccgtggcccagcccacctctctctttcaggaattcaagtcagcatttttgttggtccggatctgaagccacttcttccaggcagctgcccctgatctctcaacttcatagcattttggctctttaaaaaaaaagaaagaaaaaaaccaaacgtgtgactttctttgaggtgttagaattatcctcctggtatgttgttattctgacttaattccgagagcagggctttgtcacacggagctggtacctactgtgtcacagcactgcatgtggctcaacaggccagggcttttaatcgcttttgacatctactctctgaagaaatacatttatatcacaacccagtgtacaatacatgaaaactcaacatggccgggcgcggtggctcacgcctgtaatcccagcactttgggaggcagaggcgggcggatcacttgcggtcaggaggttgagactagcgtgaccaacatgctgaaacttctctctactagaaatacaaaaaaattagctgggc

SEQ ID NO: 118850 - DNA, 1639 bp, Homo sapiens
ttctttctaaatgtttaaggaatttttaaattgaggtattgcagattgtaaagtgttcttatcttaagtatacagctcaatggcttttttacctgatacccccatgtggccacccccagatcaaggtgcacaccactttcagtaccccagaaagctcctgcatatgcctcttcccagccagcacccccaccacggggtgacctatctcctgacttccctccccttgctttagtcttgcctgttcttcaggtcacacacgtggaatcatatgatctgatctgtgtgtgttggacttctttcatcccatgtcccatctgtgggattcattcatgtggtcggatcagtgcttcattcttttttattgttatagtacctgattggggtacttttgagcttattttttatttcatagactattttggacatatagaatcatatagaatcacacccacctcccatcctgagaagcaaaccttaagcccctatattcctcttctgtctgcactttccattttgacccatctccatcccatcccaggagaaatactctcctaaatgtggtatttatccttcccatgcaagttggtaaatttgtactacctatgtacaatttcttaacagatcctttgagtgagtataaactctctttttcttatttggtattgccgagtccaattaaattttaatttaaatgttccaagtgtttctgggattcagaacctcagctccatgctctagaggtcaagacagttggagcaaagtccagaaggaaaggccaactggggagaggcaggaggagagcagagtggggagagaagcggagggaggtgggtgtgggagggagatgctcacagccctcagcagccatgatctggtgggggcccctgccgctgccctggtttttctctcatcttggacctatggggaatgcaccgtgcccctctttctggcctaatttcctgtgtccactggtgccacctctttgcagaggcagccttcagagggatttgtgggggagaaggagcttctcctttgggaagaaaatgcttgtggtcctccatgtaccctacaccctgcagctgcgtcacaggggaagcactcccccatgggggccaggcgctgtgctaagccttttccctgtactaacatgtgaaccccctctgagcaagccagcgaagtgagcactatttgacagcctgagaaactgaagcacagggcagtgaagtgaattccccgaggccacagctagcaagtggcagagctgggacttgaacccagaaagggcagctccaggctcaccacctgtatactctccagtctattgtctagtggaggcacgggcggcccaggggccttccccgatgcttatctcattctgtaactctgcattctcagtggaggttttcttgactctagctccaggcaggcagagactgcctttgtttggctcccatttttatcattagcagagcaggtgctagtgatatttgcagaacaggtgctgaatgaatgcatgaaaaaatgcatgaatgtggaaatgaaaggggatgcagatggagatgatgcagatggagatgatgatgcagatggagatgatgcagatggagatgatgcagatggagagcagtggccatgcaga

SEQ ID NO: 118851 - DNA, 1007 bp, Homo sapiens
aggcaagtgggggtgaggggcccctctccagccttgcccagccagggcctccaggtgacacagcaccacagttccttagctccgtggaccctgcatccttcactcactcacccagtgccacggcctgctgtcagcatgggccctgcatggcacaggagagcagcgatgagtacagagagccaaggctcccagggcccagtggggagctttggggaggccagggaggatcagtgttcagtctccaggatgaggctggccagggttccagtcctgactctgcttcttgttagctgtgtgagcttaggcaagtggcttggcctctctgagcctcagtttctgcatttgttgaaggaacctcaggagtagtagggaagattctgtggacagagtaggccaagtgtctaagcagtgcttggcccatagggtgggagtccaggaaatgccagtcccctttcccgtccctctgttgacctgtggtaactcaggtgggtgcaggctaaaagtcttaggaaatctgcttgaagttagatataaacacatgccttacaccttaggaattctagcacgcatgggcatctcctgaactgtgcttttcagcaaagcagattcctgccctgcccacctcacccctcaccagtttagttcattctacagtggggccctggaatctgcaaattttttttttttgagatggagccttgctctgtcccccgggctggagtgcagtggcgtgatcttggctcactgcaacctctgcctcgtgggttcaagcgattctcctgcctcagcctcccaagtagctgggattacaggcacacgccaccacgcctggctactttttttgtatttttagtagagacggggttttaccgtgttggccaggctggtcttgaactcctgatgtcagatgatccacccgcctcggcctcccaaagtgctgggattacaggcatgagccaccatgcctggctggaatctaagtgtaaccagcttcccacagattctga

SEQ ID NO: 118852 - DNA, 1127 bp, Homo sapiens
taggttcaagcaccacccccctgacacagggacacacacataaaatgtaacagaatgcagcgttctgccttggccttttcctcttactgtatcctggagattcccctgtgacagtgtcattttcccatctagctgtatcaccctctgcgttatgggtgatctgtagtgtcccctttggctggatgtttggatgacctcccgtcatttgctattacagctggtgctgtggtacatagccttgtgtagatgtcaatttatattttcacctggagttcactgagtgctattaatgggccaggccctgcgtgacccacaggagattcaaggacaaatctgacccagcccagcaagagtggaagaccctgcagccagcctggggctgggccgggtatagtccccagagcctgtggagactggggagctgccttgggatggggagtgtggtttgtctggccttccggaagtcaagcagtcagatttactcttcttcctctttgtccagacttggtctttgtgggaaggaggggaggggaaaggccaagattttgtggtcagaaagggttatcacggatgggagaggtcacatgtggggatgattggggtagaagtggaggctgctggagctgggaggccatgccatgggcaccaaggtctagggagagagctgcagggagaaaaccttatatgcgttggtgacatcagcattatgtgctatgtagaccaggagtcgtcacccagatttctcataaatccaggccttcactccttcacctgccagcctgtttccctcttccaggcaggcatgtggcccaggggtgagaagaattgttctactgccagactgtgccagttcaagtcctggccctgcatcttgggcaagtaaaacagaaagaatgctactgtctaccatacagggttatgaaagtgatccgagatactgaacgcaaagtgtaagccgaggcttcgtgcgcagtaagccctcgcaaggggggtagcagcagtcatagctgtgattgttactattatattattattattattcctccctcaaagttgctccatctgggctggagacagagatggaccttttttcctttggacagagggagagagtggtatgaactcat

SEQ ID NO: 118853 - DNA, 1009 bp, Homo sapiens
gttctgctgaggactccctcctccactcaggctcattccactgaagtttgtgagcacacgctctgtgctgaggctcagggagccctcgtcctgggggtgttgacgggagtgggagaggcttgtgggacagacgcaactggacccctaagcacccctgtaccctgcaggcacctgggccctggtgggaggggacacacctgaagattatgaaaaaggactaggatgcctgcatcacatgtccactgagggccaccggcccctcagcttttcaccgattcccatcccatccaggcagtgcaatgccttggaaagagcatgggctctgggccccctgtccctgggctcagatcctgcctctgcctcctcttggtcctatgatcttggccagccagctgtgctcctctgagcctggtttcatcgacgtgaagggagaatagtacccttattaaacactggatcaactccttgagcatcgatattaataataatgataaaaaccatggacatttattgagcacttactgtttactaagaccacacttagcattgctcttgttctcatttgatcttctcagcaaccccatagcaacccctatgattgtccccattttacatctggggaaactgatggatgggaagccccttgcccaagtcaatcagccaagaggtggcagagccaggattcgaaccctggtagcctaggctttgaaccctggtagcctaggcttcgaaccctggtagcctaggcttcccctgcactgctgtattttctttaccaagaagggtgtggaatcggccctcaagagagagatgagtctcacacatacacacacacacacacacacattgactcacactaacatacacacactcactcactctcctgccctggggcagccaacagcttgacctggcagtcatccagcagccctgtgaagtagacggaatctttatccttattttcctctttttctctcctttcctctctccctccttcctttcctttctt

SEQ ID NO: 118854 - DNA, 1290 bp, Homo sapiens
ctccccctgtgctctcaggcgatagctgatttgactgtttctttacctcctgcttttagcctaattggtatttcagtgagctccctttactacctgattggtcaggtgtgagctgagttagaagcccggtgtttaaaggtgggagtggtcaccttccccagctagggttaggaattcttatttggcctaggaaatccagctagtcctgtctgtcataacctcctgggctcctgtttgcctctctccctccagctcctttgctcttggtggcctctgattggggccaacactacaagcaaggtcaagcgcaggtccgtgtctcccctctcccatcctaaggcttcccaggaccagggccctccttcattttcttccttgaccctgatgctgaggagagggctgggaggcagcctgagctgtggaaaggctgggttgagattctagctcggccatttcctagcatgtgactccggggatgggacacaccctctccgagcctgttccctggttttaagatggggctcagggcatttcacaggcgcacatgggacagcatgaatgcacgtagtaggcctcccccagcttaacgagtggaggcccatctgttgcactcttgtctctgggaatatccttgtgggccccacagagaagccccaggtgtcttttcagagcccaccgttccttgtgaacagcatcacaccgggtgctaggggcgcaaagatgtggtcttagtaaaaacgaaattcctttgccttggtctgactcattctttccctaagatgtggccatttacaaagctctcttggagtcttcattgcttagatagggcagttctcttttatttatagcctagggactggacccaaggggcctaataaatgtttaaaataaccacagcccagccacctgaagcactgccccttcagccgccccctaggccaggcctttagatttggttccctctgggtggggggcattatcggggaatcagatgcggccatcagacatccagcagctacttggggatgcctcaagacacctgggctcagcacagcttctggcactcagcacctctccctcctgctggtcctgttcctcttccaagggctctcagcccaaagaatgggtccaggaagaaacacagcagtgtgtctgcattcccccctcacctcaccctcctccgcccagtcccatccatcagcaagtcccgcctgctctacgtgggttcctacagccctcctcctctccattcccatcccaccccatccaaggcgccgccatcccctgcct

SEQ ID NO: 118855 - DNA, 1070 bp, Homo sapiens
tgggaggctgagggaggagaatcgcttgaacccgggaggcggaggttgcagtgagccgagatcgcgccactgcactccagcctgagggacagagcaagactctgtcaaaaaaaaaaaaagtataaaggcctcgtgcagcctccttacactgcaaccacggtgaccttcattcagttccccaaagcagccatgccctccccaacctccaggcctttgcacatgctgccaggatgatgcctacgcatcccccagacctcaatcacacctcagagaggtcttcccagccccttctccccaaaggtcagtggccctgtagtccctgtcatggccccctgcagctttctgtcaagtactaatcagcgttgggggtggcagcatatttaggggctgagtgatgtctggttcttgtgtctataagcttgaagaaggtagagacagcatctgtctgattcattgctgcttctggctcctgacaggtagtaggtactcaaaaaagtatttgttgagcaaatttggattgctaacagatgccaacactgtgctgctgacagcaaggtgacatggctgtctgtggagccacctgcccctaaatatggccgatgcggtcgacagaataatgaccccctgccccctgtgatgtctaggtccctgtccctgatgtgtgtggccgtgttaccttgcattcaaaaggaactttgcaaatgtgattacattaaggatctcgagatggggagaggatcctgggttagccaggtggactggatgaaatcacaagagttcctgtaagagagaggtggaggccaggcacagtggctcacgcctgtaatcccagcactttgggaggctgaggcgggggcggggggggggggagagaggggagggggggaggggggagggggggggtggatcatgaggtcaggagttcgggaccagccttgccaatatggtgaaaccccatctctactaaaaatacaaaaattagctggagtggtggcacgcacctgtagtcacagctactcgggaggctgaggcagaataattgcttggacctgggagatggaggttggagt

SEQ ID NO: 118856 - DNA, 2033 bp, Homo sapiens
aacagagtgagactctgtctcaaaaaataaaaaaagagagaggtggaggtcagagaagggggaagctgctggctttggaactgggagaaggggccacaagcctaggcagcgcctagaagctgaaaaaggcaagaaaatgcattctcccaagaacacagcccgttttagacttctgacctccaaaagcataagacaataaatgtgtgttggtttaagccattcccgttgtgataatttgttacagcagccacaggaaattaatacagccgtcaagtcgtttctcagaaccggttctgcccctacggatgggcatcagggaattcctggcttcccggctgggggaaggggacctcaagagaggaggctgtaaggtcctctgtgcctgctggcgccaggccctgatcccttataagacccctatttctcattttagtgttcaaaccaccttattcgtagtgggtggtgttatccccacttaacaggtgtgttcacagaggtgagcataggaagtgccagaaccagaatttgaacttgaatctgtctgaaagatatgctcttaccaccgtgctatctgaccccaccccttctctttcctgagccccagccctcccctcttttttttttttttttttgagacggagtttcactcttgttgcccaggctggagtgcagtggcgcaatctcggctcactgcaacctcagcctcctgggttcgtgattttcagcctcccaagtagctgggatttcaggcatgcgccaccacgcccagctaattttgtatttttagtagagatgaggtttcaccatgttggtcaggctagtcttgaactcctgacctcaggtgacccacccaccttgacctcccaaagtgctgggataacaggcatgagcctctgcgcccagcccagccctcccgtcctgagaggtaaggctgcacttgaagagtgcagcctagacccgtgcctgagggcacaggaggtgcaggctctgcccaggtggagtctgggttatctaagttgtggtcaccaagtgaagtgatccccggctgtcccccgcagctgagatctttgccgccatctcaacaaaggttcctatacttgtctttcccctagtgtgaacgagctctatgtcgatgacccagacaaggacagcggtggcaagatcgacgtcagtctgaacatcagtttacccaatctgcactgcgagtgtgagtactccacgcagcccctccctccagcaggacacctccttagggcaaatgtgtgtgtgcagaaatggcaagatctccaggacaagccaagccaacatatggttctccccactcttttttggaggagaatataattgcgtatgcatgcacttggaggttttctggcataataaacacaagacactactcataggggttaaccctggagagcagctgatttggtgcagggaggtgggatgtctcttagggtcatgttacagcttcgcagcagagcctgagagtctcatgcaagtgacttgttgaggggaggaagctgtaagggagaaacgcaggatagggcagtacgacaggataagcaaagatgtgtgttcagctgaagtccaaactcagcctgatctcacaggatgctgtggggtgtgaatgacaccatagcatttgtcacacccaatagcaatgggaccaggctgttattatccatgtcattgggtaatggctgcagagtggtgtgcgtggcaggggtcatatcacctcccaagcatctcaagcgagaagacctccggtcagccaagagcattcatctggagaagggcgcagctctgagtcattggcagctgacacctagagaagctggagcggtccaccatccatgagagagtgcaggacagggctcaagagcatctgcaacagtgaagggctgggagattccctttttgacttcacacctattttgttttaaccaaaagaatgaattacttctttttttttttttttttttttgagacggagtttcactcctgtcacccaggccggagtgcaatggcac

SEQ ID NO: 118857 - DNA, 1002 bp, Homo sapiens
tgagatacaagagctaacatttattaagcactttccacctagcgttcatcagaccctaagcattttctacatctatgaactatttgatccccataatctttcaaggagggttcaattatggtcagccccccatcttacagagaaagaaactgaggcatccagaggttaagtacctgaggcaggacccagattcagaggaccagtatggcagaccccagggtggccccgggacccctactatgcactgcccccctcgcctcacgtttagcggagtcattgtcctgtcccctgtagtctttggaccccagaccatgagctcctggaggtccccagcccggcctgcccctgcaatggatgaatgaaggctcccagagagaacaggctggcccccatcctcccgcgtctctgggtttgtgactgttgtctccctttggctcctgcagtggttgggcttgacattcaggatgagatgggcaggcacgaagtgggccacatcgacaactccatgaagatcccgctgaacaatggggcaggctgccgcttcgaggggcagttcagcatcaacaaggtatggaagccctgcctcagccctttctacctgctcccctttcctgctgtctccccgctccctggaaactggttgtggaggcactcactcgacctgaccctgacacagcccccagcaagcgagggttcgtgtccagctgcctggccgttcctgctgagaatctggatgggggtccaggctccctggggttttaagcccctgatggctggttcaggaaggagctactcttctctccagtgagggggacaatgatgagaagacctgaggatttgcagcccccagccctgggttcaagtcccagctctaccccttcttggcccctacaagtcacttgacccatcttaggctgagggtgtgatggcgataatagtatcacgataccacccacttcacaaagtttgtgtggggattaaatgagctaatgcagattcatt

SEQ ID NO: 118858 - DNA, 1005 bp, Homo sapiens
gaaacaaggagaagctgcagtggctcctgccacatggttgtcaccagcatcctttgttctgtaaatactcatccagcacctcttgctggcttggctctgcgagggcttgagacccagggaagagatgaggctaccacagtctgtccatcagggatcccccgtctagggcactggggcaaacttgggtaggaaatgataggggtttggagtctgaggaatccccattagtctgcaagctcaaaggtcatcccccagctgactgtggggtcagccgcccagaatccacagagctggagggggagcagctgccatgagtcctggctttgtgcccgtcgcccagatgggcacttcacatgcaccctctcaccagatagtcctggcagccccctcggaagctatggtagtgcccccattctgcagatgaggagcctgaggcccagagagatggggtgactcctttgcacagttgaaaatgatacaagcaggatccaaacccagatctgcctgattccagtgtcctccctggatcacacagggtgaggccccaatgttccgccccctggagaagtcaaccaaactcctgaaactcacatttctcccccaggtccccggcaacttccacgtgtccacacacagtgccacagcccagccacagaacccagacatgacgcatgtcatccacaagctctcctttggggacacgctacaggtgagcaggggacactcgagatggcatggccgggggtgggccttcaggggctctgtcacccagtgccctctgccctctctgggcactaggaagagttaccgttaaggtgacatctaagccaagcctggaagggtaagaagggtttcaccaggaacagaacagggaaatgggtcctaggcagggggcgtctcaaacatcacccctctcctagagcgcccagctggtggttttcatgtgaaagaccctcaaggttactttcagaaaaatggatcagtaagcgtatgtgacacggcatg

SEQ ID NO: 118859 - DNA, 1072 bp, Homo sapiens
catgtgtatcctgtcccatgacttggttcttttccctgttggagaatagctgctcctagcacccacactttttttttttttttttttgagacagagtcttgctctatcgcccaggctggagtgcagtggcatgaccttagctcactgcaacctccgcctcccaggttcaagcgattctcctgcctcagcctcctgagtagctgggattacaggcacctgccaccacgcctggctaatttttgaatttttagtagagacggggtttcaccatcttgggcaggctggtctcgaactcctgactgcagatgatccacccacctcggcctcccaaagtgctgggattacaggcgtgagccaccacgcctggccaacactcactctttcatggttgctctattgatggacatttgggttgtttccagaattttaatgatgtgcacagtgcaggaggaaagatcctgatggatagagtctcccaattcccggtatccaaggggagaagatgaagagcagttggttggtggtaaaactggggaatgagccccctgccgtgcccagggaatttaggcttaggattgaaatgacatagagctgtcagcgggcagtgcccgtccccctgcttcattctgctgtgtccttcccgcagccctggcctcccacgactacatcctgaagattgtgcccacggtttatgaggacaagagtggcaagcagcggtactcctaccagtacacggtggccaacaaggtgcgcgggcggtggctgggccgagctgtgtgcggcggcgccctctgctgacggagagcagagatgacaggcggctgcaccgacgcactttcttctgattcctttctggaggcctttcctgggggttagcttgggccaggcgctgtccctgggtaaaattgaaaagcccagtccctgccatgtggcagtctcagagtcaaggagaacagatctaaccaggagatagggtgtgatgcgtttgacaaagagcaggtagtctctgtcctacaaaggtcctggggttgcaggtctcaaacagccctgcatctggtccgagtccttcaga

SEQ ID NO: 118860 - DNA, 1005 bp, Homo sapiens
aggctaagagttcaagaccagcctggccaacatggcgaaactttgtctctactaaaaatacaaaaaatagccaggtagcacgcctgtagtcccagctactgtggaggctgaggcagttggaggctgagacaggagatcttggcagtaagccaagatcgtgccactgcactccagctctgtctcaaaaaagaaaaaaaaaaaggtgatcatattttccctagccagacaggatgagggaaaaaagtgatcatatagctacccttattaagcacctactatgtgccaagtaattacatagttacctcttttagcccccccagcaacctctcaaggtagatgattttgttcctgttttataaatggattaaactgaggctcagagaggtgaaaaaactcatccaagatctcacagccagtaaatggcaaggctcggacctgaccccagtgcctgcctctgcaacatcccctacccccagcactgtctcaggagcctctatcttccaaaacaagggctgtcaggggtgttgcagcaacaaagcccccagaagtcatagaactcttggtaggacagacatcaggatcatttgatacagtgactttcatcctgagaatcaggaagaactattagagcaggaaacaaagttttattgtgaatatgcatggtgaaatcacagcttcacacaaaccattaaaaaagccgacgtccatctaaggcagattggctgatagtttgcaagttttcctgcccatatctaacaccttttgttcacctgtttaggcttctgcaaacatttgccagaaactaaggcagcaagtgctgggggcagggaagagggcaggggcattaagaagaattgacaaggccgggcgcagtggctcacgcctgtaatcccagcactttgggaggccgaggtgggcggatcacaaggtcaggagtttgagaccagcctaacatggtgaaaccccgtctctactaaaaatacaaaacttagccaggcgtggtgg

SEQ ID NO: 118861 - DNA, 1042 bp, Homo sapiens
ccagggcccagtcaaccacttcccttccccgactacaccccccacctctgcctcctccacgactttggtgttctcatccccggctccagcctgtctgccgctgctggagcctgatgagactccaattcattatttatttcctcatgcggcgcctcctccacacgcttttaaagcagtgctgactgaacggggaaagtgactgaacagttcctgggcacttagggtacagcaggcagctggacagtgtcatcccggtccctgcagtgggccccattctacagatggggcaactgaggctcagagaggtaaactggctttcccagccagggccacagagctgggattggaccgcaggagtgtttactccaaagcccacaatctcgcctcccacggcggtgtgtatggtgcttctccattgcacgctatgggagagtaatggggaggggagtaatgatgcactgggaaggcgttcgtgctggtggaaaaacaggcatttagttcccgctccagtgcggctggaacacatccttctcatattataaggaattaagaaccataatgaaaatgtaagggaaacacacacgcaccccttttaaaggtagacaagctgacttcattctagtcacagtggaaggccaagaagctgacgggacccctgggaggaagttgctggtgggaacagaggggcattatcggatgacgtctgatgaatgccacttcctgcactgccctcagactcactggggcccaggtattgaattgtccttgtttttgtttctggagctgtggctgctgcccagagcagtggtgcatgcactggccgaggtggccctccctggctcagtgaccctgctccctcatccccgacggggaagatcccaccctaggttgtctctgagccttgaggcctggttgggagatacaagagcgtggcagtggcaagggaccaagccactctcagtcaatgccaccacagtcctagggggtgaggattagtcttcctttttttttttttctgagacggagtttcactcttgttgcc

SEQ ID NO: 118862 - DNA, 1050 bp, Homo sapiens
cccttgggcattcaggaaaatgagagttttcccaataggcttgaggtggtgagattcagggagctccctcactggccaaaggatggaacccacctctggcctaaggtgctttgccccacaaggatgttcttcatcacaaacacatcttggcaactgcctgagggaacaggacaccctgtctgggcctcagctacctgttctgttgaatgggttgctgtgtaacttcagagggcccttagagtgcgtgggcccccagcggccacaaagaatctgcctgcggtgctgggacactcttgcggtcctgttcctgtatgactcgtcttgccttctgctaaaagtgccagagagagaatggaagttgagacccaaaggcgtgctctggggaataagtaatattttactgatttttctggttaaagtgggtctcaggttgagacaatcccatttcttggccataaggttagagccttccagtgaactgaaagattaagatcaggtttcatttactgagcatctactaggtgctaggtgctccagatgtattttcagtagagccgcaggggttttgtcgttttatttttatttttatgtatttattttggcaacagagtcttgctctgtgacctcgcctggagtgcagtggctgaatctcgactcactgcaacctccacttcccaggttcaagcaattctcatgcatcagcctcccgagtagctgggattacaggcacctgccaccatgcccagctaattttcgtattttcagtaaaaacagggtttcaccaagtgaccaggttggtcgcaatctcctgagttcacgtgatcctcctaccttggcctcccaaagtgcaggggttgcaggcatgagccactgcacccggctggctttcctgttttatagatgaagaaactgaggcccagaaaggctctcccacggctagaattagtaagtgatgccacgatgcagcctccaaaggctgggtgctctctgctgccatggcaggaaagccgggtggactccccagccctcacctcatgccaccctcaccat

SEQ ID NO: 118863 - DNA, 1507 bp, Homo sapiens
agaccacaggctccagagttaagacgtacctgtgttcaagttgcatctctgctagtggtgaacttaggcaagtcacctgatgaacctcagtttcctccgctgtgaaatgggtctaataattcccttcctcattcagagggtgaatatgggaattaaaggagctcataatggtgaaaattattttattattattaaatccaccatccaacaactggttttctttgagccctaagtatgttccggacttggtgactatgtagtgggtattatgggcttaacgggcaatgtctgccttgcagagcccatcatctcatgatgtgggaggggtctggcctggttcatcctccagcactgacttctgacactcccaccccacccctgccctcttgcagatctgtgccatcattggcgggaccttcaccgtcgccggcatcctggactcatgcatcttcacagcctctgaggcctggaagaagatccagctgggcaagatgcattgacgccacacccagcctaatggccgaggaccctgggcatcgccagccttgcctccagtgccctgtctcctttggccctcaatctggtcccaaatctggctgtgtcccaaagggtgtgtgggaagtggggggaaagtagaggatggctcgatgttttgcagctacctcttttccccgtgtttctttttagacaaattacactgcctgaagttgcagttcccctttccctggggagccccaagaacagagtcaggcaaggggtggggagtccagggatcttggggacccctcctaggagagctgcagtctcttccctcaggggaacatcccagaatgcatatcgatcagctctcagccaggcttcgacaatctcgcagcccccactaggtggacacattaatgatttggtttctcccctgggcagccaacctgccccagaggcaccagacctgggctttcagctttgggaccaggctgcccaaaggtactcctttatacacccggcaccttccacgaaagatggtacttcccaagcaagcccctatgatttgtcactatagatggaaccctgacttctgccccatcccttcctgcccaacctagaacccaggcctcaagtctttaccccacccctttcttgttcttccaagaagcagatgcccagttgctcagcagcagcggtagagacttgaatctgcccaccagtcacaaggcgggtcacagattcctcttcctctcttctcctcgttcctctgaaccctccaccaatgtgcctcagcctgtgtgctgtgtggcaacagcattctggttcccactgccaagatctcccaccactctgctgggatctgcagtggcagggagtgggggttgtgtaaaggggaagtcatcttttgagatccagatagacatggtttgtgcacttacgtccagatgggaagcatccttcctgcaaccctaaaataatcatgcagcctctcagacggacgccatcggtcccaaggccttaggtg

SEQ ID NO: 118864 - DNA, 1078 bp, Homo sapiens
atttttgtatttttagtagagacagggttacaccatgttggccaggctggtctcgaactcctgacctcaagtgatccgcctgcctcagcctgccaaagtgctgggattacaggcgtgagccaccgcacccggcctggggctcatgaacttaaagatcatggcccagtgccaggcacacgggaattcagaatagtaagggacaactattgttaagttctctatgtctgttgcataagtagatgaggctgtagataactacactctttgtctaaaagggccaagttctcatcagaacactttgctgagccccgggtgaccgaatccctagctctggggtgagcgacatgcctccaaggagctgcagccaggagacagccaggcgaaggcggggctctgcctctgggctccccgaggggcggaggccggcgcgcgggtcacgtgggggcgcgggaggcggggcttgcacacgctggtcacgcggtcagctattgacacttcctggtgggatccgagtgaggcgacggggtaggggttggcgctcaggcggcgaccatggcgtatcacggcctcactgtgcctctcattgtgatgagcgtgttctggggcttcgtcggcttcttggtgccttggttcatccctaagggtcctaaccgggggtaagtgcgtgaggcccgccttgggaggaacgggcggtgaggagctagcaggccggggcggggaaaggcacgacccccacacgggtcagagaacgttgcatgggcgccccccgcgctgcagagtcaggcccccgacccggcggaactccttgtgttccttttcgcagcagcttcagtgtcctccggcctgagcgagtggagggtgacctttggtggaccccccttggaaacgagtttcaggggaattttttctcatcatagtcctgtgtggggaggtgcagtcggaaatgagcaggccgaatctgggagaaactggggtttgtccctagtcgactgtccccctttagccctgccttccacccacatgaggcctcgtttgcctgaacttaaggatcaaataaataaaacagaaattggcttct

SEQ ID NO: 118865 - DNA, 1130 bp, Homo sapiens
aaaggggaccttacatgttatagtctaataggaagatgataagctacaatcaaaccttgcctgtaccagtaaaaatgggtgtgtcatgtaggttgtgggtcttaacatttggagaatggataaaataagacacattttccctgaggttggaagttgtgatgatgataaattgagattaagtgaaaacgctttgaagcgaagatatcatgaattcaggaaatcttggatacttggaaagataatcaggtaatgagagaaaagtcagagacttactgtgacaaagcctcactgctttgtgatatgtctcaagatgaaggcaggctacgtcctgggaaacattttgttatcagacatgctgctgttaacacaatgtatatggaaagtttggtgtgaatgcagtagatttaagttttgctagtgtactttttccatgctaattgaaaatggtcatgttccaacatgatttcaccgcttcgttgtttctctcccatccttcttttagttggctgattgcaattctggcccaactcaaccctctctttggaccgcaattgaaaaatgaaaccatctggtatctgaagtatcattggccttgaggaagaagacatgctctacagtgctcagtctttgaggtgactatgcttgtgacctttcttatcagtatggtcaggcagtcagagtttgccttgactttttctcacattttatggccattttaacacgtggcaagggcaagctgctgaatgcaaacacgatctgaagagcagaaataaaattggaacttaagccttagcttacctaaatctcattaagattctttttagattctgctatcaccctgcctttttaaataaatacagtttaatttacaaaattaagcttgcatgcactctttcagacgcagatcaaaaaagtaactgtttatacttggcattgtgagatccagcaactttaaaaagtggctggcagatttaaaattgagcaggtttctttccagcagtagtcagccatccggacagaaccgttcctgtgatggtgttacactgctgggagaggaatgtcttgtcttcatccggttgcctgcgccactgttctggtggcgtctggcactggtgcaagacagagctgtg

SEQ ID NO: 118866 - DNA, 1217 bp, Homo sapiens
tgcaaggagcccgctccccaggagcctggccccagagcagagttcgccatgcctgcggaacctcccctccatgctataagagggaagggaaaaatacagactcttgaaactgcggtgaattcattagattccagcacaatcaatctcagtcagcttcattcttcctgctttctgtaacatagagtgttacttgtgctcctcatttcagcagtgtccttggttactggaccttttgccacagccctgcaaaacctggccaaacttgcaccaagttgattatcctgtgtttcatattttgttgagcatctgtgcattttaaagtgttggcttggttaactttctcgatgttaactttttgccttcctgaggaatgtatgaggaccagttaccagaatggttttgttttgcaggtcacgagaagagaatgccttctagatgcaaaatcacctccaaaccagaccacttttcttgacttgcctgttttggccattagctgccttaaacgttaacagcacatttgaatgccttattctacaatgcagcgtgttttcctttgccttttttgcactttggtgaattacgtgcctccataacctgaactgtgccgactccacaaaacgattatgtactcttctgagatagaagatgctgttcttctgagagatacgttactctctccttggaatctgtggatttgaagatggctcctgccttctcacgtgggaatcagtgaagtgtttagaaactgctgcaagacaaacaagactccagtggggtggtcagtaggagagcacgttcagagggaagagccatctcaacagaatcgcaccaaactatactttcaggatgaatttcttctttctgccatcttttggaataaatattttcctcctttctatggaaatctgggctcggtgtttgtaaagttcatttttataagcttttctatcgctacataatgcctttttaaaaaatgattttgtagtctaaacttaggttgagtatataaaccctgccatgtagcttgagatgcctgaaaagactggtaagtgcgtttcttaatcgttcagtaactatttgagtgcctactgcagccaaggcactggagggatcaaagatgtgtaaatttggagtccctgcaagttcacaagctatttggagagataaggttagtatacatagaactgtaatataaggttgtgttggagcattgtcct

SEQ ID NO: 118867 - DNA, 1051 bp, Homo sapiens
tgatcctggcgcactgcaacctccgtttcctgggttcaagcgattatcctgccccagcctcccgagtagctaggattacaggcgtgcaccgctatgctcagctaatttttgtattttcagtagagacaaggtttcaccaagttggccaggctggtcttgaactcctaatcttaaatgatccgcccgcattggcctcccaaagagctgggattacaggtatgagccaccgtgccccctctagttatgtgattttgaaatgaattagcagtcgcttgtttccaagtagggttgaacttggatttttttgaggaacaattcactgacactttcaccatattcagtagctcatttcgggataggtaaactcttagacgagacataaatttgtcagataattggttctgattattttaagacaagggttgacagactttttttttttttttggaacaggatcaaatagttaatatttaggctttttcagccttccagtctctgccacaactactcaactttgaatctgtagcatggaaacagctgtagaaaatatgttctacatatttttgggctctattccaataaaactttatttacaaggtcaggctgtgcctctatttgtgcttccacggctatagtttgtcagcccctgttgtaagacatcagtcattgaggttttttgtttgttcgttttttgagacagagtctagttctgtcccccctgctggagtgcagtggcacgatctcggctcactgcaacctccgcctcccgggtttaagcgattctcctgcctcagccttctgagtagctgggattacaggcgcctgccaccgtgcccagccaagttttgtatttttagtagagacggggtttcactgtgttggccaggctggtctcaatctcctgacctcctgatctgcccgcctcagcctcccaacgtgctgggattacaggcgtgaaccaccacatctggcccagtcactgagttttaagtacttagatgttaaggtatttcagaatatacaaatagacactttaggtacatttgagcat

SEQ ID NO: 118868 - DNA, 1036 bp, Homo sapiens
tgatttaaattaaatttaattctacttcttcctctgtcctctcttccctagataataattacatcaggtctttaaaatggactaaaatttaaatatcactcttcttggaaattaaaaaaaattcaggagtacaatttttcatatttttactatatgatactacagtggttcaagactcaatttaacaaactaagatgctttggagcacataaacgatgctcaataaatatatattgaataattgacttttttgtaatgtcctcattgtgaagagcaccacacctttgattccttatccagaaggacatgtggtcttaggggattttcccattcattttcagccatctcttgtgtggatgactgctcggaagggcattgcatttggcactgtagtgaaatagatgtgagatatgatggtcattctcaaagatgtcacagtctggtagtggaagcaagggaataggagagaagatgaaaaatatgagctaagacatgaaggtcagtctcactactggaagttcttagtggagtaaagtgggattgtaactatcttgaggattaggggaaatggtaaaatcagtctaatattagacttaagagtagtggaagacagagttggaaagatagtgtcattgtgtatgagtatttttgtttgtttgtttgagatggagttttgcttttgttgcccaagctggagtgcagcgccatgatctcgcatcactgcaacctccgcctcctgggttcaaacgattctccttcgtcagccttctgaatagctgggattacaggtgtgagccaccacgcccagctaatttttctttttagtagagatggggtttcatcatgttggccaggctggtctcacactcctgacctcaggtgatccacccatcttggcctcccaaagtgcagggattacaggcatgagccaccgtgcccggccttgtttttgtttttttaagagactaggtctcactttgtgggccaggcttctctcaaactcctaggctcaagtgatcctcctgcctcagcctcc

SEQ ID NO: 118869 - DNA, 1100 bp, Homo sapiens
tctgagggaaaagatacactttcttccttactttcctcttttcccattgtccttccttaaagactagcagcagcagaatttggaaaataaataatgggcatgttttgctaataatcatgacaaactataataatctgttttgaattttacttgcctgtttctaaattttggagtctagagaactgctatcaaagggtaaaatatagtgattcacctgcagttttggttacaggtttcatattacataataaagggagaacttgagccccacctttcccccagtgtattccttgcataggcaacctctgctgcttaaatgttttggagactttgggatgtctgatttcaactgtaccgtgaaacaggtagtggcttgacttagtaagcatctgaaggactgttttgttctactcttgcagagtagagtagttttcaaaaggaaaggaaaggaattgttgagtgggacctatgaagtatagcaggatggatagaatatgaggcagatgggtcctagtttgctaaagagcttgggccatctgataagttgtctttcttgccaaacaagggagtcacgtggggtatacacattgtataagcttttcagtcaccgaggttgcctgtccttcctgcctccctgtttcgttgcctccttgcctcccttcctcacttcccttcctttcccacctccctgtccacaccccttccttcccctgcctctcttcgtttccctttccttcattctttcctgccctcctgcctacttccctgcctcctttcctttacctcttgtcttagtctattttctgttgctgtaaccacagattggataatggataattttaaagaaaagagatttatcgctgggcgtggtggcttatgcttcaaatcccagcattttgggaggccgaggcaggaggatcgcttgagcccatgaattcgagaccaacctgggcaacataataagaccccatctctacaaaaaaaaaaaaaaaaaaaaaagtaattaagtaaaagaaaagagatttatttggctcatgattctgaagactggaaagtccaagaacatgacactggcatctgttgagggtcatcccatagta

SEQ ID NO: 118870 - DNA, 1028 bp, Homo sapiens
taaatatatatttattattcgtaaaatactctcatttacaaagaggtttatatatttcttgatgtgaagtttttctttttctttttttttttttgagacggggtcttgctctgtggcccaggctggagagcagtggtgcgatctcggctcactgcaaactctgcctcccgggttcacaccattctcctgcctcagcctcccaaagtgctggtgagtatttttagtagagatggagttttgccatgttggccaggctggtcttgaactcctgacctcaagtgatccacctgccttagcctcccaaagtgctggggttacaggtgtgagccactgcgcccagccgaccctattgctagtaaggttaatttttcagattttaaagggtatcaaacttttctcccaaatccaggttttatgccaagattatactgatccactttattgaacacatgacttgaattagatgcctttagggaggcctaagtcataggtctagaaaaagtgactgaccttctttctcataggaatcaggggagagaattagggcaatgattatgactacataccagttgtaggacgacggcatgaggtcacataaggagagactgcacaagaacaggcctttggcaggaacagggagcaatctagttatactgtagcactgaattgaaaagcatagttaactgtttctaggtgggcacttgacattgtttcctaggttagaccagtgagctgggaacgacagcccactggaggggagagtgcagcaaagatccagaaaatgtgaattatagtcagtttattaatctaattaagtagaacaatgattgagtccctgggtgtggtgttgcttgcctgtaatctcagctacttgggaggctgaggcaggagaatcactggaacccaggaggttgaggttgcagtgagccaagattgggccactgcattccagcctgggtgacagagtgagactctgtcttttttaaaaaaaaaaaaaaaaaaggaaattaatacaatgtaccactgta

SEQ ID NO: 118871 - DNA, 1172 bp, Homo sapiens
taatttagcagtaatgattatacaatagatggaattaaattttgagatatgttttctcataaagaacataaaatgaatgagagcttgactttaaaaatcaatatattacatctttcagatcacagaaaaaataagcctatgttaattttgtgttttttttttttaatgttgccaattggttattgaccagctctattttagaaaaatataagaggaggaatggtaaatttcagaatagtaagtattaagatatgaccaaatccttgataactcaaccataagacttactcatttaaagtacagtattctctgctaatattatttttcaaaagtcaactttttttttgaaacatcaacttgtttttcctggaattcagtgaagttactttgtgttgtttgacagacagcatcgcacagaattattttaaaaaaaagcagtgatccaagcaattgaattggaagcactctggggaaacctgctgtttattgtggaaatcatcttcgatcttggaattgaaagtaaagctggaaaggaatttacaaacaagaaaaaaaagaagtttggaatcggattcacaggatctgggcttggaaatgcctcaggtaaatcatacagagtaggtgcaaagttttttattttcccactacagaaagtcaatacctttgactcttaaatgaatcttaacacaactttgcatactacctttttgtgatatctcatttctgatctcagctagttttgagtacatgttcttccttccattggcttctatttcttactttgctatcacttgaagtttaatgagttctacataggtagtatgataaataggtagaaggtggacagatctgctggctttatggggcaaaaccaactcccttgaaaattagtctgccacagcaatcccgtttctatctcctcactattcctatttcccaattcttacctttcatttatgctagctgaatttagaagtaattaagaggaaatagtgagagacttcaggctgcctcccccaacccctctcatctctctctttctcatagacacacacacatacctatgtgtgcacatgtaaatatctccccacaaaatatatctaagaatgattgtatctgtttatattatggcagctactctgaattgatcagttttggttttaggcaatcag

SEQ ID NO: 118872 - DNA, 1026 bp, Homo sapiens
gaggttgcagtgagccaagatcacgccactgcactccagcctgagcgacggagcgagactctgtctcaaaaaaaaaaaaaaaaaaaaaaaaaaaaaaaaaaaaaaccgggtgcagtggcttgcacctgtaatcccagcactttgggaggctgagacaggctgatcacttgaggtcaggagttagaccagcctggccaacatatagtgaaaccccatctctactaaaaaatataaaaattagctggacgtggtggtgcctgcctgtagtcccagctacttgggaagctgaggcaggagaatcgcttgaacactggaggtggaggttgcagtgagctgagatcatgccaacagagcgagactctgtctctccaaaaaaaaataaataaataaaagaaattttttattctttctcattctctttcttcatctcagttagatttcaaattgaggcctttctattatttgacccactttaggagggtgagcccagacttgactctggcgggatttgtatagatgttaaaatgtaaaaagaagatagagaaaaaacaagaaggagaattaatgctgggtcccaagtcttttttttcccctttacttattatggaatggactgtgcccttttcaggaatcaggattaaggctacagagttcatgcccaagttactggtcttaccaaggagatttttgggtatttagttgattctgtttccattaccttcctgcaggcattggttgtactagacagtgatgcccaaattgtcttccagcttgctttggaaaataagacatgggactcagcagcacagagtgagagtgatttgctgtatctgcagaccctaggaaaagacagggaattctctactgatagttaaaatagtgttgttagacaaggatttgaagaaatgttatacagctaagtgaaagtactcgataggtgctgtatggtgactggtggctaaataagctttactttctagaagatattaattgctgctctatattttttcaattttttttgacagg

SEQ ID NO: 118873 - DNA, 1029 bp, Homo sapiens
acataaaattgaaataacacaaaaatatataaaaactggaaaactgagtgctcaaatgcataaatctactaaaaattattgaattgtctacttaatataggttggttttatggtatgtgaaattatacttcagtaaagctgttaaaacatacacagacaggccgggcgcagtggtcatgcctgtaatcccagcactttgggaggctgaggcaggtggatcacaaggtcaggagttcaagaccagcctgaccaagatggtgaaacctcatctctactaaaaatacaaaaaaattagctgggcatggtggcacgtgcctgtaatctcagcaattcaggaggctgaggcagagaatttcttaaatctggaggaggaggttgcagtgagccaagatcgcgccactgcactccagtctgggtgacagagtgagactccatctcaaaaaaaaaaaaaacaaaaaaaaaaacccatacacagacaacacacacacacacacacacaccccaaaaattaaagaaaaaaaataactctggaagactcaaaacgtcctcattttctttctgtgcctccaccttccaaaccttttaccaaaacgtaactaacaggttcttttccatgcatatgtaaacatatgtatatagtttttttgtatatactttttaattggataatatagataacagttttctgtaacttgctcttttaaaaataaaaatatatggtgggcagtctttcatatttgtacattagagctatgctgcattcatttcaatggctgcagagtcttaactgatatttgaaattgacatctccagtggcacatgcctgtaatcccagcaatttgggagggcaaggtgggcagatcacttgaggtcaggagtttgagaccagcctggtcaacatggtaaagccctgtctctactttaaaaaaaaaaaaaaagaaaaaaaaatcatctctaaaattcgtgaggagtattttactctgcctgcccaagtgttgttataaggtcttgcaaaagatcttaccattc

SEQ ID NO: 118874 - DNA, 1943 bp, Homo sapiens
ccaccactaaggagatcccaaaatccttctaagataaggaaatgtaaacttttttcaggcagaatgtttatggtaaactcaagagcccttgatatttggatcatacctgagcctctcaagggacacactttccgtcttttttaaatttaatttttaattgatttttgtttgttttattttcattctactttttcttgcctaaggaaatgatgacattatatgaaatgataaagcgtcctgtcagtagcctttatgttaaaacagaccaaaagtcaagtattgatttatcagtttgacatatggaggtgaatatttccttctgaaatatgatgtgcaatttcttttttaaaacctttctcaggatagagagatgaactaccaacagaatcctagagacaactttctttctttggaggactgcaaagacattgaaaatctggagtctttcacagatgtcctggataatgagggtgctttaacctcaaactgggaacagtgggatacatactgtgaagacctaacgaaatataccaaactaaccagctgtgacatctggggaacaaaagaagtggattacttgggtcttgatgacttttctagtccttaccaagatgaagaggttataagtaaaactccaactttagctcaacttaatagtgaggactcacagtctgtttctgattccctttattaccccgattcacttttcagtgtcaaacaaaatcccttaccctcttcattccctggtaaaaagatcacaagcagagcagctgctcctgtgtgttcttctaagactctgcaggctgaggtccctttgtcagactgtgtccaaaaagcaagtaaacccacttcaagcacacaaatcatggtgaagaccaacatgtatcataatgaaaaggtgaactttcatgttgaatgtaaagactatgtaaaaaaggcaaaggtaaagatcaacccagtgcaacagagccggcccttgttgagccagattcacacagatgcagcaaaggagaacacctgctactgtggtgcagtggcaaagagacaagagaaaaaagggatggagcctcttcaaggtcatgccactcccgctttgccttttaaagaaacccaggaactattactaagtcccctgccccaggaaggtcctgggtcacttgcagcaggagagagcagcagtctttctgccagtacatcagtctcagattcatcccagaaaaaagaagagcacaattattctctttttgtctccgacaacttgggtgaacagccaactaaatgcagtcctgaagaagatgaggaggacgaggaggatgttgatgatgaggaccatgatgaaggattcggcagtgagcatgaactgtctgaaaatgaggaggaggaagaagaggaagaggattatgaagatgacaaggatgatgatattagtgatactttctctgaaccaggtattataatgcttgcaagcttaccagactgacctttgtattactattttgaaatagaaaggtttttgtttctgttttgtttggataatttctttattttagtttgggaattaaatgacttaaaccttggattggatatgtaattggtttttctattcaaatagctctaaaatgatcacttttgctcacatagggattcataagctgattccttgagggcttattttttattattttatttcttatttttaaaattaaaatagagatgagagcttgccactgtgcccagctgaggacttattcttaatgtatcttatgttaagtgacctgttttgtcactctcttgagcatttatgcaaagacaccaataatttattggtttaaaaaatattcctgtttagggccaggcgcagtggctcacgttagtaatcccagcactttgggaggccgaggtgggcggatcacctgaggtcaggagttaaagaccagcccggc

SEQ ID NO: 118875 - DNA, 1043 bp, Homo sapiens
tcacccctcttacagtgtacacttctatgagttttgacaaatcatgtaatcaccactaataccaaatagtttgatcacccccgaaaattccctcttctattttattttattttattttattttattttattgagatggagtcttgctcttgttgtccaggctgtggtgcaatggcacgctcttggctcactgcaacctctgcctcctgggttcaagcgattctcctgcctcagcttcctgagtagcggggattacaggcacccaccaccatgcccggctaatttttgtatttttagtagagatgaggtttcgccatgtgggccaggctggtctcgaactcctgatctcaggtgatccgcccaccttggcctcccaaagtcctgggattacaggcatgagccaccgcacccggccccttatattcttttatagtcatcccttttctccactgccaatccctggcaaccactgtccatataggttgctttttccagaatagtatataaatggaagcatgctcctgattcattctttgtctggagaaaacttagttcctcaaagcaaacatatcatcaccttcttatgttttcaggaaggaaaaattacctttttacttatggccaatgctgcccaagttttcctggttaccttaggtttggattgtgtacattcttcgcacagcccattccgtcttgttcatgtacctagcgttaatgatctggagtacatcagaggtggccattctctgagggtattttagatttataggtcattcaatactgggtctgaccaacagttctagcaactcagaattaagtattttctgaaacttcctattaggaaaatacccccttcttaaacagtgacgttaatacaaatagctttcaataaaatattaactggaataggcatataagttttttatctgatagccagtgtgagaaccgtcatcttttatacttttccaaaagaagtggtgtgacaggtaggaagaaaactaatgctgccacatagaattctgcctagtagaacaccatcataga

SEQ ID NO: 118876 - DNA, 1050 bp, Homo sapiens
gtttcagatacaaatattagaaggaagacatttaaaaatcatagtttatgtatctaagtaccattatctgatggtacttttgatattcctatagctgtcctgtaattgttctcttaatcctgtttgaagataataaaaatagtatcgtatactaacttataaaaactaaaaagaaacccaaggaagatgaacagtgtagttatctatgtttattaatctcggaatgttttatgagttagagatttacatattaaaagttctcttatagacctggtttattatctttgacatgccaatgatgttttcagatgcaaggaaatataccaagttacaaatagaaggggtcttttcatttgttctgattgatttattgaaatttatggagcttaaaaattgcgggacctttttttaaggctatgaaaatgattctgtagaagacctgaaggaggtgacttcaatatcttcacggaagagaggtaaaagaagatacttctgggagtatagtgaacaacttacaccatcacagcaagagaggatgctgagaccatctgagtggaaccgagatactttgccaagtaatatgtatcagaaaaatggcttacatcatggtaagaggggattgcagtcagatatttagtgtcactttaatcaagttgagctactaatccataatgtttactccgtgtacctaggcattcagcccttcctagcaaactggagatggggactgtagagctgctacatttgtgtgactactcttcgtcactcacaaatagcttttaccagtgttaagagtcctcacctaagtggagaggaaggactgtgtaaacattatttcatttctagtcccttcttaatctacctaccccattcaggaaatgactaggaggctgctggtttctgacctgtcacagttggtataaccagaagggttgaggagaaagtgaacgggctctcttgcattcttgtgtaatccccagatgtaaatggggggactggaattcaaacggtaatggggataaaagggcaaggaaagaaaagaaagggagg

SEQ ID NO: 118877 - DNA, 1047 bp, Homo sapiens
tattattattattattattattattattattattatactttaagttttagggtacatgtgcacaatgtgccagttagttacatatgtatacatgtgccatgctggtgtgctgcacccattaactcgtcatttagcattaggtatatctcctaatgctatccctcccccctccccccaccccacaacagtccccagagtgtgatgttccccttcctgtgtccatgtgttctcattgttcaattcccatctatgagtgagaacatgcggtgtttggttttttgtccttgcgatagtttactgagaatgatgatttccaatttcatccatgtccctacaaaggacatgaactcatcattttttatggctgcatagtattccatggtgtatatgtgccacattttcttaatccagtccatttcttaattatctgttattacataattaaaaggaaagtctttcatggtagtgacatattccaagtgttttgttctgtcttacagataatttattgtttgtaatcaactccatcaagcaagagattgtaaaccgggtacagaatccaagagatgagagaggacccaacatggggcagaagcttgaaatcctcattaaagatactctcggtaagaagaatgcgagataaattcataacaattaataatatgtgtaagatgtatgatttaaggggatattaaaagttcttttagtttaaggaaaaactcaagtgctctcattgtaattactctcctttatgagtagttttatcttttgagatttagtgttcataaacatgtgttgcaggtgaccacaacttgtaatttagacttaatcatgaaactattttaacatttaagaaaaacaaacttctagcaactttaacctttcatggaggacaaaaggtcccagagctgtcaagcctgcagtttgcactttagtgtagagattcttacttgttttactcagtaatgcatttcacaggattcccacaaacttggctctctggtttcccatccctgaacagattgcacaatgtggggaggatcagag

SEQ ID NO: 118878 - DNA, 1262 bp, Homo sapiens
atgtccagctaatttatttatttttatttttatttttatttttatttttgaaatggagtctcactctgtctcccaggctggagtgcagtggcgtgatcttggctcactgcaacctctgcctagcagatttaaatgattctcctgcctcagctgactcccaagtcactggtcgtacaccaccatgcctggctaatgtttttgcatttttagtagagacagggtttcaccatgttggccaggctggtctcaaactcctgaccccaagtgatccgcccaccttggccacccaaagtgctgggattacgggcatgagccagctcacgtggccagcagcaaacttatttttatgtttgtagagacgggttcttgctgtgttgcccaggctaagctcaagtgatccttccgcctcagcttcccaaagcactgggattataggcatgagccaccccacccagccctcaccagttgttaatattttgctacatttgctttatttctacctctatctacatgtgtattttggacagggaatatttgaaaataactcgtaaaaatcatgattctttgtctctaactattttagcctgtattgcttgaaaacaaggacattctcttagccacaacgccagtgtcacatcctagtgcttcaacattgatataatatctaatatggaatccattttcccagttgtctcaataatgtccattatagcatttttttgtgtgtgtgatccagtcgaggatcatgcattgcatttagtcatatctcttcttttgttttctttagtctacatcagtctccccatcttattttatttttatgaaaaatccaggtcttgtaaaatgtctcaacatttggatttatctgtttcctcatgactaaatgcagttagattttctggtaagaatacatcatacaaccttttcattccatcagtcaagaggcacataatatcagattgtctcattatttgtcatgctaagtttgatcacatggttaagcttgtatatatgtatacacacacacacacacacacacacacacacacacacttttttttgtttgtttttggagacggagtcttgctctgtcaccctggctggagtgcagtagtgcaatctcagctcactgcaacctctgcctcctaggttcaagtggttctcctatctcagcctcctaagtagctggcattacaggtgcctgccaccatgcccagctaatttttgtatttttagtaaaggcagggtttcaacttgttggc

SEQ ID NO: 118879 - DNA, 5508 bp, Homo sapiens
aaaatacttgattattgcattttcagagcataaaccatgattaaaactgctactggcatcagaattgaaaatcatatgtttaagtaaatgttaggtacagattacaaaaatctgttaaagcaaaacattttggaggagtgaaatagtaaaatgccaagtattgtggcagatttatgctctgaaccacacaaaaaaattgaggaagcatttttttaaacagtcggtttaaattgtttttagaattattgctttttgttctaattttccacaaccattaatctcacttgtatatggcacacccagcacttgtgcctgtgggccatattagatgttcattgtcagagctcaagatgatatatataaatatatatatatatatatatatatacacacacacacacaaatgtctgtgcaagtaagaaaaaaaaagcatattctttgtgccttgtattttggggaaactctaaaactggtaatattttgtatgatgaaaaccctaatgagaaaaaacaagatatatagatggaaaaattatggggtttaaatgtttttttgttccaactctttttcagattttttgaatgtatataggactatgttgaaatgtagatatatgccacagagtctgtgtattgtataaaaaacaaaacaaaaaacaacaaaaaaaagatggctctagaaaactcatatttcggtacttgaccggaagaagacaaatacttgcacattattgcgattgttttattttttgtaccaaagacaaatgcaactgatatggcaaactgccagtctaagtaaagttttgcacagcttacatgatactgtatgaatgtatgaaaaaaaaggagaaaaaaaagaaaaaaaaaggtcagggttagggatcttactgaactgtgaattttatttctgtttgggtccaattatctacagaaggagcatccatacatacaaatattattttgctgttcctctagttcgcttccatagtagataagttggtggccatttagatgtcttttatttctgcacttattgtaggaaattttaatatatttcattttagtaagctattgataaaatagtttttgactttgaaaattaaaatgtttatttagcttattgtagtatacttccaccagacaacaaaatagattatttttattgtattatgtatatatatatatgtaaagaaagaaaaaagctaaaaatatctaattctttagttgccacttttccgattgatgtattattgtgcatgtaatattttcaaagatcaacacaggctaaaacaaaaacaatttatagatttttatatttttgtacaggtattttcaaactagcttcttcaaacttaacatgtgacttattcttctatagtttctagaattgagaaacattaacacatttagtttttaggtgctcttttttgctcatataaaacagcttcattagtcagtgttttaactgtgttcaagctttacctcttgatgagaaatttcttatgtcaaggcagcattataaaccttcccccacagatttttccatcctgtctctcttactgttttattctcaaatcttgtgctttgaactctgaaaactggtggcttaaaaactaaaaaaagaaaaaaagcatatttagcaaggaaaaaaataccaaaaatttcaggcatagctgctggaaaaattatctatttctccattacccactgtaggatttcttttttaattatactttgactataaagtgtcaaagtataatttgttcttttcttttactttgttaccccatttgtaagctatagcatatgaagctatatatatagcttgtgaaggtttgatctagaacacccagtaacaaatgaacaatgttgcttacctgcttctttgacatcttaaaaaagaaatccaaggaggattgtaaggattgtcttaccaccttagctgaactgtgatgcacaagatttttctatgtgtttggtggaaatgtacctggtttgtacattcacgctaaacagatgataagctcaagtctgatggtttaatagaatgtaagttcatcgtttaaagcttttcctttttaggttggagaaggcaaaacacaggcttgcaagttggaagtatatgaagtcttgacagagtgtgtctggtaaattgaaaagtgtttcaaactatggcagttttgcaatcaggtgaaaatcacctcatgatattcagctgataaggtttataaaattgcccctttctagctgctctgttaggaattctggtttttgatacttttttcctgtctgcaaaccagaatttgattttttggtcttgcatttcaaaaaaaaaaagactttgaatctgtttagtagattccatatctttgagtttcagtgttttatatgtactacttaagttaaatagttaaaagcttttaaatagttgagctttttaatgttgacactttattttgtacctatttatatatgtatgtatatcttagaaaagcactttgttaaaaaaaaattgcattttatatgattcctgccatttgctgctaaatctgggctggtcagaatgctgcagcgatacttgatctatataaaaacctggcagtaaaatgtagagtgaaagttaaatcctcttgctgttttaactttatcataaagatgacataggcaagctgtgcagctttacattttaaccaggggactctgtggcatttaaaaccgtctagaaatggttgtactttaatgccagtaataatctgcttcctctattgtcattaaaatatatacgtttagtgtatcacacaaaccaatcttataagggtaatgtaaaaaccccaacaattgtacatgttctgtttttgaaaattgtggcatgtatttttgggtgaagatcattagagaagagttctctaaaggttttctgtgttcatacatggtatacagatagctcataatgaagtccagaatcttacttttaagtgaaggcattgtgaattcacctcaagtaaacccattgttccaaagcaattataaactttgactctagtactactatgatttaaaaaaaaaaaaaaccaacaaaaaccttttttcctagtttcagatacactggattctttatagagtttgtctccatatgaaagcatgctgtccagtcgctcttgttaagatcttgtctgagttttgaattgggtgccacacttttccagtcaatataattgcttgttctactgtaccatgtatgattcttgtcctttcctatatccttcatgacagattatgatgtggctttatattgtgccttacttgtacatttaaaactaaacgtcttcattcccttccacttcctacatctttaactttgacctttttggtaagagaatcagaactattacaaaagcatcatgaaggatttcagatgggtatggtttcaaattccctctctttatagttattttatatttgtatgaaagaccagttttggatggtctttgaatataggggggaaagattagcagtaatttcactacatcccttttctctgactttcatgcatttctcatacatcttctttctgatgcttgactttatttgcttcctagcaatagtctgcatttaaagaaaggtgtgttcaattcatcagcttgaaattgactatttcatttttccaggattttttaggagaagagtacccattttgttttataaaaacagatgacaagtctctttaaaagaaacagaagtacagtacttttgaaatacaatgctgttagtttggatttctttttatatatatatataatattcatacaatgatctgatgtttgccttcattaataaagctgttagtttattcaccaaaatgtcaagaatggatgtgcttttctttattccacacatttaaaaaaatttagctgctaagatttaatgttataagaaatgaattcaagttgccttcagcaagaattaacaaaaacttatgttccctttctttatatagtttcctaaaattctgttcaagtattttctagttaattatgtaacagaatgttagcatctctccatatcttgaaacttgaattttgagaatgcattgaattatgctttcagtgttaaagtaaaaggtttcaattatccttctagtgaagtctgttgtggaataccatttcccatggaactgaggccatttccacaactttgcacagaactgcagtcttgttcttcccttggatcatgacaaataagtctcacacagtgccgtaatacttgtggattcttttgtaatctttgtaatcttaataagggcattatgagaagacgactccatgtttttttaatacttcaaacacattgggatgtaacaatgaatgtcaactgtaggaatggtggtttcgttttaaggaataagcatgttggggaaagatgatgaaaatgtactactgaaagttatacacttccataggcaaatgggattatgtgttgaagcatagtcctcatgcttaataaactgactgaaatcgtagaaattacacctaggaactgagctaggccaaattgccatttttgtttagagagttttggaggtagtagtgaggggacagagccttaaaactacttccaaacagtattttggaattgaagacttggtaactagtgaagaacatcaaagttgggtatttcaatgtgccaagtttgggtgaactaggttcggtttgcctctttcataacaatgtaaacacaatggtgtagttaattaaattctgggtggataggagcaggactgattactatgtcttgcccttcgccctttgtttttttcagaaccaaataacagaaatgtgtatgtgtgtactgtatctgcctttccaccacatttttatgacactgtattccactgcctgcttttttaccttctttccctaggatttgtcctacagcttagtattgtggttgacagcgatactagggctgacagcacagaagtcacaagagaagagtggaagggcaagaattcaaagcatttgttcatacaatgtggcaacctcttttgcatagttgcgtaggatcctgtttgtaatgctatcataaatattctgtagttttttttttttctctcccaactggagctatgacactttttattggattcagtcttgtctcttgtctagaaagaactttatcttgttgacgcatgagctgtttaaaaattatcctattaaatgttggttaatagttgtgcagtttttcatttcagatggaaaggcaatgcaaattttgcctttgttttctgtcaccttccaacccctgagcacttctagtcagatacagattcatcagtgtatgcaacatcctttgtaatttaaaataaaaaaagatgaaaagaaaacgttctgaattgtttgcctcatgttttcgcccttcctttctgtacttatatcttgcttacctaggtaaccatccgctcctcaagataacctattccaaagaaattccaaatcacagagagtggtga

SEQ ID NO: 118880 - DNA, 1020 bp, Homo sapiens
caggagttcaagaccagcctagtcaacatggtcaacctccatctctactaaaagtataaaaattagctgggtatggtgacccgtgcctgtaatcccagctgtttgggtggctgaggcatgagaattgcttgaacctgggagttggaggttgcattgagccaagattgtgccactgcactccagcctgggtgacggagcaagaccctgtctcaaaaaaaaaaaaaaaaaagacttgtgcttttcatataacatggcccccaaagcccaccagcaactctgttgttgcttaacagaggaagacagtctgttctaaagctggtagaaaagctggccagttggacccctgagaaacagtatgtctgtgtcctgtgtttgcctacctcagagattttcaagggcaattttgaaaatgtgtaatttttgctattggagttaactatatgattttcagcagcgtcaccatacctagctgatctcttcctgccttcatctccagtactgatttaatcatcttaattttttatttttgaaaagatgttccttttacatgttttatgtatgtgtctgtctataagtatcaacattcagtgaaaagtctcagttatgccccagttttgttttttgttccactcttccaaacaggtaaccacttttgttactgatatgtcattccagagtttctctactcaaatatttaaaaagacaaatttctttttttttaaaatttcttccttgtttctcatctaaaaagtagcatactaacacacagcttttaaaaactttatacttttgtttttttgtttttttttaagacggagtctggctctgtttcccaggctggagtgcaggtgtgatctctgctcactgcaacctccacctcctgggttcaagcgattctcctgcctcagcctcccaagtagctgggattacaggtgtgtgccaccacacacagctaatttttcgtatttttagtacagacggagtttcaccgtgttagccaggctggtctcgatctcctga

SEQ ID NO: 118881 - DNA, 1020 bp, Homo sapiens
ggcttcatttttctgtccctgcacgagctctcaaaccttcaagcgctcaaactgcctattactcgtctttaattaaataggcacagaaattgtgagtatctggaaatgaacagcagtttgatattttaatgatatctaagtgggggatcagtgtgcttgtatttcgtcattgtttttcttttcctttcgggcctgccctaggtgacaggagcagcagctctgacgccaggacagccgtgcatcactcccaggctgactattccagctcttgttcccttcccacttttgggccataggggttttccttacttccttgtggacttagctatagatttaaaaggatgtgtgttatatgttacctagcattcctaggtgttctgttttaaaagggtgcttcaagtgctattgtatgcccttggcagaaatagaaatgctcttctgctttcatgttgacttttgaaatcattttaacatggaattatttttcctcaaaggacctggagcagttggctaaagagcaagacaaagaatcagagaaacaacttctactccaggaagtggagaatcacaaaaagcagatgctcaggtaggcagggcctgcccccgccagcggcttctgctggctcttcttgttgcctgtgagccttgcacgtgtgtttgcctgatggatctgctttaatgctgacttaatggtgtcttttttttttttttgagagacggtgtctcgctctattgcccaggctggagtgcagtggcctgatcttggctcactgtgacctctgcctcccgagttcaagcaattcttctgcctcagcctcctgagtagctgggattacaggcgcccaccatcacgcctggctaatttttgtatttttactagagacagagtttcgctgtgttggccaggctggtctctaacactggcctcatgtgattcacccaccttggcttcccaaagtgctgggattacaggtgtgagcaaccacgcccagccaattgcatcagttacacactggtgga

SEQ ID NO: 118882 - DNA, 1840 bp, Homo sapiens
tccatgccggcggttgggtggggaggggaatcattggttgggggaagggaggaaaccccacctccagcccccgccaccgggctccctgggcacccagcaagatctggggctgcagagaacagaagagctggtgcacttaatccagctctgcccttggggggaggaggacctgtgtgtcaggctctgccatgggaacgagtgtaaaccgtggctgtctcctgcagtgagccaccgcggcaggcacgttgactgttttactgacatcactcaaaagctaaagcaataacattctcctgcgttgctgagtcagctgttcatttgtccgccagctcctggactggatgtgtgaaaggcatcacatttccattttcctccgtgtaaatgttttatgtgttcgcctactgatcccattcgttgcttctattgtaaatatttgtcatttgtatttattatctctgtgttttccccctaaggcataaaatggtttactgtgttcatttgaacccatttactgatctctgttgtatatttttcatgccactgctttgttttctcctcagaagtcgggtagatagcatttctatcccatccctcacgttattggaagcatgcaacagtatttattgctcagggtcttctgcttaaaactgaggaaggtccacattcctgcaagcattgattgagacatttgcacaatctaaaatgtaagcaaagtagtcattaaaaatacaccctctacttgggctttatactgcatacaaatttactcatgagccttcctttgaggaaggatgtggatctccaaataaagatttagtgtttattttgagctctgcatcttaacaagatgatctgaacacctctcctttgtatcaataaatagccctgttattctgaagtgagaggaccaagtatagtaaaatgctgacatctaaaactaaataaatagaaaacaccaggccagaactatagtcatactcacacaaagggagaaatttaaactcgaaccaagcaaaaggcttcacggaaatagcatggaaaaacaatgcttccagtggccacttcctaaggaggaacaaccccgtctgatctcagaattggcaccacgtgagcttgctaagtgataatatctgtttctactacggatttaggcaacaggacctgtacattgtcacattgcattatttttcttcaagcgttaataaaagttttaaataaatggcttccacttgagtagcgtcattgtctgagagggtcattgatgtccggtgcacagggggacagctgtgagcaagtgggcttttacgtcaagagaatcctatgcttctgtggatgttcagcctacagggaaggaagttagatgaagaggactaccctaggcttctccgtcagagggaccctgtccaagcccctgcctgagtcacccagacaaggaggagaataaatttcatgcagttggcctggaagtgccacccccacaccccattaggcaggtccttaaggctcactctggtctcacctttgagtctcccctgtgagtctcccctgtggcttggccaccccttctctcagactgagcctgcagcagacaccaccagcttaacagctgagtggcctggcatatagagggaagcccactgcctcctccccagctcttgctcacgacagcagaacagagctggagcccctggtttacgtgatctgtgccactgttggtgtacctactatgttccaggcaccacagtaggcattttgcatgcattatttcatcctcattacatcccacaaataataggtattatcctcattctacaggtgaagaaactgaggtacagacttg

SEQ ID NO: 118883 - DNA, 1036 bp, Homo sapiens
ttagaccctacgtggacctcgtgaacttgctgctgacctgtggggaggaggtgaaggaggccatcacccacagcgtgcaggttcagtgtgagcagaactggggaagcctgtgctccatcttgagcttctgcacctcggccatccagaagcctcccacggcgccccccgagcgccagccccaggtggacagaaccaagctctccagggcccaccacggggaagcaggacatcacctcccagagcccagcagtagggagactggccgaggtgccaagggtgagcgaggtagcaagagccacccaaacgcccatgcccgaggcagagtcgggggccttggggctcagggaccttccggaagcagcgagtgggaagacgaacagtctgagtattctgatatccggaggtgaaatgaaaggcctggccacgaaatctttcctccacgccgtccattttcttatctatggacattccaaaacatttaccattagagaggggggatgtcacacgcaggattctgtggggactgtggacttcatcgaggtgtgtgttcgcggaacggacaggtgagatggagacccctggggccgtggggtctcaggggtgcctggtgaattctgcacttacacgtactcaagggagcgcgcccgcgttatcctcgtacctttgtcttctttccatctgtggagtcagtgggtgtcggccgctctgttgtgggggaggtgaaccagggaggggcagggcaaggcagggcccccagagctgggccacacagtgggtgctgggcctcgccccgaagcttctggtgcagcagcctctggtgctgtctccgcggaagtcagggcggctggattccaggacaggagtgaatgtaaaaataaatatcgcttagaatgcaggagaagggtggagaggaggcaggggccgagggggtgcttggtgccaaactgaaattcagtttcttgtgtggggccttgcggttcagagctcttggcgagggtggagggaggagtgtcatttctatgtgtaatttctgagc

SEQ ID NO: 118884 - DNA, 1628 bp, Homo sapiens
ttattcttcaaatatttttaagggaacaatagcagccacagcatcatcaacaacaatgatagctgtctttttttatgtttttttaattttttttctaatggtctaggcccttggccagggcctttacatgggttatctcatttatctttcccaaagatgctacaagatagaaattactatgcccaagaggaggaaagtgaagctaagagattagagaactcggactgaggtttgattcctgcttttaagcttcggaattgctggtatacatgactgaagccagtcatcaggaatagacttcaaacctgctcccagcctattatctccctcctagacctgaaagggctcacagctccccacatgtggtgggcttcttgtccttttatcaaatatatccccattacacaaggagaacactctaaaattcccttccttcaggtgcctctggaagagaaaaatgccccatggctaggaaacaccgtgagcttcactcgcctctagccctgtcccccattagagagagtttgctggcctcaggaatcggtggggaatggggcccattcctagtttataaggctataatgcatgcctggagcacaggaattctatctttcttggagaaaagtattctttgggaaaactgaaggttggaagtcccaccccctccccttaatttaagaagaaggtaaagctctctggcgttctagtgtctccttcttgggaatgtggccctcggggccatggtctcctcacaccattcagaatgagcctatgaccccccaccccagcctgctctggaaatgcaggcagcccatataagaagcctggtcacatgctgttcctcttgcttccccctaagtcagcatctctaggcaggggtctcccctaactccagcttcccaaaaacccccattacctttccttctgaagccatgatgtggcggtgcatcgacttgtacttctagctgaactgcctgttttttaggtttttttttcccaaccatcttaactgattaaagtatcctatcagtccccaaatatcaagaagcccatttccaaatgtgtggcattggtcaaaaaaaaaaaaaaagagagaactgaatttgcttttcactttagagatgaggaaatcacagtcaccccagaatctgcaccacccccattcttcaacccaacccccatccacaccagaacactcacccccagttaatgctgctcttttcaagctcttcctctccgctcccctcaccccttcctgcccgccccactttctgcacagcatctgtctccccctagctgccgcctgcctggttttacccccactcgccatgtcactgggtgctggcaggctccaggcacatccccctccaagtattttttaaaatcctttaggcttgctgacacccagttgaacgagctggactttgtcattagacacgggctgagcttgcagcctcagaaggcaccaggccagctcggaacacggcttggattaacttggttcggcacacacacccctccccgcagttcacagcttcctcctggagagagagagggccaagggcagaggacagcatgggctcatccagccttctgggatccagatccgccctgggcttctgggggct

SEQ ID NO: 118885 - DNA, 1060 bp, Homo sapiens
aaattccctttgtgttccagaaaagttgccaccacacaaccaacacagggctacctgagggacacatagccacggaagcccccgttggagggaaactcacagagtagccagggaggaaggagggagatgtgttcgtctacagaatgaacatcccttgttgcccagtgctgggggtgtcatgtcactctggacgtgcctccggatgtcgcattgcctgtcacctgggaggacgtccgtctctggtggggccttggggttctgatgtcagaaatatcctgtgtaagcccaagaagggctgaaatgtccaagcatgtaacgaggtcttctgctttctgcccctctctcccttccccggcctgtgtgttctcagggcaagtcattcatcaaagacgccttgaaatgtaaggcccacgctctgcggcacaggttcggctgcataagccggaagtgcccggccatcagggaaatggtgtcccagttgcagcgggaatgctacctcaagcacgacctgtgcgcggctgcccaggagaacacccgggtgatagtggagatgatccatttcaaggacttgctgctgcacgagtgagtactgccccgcagagggcctgggtgaaggggccacccagcaaggatggcaatgtgtatgggaggagagccgcgttgcttctagaggctgaatgcctgtcaaatggagaaggcttccatttacttcagaaagctacactgactctactaaaaggcccctttcctgctggcttttaggaaaagagagaattccctcatcagtctcaaaatcacaagcaacagaaatgggaaatcgttttactaagaatgaaatgtgtcgattcagtaatactcttcatcttccccttagccaagaacccactagctctcagaatattctgagtagctgtagaggtgtccttacagacagcaaattgctaataacatttgttgaatatttactaagcgccaggcactgggctaagggctccttgtgaatttttcacttgatcctcaccacagccctcgtcacctccatttgacagatgagaaaact

SEQ ID NO: 118886 - DNA, 1470 bp, Homo sapiens
agatctttctctcccaagctgaccggtcgaaaccctgattgagtccttcagttccacactttccttttgctctatatgataaatatagtcagggcctgacccacttcggttatcccagggtcccaaggggaacgcggagttgctgctcagggcaaggcaggaacacaacaagcaacatatggctccagtgccaacaacgcaaatacatttttagatggcatgtggcatcagactcaccttcttcgtgttctccctggccacttatatgccctgttgaaacgccctgttactatatctcagaaacgtctctcctgcttcattggagagcaatgccaacatttggaggtggccatcagcttaggtgagatttatggatgtcaccagtccccatccactgacatatagtagtgagcctgacaaagcagtgcctgggaacaaggaggggaggcgaagacggggctggcagcctaaactgcagaggatgtgcggtgtggccagaggggaaactgaaaccagggaaggaaagaggtagaactttgaactccttgaggctccctaataaagcatcactctggattaacgggaattaggaaacgtaataggaaatccggaggaaagacgtgtatttaagggcaatcccacaggatgtcagggaagaataccaagaacagattgccacagccctcgcataaattcatcttcctcttttttttcccaaccaacaggaatacgttctcaagttagagacatccctttcaagttgatgctcagcacataactgcttaataaacgggcacaccctgccctccattctgtttggctctggctggagagtcaaaagagagggggccacggggaggccatgcgggccacatggtttttcagagatcagacgctatctgtagacatttctatggctgctaaagacaaaaccaaaataaatgtgctggctggcttcccacttccaacctaaacccatttactttctcaactcagtgacttccgggcctgtctaaaaacagaggggtgacctctccgacgacagctagtttctatagtaatgtggggtgcggggattcccgggtaggcatcccacaatgcctccgggctgcgcgaggttgataagggagcagcaccgagctcgcctccacacccccaacagctgtctcctttctaggataagcacaatcagacggggttgccaggaaagagaactgcaggccagatgtatgcctggctgccttcgccactcggaggcagggagcgtgggggaggggccgccagtgcggcagttcagactccagatgctgccaggcagggtgccaggccagccttttagaggcaataatccgaacagtttaaaggagtagagtcattttcaaaaaggaaaagagcgctcttcctggtagggtaggaggagacaagggtatggatttggggcgtgggaggcacggaggcagaaagggaggt

SEQ ID NO: 118887 - DNA, 1054 bp, Homo sapiens
gaagggctgcaagcttcctcccgggctgcgggaattctaggggattgggtgatacctcacccggatccctaattaaaaggagcctgcaacctctgatagtggcgtttctgaaggctcgcccccagctgactccactcctaagcctgctcgccaaccgcagcttccctagctggtattttaatgcgaagggttgggaggcactgccttaataggaattttgttttgatttttaggtgttgaatcataaagctgaattgaaactgctttttagatgctgtcatttgggggtcaggaagcaaatggctgtgatttaatagcagcaacttctacagatcaagtagagaagggtacttcattgatgaagtacagtcttcgactcaaaattttatttttgtctgtgggtttaaaaagcggaaatatattttgctctcaaactaagtattcccacaaatactttaataaaatggaaaggatgaaaaggaggaatgctcagaccagccttctggttgtaatttttgtaatttttcggctcttttctacaaatatttacaaatagagatatttttcatgagtagattaaaggacgaaattttgtttcccaggctttttaggtcctgaaatagtcattactaagtcttttttcctccttaaattttcctttagttgttaacttttatttcaaatgacctctctgcattgcccagcatgggttagagttttgtatatatttgtatgtgattttccttttagcggagatccagcactgtttggtcaacgctggcgatgtggggtgtggcgtgtttgaatgtttcgagaacaactcttgtgagattcggggcttacatgggatttgcatgacttttctgcacaacgctggaaaatttgatgcccaggtaaaaatccatccagagcatgaagaatgtttggggtgagcatacatgattgaaacgttcattggaaagccttgttaaccaacttcctttgctgttccttgtggtgtgttttagtgcttgcaagcgacagtctaggtataaaacattatgccagtgtctcc

SEQ ID NO: 118888 - DNA, 1022 bp, Homo sapiens
caagagcatcaggactgtctttttgttcctctattgagagaagcccttgagtccaatatggagtgtaaaacattcattttaagtctttctttttaattgtaaattcctttaggaacataaaagtgaatatagtctgttatcaataaataacattttgatatgattatctttcctttttagaatacgccagacaccttttgaaagctaatttttggtgaagaaatggattcggttacataagagtgcaacttcagactgaagataggccaaggtcgtcactgatctcaagatttcaaccttgaccatgggcagtgaccagattgaaaggggagcaagttcggcagtgggagagttgaccgtgtcaccccctgcattgtgctgccatttggccagcctgtccaagggcatgacaccaagtagacactacagagagagaaacactacagcaacccagggttgtcctgaaacagacttttatacttgaacatggagactgcacatggactttagggtttgtgctgtgggataaacggaagctacagtgagaacatagccagtcccaaagacaatttcaaagaaaaatgacagtaaagattagctgggagtagtctttgacagtgcttatttgatactgtctctcagagtttgcaaaccagattgtacaagtcattagcgtcagatagctttaaagttgtgaccttcttgtacatgaatcttctagccagtttcctttcctttgtaacgaaacatgaaatcctagaatgtatgagaagttcagacattaggcataaggaaactcgtttgcaggctctctgtccagggctgcttcctgtcctggaggggccagtgagtcttaggtatgtttattttattctcacatttgtgtttttttagaaaagtgaatggtcaataaatggcttatctttcataataaaattatttgatacttttactccgaagcttcagctgaagcttaaacctcaggtctgtgaagggcaacctttgtcttctgcctctgtgca

SEQ ID NO: 118889 - DNA, 1129 bp, Homo sapiens
ctgctccttgagatctggctcagcctgctcactgcctcccaacctacctctccccatggccatcctaggtcctgcagaaggccaatcctgaccccctccatgatttcttcaaattcttcacctctgcattgaagtcctgcctctactgtattcttttaaatttaggggcttttatacgaatctcagcacctggattatttggtactgattgactttctgaaggtatcagaggagggactgatgtttcagccacattaaaaacaaataaacaagtggcaaattgtactttcaaccttgttcttagaggacattccatgtcccaagggacccatagtcagcctcccacccactcactatccagctcacagtgcctcgcttcccccggatcttcttggggacacaccctggcctgtcatctctctgcaaccaaaacaaagtgtgggcccaagaagcctgtggatattctaggcatcctggctcctgctgcctgtcagacagttacaagaagaggatttatttccagagggagcctggggctacagtgaagcacccatcttccttaggagacagtggctcaggagcctgtaggcaggaaaaaggctgcctgcctgagctccaagaggctgggcttggctcccagctccccttactctgggccctccagtgcttcattcgtgggctgtgcttccaacatctgctgctgccacttgcagtttgagcagagtgtcttctggggccacacccagaagtaagggtttcctctagcccctaggtgctgctagatacatgtacagttctcaggggctcaaccaggaatgaaactctgctctcctacctccatttcagtgctctgtcttctgttccctttccaggtgggctttgattggcaggccccattcagtggaccctgggcattgtcaacactacttgccagatttccccagctctctgccctccagatctgaggcaagacggcacttgctggccccaaggcagggccatgtgactaggtctggccagtgagccatgcgtggaagtgacatatgtcacttctggttgggagcctgtaattgctgctctaatcaccccttcccaatgccatggtgactgtgggaaatatttgagatca

SEQ ID NO: 118890 - DNA, 1043 bp, Homo sapiens
ccccttctcctcctcatatcctaccccccttctcctcctcatctcctacccccctcctcctcctcatctcctatccccctcctcctcatctcctaccccctcctcctcatctcctacccccctcctcctcatctcctaccccctcctcctcatctcctacccccctcctccttatctcctccttcttcctcttccatctcacgatctcttccccatcttcctcctcccctctcctcctcccagtcctcatcttctccactctcttcctcatccctcaccgcaactcttccctcctcctattcttcttcctccccttcctcccacctcatcttcctcttcattccttctctctccttcctccctctctttctctctgccttctcctccttttaaaatcaatccagatttacttggcttttgatttgtgatttagtagtgatcaggagatttgatgttaaaggaaaatcggataagcccagagccactgacctaattgataggagttgccattgcctctgtttttctgtataaaatgggaacagttttttgtacaatacaagtacaatacaatacaagtatttatttgggcccatatctattttcactagtcttctgagttctgtgaggaacaagaaaggaatgagtaggacaatgtcctccctcttagcaacttcctatctcaatggagaccgcctatcgaatgggaattttctaccccaagacacctgagacagaccacagtacacgctgtgagtgattgaagcacaggctctaaatgctggcagagatcaggctcagtatgggctggagggaggctccacagacaatgttcatctttttttttttttttttttttgagacagagtctcactctgtcgcccaggctggagtgcagtggcgtgatctcagctcactgcaacctctgcctctcgggttcaagagattctcctgcctcagcctcccaagtagctgggattacaggcgcctgacaccacgcctagctaatttttgtatttttagtcgagatggggtttcaccatgtt

SEQ ID NO: 118891 - DNA, 1122 bp, Homo sapiens
tgaatagagcaaccaccaggaggggtttgtgtgaataattgagatttgggatgtgctgggcttccgggacagacaggaagtgttagggaggcagaattgatggggctagaatcggttccatgcctttggctcacagtttatgccacagagaatgccctaaccttctcatttctgtgtggctcagttccaacacatctttgccatcccagctccaaggccacctccttcacaagcttgccctgcattcttcccacgtgaaggtcacctctctcctgtctattctgatagcgctttgggggcagcttgccttttgtgttctattggaacacagcacatcaaattccagtcatttgtgcctaacaaagcacagcgcatacaggaggtactcagcgaatgttcactccaaatctgcacctcactaaaccatggccagatgacatgcatgtgcactgattgacctaatggtagccagacatagagaccacaacgaagtgtagtgggacccccagctgccaaatgcctgatctccctgtgatttaagacttcacagttgcaatagttaactcaagctaaacttgccaggtggtgggcgtgggggctagatggtgaagatcagagccagacagccactccccgtgtttctgggagatgccgtgggcactgaatggacatgggggtgcatcagaactgatgtctgtagcagcccttgtcctgtccccgggagccattcgcttttatcaaggttgccttgcctcccccttctccttctcaggaccctggtgagttccccctcctctgtcacagatgatcagccgctctgcactggtcatgctagcagctgactttgggagagaagatctctgaaccaatagtgttctctcaacatgatgattgcctttcttctgtttccgcttgagaagagaccgtttggcttggtggaaagttccccagggggctctgatgtcacatggactgggatttgaactccagctcctccactgttggctttgtgactttgggcaagtcacctcccctcttggagcctcaggtttctcatctgtgaataaaatggggatcgaagtcctttccctctgggttgtgcaggtggcaggtgctcctgct

SEQ ID NO: 118892 - DNA, 1050 bp, Homo sapiens
actctctgccatagcttaagcctcatcatccacttccacatctcctaccttagatgattttagcagactaccaactcagaattacaatggaatcactgcagtagatgactaactgctatttgcatgcatgttttatttgtgaatgtgaccttacaaatcgattttcatgtctcactgatgaaggcaccaagcgtcagggagacaagggacttgtgtgcagccagtaagtagcagagctaaaatttgagctcagatcgtctgactccaaaatgcatgctctttctccacagctcactgtcatgtcttgcttctttcaactctaggtactgccaacaagaaggcccaatcaagatcctcccacaacaagagcagattgtgaggtaagaacactttgatcccttgggaacacagagccatgagtgtggccagactctctcaaatatcttagacttcatggctataaggcacaaattctagttttggtttatccttttcctcctgccctcatctgccctccactcaatttccaagctcatctttaattttgttgccatgatctcatgggccaggcttgggtgacatgcccatcactgagcaatctctcaggtcaggggatgcgctgtccaatggggttgtcttgggtcatatgccctgccgtgcatttcggtcagtcctattcaagccagatggatggaaagtggggaagatggttctccagaagcaaataaggtgctgttaccaggaagggtggccactccttctcactcccttgcctaagacctcagccacccaaagcaacaatcgtctatttggttctatagcgtggcaagctctatgctgagcactggaaggacaaagagagattgggcacagacttctcactgatccaggtgatgaagagctcacatctgagaggatgtgaccatggatgacccaccagaatgtcatgggatccagctacagccaaggaagcacagagcaccgtgggagcgatttattgtgcttggggatggggaaggggacatgggaggagccatattgagaaagtag

SEQ ID NO: 118893 - DNA, 1019 bp, Homo sapiens
tcgtgagcgaggaatccgttctccttgacacgtccctattgctcctcctgcaaagcccagttagggaagagaaatatcaaaggagtcccttgcccacacaaaagatggcgacctgctgcgctcactctgggtgggggaagcgggttccaggcgccgggcctcactaggcgaggcgcagacggaagaggcgtctctggaggtaacttttcgaccttcctgggagtagctctgaagcgagggggcgtggcctcgcctgagttctaacagatgattggtcttccggcaggtaggtggggaatgagtgctacccccacccctccctcttcgaaccggaagtgtctctgggtctttccagctggttgtcatttcactcggctcggtcctgaggagaaggactcagccgcggctgcgggacccgggcaccgggaggcggtggcggcggcggcggcggcagcagcggcgacagcagaggaggaagaggaggaagaaggaaagaaaaagaagaaccaggaggagtcctcaacaacgacagcggggactgcgggaccagggtaaagcggcgacggcggcgacggcccagcaaccgtgaggagaaacaaaagccttctaaattatagtttaaaaaaaaattctgggggaaaagagagagaaagccgaggggggaggcccttctcctttaaaataactacggtagtgggtttttcctttttttcctcttttttccctctctgcggagaatcgaactgagggaactgaacaaaccgcccctgggtcccatgagggaaaaaaaccccggagccgcagagaggggaagaggcagaaaccgcaggaccttccaggtcgccccctcggtccccgcacccccaggccgcccgctcaccctcgtcgagtctcgctaatccctcctgatcgcgacccccgcaagagggagaaacgggtgtttccaacccctttcatgggggagaggaagccgcggggagcccaggaacagcgaccgcagcaagatctgcacccggagc

SEQ ID NO: 118894 - DNA, 1201 bp, Homo sapiens
tccattagtcaatgctgatttcctctcccgaaaccaggaattcacttcccaccccagataacctaatataatctatatatataaatatataatatataatgttcttaaattattcctgatttttttttaaccaagctgccaagaaaagaacgtattcccctcttagtcctattctaatttttatgtgagtgaatctaaactgctgaggaaaaccatatgtgattgttaaattatatatatctatatttttactccgcgcaaggcttattcttctacatccatagatgcttgagaagctctgtttttgtcattcatgtacattttcctttggaaaaagaaagcgcctattttactaaccaaagacttgatttttaccctcttcatttttattccctcctaaaaataagcccaattggatccaagtcaatgttttaagagatttttttaagagttgttttttctttcagagaccagaattccaaatcagaacaatttaaggtgataagctgcgatctttgagctagctataaataagacatttcaagcaagcaagcaaacaacttaaatttggggtagaggaaaaaaaaggcgtgagacatcaggttgtcattttttattgtgagattctgctcctaaagataataaatgggggattacgggtttggagtgctagtgcaaagcaatactgggaataaatctgcttttccagtcagattccatccacatctgcagcctccacaccatcaccaaaatgccacccccagccctgctgcttttataaataataacacagctgccaatggcagcagtgctgggtcagcttggctttttcctgctccagctacccataacattcaggatgagatcttggggtcagaaaaagcaaaaagtcagcaacaggaacagcaagaccccttagaaaagcagcagctttccccaagtccaggtcaggaagctggaatactgcctgaaacagagaaggcaaaatcagaagaaaatcaaggggacaattcttcggaaaatggcaatgggaaggagaaaataaggatcgaatctccagtgttgacagggtttgattatcaagaagccactgggctaggtacttcaacccaacccttgacatctagcgcatcgtctcttactggtttcagtaactggtcagcagcgatagcgccttcctcctctacaataatcaatgaag

SEQ ID NO: 118895 - DNA, 1009 bp, Homo sapiens
tccagcatcatcacagccagcatcagcagcaaaggaggtctcctgccagtccccatcccccacccttcacacatagaaatgctgcttttaaccagctgcctcatttggcgaataatcttaacaaacccccctctccgtggagcagctaccagagtccgtcaccaacaccctcctcttcctggagcccgggcggtggtggatatggtggctggggaggttcccaaggccgagatcaccgcagagggctgaatggtggaataacgcccctgaactccatctcgcctttgaagaaaaattttgcaagcaatcatattcagctccagaagtatgctcgccccagctctgcctttgcacctaaatcctggatggaagatagcttgaacagggctgacaacatttttccttttccggtaagattatgttccattaatagattaggatgaataaggaaatagcatggtgtaatatctatgtaactagagtttgaagtgcccgtattcacatcagagcttttcttagagagaaaatgaatcaataaccagactttattttagcaggagtgtaattggaacaaaatattcagctgtttctttggcagttttctaaattgtagccttaatcttgtcatagataattatgaatacctggtagctggtgatgtagtaattattaactataatacctttcttgcctgacatgagaatcagggtcagttttttccctatttagatgagaataaataatatatagatataaatatatttcattgcagaaactattgaatgttttctgaagtaactatataactaaacaaatttcttttgacactataaggtagtgattcactgaaaaccagctattgaattacagttttctcactggttggttgcattttaaacctggaaactctctgaaccttgtaggtctgaacagcctgaattgatggacttggcaattcctcttaaacctctgcaaattttggcctacctttcatcagtaaggactatct

SEQ ID NO: 118896 - DNA, 1039 bp, Homo sapiens
aaaaacgatttttttttttttttgcctatcaaaaagctgttggcatttgctttaaagggtttcagttgttaaaaccaaagatcaattactgtgctttagtggtcaagtaaaaaggctgtttaagacattgacaatcccatgaagtctatttttaaaaagttgcctttgatattcctttgaacataaatttaaagaaaatttaatgcaaagataagttttatgaattattcttatattgctaatttaaaaattgtaagttaacattcagtacattttaactggattaagatttggctcagaactaaatacacctttttttcttattttgctactatatgctgacacagtgaatttatgtggcctcacagtttggttcccattctcagcttactgacttttgttaagattgctttaggaaaaatgaaaagttcagacaatgaataaaatatacatatatgcacattaatattttttcctattgggctaatagagtgtgtgttatgtgtgaaatctttttgaacagtttctttggagattaagttgatttatgaaataatagttagactaagattgatactaaaatatattgttagaaactaactcttcccttagaactgctgtcttttatattgattatgggaaaaggatggtcagtgtacctgactttcaaatatggtaagattcaaaagtaaattgttaattctgctcctcatccccaccatttgtagctctgtgtgtgtgtgtgtgtgtgtgtgtgtgtgtgtgtgtgtgagagagagagagagagagcacacgcacacatgtatgaggagagagctagcagtggggtgatttgaaagtcacaagagaaataaatgatttgaaaaaaatctctatgacaagaaactcctaattgggttttgaaaaagtctaaagaagtaagtaaactgaccactgtgattcttacttaaatggatacagttctttttgctttttaaaaaccaataattcttgtgaattagttatttttgagaaaaagtatcattttaagttggtataa

SEQ ID NO: 118897 - DNA, 1129 bp, Homo sapiens
tggttttttaatacaaataagtgatgacaagaaatgtttatcattttaaggatttataatgctcaaaatgaatgtgatttatttagtaaaggtgcaataaaaaatgttctcagaggctttctggagagatcttatttgtcaattaacatggcaaccaaatggagctgttgatccaaggtaatacactgaagacattcattcatttagttgtagatcataattctattagggaacatgtggtaacctaagatctgttagactctaccttcattacaggagctataatgaaaaagtactgattgaagagggaacttgcaaagaaatatgagatgctgttaaatgtggtccctcctgcttcagataattaccactttaactttaatctctgatgctcgttgtcttcattcaggccacgtatatatagtgaaggatttcatacctggcaggtaataatagagcaaaaattctaggcccaaacaaaacttcacttaaaccacttttcctgaacatctgctctgaagtcagactcgaccacttactgtgtgactttgtagggcaattagttaacttctcctagcttcatttgcctacgatggggaaaataaatgacagtactgacttcatatgatggttgtgaggaactaatatatgtaaatgttatgtaattcatgtaagatgcacaacacagagccaggaggaacatgttagccactttctatatcagtggcgatggctttacggcatgctacaagctgtggatatgaaaatgagtgaagctcatggcgcatggtgatagtataagctctgtcatacagagcttatcactatcttgtgggatgtcagagtgctagggagacataagggaaaagggatttgctgcctgtgtagggatgtgagggtcatttggaagtggaatcttgaaagttgactggatagtccactcttgatgatctgtgaatttacatattatttaattcaagaggaatatttacattttggcaaatcttgaattaaaactcccatagttacctttgattaattatgggctctactggcatctcaaaatttctatttattttggcagctgacacactggcgtacactttcctttcaaaccaaaatattttcc

SEQ ID NO: 118898 - DNA, 1039 bp, Homo sapiens
accccatctctactaaaaatacagaaaattagccgggtttggtggcgggtgcctgtaatcccagctactctggaggctgaggcacaagaattatttgaacccgggaggcagaggttgtagtgagctgagatcgcaccactgtactccagcctggaacagtgtgagactgtgtctcaaaaaaaaaaaaagatttctctcatttttttttttgtatgctttaccatttaatagtcttacaatcattcgatgactatttttaaactttgccttataagaaaatatagctattttgaacagcacatacaggtaccagtctagcagataactagtgggacaagtttggaaagctttgccacgtttttgcaatcttaagtgatgggaaagaattttttttttttacacttatgtaatgttcttaactaatacagaaattcgttttaatggttttggctttctgaataaatgtgatgcttttgttgaaattattgttagaagtcaaatcactctttgctgagccctgtgtacttacttttgtggtttttgatgtttggtgttaataataacatttagtaataatgtgccttacatagagagtaaaattgctactttgtgatctgtgtcccatctaatgaaacttactgtcctcttttatatttaaatgctattttaaaaagtggtttgtggctgtttgtgtctacaggatcgccccaggacattcgacatgcactcactggagagttcactcattgacataatgagagctgaaaatgataccattaaaggtaagtttagaaatatacccaattgatttcagacaatagttttaaatgtgtattaactatttaatctgatacacagtatggcaaatattatggagtcactttgtatgcagtaagttctatcaattttacacatatacctcttgttgttaaaaaatccaacatacttgatgaacctctatagtggagccatcgtgataccaggtaagagtactacgtgagtactaattgccaagaatgggcaattatctcaaagacac

SEQ ID NO: 118899 - DNA, 1023 bp, Homo sapiens
aggacgttaaatagcaaagagtataatttaaactgggctacaattaaatgtgtgtgtggctatgtaggaatgaagcgtgtttcttctcctcctgtactctccctctcttgactgcggaaatggaacatcctaaacagtctttctcttgccttggcttagctgtgctgtaggatgggacctgggcttctgtgttgaggtaacttctattgtgaggaagaagagggcgaaattgtgtggcatgatttttttgtatgaaaagtgaagggcctattcttaattttgaacaactgcctgctttctgatttacttttgatccggatttgttggattcctcactgtactgtgtaggttgagcttacaaaggtgtggattttgagcagtgcgattaccccctttcagatttggggttgctgttgtttttgtctttgggtttttataaggcggggagggtaaggggaaatgcctaggaaagaaaatcatgtgatgtatgtgaatgccgacatcgtcataggatcggactgaagcctttctccctctagcctctgaatggaaaccaactcagttcaaactaaatgcatcttgtgcatgggccagatcctcatctgccccgtttacttacataacacatactagtcaatcgaaaatagtgatcctctgccctctacctgccacacattcgtgattgaatatttaacccttgtttttatttggtctgaaaatcaaataagcagttgccacaaagggggaatttgtcttatgtcatccatgatgtgggtccgtaattacttaagcagcccctttatcttaatcctgaacattgaacacaaggaatcctattttgaggccatgaaaatcggttatcgttttattctttgttacctgagtgagaggtgagggtaacggtgggcgagtagatgggggaagtattataatagtaaacttttaatgttattagaaggttaaacatacatttaaaagatttttttaatacataattttttcttttcagttgtagtaaagttc

SEQ ID NO: 118900 - DNA, 1084 bp, Homo sapiens
aggggaagaaatgccacctgattcatagttgtcataaaaatatccaagattctctgcatttagtttagcaacaggaacgagggaacagttcacaattgtgccacagaattattacttcccaaaactcctgcatggactttctacctgaatgttgtatgcagttgattcatttatcaactgtatgtgcctggattgtgaatttcttgtttttccccctcacattaccattatccttactaccaaaactaaaaaggaggagagagaaaattctctgaaattgttcttgcttagccctgtacaattagccatacaatttgtaaaaggaatactttttaagaaggtttaaactagtcactacttttcaaatcagacattgagatggtcaggctgcctctgggcttcattattttatctaattgactgattctgaattcagtcctacaccactgcactcagttctaaaagcaaggctttgttttattctgggtattacctggtaaccagtcaattaagaacattagtggaactctgaagggaaagcacttccataatctctttggaatccagttgggttgatgccagttgctgtgtattggaaaagagaaggaggaatcaaccaattagagcccccttttagtgcttgagaaaccaacaataaagagcaagtcttaattctgaagagcagccctgattaattgaaatataaataacttttaaaaatctaacttctgctggctataatattccaaataataaatgtctggcatggttgactaaatagaggtatttaaaccagctgcctgatttctttattgtaatgatcggaagttgttagcatataacagacttttccaaatgttacgaaataaaaggagaagtgttcagggttgtgttcaaacctggtttggccactagtagtgccttagattggtcacttctctctagacctcaatttcctcacctgtaaacggaggggttgaacttaatgatctttacattaccatcagcaattcagtcttacattacaaaactggaggtacagttttatattttaaaactgaaggtttttatggtgtaatgactg

SEQ ID NO: 118901 - DNA, 1026 bp, Homo sapiens
gctgcagatacatttgatactttttggtgtttgtgtgtttgaaatggcagcatttatttttattatttcctgttgaattatcagtagtagtaatatctggattattctttagaaaataacttattttacctaattaatgaaagtaatacttatatatactgctaatgtaaaggaggatttcctctggtcttttctccttttattttttgacttggttactttagttagtgtcttaaaaggatatgatagtacatactgttctttttagcacctcctgcccccacctattctaagtcagtctgttggtaaatattggttcttccaactggcaaatgcttagcatagaattgcctagttgacgtatggatcttttctaggttgtaggatttggtagtgtagatccccagagtcacactgtatctgttgcctatatttggctaggttgagtcatgtcaccaaatatagcctatgccttcggcatgatgtatgccaggcttctggttccaaattctgcagctggcctccagagactactgcttttcctgtcataatgttccttaagattagggctgctgaccaggcagtattttttatatttataacaaaatcaataccaagagccttcaaagattgaattttgctcatcaaataggttcacatgctgaaatcctaatgccttccttctccctttagaaattaaattctgaatgtgcccaaacctggataatgattaaagatagatgagttcttggctgggcaccgtggctcatgcctgtaatcccagcactgtgggaggctgaggtggaggcatcacctgaggtcaggagttcgagatcagcctggccaacatggtgaaactctgtctctacaaaaatacaaaaaaaattacccgcgcatgatggcgggtgccagtaatcccagctactcgggaggctgaggtgggagaatcacttgaacctgggaggcggaggttgcagtgagccaagatcgtgccattgcactccagcctgggagacagagcgagac

SEQ ID NO: 118902 - DNA, 1101 bp, Homo sapiens
aagcatgttgaaagatcccttcattgaaaagataatatgaaaacaaactgtaaactctaaagtgctctacaattgttaaccttaaaatgctaatgaaaagctgagaataattgttgaagatcatactcagaatatatgcatatgaatttacttttgggaaagggagattatttattgagtatgtgactgaccattacatatacacattgtgtttttcattattctctcatttgcttcccatttttataaataaagaaactgagggttagggacataaggaaactagagttgcattctctgctcttttctaaggtaggccttacaaataatagtgtctttatcatatcttaggaacattctttgaatgttgttgtaccaacaagctaatataagcataagccaatgtgataggaatttctaactataaagcaaatgtaaattaattttgtggcagtgagcctattaaattagggattaatttataaaatcatttaaaatggttctttgcatctttgttgaatcgtatgctttggtctttgtgatgattgtgtctgctttttggttctaccatctttattcttttgttcacagattaattccttttagcttcaagcctttgatttatatcttttcaactgatttactaatttggctaatttctacactcctctccccatatattttcttttagtcctcctggaaaagtcaggttgttttgttttgttttgtactgttttgagacggaatctcgctctgttgcccaggctggagtgcggtggtgcaatctcagctcactgcaatctttacctcccgggttgaagcaattctcctgccttagcctaccaagtagctgcgattacaggcatgtgccaccacacccagctaatttttatatttttagtatagacagggttttaccatattggccaggctggtctcgaactcctgacctcaaatgatctgcccacctcaacctcccaaagtgctggggttataggtgttagccaccatgcctagccaaaagaagccagttatctgataacatcttatcatctgagctacaccccccttttttttccagatagaattgctatttgtctt

SEQ ID NO: 118903 - DNA, 1039 bp, Homo sapiens
ttatcttctggtggtgaaaaagtcatgaattaaatattggtatatctactaaattgctagttagcagggaattctgagagaaaacgttattaatatggtaatagttggtttttattatgttgtatactgccttagtttcataatagtttgaaccttgggcaacaattacagcaaaaagcttcccataaaacaaataagattcaataaagttttacagtgtccttgaagaaattttaaaaatgcccaaaattgacctcttacctcccgttccttgtttttttagacatttaccaggaaatgaagaatatagtcacagtttttccattttcaaaagctggtagatgaaatcacagttgattcttttgacaatgtttgaaaggttgttttgtttttttgtttttgtttttttctcatttgacatgcagcaaggacatatgggcgaaggagaggtaacattgtttttaacttttaaatgtatcacttgtatttggagacgacccaagcttgtttaatttctaacctttgtggggaaggggagaggggaaatgaagcatagctttgatccttaggtaatttttgtgttacagttaacattttagacataatttgaaggagttaaggagctataaagaaatttagcagaatggtgggatttggatttgaatcaaaatgatttccctgtgttaaatgagaaactcagcttatttatatctaaagatgtgctttttttcctttctgaaaggaatttcttagaaaaaaattaagaatctttaaaaagaaaaatatagtgacactagtcccaaaatacctcattatcttggaggtttaattatgctcaaatgccttatgtcaacttttttcttttcttttttactaagtaaacaatacatgtggtttaaaatgagatgagctaaataaatgactaatcctataaatttcaaacatttgggggaaaagctctagaaattttaggtaattctaaagaatcatttcgtagaggtacctgaataacttattcttggcacctatattttgcctt

SEQ ID NO: 118904 - DNA, 1031 bp, Homo sapiens
aggattattgcttttaaaaatactttgtaataattgttaacttttttgcccatgaattgtctgtattgagaatgagacattttggtttgtacattccctaggtccagattcggccttggaatctcagtgacagtgactttgtgatggatggttcacagccacttgacccacgaaaaactatatttgttggtggtgttcctcgaccattacgagctggtatgattaaacaaacgacaaactctctaccctatagcgcaagaaatatgaagatcttcaggataaatttttcctaagaattggagttaatatccaagagtgagagttctagaatcaaaatatctgggtttgaattcatgtgttctaatagttaagtgaccttggacaaattccatgacttttctaattcccagtttccccatctgtcaagtagggatgaaaagcgtttcatccctaggatgaaataacaccagaaaaagtatttcctagtgttattttgagggttgaattagacgaccagtgcaaagtacttagtctagtgttgcataatgctaattattacgctcatcattgtctgaaaagaaaaaaagtccttcaagaatagattctgtattgagattgtcagtatttgtttcccacatcctcatttgctcaacagcgactgactgagctctgggatataatagacttcccagcaatgcatcagatttttagggtagtacttacagaacaaattaaattcctaacttcaagtaatttgaggtttaataatatacatgagataaaaagacataacatgaacaggaatgtagctgcacgattttaacacttcataaagaagaaaatgcagtcattatttcaaggtttttttaaatgaaaaattggtgaactgactgtggggaaagagttttgatggaaataagccaggagggcccacaaagagtctaccagttagttttctagtgttcaagtaattattacattaatcaatacattattaactggtaaatctatggcagcaacatggcacagag

SEQ ID NO: 118905 - DNA, 1019 bp, Homo sapiens
cttcctgcaacattttcttagaggagagagagaaatattaaaagagaaatgaaacaatagagtattttgggtttttaattaaattattgttaataatataacatataagaatacttttattaaaataaccatgcaacaataacactatcggtctatctgacagtttttcccccagggaagtgcttttgccttttcctttcttttttttttttttttcatcttttttgtctctctcttttttccatccctttttaatttttttaacagcaatggaggaagttaacaatttttaatggaaagagcatgttagagcaaacaaatgcataagcaagactgagcagcattataattaattttcagggttttgaggctgaacataatttcattatccctcaaaaagttaccaccacatcagaaaaaataaaaaaaaaatagtaaagtaggcagagctaggtttattttctcttaaacaatttttaaaattcagaatgtaaaaattgggtaaatttactactgaggggagtgcacttatttatttaacttacttatctggtcaaagccccaggaaacctaccaaagctagaattaatgacaactggtgggaaacctagcatttcctctcctgaagaataaatgtataaatgttatttttgatgtttatatataaactctatatcctaatttactaatactcatcagatgtcagcctttgctctccattttgacgttaaaaaacaacaacagatctagagatacctcaaggatatcatttttgattttgtgttacagtacacttgtagccaaaactggaagacaaaaccaatatataatttggctgctgattggcttacttttagatttaaagttactttgggtatcctgtaatttagttgtaacatagaaaatgaaaaaacagttaaaaaaagtgaagtagttgcaaagtgttttgcactgttgaactaagtaactgtgtaaatctgtgcaaaggtacgtatgtttatcttactcttcctataaac

SEQ ID NO: 118906 - DNA, 2222 bp, Homo sapiens
gggcaaaacatgaaataatatgatcgaatggcaatcttgctagttgcgctacctaacagtaccatcttggatccttcaaaaccaaagacttgccccagcactgctgtggaaccacctggcttatgacccctatggatgatctttaggaaaagcagccctttacttttaatacaggctttaatgaactatacctgttaagttccaaaggtcaaaatggaggcatttgctgtctaatattcaaacatagaaagggagctgcttttaaagaattccctgcaaatactgaaagcagtcatgcgaatggagggtgctcttgtgtagctggtcagggacttttttttcttttctcctgaactacatgattctaattggaatgttcatttgcctctttttactcttttaaatgcttgtaggtggcttggggtgtgctatcgtgctgttcctactcagtaaacaggtgtgatgagttaacaagaaataacactgtttgagaactagctttgaataataatttttccctttgtacatgacctgctgaatttcggtacagtgtttttgtagctaacttattttgtcatgcacataatgtatatttgttatgcactacttttgtatatcttgtttttccaacagtgaacatttttaggcacacttttcactgacgggatatctctttatgcaatacctcaatttttcatattgcaaagagtagctttttgtacttttattactgagagatcttcatatacttcattttttaatataaataattttaataaattttattttcttatattctgctttttatacatttcagtgctctgcatacattttaaattatgaatgtcgtgcactggcaatgctattttagagtctgcagagaagagaaagcatgttgcttaaacatccttccccagcaccagctattggtgtacctataatttaagaaatagtctatgtaaagtcacaaattaatgaaaaaaattcgcatgaaaatgacagataacactgtagttcctaaaaaaaaaattaaatgcataagcataaggtagaaattaaaataacaaaattgtctacagcttcttactaagtttttaaaattattcataaaatgcagacatttttggtgaatgtttagccatttttaatattaataaattgatgttaagtgtttgattcagagatgtctgctcttttaaattatatataaggaaaaaaaatagcctgccttgggacaggtgtgtaatgttagtgtgcatgactaatgtaagaaattgttattctactaatatttacttgtgattgtgtgacaagtgtgtttacagattattggttacacttcaatttacagggcataaacaatgattatctattactctgaactttatgattacatgttcttcagattacatgggattgtagttgggagttaccatgtaactcaaacataattaacatgtaattagtttacagattgtagggcatcacttcaattcaccaagcatgtagttctagcgcactagcatggcgccagccatgtacttacaatgtagttacagagtaattacatggtgatttttgcaatgtaaaataaagtgtttctgattattttctatgtaaaggaaccctctcctttccccttctggtccctgcgctttggtataatatatatacttctccatacacagacctctgcagaatgcaaaataaaacttgcagtgaatgaatttagcattttatgagagtgctgttggaaagacttgataattcaccccttttgttttgaagagttgaatcttctgttaaaaggtgatttaaaacttgaatgtgatgaattgtggcaagttaacttcaagttatgtgcaatacttatttcaaacttttgaaagatctttgcagtgtaattctttgtttttaattgcagacatttaaaaatgtcattttctactgttaagagtaatcctctttcttgctggtgtttctaaagaaaagaatcagaaatcaatctttctactaatgtaaatttgagattatttttaaaaatggaataaaagaggttttggtcatttgctttattttattattttaaagctactgtgattgatagcattgtaagaatcgggacaatattgtattcaactgttttattttttatatttttaaaatttaaagtataattagtttttataattttcatcagatttttgttatattttttggaa

SEQ ID NO: 118907 - DNA, 1064 bp, Homo sapiens
gtggaagaaatatgtcttttttctttttcacgtcttctgtacttgtattttagatccccaagtaattacgggtagacttgatgactcctgtgttttctcaaggagtataggtctatgttggtaagacttacaaacaagaaacatttgggaatgatgcaaatatagtattccaaaggttgtaggcatttagagggaaggataaatatgggtttatgaagagcagagtttcccaaacttaaattattttcctatgccatatctgcatatcatctgtactattattaatatatttatttaaataggcacattttcccttttaactaaatttctttttagaacactttaaattattacttcagtggaaaactgtaccatttgctataaatagaaattaattagaaacaaatataataaaggcaaaacaatattattaaattctagctaagtaggttgtctgctgagagttgtctgtggtcacgaagggagacgaccaagtcttagagaagtcttaataacatactggtaccaaacttagattttctcccaaatgtaatcagaatattgaaaaaaactggagagagaatgagtttctcaccatatgagttaatattccttagtgctatgtctgtatgtctgtgacctgctccaaatcagtggcatgtttctcacaaattgcaaaatgccattttagagcatattctagtttattcaacaaatggaatacttattgtatagctgatatctatagaattggatactggatctctagtgaataataaaacacactcctcaagtaaacagtgtgataaatcctatgatacctgagcagagggtgctttgtcagatcagagaaggctccctggaaagctaagtattgaaagagtagaagaaagtgagagatagagtggtggtagggcaggaacaaggtggggaagggttgaggtgagggaatattctagacaaaatgagagccaatataaaggctttcagggaacacacgctcattattttataattttgtctttggaaaaacaaacccttgggttttcttctaacagttaaca

SEQ ID NO: 118908 - DNA, 2027 bp, Homo sapiens
catcggtattgatgaagaaaaacattttaactgcaatataaaattatacattgtgtcacttcatgtagtcatttcctctccatggaagctacattcctacttaatgcatttaacaaagatctacccttgagttatagccttgatgtcattatttcattcctggaaaacaactcatgaattaaaccgtgctctaaagcactattgagttgatattgtggtcagagcgaaattagatgtagtctggtgtgtttatcaaaataatttgtagttctggattttaaaaaaattaagttggataaaatttatgtaactaataatgcaatgtgaattgataaatcacaagttattttctttccttaacgtgcatttctttctttaacatgtctttctttcctgcacatgctatcatgaatgtttctgtgagttcttagtacggtcattctatggcaacttctatttcatagtcagtaaaattgcagtatttaatttcatgaagaatattttcataagataatcatgaaaacagaatgccattttgcaagcagtggaaacttatggttcatataatattgcatcagtggtagcatgaattgtttgcaataatggcatattagtgataatgtgtttcactttgcttatccatttaagaaggagaatgaggtggggggtggataggaaaaagaagtcagaggtatcttaaatgaaaaggatgtttgaataggcagagcagtgtgcaaaaaacctggacatacttctgagtgctaattcagatcactgcataactttgaacttgttgggttcttttctgcctcagcaagaggccttctcttaaatgtaatcttgtaaggattatttaacaacttaatatgctgtgttttccataaatagcctctggtaaaccagttcattattttacattacagtgttaaactacattacagaacttctttataaaactaataattatgtttaaaaatgtattataacttgtattccataatgtatatttattaatgggaaaaccagtgctagaggccaacttaaattttccttattttttatgttgtttgcaggctcaaattacacaagatgaatcttcttatcttctggtaagaatttatttacgtaataattatggaatatagattttattcccttcccttctgtatcctcccttctccaaacattagtgtataaccaatcattgctaattccagcctatttcctttcttaaatacagtgtttggcacatagtaggcactcattataatacttactgacctttaaaacttcatttgggccccatgtccatcatgctattagaaattctctctctgtactccatgtttttccttcttcttctttttctttctttttttctatcgtaccctctgagggtacaatatggtacattattctgagggcagaatcttcttcttttcgtttatacctctacttagtcctcttttcctttgaatatactgtcatatttaatgctatcttactactgctcctttttatgtcttagtatcctgtaggctgtgttatggcccttgtcctgcctcacttaccatatttacctttgctaccacctaataacaaatgctgtcctaggagtgattgttggtcccattctctctttacatattcactctgagataactcacagatttttatagcttcaactactcttcctgggtatattacccttaaatctcatcctacccttgacctctggttatgtacctctggttttctttaggctgttctacttatttctttttttgtcacctctactgaaatctacatacagttatcttttttcttttttttttctttttttttttaaagagacagggttttactctgtacccaacctggagtatagtgactcaatcgtagcccactgctgcctctaactcctggactcaagtgatcctcccacttcagcattccctcccaagtagataggactacaagtatgcaccaccatgcctggctagttaaatttttgttttgtataggtg

SEQ ID NO: 118909 - DNA, 1225 bp, Homo sapiens
cattctgtactcaccaaaatttttcattaaaaccactagaagatctcttccctcccttccctgcacaactaagcatgaaacaaccactgcagaacccaaaccgtaagttgcaaatattagactactgggctaaaataaaatgcctttcatccacacagaggaaagagtcagatatagatttggtgagtgaatgtttctactcatgaaaactagacaaatgacactttgggctggagatgaagagaaggcaggaccacaatgcagtctgaagtctttaatgtagcaggggtgggtcattagcccctactgaaattatggaacagaaataagttaaagtattgcagcttatgttcagtgatgtatcagtaaagaaaagtcttatgtttattatattctatttaacataacagattgaacacatattcaccagaaattattaaacaaaaattaaaagatttagaacaaatatttagaacattcatttcagtgggagtcttcattcctccatggttctagaacagtgaaataaactgagtttgtatccagcattagactcttattttaaatctaacaaatattgatatacctaataaattaaaacagactactatgtcaagttgtataagtcacataaatataaacatacattgaagcaaacctaaaactctcatacacattcactacaaaactttatgcagcataaattacagtataaacagtgtaaatatgtctcattttgcaatggacttcagttgcataagctaaaatttgaagcttcacccaaggatttagcagcctgaaatttacccagcataatataaagaagttgtgtgaccctcaatgcagggaaacttgagagcctacatggcaaaaaaaccgaggccatttccccaggcaatgtgtccttcatctagaaacaggtggatttgataaatagtcactagaagatcatgttaccacaaattctacactgtcgtagtctcctgaagtaattaagttacaactattagaggaaaaaacaaaactatgaattactttacagtccttacaacttgtactatttcatgagaattttgtatattaacactttgtaatacctttgtaaaataattaggaagcccaccttctcaatgcccccaaaaaagaatggatgtcatcactgtaatcatcctggatataaaagtacctgtcactccaagggaaagaagcaactagagtacacaga

SEQ ID NO: 118910 - DNA, 1156 bp, Homo sapiens
cttgcagctgaggagagtgcagcttgtgcaaaggccctgaggcaggaaggaggctagccccaaccctgaatagaaacagaaatagaaaccctgaatagaaataaggacagtgagggccgggcacggcggctcacgcctgtaatcccagcactttgggaggctgagtcggatggatcacgaggtcaggagatcgagaccatcctggctaacacggtgaaaccccacctctactaaaaatacaaaaaattagctgggcgtagtggcgggcgcctgtaatcccatctactcgggaggctgaggcaggagaatggagtgaaccagggaggcagagcttgcagtgagccaagatcgcaccactgcactccagcctggatgacagagcaagactccgtctcaaaaaaaaaaaaagaaataaggacagtgaggccgggctctaggagggtgcagggagcagacacagatgaggcagaagtgggcggagggcagacagttccaagcattgaaggctgtatgaaggcatttagggtttaatactaaaagcaacaggaagcctttgaaggacttcaggaagagaagggacatgattacatttgggttttagaaaaagtatgctggcttttacatggctaatggagtgtggtggatgaaaggggatggaggggcactattaggctactgcagtcattcaagtgaaaaaacacacaaaaaacggtggcagatcagataagggtggccagtgggtggagagatgcaggcagatctaaaatatttaggaggcaaacaatcagccctggaggcagtagaacaagtggtcctgtggatggatgatgcagcagcctggctgggcttgagccttggttccaccttatcctagctgtgtggccacaagcgagtcactaagcctcacttatcaaatggagataatagtagggttgctatgacgatgaagtacaaagtacctgcaaagcacttggatctgtataagtgcgcaatagtagcctttttatgtcaactgtgactgggagctttgaaagtgaacatgactcgtggttggttatctgggaattgaagcgtatgcggggagaaacatgtgggtttgtttgtctttgactatttttctccccactaaatcaatactgaagcagctgcgtatgtg

SEQ ID NO: 118911 - DNA, 1022 bp, Homo sapiens
ccccagtaaactcttcagtctgaaccttatgctccttcctcaggcttcctctgcttaccatccaagacttgtctttcactgtcatgggccactccaacgtccacaccctggggcaggctgttctctccacctggatcccccttttactctctccttccaggctggcccaggagccccactccccagtgccatctccatcacatcgcttctcaccttgccttctatgagtctttcctgagagccgacaccacgtatacgtcatccctgactcccatgtgcctggcccagggccagcgaagggctaggcattcagcttgtatctattgtccagtgaacaattaggctttggcttgcatggtaaaatatgaatgacattttctccattttagttctctggggatccctgggggaaattgttctttataacagaaatgaggccaggaaaatcaattgtgtttctcggctgcaggagatgatggaacagcgtaactttcctgaatatcccagggcacagcactataacagagtggcaagaggtggactgtgctggaggcccctttcattcttacgtgcatttcaagccaagctcaggcgagaactcaccattcagctgcccactgctcatgaaattcaggagctggcgtgcttgcaaagcttccttgcaaagctccttttttctttttaggtcataatgagctggttgggcagctgcttggttgccaatgactttatagttaaacacccacactccaagactctgccttcagtaaatggagggagaacaaaagaccgcaagaaagacaggagaatgaacattgatacagcatcttctgggttctaggcacagtgactgctgcatttgtctacttccttgacctgcataagtgccctgtgatggggacattattgtaatcactccctttgtacagaagatagagaatgagagagaagtgacttgtccaaggccacatgcgttagataggggccatttgtgtgtcttctgagcaatcagtttgctttta

SEQ ID NO: 118912 - DNA, 1047 bp, Homo sapiens
cagtcacatgacaatgactcacaatgccatgtcttgggtctctgcatatccttgagcttgatgctcagatagtcagaggcctctctagcatctccacttggttacctaatggcatctcaaatgtaaaatttccaaaatagacctctgatttcttttcccagctcccttattcctcctgatgcctaaacctatgcctctcccagcttcctcatcggtcagttgcttgggtcaaaaccaggaatcattgcagattccccatgttccctgaatccccacatctaatccatcatcaagccctgctgagttttccagacacatcccagcctgcccacttatcccttctcccaaccaggcctcctctctctcctgcctggactatggtggttgcttcttcatggggtcttctgcttccactcttgcctccttctaatcttttctccacagtggggtcttataaacatgtgaggcttccaatggccatcatttaaacctgaataaaactcaactctcttactaacaccaccaacaaggccttctatcatctagcccttgcctctgtctccaagcccttctcacatcagtgtttccatgttcattatagttcagacacagggactttctttttgttttctcaaacatatcaaggtctttctctttcaggactttggccctgtttgcaccccttgcctcaaacactcttttcccagatcctggcacaatttgcttctcttcattcagatctcagttcaaatgcagtccccttcctgggaggcctttcctaactacgtcatctagagtagctgggtctctgtcatattgctgttttactttcattgtagtgcttattactgcttagtattttcttgtttatttatgtgtccattggttatctctttatacttgaatgtcagcttcagacagcagggacttatctgccctgtgctctactacagtgcaaagagctggattcatggaagacaactgataagtttgattaaataaattgttgaatttgagaataatggatgattttttcaagctttctaa

SEQ ID NO: 118913 - DNA, 1035 bp, Homo sapiens
gaggtactgggtgttggctctataatccacatgagaaaactggggctctgagaggttgagtgcccaaggtcacacagctggccatccatagtccaaggccatctgagtctcagtcgtaaatactgcgttctcaaagacgcttttccttggctatgctgtctaaaattgcaccccccatccccccacacaccctttgtaacacaaactctgggttttttctctttagtgtcttttgtcactagttgaaattaaaggtgtttacatgttttcttctcctcatgtgaacagggcctattttgtgttgctcagcctatctatcccctgcgcataacaattgcctgcaccaagaaggccctcaatgagtatttgttgactgcctgaacgaaaaagcctagctctgcttcactccagagcctgggcacttagctgctccgtaggcaactcttttctgcgcccccatagctttttccctgcacatttctcacagtcctagtccctcttctgcgttgacttctagattttgacttgggtgcctttggattctcccttctttgtccatcccccttttactgatctgcttcagtgttctaggcattgttataggtgcccagggaggatgcaggtaaatgaggaggctttgcagctcctacagcttcagacttgatataaaagatgagagggaactgtttgggaggatgaatggggtggctaccaagaagttctgggacctcaagcagatcctttctctcctcagcactgagcaggtgtctcactttcaaaaatacagtgtttgggccaggcgcggtggctcacgcctgtaatcccagcactttgggtggccgaggcgggcggatcacgaggtcaggagatcaagaccatcctggctaagccggtgaaaccccgtctctactaaaaatacaaaaaattagctgggcgtggttgcgggcgcctgtagtcccagctactcgggaggctgaggcaggagaatggcctgaacccgggaggcggagcttgcagtgagccgagatcgcgcca

SEQ ID NO: 118914 - DNA, 1002 bp, Homo sapiens
aggctccttgagttagtgtgattgtccttggcagacacatcttctctggcctccaagggtcagaattgagtttcaaagtcagacagaactgtgaaggctgtgtcatcttgggcatggtactaaatttctccgagcggctctataaaacaggggaaaagatcttggagggctgtcataaggagttagcaatctaacaatgcatggaaagcctagtgtctgggtgttccgtcatgtcccctggacagtggacagcagtgactgaccggctgtctcacacctgcctggccctagtgaaacaaactgggcaatcagaccctttcataactctttcaaaatacggtagttttgaccaacagctttccagcttaataacgcagttatcattggtactctttagccaagattaaaggtctttgtactaattcctcataaagcacattccctgctaacttgttttctacaaaattttggaaaattctttttttctccagcagttaagcattttcttagcatgcagctaaaaatttgaaataaaatttatcttggagataaattctttttcttacatgtttctgatgatcttcaggaagctcaggagccattcctggccccaggagctgcatttatgcacgggactgtggccagtgaggacaggagcttccactcgtggaaaaccagcttgttaataatgatcccacttttgtttggtaacttaataaagattaataaaggcctcttatactcttcagtttgctgatcctaccaactctatgagccaactcttacctgtgttttatagatgacagaattgaggctcagaggtgtaaagtaattcacccagtcacatgtctagaaaggaaatgatagaatcaggactgaaatctagattatatttgcttaaatccggttctcattccataggttatcagggtagatgctcgggaaattacaccacagggcggggggcctccatcagcaaaaaccagccagaaaaaaacagct

SEQ ID NO: 118915 - DNA, 1032 bp, Homo sapiens
tagcataagtggcatcagccaaccacagaatttttttaagtcccacttttttctcataccccaccaaaatttcttaataccgttaaaatccaaaaatttctttaaaatcattcatgaaaaagattcttagaattaacacctcagttgtccgagcaccaggaagccacattacagctagtgcaatacacagagaccgtctgtcaccaatcattttcttctagcgcgtctgttctagcccctttctcttccctccacaccccattgcaccatttcttcagctcgtgaaaactgagcttgctggacatgagaaacctgccagtgtgccgctgtgtaaaccataacattttgctgctgcctttctgcagtcctgaagccagctaataactgctcagtaagcgcctcttccacagcttccctaggtccctctgtgtctctggtggactggggcctgctcccctgtctcctagcctctctgagtgcctgaaggcaccaccccagcgcttctgcataactctcaaagcctcaggtgaacagggcaaagagagcaccctccccactgactgtctccgcactctccctggcatctttcacttgcttcaggtgccgtgaagctgatgaacccacacactctggaacacattctttggcgtcccgtgtagtgtgtccctctgagggacattcttcatgatccttgccgcatctgcagtgggaacgcaaacatcttgttctccaaaactttcttttgaagtatctgtggtttcatgattattcctgttcccagtgtcagcacaaggctgtgcagcatgacttcctccagcgcagtctgcagaaatccggagtcgagaagcctctgtcctagcactgtccctatcctaggtcatgaaagactgtgattgatgttcaagacacctctgtaacgagatgtttgatctttacccagtttcaaccttccagacaagcccaggggccataatttgccagatggatggctgcataagccagaccatggaaaaacaaaggccattcctgcac

SEQ ID NO: 118916 - DNA, 1038 bp, Homo sapiens
gaatgctgcggaccaaccaagtggcccggccagccctgacccctgcgggtggaaaagggtgcaccctggggatccccacatagcggccaaggccttaaggataccagcatctcgctccctgaatagactctagacacaaaatggagccagcacagggcgcgtctcggcgcatcctcctcagcccaggccccgtgcgtaaggagcgctccgtgtcagcgcgcttgctagaccccattgatttttagagacgggttttactatgttgcccagtgtggtctccaacctcctaggttcaagcagtccttccacctcagtctcccaagtagccaggattacaggtgcgcaccaccacgctcagtgctgttgactttaatgtgaataggaaataagttttgatgtttgtttgttttttaagtggggctcctgttttttaaaaatggatcaatttacctggagtgcaggctgctcctgagcttgaaggtggaagtcagttcatgcgtgaaagaagtcttgcctaattgaaacatggcatcacggttaataattaaaatgttatctgatttgagatcagctgtttttgtgagaatgctaatgtggcattcctgattagtctgtatgtttgtttgtttgatttttaattctgggtgcagaggaacacagattatcaaatccagttggtatttcttatgccactatagtacaacttgaaatcccttttaagtagaggaaacagtgttgtattcatttcctattgctgttataacaaattactacatatttgagtagcttaaagcaacacagatatattatcttagagttctggaggtcagaagtctagaacaagtgggccttccttctggaggctctagggcagagcccctttccctgccctttccagctgctaggggctgcagctcacagcccagcatcactccaacctctgcttgttcccacatctgtttctctggctctgcctcttctgcctccttccatctcttatagggagccttgtgatgacattgggccaaccaaatattc

SEQ ID NO: 118917 - DNA, 2050 bp, Homo sapiens
tactgactatatgtaacaaatttgtcactccatctaggcacaagtgttttaggtgagcataaatttttttttttgagacagagtctcgctttgtcaccaggctggagtgcaatggtgcgatcttggctcactgtaacctctgcctcccagattcaagcaattctcttgccttagcctcctgagtagctgggattacaggcgggtgccaccgcacccggctaatttttgtatctttagtagagacgggtttcaccatcttggccaggatgatctctatctcttgaccttgtgatccacctgcctcagcctcccaaagtgctgggattacagacgtaagccaccacacccagccagagcataaacttttaaaaccttgtagccacttgtctctaggacactggggagatatttgaaatgagcaattgccatattatttgttgttttcttaggcaaggaattgttcctcctggtcttacagaaaatgaattgtggagagcaaagtacatctatgattcagcttttcatcctgacactggtgagaagatgattttgataggaagaatgtcagcccaggttcccatgaacatgaccatcacaggttgtatgatgacgttttacaggtatgttatgaatatgtagcaacagtgtgtttaccattacagaagctcaaagtatatttttgtatgtaaataattttgttgaaataagtattatttcataagtatatgaagtgacaaacaaggtaattagcttgattgaatcattccgtaatgtacttatgaatcaaaacatcatgttgaactcctttagtatatacaataaaaaataaaattgaagacaataaaaaacaaaaaatggggtattattgatgtaaaagaaaagaagtcatttcacttttagttccattatgtttgaatgttgctactctgggactctttttttttttaacccttcccctctgctaaatagcatcttcttagttgttcaaaaggaggttgaattttttttctaaatcttagccccaaaagagaatgaagtggagaaggaaaataaagagtctgcaggcaaattctcctttgactccattcatatagatataggtataggtataagtgtagatataggcacattaaaggtgtatgtgtagacatagacatatagcattgcaagtgctgttaggagggcccaggaccgcttagcctacaaattgtatcttttttccccaagagaagggatctggcatttattgaatgtctattctgtaccaggctctctacaaattttatcttacttcatcctcatagtaaccctctgagcttggtgttatctatatctacggaatgaggaaactgatgatcccagaggataaaagcttgcccagcacacagatcctaagcctgtgtggccttatggctttctcccttccccagtacgtctcctctctggttactggtgttcacgttttctgttccatgccgcggctgggcccagtgatggtgggtatgtgacggatgcctctgttttaggactacgccggctgtgctgttctggcagtggattaaccagtccttcaatgccgtcgtcaattacaccaacagaagtggagacgcacccctcactgtcaagtaaggctacgagaattgaccactctctgcagttcttcaaccttcattttattaagtggtgatactctcctgtttaaaaaagcctatgtgtgcatatttttatattgttcagaatattatgtagcatccttttttgtagcttttttcttttttaaagtaaagtgtttcattttctctctccctatcaagaaaacagtcttcttccagcctgccttctcagacattactcgtgcctttggaggtactggtaggatgttacctccttctcaccctggagctcatggccctgtagaacacatggcaggcagcaccggcctggcctctgataagtgacaggctgttccgccatctaccctgcctgagttgacagacaccaacgttaagagtagaggagacaaagtgtggtctctgcagaaatcaagggg

SEQ ID NO: 118918 - DNA, 1820 bp, Homo sapiens
ttttttatcacttaaaattgcttttgacaacacatattcttctactattgttatatggaacaaaggatcttgaaatctgcagccaagtggtgtttattgcaattaaaatttcttttaaaagaagagagaattgcttgggctttatagtttttggatgataagacttagtatttttatacagttaagatatcattttttaaatggcagcacttcatttttgctttcagtgtgtatattaatattttgagaaatatttttaagcaaatatgccccaaacatttagcccaatatgcattcccctgtattcatagcttcctacacacagctcccctccttctcacgaatacaaagtctgtatgtttatttatttattttaaccaactcacttcaaagaatacatgtctacttttttggagttatagtcaagatacgtgtgaagaatcccattgtttatggatctgcttgctttttctctagattcccctacttgtggagtgatagtgaatgttgttttgtagactcttcattctgaatcatgctcttttatatttcccttttatttcttcaaataatgttgcaccagagtttcctgacatgccctcgtcgtccacacgatatccttttttcttttcagtgagttgggaacagcttacgtttctgcaacaactggtgccgtagcaacagctctaggactcaatgcattgaccaaggtactcagatttttatttccataataaagctgtttaatttgttatcacctgcctggctctaaatccctctattatttcttaaactagttcaagtcatatggctttcttgttatagtgcttatcttcagctgcatattttagttatatcttccaataagtttgggaagagttgtcaccagtaacacctaccaggactgtggtctgtgcctgactctgtgtacgaagtgctaaatgttcacccatcctgacagcccaccagaggcattgcagagggcagtgtgcctcaggccacagctctgaagagaggcaagagcatctctctctctctctctctctccccactccaaagcccatactcctgcaaccacacttagctacaaggccttagaagcttgcatggtcccagcacacccatgtgggaaatatacaaatactgctaggaaaagttttgaaagcattcttggcctgagtttctatgcaaatgggactctgcatttttcagagttttcaagaagaaataagttatttccatttactagtacaggaaaaataagataaagctcttgaaattttctcctctgcagcatgtctcaccactgataggacgttttgttccctttgctgccgtagctgctgctaattgcattaatattccattaatgaggcaaaggtaagacgaatatgcactcttagtagggacatgtgcttgacaggagagtctcttgtaataattagctttgttgaaactttcaaatgcttgttttaatatgtataggtgaaattatatgagatcttggatttcttttgaaatactctggggttggggatgaggatgggcgtcttgagaaaacaagcttagcgatgagttactgattattgaagcagactgaggagtgcggggagggggctgatgctggaatagtctttctatgtccgtataataaaaagtttaaaagatatatctcaagcttacattgagttgtgcttgggttggacaaagtctatccaaagaaagtttattctctaaaatagattccttttttttctccagaattttcttttggggcttaaagtacattattctatatctttggaagtattgttgtagaa

SEQ ID NO: 118919 - DNA, 1038 bp, Homo sapiens
cttagtggaaattgccttccactgggggtggcagaaaataaacaagtaaataaagtatgtagtatgtgcagtggtgatgagggcaagggggcaatggggctagggcgtgtgggtagggcagccggggaagagcactgggtggaggtgtgggagtgagccaagtgggtatcggtgatgaatattctggcagagggaaccacaggcaggagtttgcctggtgtgttacaggcattacgggtgcaggtgcagctggggcacagtgggaggggtggggagcagtaggaagggagtcaggaggccacagacggcagagcgtggatggcagccctggcgtttcacacctgggttttagtctgagaggtaagaagccaggcagggttttgcatacaggagcagcacagtctgacttaggttttatctgtgtgactctgggtggtgggttgagaataggctgaaggagaatgagaatattcagtggaggctgtgcggggaggctgcctcagtaatccaggcaagaggcagtgatgggctggaccagggccatacagtgggaatttgaccagaaggaactgatggagcaaattggaatggttagagcagctactgataaaatgtgtgccaagcaactgctcaggtttccctatagggactggggtcagaatgaccaaaaatagaaagtctacattgtatttagttctgctgagaatctctagtccaccctaaggctgcttagagctaccttcagaccaggggcctaaagaaagttctcagactgagaaatcagagggcctggcagttagagtgctcttcacagaaaaaaaacagaaattagtatgtttaattttcatcatctaaactgaatgcaaacagcgcttggcaattaaaatgaagctctccaatgaagtatacttcatcagctgctgtcaagtcatccattgatactgttttgcggtttttaaattccttttgtcactgtgactgctcatcagcaggcaaggaagagcaggcaacaaaagttgaaaagtgcatgaaggaaaa

SEQ ID NO: 118920 - DNA, 1189 bp, Homo sapiens
ttgttccaggctgttacacaatgataagatgaataactattgtgttctccccactttcatcttaagctgtggtttttttagctttgcttgatattgtaccctttgatcatcatttggaagtgtgctgccatgcctactcttcccaccgaagccccctacctgccccacgccccacatggaagggcccactggtttcagaaccccattgtgaaggtccagagagatgatcaggacagctcatggctcagtcctggcacctcactggctacaagggagcctggttgtaggtgtactccttcagacctcaatgagagatattgctctgaaaaagtaatggctaactaccattaaggtacccatacatacctaccactccccaagttcacagttgctggtatatgtcggtgttgcatttcacccatgtagagaggaccataggacagaaatgatagtatagtcattgctaaaatagacacagaggcagcttatattaaaatccctacttttccacgttcaaaacactttcacattctattgtgaaggcgggcttcaccatgcctcttccgcaaaggctgaagaggtcacttccttggcagctcatgatgcccatgcggtggtgtgccttggttggccttccgcttgttcccactgccccagggccaggtgtgcctcctctgcaaggaggtacttatctgggcttttaccttagaaatgaccagactcctccgcaaacatgaaactaattgaacattctgggcttttttaaacggtgatgcttggggagcattcagcatgactcatccatccccctacgccttatctctccccaagtggagagctggaaaaaacacatcagctgtgggcaggtgactcacggaaatttttgcagtaaaccaagaagttcaccgcctaaaatctggtgcttctgtgaacagttttcttgaagaatagttcctgttgtctctttaaacttgggtcattcttgatggcactttcattgggagtgaaattgatatggtttgggtcctatgctagttcttgttccttaagttctaattcttttatattcccttttataaaagtagactgctgtgtctactcagtaggctttcaggactgctaattgaatgggaatgtaacatttatttgttcattcatgtttttttcagcagccctttgctgaatgctt

SEQ ID NO: 118921 - DNA, 3222 bp, Homo sapiens
tgctctacagaagctcagcaagtacacagagcatgaattgttggaagtttgtggatggttaggttggctgggatgtaggcaatgtgtaaggaattgactataccatatataaaaattagctctcagtgattcatagaatctaatgtaaaagtctacaactgtaaaacttctagaagaaaatacaatagaacacgggctaggcaaagacttattagactcaacacaaaaagcacagtccataaaagaaaaattgatcaattggacttcatcagatttttaaaattctgttctttaaaactatacagaaaatgaaaagagaagaaacagcatggggaaaaatgtttacaaggcacgtatgtgataaaggacttgtgtccagaatacataaaggaccctcaacacttaagctgggcaaaaggtttgaacagacactctaccaagtacatacagttctcaagcacctaaaaaatgcttagtgtctttagtcgttgggaaacctagattaaaaccacaggagctgccactaaatgcctattagaatgtcaaaaactaaaaagattgatcatagcaagtgttggtgaggaaatggaagaactgaaaccctccccactgctggtagaattaatgtggtacagtcatgtgagaaaatagtgaggcagtttcttacaaagttaaacagatgctgccctatgatccagccatttccttcctagatctttacctaggaaaaatagaagcacatgtccataaaagacgaatattcatagcagctttatttgtaatagccaaaaactagaaacagctcaaatgccaataaaaggaaaatggataaacatcttgtgaatacaagggaatacttagcaataaaaagtaacaaactagtgctacacacaacatgaaggcgtctcaaagtaattacacaaaagaatagatactgtatatcgagtcctagaaaatgtaaactaatatctagtgacagaaagatgagaggttgccatataatggggtgcagggtttatggaagagggaggaactgcaaagtggtacaaggaacaagaaaaacattcggggtggtgaatattttcattattttgattgtgcttatggcttcacagccatatatgtatgtcagaacttacattaaatatgggcagttgtatgtcaataaagctattagatcactggggaagaaagaatttagagtcactaacttttcagggggttttttgcttttttttttttttttttttttttgagaccgagtcttgctctgtcaccaggctggagtgcaatgacataaccttggctcactgcaaactctgcctcccgggttcaagcaattctcctgcctcagcctcctgagtagctggaactacaggcatgtaccaccatgcctagctaatttttgtatttttagtagagacgggatttcaccatgttagccaggatggtcttgatctcttgaccttgtgatccacctgcctcagcctcccaaagtgttgggattacaggcatgagccaccacacccagcctgacttttgagttttttacttcattgaatatatatatgtacatatatatatatacacacacatatatatatttatgtatcttttaaacatataattactctctttaattcatttggacttttcatctaaacttgctctgtttgcacagttctgttaggtaagatatgttcctaccttgagaaatgttgtgaatatctagcgaaacaccaaacatcctcagctgactaatgtggtatcagactttctggttgcaaggtaggggtgaataaggcaggatggggtgcgggggtggtgctggaagaagacatggcatcaggttgggttttgcaggatactgaaattgtctaggggccttggctgtgcaaagagcctttccgtcaaaaccctctgcatgagccacagtcagcacgtagtttgcacatgcccacctccaaggtggcacacagctgctctcttttgagtaacaggttagcccagtttgctgcagaccagagtctacttacaatgaggaggctgctctcacagggtcaagagcacaggctctcgctaagtactatgtttaccctcccatcaccaaatctgtcccagcccagatgtcacctggctaggaagcgctggggagtatttagcatctccttatgacaatccttcatcatcaaacagagacagttgccaaagatacagtgttttccttttcattctatcttttgaggagaggggcccctctgtgtaacctgtgaagactagtttccttgacgatgctgctcccttcctctccaatccatccctttcccccttacgccaaccctcctgatgaaccttttccccagaggagtctctttggggaccagggtatgcctcccatgcatgttgtcttctaacagcttgtgttgactcctaactaagctggctgatttcattacaaccagctcacaccttggttgcagtgatttctgtggccttatttatataaccatatatctcatcactctttatattgtgtatttaagtaccactccttttttaaaactaaaaatctaacagcatttattctccagaagaccaaccaacttgttcatttccattaaaaaaaaaaaaagtgtgactagcaaaaatgttttatgccagaaatagttttaaccatactgacagcaactaaaaccaagaaagacgaggtgtaaagtggggtgagggatggtaagcatttgttgggtttctgatatgttccagccaccatactaggtgctttatgaatgtgatctggcatatcttcatccacacacttttaggaagctgttagtgatgttcattttgtaccatcacaaggaaacggaagcttggagaggctaggctctgcctgtggttccccacagtcaggaactaaccagaaggcgggagacttgagaccttggcaccaggctgtcctacctccccagccaggggattcattacaattaaatgacagctacttccccacctccattatatacccaagcagtgctcagattaaatgggggactgggaggaaaaatagaagccacttgatctttgcgtgtgtgctgatttacagatcaaagaaggttacaggaagttaggctaacacccttgttgcagcatttcccccaaatttcactaaccatgttctatctgaatcttgaaatgtggtgagaggttccttccagttaatca

SEQ ID NO: 118922 - DNA, 3928 bp, Homo sapiens
attatcaatgttatgcatttcactgattgcatatctctttttttatcaatggtgaacattgcaaatgattgatacgtttttcttaggaagtggcattgccacaaatggtttttccaacaccagcagggcctgagagtgtcatcaccatacactcttgccggcaataagagatttcaccttttaatgatatgagagggaaaagttgggtgttgggttctccagtgcatttctttcattatgagtgacatttttctgaaaggaacgtgatctcgttttctagccgcatgaagcatttctccaacaagacccactgtaccagtcctgggatctccacacctgtgccttctccctgctctttctaggtcctgattctcacctctgcctgtgtaataaccctgtcatttctcccttatcccagttccatgtctgtgacaagcttggaggccgagttgcaagctaagatccaagagagccatcctgaattgcgacgcgtgtacttcaataagggattgtaaagcagggaggaaacctctgcagctcattctgccactgcaaagctggtgtagccatgctggtgagaaaaatcctgttcaacctgggttctcccagttacggaaaccttttaaagatccacattagccttttagaataaagctgctactttaacagagcacctggcgtgggccaagtgcctgatactcccttacactgaatcatgttatgatttatagaaatacctttcctgtagcttttatagtcattgtttttcaaagacgatataccagccctcacccaggttttaaaaaagcactggtaggcatagaataggtgctcagtatatggtcagtaaatgttctattgattatcaatcagtgaaaaaagaaatctgtttaaaatactgaattttcatctcactcccattgcaaatcaaggagatctcagcagtgaactgggaaaatacaaaagctctgggctaatctataaaaacttaccctgaaatattaagggcagtttgcttctagtttggggattgcgctagcccaatgaaggtgatgaagcttttggatttggagggtaaaagctccttcacaccccttccaaaagtcagtcacagaccactgcaacatgccttccctgctggatcattatatacattcagattgtgagtggattgccttggttgacttttaatttattgttttttgttcttataaagatgataatcttaccttgcagttattgactttatattcaattatttacatcaaataatgaaataactgaaatgtacaaatgtcaaattttggaagtatattcaataccaatgctgtatgagtgggctgaatccagttcattgttttttttttggtaagaagtgagactacagttccagctacctacatgtcttttcttgtcatccttatagatctctttggctttcagaaagatacagtgataatgtgtgtatgaatcagtcacaatgaattttacttgaatattgtatgttgcattccacttcatttgaaaataatgaaaccatgtaccactgtttacatcatctgtagtgatttcatagataatatatttaatatgacagattatgtttcaactctgtagatgtttaacgtcatagacagttggccctctgtatccgtgagctctatatctgtgaattcaaccaagtttggatggaaaattttttttttttttttttttttgagacggagtctcgctctgtcacccaggctggagtgcagtggcgtagtctcggctcactgcaagctccgcctcccgggttcacgccgttctcctgcctcagcctctctgagaagctgggactacaggcgcccgccaccacgcccggctaatttttttgtatttttagtagagacggggtttcactgtggtctcgatctcctgacctcgtgatccgcccgccttggcctcccaaggtgctgggattacaagcgtgagccaccgcacccggcctgaaaatattttctaaaaagataaaaaatatacataacgatgaaaaataatacaaatttaaaaaccaatacagtataacaactatttacatagtgcttacattgtattaggtgttataagcaatctagagatgatttagcaagtatacaggaggatgtgcctaggttatatgcaaatactgtgccattttatatcaggaacttgagcatctgcagatattggtatcggagggcggtcctggaaccaagcatccacggatactgaggggtgacatttcatgaagtgtagatcattgtattcagagattgtaaatgaaaaaaatatagaaactatttagttttggtagattttttttctgacaatgtgaccagactgaatttcctcataaagaaaaaatggcgtgccttgtgtctgtgtttctcttttctctgaaaggattaatagatctgaagctttgggccactcagagccttccttgatgctgccagagtcttcttatttagattttctgtcttaaaccattggaagcaaaacggttttcccatgacattctggccttggacagattctgttgtcctcgacgcgtctctttataaagtggtaaaagcctgaaattcagggcagctctccatgaggtgctgaagggctcttttcataagaagctaaggcactgctgcctgccccaggtgtcccgctcctctcagagtcctccccctaccaggtagtgtgtagctccatttcagaatgttaacctccagtgaagagctaatgactggttagaagattgacaaactaaccaaaattttacacactccggttatgtgtgtgaaaggttataaaaggaatggccgggtgcggtggctcacccctgtaatcccagcactttgggaggccgaggcgggtggatcacctgaggtcaggagtttgagaccagcctggccaacatggagaaaccccgcctctactaaaaatacaaaaaattagccaggcatggaggcacatgcctataatcccagctactcgggaggctgaggtaggagaatcgcttgaatccgggagctggaggttgcagtgagccaagatcgcaccattgcactccagcctgggcaacaagagcgaaactccatctcaaaaaaaaaaaaaagagattataaaagggatgatgaacatggagctgcatctttttaaacgttgttttttgatgcttcagactcttaatgcttttatataaagctatcaactgtatgttgatcacagtttataagaaagaacaaatcaagattggcaatccttgccgatcttttagaaataccttttctggagaaaaaaaaatccacatgaagtgcaataagcttataaagctaagtagttattaatatttctattaacatgatacaaaggatgatgattgtaagtgtttactgactggcagcttttatttcagtattagcacagcgtcttgccagtgttggaggccatgtattatttcagttcaactggatgaaatgttaaataaactcagaatgaaaataaattctctcttttatttgtacataaaggataaagcagtttgtgtgttacaactgatggtacttttcattcaaagttaatatctacagtaccatcagcaactcctaatgaaaagatatttttgtattatgcctttaacaagaaatatatttctattttgggctaccagtctcccacctttttgaacctcatatacataaaggcacacccacccaccccccaaactcctatgacaatgtgattccaggaatattaatgatgggcgtgggggatggatttcagcttgaaacttggatggccaacacctctgcacatgacggtgatggaaacatgcttctatattattgatctgattctaacctggcactggcatttactaacagagaaagtctaaattaacctaagtttg

SEQ ID NO: 118923 - DNA, 1058 bp, Homo sapiens
ttacttaataagtacgatatacattatttgggtgatagatatgataagccttgaccactatgcaatctatgtacgttacataattgcacttgtactctataaatttatacaaattttaaaaaacctggaaaaaactgctgacggcccattatgtgctaggagtttgggctccttcttgcctttgcccaggagccggagacgagccctggggcaggggctggggatacacaggaacagggtgtggtggtcccaatcctctagaagttcagacacaggaagagatggctaataagagctgtgggtggaggccacacaggtgtgggaactgggacactggagctttggctctgagggcggtagcaagcaacagctctgtgtgtgtgcacgtgcgggcgtggatgtgcgcataccagagtgtgtactccggcacacacatacctatttgtggaaggaagcattttcttgggtctggaaaaccccgttaatgttaaaatcactcagactactgacccagcagttgcacttctaggagtctgtcctgtgattccccaaagcactgcttgtgtaggcaaagtctgggaagtgtaaacgtgcacgtgacagaacgtggtgaagccgtccaaaagacttagattgtctgggctgatgggggggcctccaaaagtgtgccgatgctgagtgtgatatgcacaagggagaacacacgtgtgcgtacccacgcatctacacatgttaacactggtcaaggagtggctcaggagggcggcagtgagagggtagggatggctgcctccagggaggaaatgggagctgggacaggatgggagaaaggcttctttttcaccatgtgtctcttgggaccttttcaatctttccaccttgtgtatgtatcacctactcaaaacctaatagatgtagagtttgacaggtggagaatggaaggagaagggtatgctgagcagagggaacaacacacaaaggaatggaagctggaggactagctcatgcttaggagtgagacagggccatatggctgagatgggctccaggctagggtt

SEQ ID NO: 118924 - DNA, 1040 bp, Homo sapiens
caaagaggcctgctgtttgcccctgggcatttagcagtgcctggcagagctgggaatcacctgggctgttgagcgctgtgtcttgggtgtagcccctgaatcgccgtgccagtttctttggtttgagacctttactggctctgtagcctctgactggctcaggccttggacctgggcacctctcagatggttcctcctcagccccttcgaagactcctctcccctcttccctgttccctggcccatccttaaatgctggtggccccttctccttgaggtctacaccctctgccttagtttgctgcccccgcagcacttctagggccctcttgctgatgtgggttcgaggaactaataaccttccgatgtcgctggcagcagggaggcccccacagcctgtctagaaaacagtgaggggaagtgtagcacaaggcttcatatacccctcccctttagccagtaactgtttccagaaattccgtttctagggaaataatctgaaagaaacaaagtgttccctgcatgaagatgtttatcatagggtgaagaggagacaacagccagatgcaacaatagggaagggttttctcctacctactcctgcgcgagctggtgacctctggggctcactgggtgccggacactgttctccagcctctatattattcgctcctttaatccttgtaacaactttttgaaacaggtactagtaacatcccctttgacaagtgaagaaaccgaggcttggcaaggttaatcagcgtgcccaaggtcagccagctccctgaagtctgactctaccagcctcaaccgttaccagggcggcgatggtcagcagtcacaattaccaggtagttgttgggagagggtcaacgtgctgggcagcatgagatgcctgtcaggtggggcaggctgggctggactttgcaatgcaaagtccagaagactgcatggctcctggccctggcttgtctgtgtcatcggcacgggccccgccactcaggcagcaatggcaggtgagggcagagacaatttctgaa

SEQ ID NO: 118925 - DNA, 1046 bp, Homo sapiens
atcattcactctgtagtttgtactttcatgtcgggtttcacattgcatggtaattattatttttctctatgtttggatattcccaatagaggcaagccttgatgaaacaaaaggagcccaagttttgagatcagacagacttgggtttgaatctcaacactatcccttcctggctgtgtgactttggataagacccgtgaactccctgaacctgagctgcaaccgtaagccagaacacatataaagtgctgaataaatggcagctgtcagaattcttatttaatatgtgcatcccattgggttgtacatttctgctgatgcatcatttttttctgagattccccaaggctggactgtgtcttgttcaactttgtcttcgcagtgccccttgataagtataagaatgcgctaagagttggaagcatgaataaatcatcttgtacttttttgacgttggtcgtaatttttggatcattgtcagaggccatcggctgcttccttgaaagtttcagggaggctgaggggaaggagagtgaaggaggcagagtttggaaaaggatgggggacagagaaggacaagggggaagagagaaaggcaggatctggagcatctggatgggcctgtccttactcccttggtggcctcattaggtctcggagcctcattagctctcggagcccaggtgataggatgctgctgtggcagatacctgggagactgaggcaggctggtggagatgcagctggtctgtgagctggaatgtcagggcctgtcagtcactcaggtccctctggctgggaatgaagctggagctagaagccccaagagagatgacaacagatgcactgatgggggccggggagggagacaatctttcctgagtacctgctgggtttttggcacaatgctgggcatgtctacacccatcctcatttcctgttcacattgaccctgaggagtaggactaactcccactgagttaaagataagagactgaagcccagagaggctgagtattctggccaacgtcacacagctagaagag

SEQ ID NO: 118926 - DNA, 1037 bp, Homo sapiens
gagagaggggaaaggtgccaggctcttttaagcaccaagctctcatgtgaactaatagagtaagaactcattcattatcatggggatgacactgagccattcatgggggtctaccctaatgacctaaacacctgccactaggccccacctcaaactttaggaatcaaatttcaacatgagattgggtggtggggggcaaatgtccaaacaatattcgaaggcttataagaaaatggagccaactgagacagagagagagagagagatttctgatgatgtttgaacatgtagtttcaggtgtgtctgaaattatatctgcccttaaacttttcagtaacactttggaccaataaatacccacttcattgatttttagtttagtttagttttttgcttaacatgccattagatgggtatctgtcatttacaatccttacgataatcccatgaggtagacatttattattccccttttacagataagaaaactgaggctgagtgaaaagtgactgcttcaacccacacagctggtaaagggccaagcgcaataaaaatccaacccttttctggctctgggcccagtgagttgcacattccatgccctggatgagttccatgttcctttccagctctcagattctatctccctgtgctgtctcagaattggataggtgccaggtcgggggcagcaggtagtggaccagctgctgcctgggtcaggagcccagcatgttctcaaggacacagatgggctggcagccttgtgctctgggcagggagcctaaggcgggggtggacactggtttctggagaaaaagctcattcaagactcactgatgcccagcactaggctccaagcctccagagccaaggtttggcacggcttctctttatgtgcccagggcccagcgtggaatgtctgtttaactcagctcttgagagcgcctacacaattggagggaaccccctttggtgatggtgattgtttgcttaaatgtgtgtgtgtgtgtttgcagggggaagcatggaaaaacctg

SEQ ID NO: 118927 - DNA, 1006 bp, Homo sapiens
aggaaaaaagcggctgtggctgagatgcatcccagaggggacctggacaaaaccggcctcaggtcctgcttccagaccccttgtgcagctttggctctggtcctttcctgagccctgtgtccagctttccctttggttctgggtcccatctgataacctcgataacccccttttctgtctgagtctgacagagttagtctctgttgcttgctatcagtgtaccctaattcacacccagcccctctctaaggctgctgtgaactgttgaggttcacacctgattccttgaacaccaggctgacacgggctgcctcttcctgtccctcagctccttcctgcccccgctggataatccaagttatgatcaaccactggaccacagcctctaattaagacccccttctggatgtaatcaaccttgccagaaaccagaggcctagggtctgtttcagatccaccctctggtggtagccctgacctcactgactgctggccaggctgctgtcctggtctctgcactcccggctcaggcaggaggctctgggtcacctgcccagcaatctccctccttcttaggatggggcctcctttgccctccccagggtgaggactgccccggaggctgtggtggggcctggagacattcctgcctctgggcccagcatgggctctggagccatggaagcccttgcaacacctttgccaggtgactcttgcctcagtcatacaccacttctctctgttttcctcatgtacatcttgcatttactattactcactttatacttagcaagagtaacaggttcattttttgacctttaatacatatatttggaaagagaacataagatccttctcataaacaggaatgcagtatcctgttctgtaaatagaaggccatggttaaaaacaaataaatggaaaataaaacatcgtttatccacttccagctagttactgttgccggctgaagtctgagcctcttccttggaaaggaaatcaagct

SEQ ID NO: 118928 - DNA, 1067 bp, Homo sapiens
gcatttattgaacactactgtataccacagcaaatccatgactacacccagactcagagggacaaagaggcttgctcaagttgtccgagctagcaggtggcagaactgggatttgaccctggcctgcctgatttctcttccccaactgttctaggagcctttgctgcctcagccccccaactcaatgccactcccccatgcctgtaagctggacttctgtcttctctgtctgaaaagtttgcttttgcactgaatccctcccgggctgctggagtgtgatttgctgcctgacagctggaagtcaaagcagcaaggctaactccatcctgcaggcctagccaagctcaggggccctgaaagtttccaggggcagttagaccaagctgggcaaccttgggcacgttgatcaagctctctgaacctcggcctcctcatatgtagtgcagggaggctacttctcctatttaggaggcgttgagatgaatcaacaaggtggtggcaccaaggaagcaaaagggagacccccgcctggagtctgggtgtgtaaataaagaggcgtggggccaaggagggctttaggggcctcgtcccaggcgacgtgaggccaccgcaggaagtttctgagcaggggagtgctgtgaggcgaggagtattttaagaagattcttctggcagcacagaccaggttgagttggaggagccgcgtgggggagtgcgagcggcgcccatgcctggaaaactttgcaaatgaggccccctcttggagcccttcaggatccaaggcaatctgagaagcaggggctgggtccgaggtctcacccccgacacaggttgcatctacaacctcagggccatcagcatccccagagcaactcagacaggctcctagtccatcacgacgtgccttcgctcacagcatgcgtggcccactcagagccgccgctaaagctaggatttgaagctgggtctgtaggacatcaagtccagcgctcttccatcagagttacacatactccaggaaccttgcctgagcctcagatgggcatcttactgccctcaactcagcc

SEQ ID NO: 118929 - DNA, 1049 bp, Homo sapiens
gtggctatccagcactctaattagctggctatggatctaatgcccacccatggcagtaggacatagagtcaaccccacccaaaccacaaagactgagggtggaagaagacaggaactccaggcaacactagacaggtcaaaaatgtattatgaccacagcaaattacaccagaaacatcccaatgacataatgccatagtgatagggtgagagcatggaaggatctcatggggttatgtgtgtgggtgagaaatacaaaaaaaaaaaaaaagcttcagaagaggcaagtgcaagatttaaacaaggatgccagagctattattatgctctgtgatccagaaagtggcctcagtctgcaaatcctgcccctgagatggggacctcaaaggccatgggccaagacaagttatttcaaccccaagtaggtggggcaatgccaggcatgtattctacctctggaaatatttgttgaccatccacaatcaaaaaagccttgggcttgatgttggggattcagggatgagcaaggcatgcacttgctctcaagcagcttaggatccagcagcaggagacaaccaaacatagggtaaaaagggcgccccagaggtgtggagggctctgcagcagggagcactatgtgggagaagagttgaggtaaacaggttgacaaaggaagcagaagtcagatcaagaggggccctagtaggtttggacccgatgctgcaggtaatggtgagtcactgaaggcctttgagcacaggagtgacccaagcagggtgacgcttcaccgccttaatagagccagacaaaggcccagtggagagtcacagagaggatcaaagggctggcaataggcctagaagggagacggcagagggaaggctagaaagctggaggcggggagagccttgatcaaagtcaggcaggggagcacagcggcttcctgacgctggacccaggtggggacagagcggccctgtgaagtcaaagagaatgttgctttgttcagctctcactgggaaaggtgagtgttgcacagatgcacccca

SEQ ID NO: 118930 - DNA, 1030 bp, Homo sapiens
gctggatgtaaaaatccttggctcgttttctcgcttgtgtatctttcttaaatatggtactccattttcttttggcattaagtgttgctgtcagaaagcccaataatctaattttctttttctttaaagtccactagttttgctagtctctgtctcgatgttggtaactttggttctgtagtctcaggtatgtgttgtgctttttaaataatgtagttcaaaatctttttttatttcaggaatgttatcttgaatgacagttcttggtggtggtctattatctttgcttttcttcttcatcatctcctattattgtttcagcaccacagtcctcttctgcagtttgatcgctgtcttttttctcagctacccagaactgaagcctgtgcagtccatcaacgcccatccttccaactgcatctgtatcaagtttgaccccatggggaagtactttgccacaggaagtgcagatgctttggtcagcctctgggatgtggatgagttagtgtgtgttcggtgcttttccaggtaagtgactctatcagcacttcccttgttgggtacattaattttatttcatcttgagtgacattgttccctcctcttacttggtaattctcttgtctcttctgtccactctgtatcataggctggattggcctgtaagaaccctcagtttcagccatgatgggaaaatgctggcgtcagcatcggaagatcattttattgacattgctgaagtggagacaggtaacttcatgagaatctaccgtctttcacctttggcagtcaggacttctcttgtgatctcatctctgcatgtgactacttcaccagcatgatcatgaatgaatttgtctcctttagacaagtatgtttctgttttgactgtcactgccaggtggtgaggaagcaaagagttaagaaataaacaggcaggtctgaggaaagtgatttagaaaaatattttgatttatttaaactttaaactacagagtagaaggaagaaaaaagcaccacttggggtccc

SEQ ID NO: 118931 - DNA, 1010 bp, Homo sapiens
agtgagcgtcgcctcgtttgggggcgcgcgtcttcgcgaccctcggctgggcccgccgcccgcttcccgcccctggcgcctcacagctgcagccacttcccgccttgcctccttccgggcctctcgggccccggggagcgcggcgggccggggcaggggccagggcagggaccggggaggccgggcctcccaggctcagcgctgaagcccgagaggactgcggctggaaagcggccgagcacatggacgagctcctggcgcgcctgctgcaggggctggggtctcaggccggggccgcgggcgtcctcggagcctcggcgggacgtgggggctcgggtgtactggccgggccgatgcaggaaagcgggagcgcgtaattcttcggcctgtggtggacacagatgtgtgcagggaggtaacaggagcccaggctgggagggagggaagcgcgggcctgggccagatggtggccgcgctccagggcctgactgcagagcgaggggcccgattttggagttgtacaggagggcgatttatttcctcagcacttaccctgtaccaagccctgaaggaatagggaaggaaacctcgcgcgctatttctgtttccctcagaaccccttcgtctttgtcgttcatgaggtggtgaattatctgcctttcgagaatcctgcatcgatgtttattgaatccctactatgagccagatgttgtaggggccggggatacaacggcgaacacaatatccatggtcccctcagaaggtgatacatcatcaggtggttgttgaggacctactcaagcggtgggaggtggagctttctctcagaaggcttccaacgatctccccagcctcccagagccatcccccggaaacacaaggattatcaagctgatgttatgtgtatagatcatacagtttaccatgcttcctatgcaaatactcgttcaagacgtttcctagcttctgctgcccctgttccctttctagctggtttacagtccctaaac

SEQ ID NO: 118932 - DNA, 1219 bp, Homo sapiens
ataatgcctaccttatcaggtcattgtgaaaattaaagatatgtgaaaatactcaacatgttcttagcacatagattctttcacatttgcttcacttcttatttagtttttgttgtaggttatcctgtgtatttgaccttccaaacaaaggttgcttttgactttatgacttaaggttggaatatctcctactactcccctgtcctccttggaccagaaaaaaaaaaaatcccactgtgatcctagtcatgcgtatgtggcatttggagaatttaagaaggtatagaaattgacagctttggcaatactattgcttatgttacacaagatgtgtaacttatcagtgaggtgaaatggtaaagtaatgcttatccttaaaagctaagacttaagtcatctcagataaagctaatactcccatcttgacctcttttcttcacacaatccttcaacaggacttcattgacttaactagagagaccagaccaaggacaaaagatcgcagtggactgtatgtgattgacctgacaagagctgagggagaaaatagacctattgccactcttgacttaactttagaacctgtcactccttcccagaaggagccaaccagtcttcagacatgtgccagcctctctggcaaagcggtgatggaagggcacgtggacagaagctctcagcctacagcacggagaatcattaacagtgatcctgtagatttggacctagtggaagaaaacacctttgtaggtcccccacccgctacatccatcagtggaggctctgtttatccaacagagcctaattgtagctcagccacattcacaggtaacctcagcttcttggcaagtctacagctgtcttcagatgttagctccctctccccaacaagcaataatagtaggagcagcagcagcagcagcaatcaaaaagcacccttgccatgcccacagcaagatgtatctcgcccaccacaggccttgccgtgccccctgcgacctttgccatgcccaccgagagcctcaccatgtccaccacgagcctcctcatgcccaccacgagccttgtcatgcccatcacaaaccatgcagtgccaactaccagctctaactcacccacctcaagaagtgccatgccctcggcagaatatcccaggcccacctcaagactctctgggcctacctcaagatgtgccagggctgcctcaaagcatattaca

SEQ ID NO: 118933 - DNA, 1872 bp, Homo sapiens
cttcaacgtattctagaacctcttatttttgtatactatagaaatcccggctcggcgccgtggctcacacctgtaatcccagcactttgggaggctgagacaggcaaatcacgaggtcaggagattgagaccatcctggctaacaccgtgaaaccctgtctttactaaaaatacaaaagaaaattagccgggcgtggtggtgggcgcctgtagtcccagctactctggaggctgaggcaggagaatggcatgaactcgggaggcagagcttgcagtgagctgagatcacgccactgcactccagcctggggaacagagcaagactccgtctcaaaaaaaaaaaaaaaaaaaaaagaaaagaaatccctcctaatttccttctttttaatctctacagaacaagggtcaaaaattagaacccatccctcatcgaagactaagaatggtaacaaataccattgaagagaattttcctctggggactgtgcagtttttgatggactttgtgtcaccccagcattacccaccaagagaaatcgtggctcacatcatccagaaaatcttgctcagtggctctgagactgtggatgtcctaaaggaggcctacatgcttctcatgaaaattcaacagtatgaaccgtaacctctggctgttggcgaatcttctagggatcttggactcagggcatagctttctcttgacaggcttttttaacctaaccgttacagtgggtgacttagcatattagtgttatttgaattgcaaatgataggaaacccagtccaaacagaccttaactactgctaaaagagaatttaatggctcgtgttactagaaaccgaggagtgagatgtgacttgattcagtatacaaaaatggttaccagggttcattctgcagctctacttcggttctgtttggggctgcatgtggtagcctctcagcctcagttctgttttggggccgcatgtggtagcctctcagcctcagttctgttttggggccgcatgtggtagcctctcagcctcagttctgtttggggccgcatgtggtagcctctcagcctcagttctgttttggggctgcatgtggtagcctctcagcctcagttctgttttggggctgcatgtggtagcctctcagcctcaggcttttatgacacttccagtgggaaagagtgtctgcttcctttatagtcacccaagagttctgaaattgagtcttgcaggatttaattggcctaatgagagacatgaccatatctttgagccaatcaccgtgaactgaggggtagaacagcacgattggctaaaaaagccacatacttcattttggggttctggtaggtaaaactagttggttaagagtagtgaagagttggtttcttaagacaaaattatagtactaaagctttccaaaaggggactggatactgggtagcaaaaaacaatgaagttccactactctcagattgacatggtatgataccagaaagtgagcaagagcatggaggataatggaggataggaagaggcttcttccttctatcaccttcagatcctatcccttcttccgctaaattctccataattctaattgatttcacttgactttcaggctacatccagccaatgccaagacagtggagtgggactggaaactgctcacctatgtcatggaggaagaggtaacaacaattataagattatatcttctgtaggggaagttttaactataaagaaaagtgatatcaggtgccatggctcacacctgtaatcccagcattttgggaggccgaggcaggaggacagtttgagcccaggagttcaaggccagcctgggcaacaaaatgagaccctgtctctacaaaa

SEQ ID NO: 118934 - DNA, 1609 bp, Homo sapiens
tgagccgagatcgcaccactgcactccagcctggcgacagagcgagactctgcctaaaaaaaaaaaaaaactcactgctattcatcttctctcctcttctcttcttccttgtggatatttttcaaaagttatttattataatattagtggggttttaggaggaaacaaaattcggtgtgtatattaaatctactatttttacctaggttacctaagtgatcattaaaagtagttttgactgtatgtttttaccttattaacttgtagagcctcagccctgtataaagtgtgattccactgcacacactctaaaccttagttgttaacattaataggtgacaataatatagagctggcaaggacttctgtggtcacccagtctaactttccacttggtttaggaatgttcctggtcaggaaggcacagatagtactattttaccctgaagttacctttgaatacttacaattcaaagaaaaatgttgatattttagttagctttttttttttttttttttttgtagagttgggttcttgctgtgttgctcaggctggtctcaaactcctggtctcaaaagatcctcccacctcagcctcccaaagtgctgggattacaagcatcagccaccatacctggcctttagttgacttttacagccttactgcagttaaatgtgatgtttttattagacttgtttaattattgaaaatagccagagggcccttttgttgcctgtagggaaatccagggatctgggggcccaggttaaggctatagttctgagcaccataaatacaacagacatggaaaccttttctttctttattttttttttctgcacagaaaaagaaagaataaaccttttctttcttttttccattacagggatgttatcaagtggctggtcaaagcagtaactgaagatggattgactcagcccccaaatggaaatcaaacgtcttcaggaacaggaatcttgaaagccagcagtagccacccttcttcccagcccaacctgacaaagaacaccaatcagctgtaaggggcaggcagttctctttcctggggctcttggggtttagtgttttagagagaacaacaccaatccctaagagcagcttcccccaaattaacaagatcttagaacataggctgatgcttattcaagacttagtttaactagaggctaaatttctgatttcaaaggcagaacaaaaccaggtgctttcacccctaaaatgaataggacttcacaaagtgaatacgaagtcacaacgcagatgcaaaacaaatgctagaggacactgcccttcacttcctgcatttcaggagacagtaaagggttacagctcctcatcacttcagatatctgttgccatagagaaggagtggtgtgtagtgtgagttttgttaacctcgagtcctcaaggacctgggtttctctcctcaggtcccgggagaaaaatagcattcagcctgcaggttccaacacaccagggcaggtatcatcaccgcagactgcactggaaagaaattcatggcatttcttttatggagttgagagtggtcttggcgttttttgagagatgccgggagattaggggctg

SEQ ID NO: 118935 - DNA, 1023 bp, Homo sapiens
ctgttcaactatcagctttttgagagtggttccttttatttatcttaatattccttgttgtgccaaatagtatttggcacatcattggcattcagaaatattctcatgattaattttcatagtgacaatgtgtagtaattatttttaatgtgtcctaaacttgtctttgtcaaatgtgaaagactttttcctcattctagcagttgctaatccaacaaacccatttctaccctgtccacaggttttgtgattctgtgggcttccatggtattccttcttaactgtcttttttaggacaaatgttgtacattcagggtgaattgtggctcatgttctttgaagcatagttgtgatgattaactccctcttcctcttctccacacagagaaatgttctttactaccatggaaagccaccttctgcgctgcaaagtgttagaaatcatattcctccacagctgtgagacacccacccgcctgcctctgtctctggcccaggccctctactttctgaataattctacgtcactgctcaagtgtcaggtacattttttcctgcccaatttcaggcctagagcacctctctttgctctaggcccgaacccttcccataggattttagcttaaaacacaactgtttgagcattctgtaaaggtgaattgaaaactgtacaaaaattttaactggggaaggcatttattatcaatccattttactatctctgcagtcagataaaagccagtggcagacttgggacgaattggttgagcatctgcagtttctgctgtccagttatcaacatgttttaagaggtaaggagcatttgttcacaagtggagtagtggaaggtctcaatggacatttgtattagtcataactacacaggatattctgatttgttgacattgttccttggttgtatgtaacttattataagggataagaaatgacatagccggagtcaccactgtgaaaagaattcacatattcttgttatggccgacaatacatggtcctcatagt

SEQ ID NO: 118936 - DNA, 1026 bp, Homo sapiens
cttgaatgaaaatgttaaacatgtgatgcacagagtattaacctgtttcaaaaaagtatagataaataatttattaaaaaatatatataccttgtatatttaagccatatttgagaacaggctaggataggattatttaaaaaaagatatttactagagttagaaattacaacctactgattaaataatgcaggtttggtcctgtaagattttaaccacttttcatgcttttagagcttctgagcagttggagagagagttcaggaggtattcttggcattcagtgcttggcaggccctcaggagccgctccagcccttttgaaagggctctgcatcagggttcaagtccgcagcatagaagagcaggagcttcaacaagtgcactttgtcttggagttgggggacaagaggctcccccagcatctggatcaggcggctgcggaaggcctcaatctgcttctctacgtctaccactgtgatgtcatctccttgctggggtttgggcttaatccttttgattattaagtcctttcggtcgatcacggaactccttaagtgttctgcaagagggaaaaaagtcagttgggtgctctgaactgctttttaattctttttaagaagtctaattttggtaggtagagtcttggcaaagacttgctgactagctacagggatacaagtcgaaggctgtgtgagtgcctgcagtaactccacttccaaaaggccctttgttctcagttctctcgggtccttaagaagttttacattaaaaaaagtgatatggtttggatctgtgtcattttttatgatcacataacatggtcaaaaaatgaaaatactgaggaaacaattagacatattcatctagtccatgttttagccaatagtatttaacatgagtatgatcatgaataaacaactagacagtcccaaattgtaatccctgatgttggaggtggggcctggtgggggtgatttctcatgaatggttgagcaccatccccttggtgctgttctagtgatgg

SEQ ID NO: 118937 - DNA, 1214 bp, Homo sapiens
tccaaaacccaggcttctttattcctttaccactatccatgtgagcattgacaaatcatggcttagaggtgctcactgactcgctaagacgactttggccctgttgatgactggtgctgtgctccagccttatcagttaggggacccaaggtttgtttgggacctgggtacaggtaaaagccagacttggcagggacccctctttctaggctgaaccttgagtccccctgctttttggcagacctaatggatcactgtcttgcagctagttcttcatgtggggcctcttaggccagtgccggaggaggcatgctcctctttctatgccacagaacaaacactactctagcagagcctttcttgcactttaaagtgagattaatttagctgtaatttggttaaaaacttcctaagagagaaaattaagtctactgatttggtataggtaaatggacattaaacttttttaaagtaaaggagatggtagataccgttagattatagtcttgaggttcatgtgaagccagtggtgttaacttactttgatttccttgttcaggtcagggcctggaacgcctgtgcggggaggtcactcaattcaaaattttctgtatgaaagcatttttcaccaaaatgagcctcatccctttatgcaacacataaccttactgagggagggaaatacagaagccacctttttatttctcttcactgtgtacaagttcacttgttgtcttgaacactgtctcaaatacctgctttttgttttggatagtaccttgtctgtataagaagctggcctttccatagagaggccctggagtctaaaattatgagaacaattaatttatttgtgtcttctattatgatctcgttttgacaataaaaatccttactactttctcaaatgtggctatttttttgtccttttaacaatagttattccactctacccacccagagtcacactgaacttggtattttgaaaaaccattgcctttttattgtctccttttaacatcaaatgttttataacacacttgatccttttgtttctaccccctattcattacagtcaaattaacaggcaatataataggtctaacagaatgcttgcatttcattagggaaaaatgaacgtctctctcctgaaacaggttgtcggtaccttgaatgacataatattggtgtatagactaggttcagcagaggga

SEQ ID NO: 118938 - DNA, 1014 bp, Homo sapiens
tactgaatcaaactctgaggtggagcccggcagtctgttctaatggctggcacagggtcagaaccacttagccagtgctctcatcaattaagatctagcatagtgcctgggatgtggtcagtgcttcgtaataagcatttcttctgcattcttagggcatagtactatagtatatcggaagatcatagtctgggaaggtagtagacgtcagagcttcaaattctggctttcccacctttataaatgtaaactattcacctaatgtctttctttgttgtctctatggataatacctatctagctgggtggagatgaccaactcctcccttcaatgatttcctcacttaccagattaatgttatttcagtaacttcctccccaaaggagtaagtttaggtgtgtgactcccctgccctgcctaagtgcttctgtactgtacctctcttgaacaggtggaggaaggagaggccagtctaccctcccctgccatgaccctgtcatcagccattgacagtgtggacaaggtcccagtggtgaaggctaaagctacccatgtcatcatgaattctctgatcacaagtaagcactcttcaccctcagagtagagtgccataggggcagggaagagttgaggcttcctacaagctgattggagatgatactgcaacacgctcgccttaccttatcctaaaaaatgtcagtttggctgctgaatcatgtcagtattgaagctccatttattaagtggaagatttgccaaatgttaagcatcttatctgatttaggtgcattcctgctgctttgttgatatgatctcatgttcccagctctgtcactgtggccttgggcaagctacttaactacagagactgccccgctctaaaatggggaatttcactggcaggttgaggtgaggatcagaaggcccagtgctcagtggcggcagctgctgctgttactgtttcaagctctgctggagaaggggaaacatccgggcatttcccacttacccca

SEQ ID NO: 118939 - DNA, 1010 bp, Homo sapiens
ttcagctactagtacgaaccctgcctaaccccgctgttttgggagacagtccgtgctcactgcaccgcttgctaatcgaagtgacttctcatctctcccagtctcagcttcacctccgtgaagtgggaaaaacaggatgacaagtgctcgcacttggcagccctttttgagccttgagggcttgggtttgtgggtgtcattttactatgctacctccgtcttcccttagcttgtcacggacccaggcacagcacacgcgctgaggaagtggtggtgaagtgtggcgtttcctctcggggctggcggattccacactcggagctgcggctccacaactcgctgggcggcgaagggcatggggagggggcgggtctcgcgatcgtggacaacaactcccagcatgccctgtgctccgctgggccaagtctcgcgcgagatcccgcggtctccggaggctttatctgcagtgctgcctgcccgctgggtggtactgctacctagtgggtcttggggaccttcgaaatcgccgccgctctcacaatggcttgggtccagactgcgccacagcctctcgggagacgtgggccctcggaacctttttagtgccggactccgggccgcaggcagtcccgcggcagcaggatcacaggtgaacagatggcgggcctgggccctcccttggggctgcgttctctggcgatcaggaggggcgcttccggcgaggcccgatctcggggcccctccaagccactcccctctccccgcacctcttaacccttcatcccggcttcgagctcggctgggtcgcctcttgcctccctggctccgctctctggggtctccgtaatggggcttctctccgggaatgccctgcagctcccgtacgggcttcccctccgcttcgtgggaccagcccagcccgagcccccgcggcttgtcctcaacctcatctccccacaccccgccttcggctagggtcctggccctaatcttagcctggaggggtgggt

SEQ ID NO: 118940 - DNA, 1100 bp, Homo sapiens
caggattccaccacaggaggtggaggttgcagtgagccaagatcgtgccactgcactccagcctgggtgacagagcaaaactccgtctcaaaacagtggctaatgatgcaatgaaaagaggttggtacaaaggagagcccagggtgagggagagagcattgagtttaggccaaggggtccagaggctacttctgggaacttggggcctgatattcccggggatagcctaagaacagtgtgtttcctgatattcccggggatagcctaagaacagtgtgtttcctgatattcccggggatagcctaagaacagtgtgtttcctgatattcccggggatagcctaagaacagtgtgtttcatgaacgacaagggtgtcagtgtgttaggaaatgctgccagctgtgttcggacttctgtgtctcacccaggacctgagcgaggccatgagtatgggggagctgcagcgggagctgggtctacaggctatcgataaccagcgggaggttttcctcttggcagccagcattgcccctgcaggacccacctttgaagagcctggcaccgtgcacatctggaaactgctcttggagctcctctcctaggctggagctctcctgcttgccacctgcctgtcaagaccatagttgtactgctgctgcttcattgccagactgggcctggggcaagagccacatggcagcatttcccttttcccctcctttgcctttcaagagcagggcctgggcaaggccaagaaccatgcagaagccttcctggtgaggtggccgtgaagccgaagcagggaggtgggtgagacagagggtggggaggatagtgtctggctcattccaggctggaatgtggatccagctttcccttctcttacctgtacagtgagatgctcagtgggctcaatcctccactacaggtcccggtacctgaggaaccagtgtaggtgtcagaaatactcctagagcctcaaggtctcccagtccagaaacagtctggtgacgtcatgcccttctcatgtgggcagcttctgagtggtgacacagcaagcctttgttcctgtcctgcattgtccagccccagctccacct

SEQ ID NO: 118941 - DNA, 1772 bp, Homo sapiens
tggctttcactggggaaaaattgggtccagaaaggctgagtgatgtacccaaggccatcccgttggctggtctgctattcctgtccttaggatcacataatacaatttttttccatctttttacctagattcacataagggaaatcctctcccagagtcatttcttatctacccagaaggaatttgcaccctttcaacatcctgggccaagtggtggcgtttcagttcatgtgaatccatgtaaagtactatgatatcgacgacagcctcaaagccaggtgggaggaggaacccacaactttgtctccactgacatctgtatgttatctcattgtcattcatgattccagctattttcctaagttccaaattttctatgactgtcatctggggttttgaaaacagcacctagaaacagagcctagaactctggcctgttctgcttataaattaataaataaaatgcagttctgaggtcaacacctagctccagttgactgtcgtcccagggacacaggctccttccttcccctgacttctgtaaacatgggcactggcacagttagtacgagagcagcagcttgtctccagattagaggggaaaaacccagccttcactttttctgtttggtgggtgaatatcagttattctgtagtcaagagaggctggcaggccaggcctgggctcagggaaaggcagggaggtcttcagaaagctccttgctaggatggccaggttcatcctagcacttcacactcccatggctgggaaaggcatctccgaattaggaaaccacctccctttaaaaataatggccctggggtcagagaggcagagattgcacaaggccacaagtcacttaggtggagctggggctggacaatgcaggacaggaacaaaggcttgctgtgtcaccactcagaagctgcccacatgagaagggcatgacgtcaccagactgtttctggactgggagaccttgaggctctaggagtatttctgacacctacactggttcctcaggtaccgggacctgtagtggaggattgagcccactgagcatctcactgtacaggtaagagaagggaaagctggatccacattccagcctggaatgagccagacactatcctccccaccctctgtctcacccacctccctgcttcggcttcacggccacctcaccaggaaggcttctgcatggttcttggccttgcccaggccctgctcttgaaaggcaaaggaggggaaaagggaaatgctgccatgtggctcttgccccaggcccagtctggcaatgaagcagcagcagtacaactatggtcttgacaggcaggtggcaagcaggagagctccagcctaggagaggagctccaagagcagtttccagatgtgcacggtgccaggctcttcaaaggtgggtcctgcaggggcaatgctggctgccaagaggaaaacctcccgctggttatcgatagcctgtagacccagctcccgctgcagctcccccatactcatggcctcgctcaggtcctgggtgagacacagaagtccgaacacagctggcagcatttcctaacacactgacacccttgtcgttcatgaaacacactgttcttaggctatccccgggaatatcaggaaacacactgttcttaggctatccccgggaatatcaggaaacacactgttcttaggctatccccgggaatatcaggaaacacactgttcttaggctatccccgggaatatcaggccccaagttcccaga

SEQ ID NO: 118942 - DNA, 1030 bp, Homo sapiens
tggtcttttttttgagacagaatctcgctctgtcacccagggtggagttcagtggtgtgatcatggctcaccgcagcctcatcctcccgggctgaaacagtcctcctgcctcggcctcccaagtagctgggaccacaggatggttaatttattgtttttggagagacagggtctcactgggttgcccagggtggcctggaactcctgggctcaagagatcctcccacctcggcctcccagagtgttgggattacaggcatgagccactgtgcccggtgcaccacagcctttgaggtcaggattctggacctcagggatagatagcaagtggcttgcctaattcaggatgagttcagatttgagcctttgcctgtctagccctccttaaagtagcccttctcctcttaggccatggcccgtgatgagaagaattactatcaagataccccaaaacagattcggagtaagatcaacgtctataaacgcttttacccagcagagtggcaagacttcctcgattctttgcagaagaggaagatggaggtggagtgactggtttacatcacagctgccccaggctgaggcgtcccccggaccagtgaagctggagccagggtgtaaggcaaggaggtgctgtgtggctccagaggagctggccaggtcccatggaatcagaaggttacacacacgtgcacactccccgctctggggaaggaactgttctcagaggctccaatttatattcatctgggggttcacggaaaagccagaacctgctgttttcagggtgggtgatgtaaatatagtgtgtacataataaagcaaatatattttacttctctgatgattttgtatttttctgctctcagccaaaccctggggctgccccggtgaaaaccacctctaccggggctgagaggccatcccgcctgtcagcaagtgctacgttcacttgctcttctaggcacggcctctggcctcatcccgatggctctctgcccatttcccgcacagcagttcctctcaactc

SEQ ID NO: 118943 - DNA, 1144 bp, Homo sapiens
gttgcagtcaaccaagattgtgccactgcatttgaacctgggcaacagaatgagactctgtctcaaaaagaaaaagaaaaaaaaaaagagagagagagagaaaaagcctccagggcattagttctcattgttacctacttctacctaaccgtgggcagggattcttatgggttagtagttgtgttgggataagcaggagtctataactttccctcatcaaagatccttctggtctcaagggctctgttctctgcaggtgaaggccatggaggtggacatagaggagaggcctaaagagcttgtacggaagccctatgtgctgaatggtgggtgtggtccatatattcctttaggtcactgtcctgcactgtgggaagctgggaagggccctaagatgtcctcattttgcagatggagaaaccaagtttcagaggggagaagtgagctggttcaaagttcacagagttaggactgtgtcctggctggctcatttttcattgtactgactaaaccctgaccttactgtgtgaactaaggtcagagatgtttagggaggatgtacccaggtgcctgggagaatagaagagaaaccagtaaatctctggcatgggtatggcttctcatgaatttaaggatgaactgatttttagggattccaccatctcaataaatgttccaatgacaaaatcgattttatgtatattaaggctatagagagtgaacgctaaaacggaggagagtaaaccctacaggaaagtgggaatactctagaattcttcattcatccttccccttacctgtcagggagtttaagcagctcccctaaagataaaggatttgaatggccagacatttgatacagaattccttgagttcctgtcttttatctcagtggttctcataagaattactgcacaggattgtatataccaagccataggcacttactgtagtcaaagaggaacatttttaaaaattttaaaatgtggttaaaaaacacataaaagttaccatcctaaccatttttaagtgcactgttcagtaaaggatattgactttgttgtgcaacaggtccctaaaaccttttcattttgcaaaactgaaactatacccattaaacaactccccatcttcctctacctcc

SEQ ID NO: 118944 - DNA, 1060 bp, Homo sapiens
gattgcctgacccaaggaagttgaggctgcagtgagctgagattgcaccactgcactccagcctcagtgataaagcgagaccctgtttgagaaaaaaaacagaaaacgaagatttggccacaaagacagacatacctagaaggcaatgtgcaaacagccacctgatgggggcaggattggggtgatgcgtctgccagctaagggatgcctgaggctaccagaagccagaagcaggtggaacagacccttccccagctccttcagagggagcatggctctgccacagcttgatttcagatttctggcctcaagaactatgagacaataaatttctgttctaagccagctagttcatgtaccttcttacagaagccctaggaagctaatatttactggcaattactcaaatctttttaaacatcatgcaggtcatgaacgtcctgtttgcaaactctgctgaaggggaagaaggtgtgatcactggttgtttatccaaaatccaagatgagcccagttgaaggaggaagcgaaatacacagggcagtggaccctccacatccagaaggtcccagccaaccctaaggaggggagtctcatgggtcttcagggctcttacccaggcttaggaggaagctaccaccaggaacctctggtctcgcttttccctcccactacaagccacttcccctctgggaaccttggtgtccttggttatatggtgagaataacagaatttacctcacagacttgttaaaggatcgaggttacaaaagcattctgcgagaggctgtctttcctcctggaggtggaggcaacagacatggagagcttggggctcccacttggctgggaaatgggggaacattctcccttctctcaaggtcatgaagctgggaaagttctaagcacaaaccgagccctgacaccagttgtggcttccagagaagtgagaatgataataaataagtgtaaaaagagtcaacaacacaccctttaagccaagaaaaaaaatacatcaggagggacagtcacaattgagtagactgagaggaggcgtgag

SEQ ID NO: 118945 - DNA, 1028 bp, Homo sapiens
gcttccttccactctccctcatttagtactctttggcactcgccttgtgccagattggtaagacacccacaggccgcccccctcaccgtgctcatggtctggagtgtgttatgataagggccttgtggaaggacacagtgagctctggaagccactctctgcctggggagcctgggcaggcttcagagatgcaagaccttcagctgaccttaaagtgtgagaaggagtttgctggatagggagggtgggaagagaaggtgggaggagcagctggggccaaggcatccagagagaaaaggcccagctggctgcagtggctgaagctctacaggctgggatggtggggatggtggggatggtggggatgggtgggagctgaggctgggaggtggttggcttggggctggttgcaaagcgcctgttgtgccaaggctgagctcagacttgatccagaaggcagtggggagccacaggaggcttccagcaagggatggggatgtcagatgggcatgggtgctgtggaataccacagggggctcgatgcttctgttgagcctgaggaaatggcccagagagcacccaggagagccctgaagagagagtatagaccagggcttctcaaacttttttttttttttaagacggagtcttgctctgtcacccaggctggagtgcagtggcatgatctcagctcactgcaacctccgcctcctgggctcaagcaattcttctgcctcggcctcctgagtagctgggactacaggtgcccgccaccatgcccggctaattttgtgtattttttagtagagacggggtttcaccgtgttagccaggatgctctccatctgacctcgtgatccgcccaccttggcctcccaaagtgctgggattacaggcatgagccaccgcgcctggccacacccagctaattttttgtatttttagtagagatggggtttcaccatgttggccaggcaggtctcgaactcctgacctcaagtgatccacccgcctctgcctcccaaagt

SEQ ID NO: 118946 - DNA, 1042 bp, Homo sapiens
cccctttctctctccagagcttgggaggagtcagaacattgctctagccgctggtgatctctcctggttgccaaccctcctggccatgactgatctccccactgagatgctcaggtgattaaacgagagcccagttgtggcccgtgacactgtcactggcaagggtaggggtggggacaggggcaggaaaataagttctgagcagcccggaaataatgagtggtgactgcttctcggggctttgcctgccagcagcaccactgtgctctcctggtcatggtgcacggagggccagcaggtgtggggccctgccacaccggaacagcaggccacagcagccatgctgtccctcatacgcacacgccctctatgggctgcagagtgttaccatagcatctcgtaagcctcacttcccaccggtagtaggatattgtcactcatttaacaggtttgaaagccaagctgcccagggaagggacttctcaaaggtcgcgagtccagtgagtggcagaagggggatgtaaagcccagcccctctgatggagtgtccagcgctcgtcccgtgccctccacgcccctgtgtacccagctacttgtttattcatttggtttatacgtttggtcgttcattcatttggtcagtgcacattcttttatggccacacacctgctagggcagtgaataaacggatatggaggcaaatccactggatagtttgtctccaaagagctctcttttttttctttttctttttctttttctttttttttttttttttttgagagacagggtcttgctctgtagttgagactggagtgcagtggtgtgatcatggctcactgcagccttgagtcttgggcttaagtgatcctcctgcctcagcctcctgaatagctgggactacagggagggccaccatgcctggctaattttttaatttttttatggagatgtggtctcgctatattggccaggctggtctcgagctcctgggctcaagcagtcctcctgctcagcctcccaaagtgctgggattacagg

SEQ ID NO: 118947 - DNA, 1020 bp, Homo sapiens
atagacctaaagttattgatacacttatttccttatataaaatgtgtaaatattcatttattcaactatatgaagaaccttagtgcgcagcgctgctaggtagaatcccacttactatttcagatgtaagtactttgtaaacacttagcatacataacctcatttaatacagcaaccctatgaggttcatactgttctagtccctgatttacagatgaagggtatcaggactaagaaataaaatgcttaggttacacagctagaaaatgatggtgtcagatttaaagctatgtccatcttccagaacccttcccaggcttctgacttctgtcttgtgcaacttatatttcagtgtacagttgagtgtggaatgcaaatgctgagaaaataaatatttttttggcgagttctcacttttttgcaatttccttgaatagacttcactataataaattttgaagtggttattttttcccctcttaaattgagcagtgtgttggaagtgtataaatggaaaaatgctgtcatagatgtaattgacatttgattggaatttttggtagagaaattgaattgatgacccagcaaattattattagagaatgagttaaacagacaaccagcttacacttccaggtagaccaccaatttcagagtgttgtttaactttggcagaccattttaccccttagaactcttcaggggtaagctaacatgtggtttaagtgcaatgaagtaatgtgagttataaattatggtatatttagtctcatactggaagagcatgaatataaatctatgatagcatttctgaagtaaagtgcataggaacctccattttatcttctgtggagatcttttttttttttttgagacggagtttcgctcttgttgcccaggctggagtgcagtggcgcgatctcggctcactgcaacctccgccttccagtttcaagcgattctcctgcctcagcctctcgagtagctgggactacaggcacgcgccaccacatccagcga

SEQ ID NO: 118948 - DNA, 2529 bp, Homo sapiens
aggaggctcacttgaacccgggaggtggaggttgcagtgagccaagatcgtgccactgcactccagcctgggcaacagagcgggactctgtctcaaaaaaaaaatttttttttaagtagagacgggagtcttgctatgttgtccaggctgctctcaaactgctgcctcagaggttgagattacagtgttgagatgagttgcctcagtgttgagattacagatgtgagccaccacacctggccccttaactcttttaaaccttttaatataacagtgtaaagggttaatcttgttcattttaataatgaagaaacaggttctgagaggtcaaatagctttcacaagtagtaagtggtagagatttagaaatttatatccacaaccatcttctgtgtaacttaatggagaagtcaagtacacacatgaataatgggtatgcgatatatatagatatatatatatgtgtatatatgtatattgtatatatacatatatatacgtgtgtgtgtgtatatatatatacatatatatatacacacatatatatatatacatatatatatatacacacatatatatacacatatatatatacacacatatatatatatatatatttttttttttttttttttttttttttttgagacaacatatctctgttgcccaggctgaagtgcagtggcgtgatcatagttcattgcaacctcaaactcctgggctcaagtgatcctcccacctcagcctcctaagtggctaggactagaagtgcctggctaatttttgtctgtttgtttttgagacggaggcttgctctgttgccctggctggggtgcagtggtgcgatctcggctcactgcagcctctgcctcccaggtttaagctattctcttgcctcagcctcctgagtagctgggattacaagtgcctgccaccatgcctggctaatttttgtatttttagtacagacaaggtttccccgtgttggccaggctggtctcgaactcctgacctcaggtgatccacctgcctcggcctcccaaagtgctcggattacaggcgtgagccaccggacctggccagcaggtaacatttattaagtatctactatgccttaggcatggtgttaatgtataactattatgtttaatccttacagcagtttacaaagtaccataggtggtatgcataatgaagcagatctattgatgtatttactcaaggtgattaagctactaggtagtggaattctagtgggtctagatctggacttgatggctgagttcttactaatataccttgctactttggaagaggaatagagtttcaacatgtgttgggcagaatattcaaagctaaagaaatagcttgcacaaggtagggagatgggaaagtgaagtgtctgtggtgatgaactgaagagtattgaaagtggacaataagactagaaaggtaaattaaagccagattttggaggcctttcaaagctgttcacaatgtttaaactttaatctgtagatgaggggagccatcaaaggatttttcaactagggagtgacactaggtttcaggtttgcttcattagcagtatggagtatgtgtttggaatctccacaggggtcagtacagaacaggatgacactgctaggagttggttctcaatatgtttcttcatttggtatattgaaatcagtaaaagtaaaatattttggaaatctcaggtttcctgtatttcaatttttttatgatgttatttggttagaactccccaaggcattttatttcatatcatgtttctcagcccatttgatatcttccaggatttttctacagttctccacttctgtttattttggaaccagttgaatatgaataactattgcagacaattgttttcagctatttcagatgggaaagaataaggacataggttttaaggagagctaatgcaggtatgtggaaggttacttttattggcgttcattttcccaaatttccaaatatagcagactctcctagtgtcttggtttactgcctctaggttgctgtttgaacaactggagaaggatgacatggacagagagaagggggaattaaaggagttatgcaggccagcagaggaagaaatgatcccttttctgcttgcacaggaggaagaaatttatgaccctcatccttttaaatgatagcctgaacgctgggctgtagaatcaaatttataagtcattttgaaaatctttcttttggcttcacctgactatattacctaaaggaaaaaaaaacacatggtgctttttgttcatgtatttaaaacagaacatacagtggtccatttgagggttttttgccagagaatttggcactgttgagaaaacaagagctttgaaaatccaggcaaacatgacttaacttttcaacagcttatggtgagttctgtgatcttgaacaggttctcacttctttgaacctctttcattttctataaaatggagatactggccgggcgcagtggctcacacctgtaatcca

SEQ ID NO: 118949 - DNA, 1008 bp, Homo sapiens
cgtatctactgaaaatataaaaattagccagacatagtggcatgcacctgtaatcccagctactcgggagggtaaggcaggagaatcacttgaattctggaggcggaggttgcagtgagccgagatcgtgccactgcactccaagcctgggcaacagagtgcgactccgtctcaaaataaataaataaaaataaaaatacaaaaaaagttagcccagtgtggtggcacaggcctgtaatcccagctactcaggaggctgaggcatgggaatcacttgaactcaggaggtggaggtaccagtgagccaagatcgtgccactgcactctaacctgggcaacagagccagattctgtctgaaaaaaaaaaaaaaaaaaaaaaaaaaaaaaaaaatctaataatacatgcttgttggaagttagcaacatacaattgtattttaaaaagtaatcaaatcttattttatttccccattctaattccaggtttgttgtttatctttgtgtatttttgtcttctgcatacacagcttaatgtggaagctctcttaaccttaaccttcacttgactgattaattggagcagatatcctccttttcctaaactctattctgtaatatgttcaagcatttctgcaaactctactctgtaatgcactcaagtgtctcaccagtcaagttgtattcctgacaagaggcagttatatttgctcccaaactagtgtgtgctggttatgtttgtcacatgtgtttaattaaacactacataaacctgtaaaataccagtgcaaaaagagttttcatcgatacgaaaactaaattaaaagctttaaacaggctctgtctggggaaattgctaaaaaaaaaaattgttgtttagttaggtgtgggcaagttaactgtaaatgacttagggagaaatcattgagatacaacattgtacacttactgcttggcaagtgtttaaggttgcactacacttaaggaaatcaaatcagtatgggttatgct

SEQ ID NO: 118950 - DNA, 1003 bp, Homo sapiens
agcctgggtgacagagtgagaccctgtctcaaaaaaaaaagtaaaaaatagccaggcacagtggtgcacgcctgtaatcccagcactttgggaggctgaggtgggcagatcacctgaggccaggagtttgagaccagcctggccaacatggtgaaaccccatctctactaaaatacaaaaattagccagatttggtggcgggtgcctgtaatcctagctactcaggaggctgaggcaggagaattgcttgaacctgggaggcagaggttgcagtgagccaaggtcgcactagtgcactccagcctgggtgacagagtgagactccctctcaaaaaactaaaaataaaaactaaagaagttccaaggagtgctagtggattcattccctaaagaaaacgataggcttttatcagaaacttatgttcatgtgagtactttatgttaaaatgaaatatttacataaatattcatttatgtaaaaatgaaaacatgtaaaatgttaaaatgaatatttttattactttgacttcagttaattgattagttatgggtctcattctcattgggtaagagaacttctgtctttgtcttatagagatatgattatattatacttaactctgcatagcataggtaagtagtcatgaagactgactgggtttgtttgattgagacagagttttgctcttgttgcccaggctgcagtgcagtggtgtgatctcagctcactgcaacctccacctcctgggttcaagcaattctcctgcctcagcctcccgagtagctgggattacaggtgtgtgccaccacacccggctaatttttgtatttttagtagagatggggttttgccatgctggccaggctggtcttgaattcctgacctgaggtgatccgcctacctcggcctctcaaagtgctgggattacaggcgtgagccaccgtgcccggcccaaaatatatttttaaaacttaaaatgaacaactcaatcaaaaggtaggg

SEQ ID NO: 118951 - DNA, 3396 bp, Homo sapiens
tgggcaacagaataagactccatctcaagaaaaaaaaaaaaaaaggttaaagttcctgacttaatgaggaaataaaaaaattatatgctgaagttgctaagatctagcttgtgtttgtgaaattgtgaagaaagaaaaagaaattcatagtagttttatggtcacacttctgcaaaaattgcagccacagtgcatgataagtgcatagttaagatggaaaaggcattttttgagtggaagacatgaagagaaatagcttccaatgacagcattcaagttcggtactatacatggtttcaggaatctactagaggtcttggaacatatccctgtggataagaagggactactgtattgccaaccagggaagcttcagtgcttccagagaatttattagggcatcattacataggcacgattgatttgtttggctgcccacatggttgaactcagtcttcaagtcaactgataccaagttgtccaaagttccccaccctaaaccacatggttggtctttctggcatggccggctttcaccctaagactactgggtgttgcagctgcaacctaaaatctagtaacaaagacatgcttatcaggtctgacatagattacctcccaaaagggaaagatcagacatctctttgggtaaggtcaacttttttttactacattgagacaaatatctatttcaaggacagagttaaggagggaatgaattttttaaactgaatatcagtagtctgacaggagttgtattaggatctttatgtgtggccaactcattaaattttcagattaactcagaaatattgttcctttattttgcacatgaggaaactgaggctcatatgtttttttcttctttattttttatttttagagacagggtctcgtttcattgccctggctggtctcgaatttctggtctctgggctcaagcaatcctctcacctcagcctcccaaagtgttaggattacaggtttgagccaccgcgcctgacctgaggctcatacattgagcaacttttcagagagatggagcttggatcagaccgaagtttctctgctgcaagccccttcatcagatgccactcatcaggactgcttcactgcataactccaggggtactgcctacattgtattctctgaggatggcttttcttgggattgtacagtgaagcactttatatcccagccaccctaaataatacatgccatctgaatccaggcagtacgcttgctgcataaatgtagcttccagacaagtttcctcgtctcctctaccatggatgcattctggagtgacaactccagttgcctccaagtacagccggttaacaggcccatgaaggtgcactcctcagtgaccttttggtgtattcatgaccatcctgttttggaataccacgcaatagttgcctcacctcttgttgttggttgatttgagcatcgctgaaactcttgccactccgttttccttctcaggctgctgtacaggacagattgaatgagcaagagggcgtacctagtgttttcaacccacctccatcacgacccctgcaggttaatacagctgaccacaggatctacagctatgttgtctcaagacctcaaccaagggcaagttatttcatagctgggatttcccccttttttatttataagtatatccacttggttatattgatctccctgtgacaggagcaaaacaaatatttagaatgtaaacctgttagttagacttggcccgttgggtgtattattttgccttgattcctcaaggaattgttacagaaactactcattttttttttcttttctttgccagttatttggagagtgttttctgcctcttaagttacaatttgtttactcaagttctttgttgcttcagtttacttaatcttaaaccagttttgaggaagtatatggaatctttgtaggagctttggccacgtctttgaaattagccttgaagggctagtagcaaggaggtggttcacttaaatttgacagacatttaagagtactccaataacctggtatcttgctactagggatccagacatgaataaagagccagtcttcccatttcaaattcaatttctcacagtctattgaaggaagtcagatgtgtacactgataatgaattctaaagaactgcttggactttctttttcttacccctggggttatactcacctcttatacttttatacttgcatttagaatcctaagaaaacactccctttaacattgcagcagttagaatttactccatcatcaagcctttttgtggagtacttgatttttgttgtgttttgttctgtttgagacagggtctcactctgtcgcccagcctggagtgcagtggcatgatcttggctcgctgcagcctagacctcccgggctcaagcagtcctccacctcagcctcctaagtagctgggactacaggtgtgcgccaccatcctggttaatttttgtattttttgtagagatggggtcttgctatgttgcccaggctggtcttgaactcctgagctcaagttatctgcccacctcagcctcccaaagtgctggaattacaggcttgaggcactgtgcctggcctacttgatgttttaaaacatgtttctaagtagtgctctgtggttttctgaagtacagtagcagattcccatgtcagccatggggctccagagcttcctggccacagacacagaaagtgtctcaggttaacacaatgtgacaactatgaaatgctttataaactatagagccctggatgtatgctagttttaataattaataacagcaataataattagcattattactaagataagcagctatatggggatttgtcattgtggttaatataattatttaatgtttatataccaatgtccaaggttagtaatagtgattatctttcttgctatttctatatacattattttaggtttttatgtttgtttgttttgttttgggacagaatctccctctgttgcccaggctggagtgcagtggtgtgatctcagctcactgcaacctcagcttcccaggttcaagcgattctcctgcctcagcctcctgagtagctgggattacaggcgcccaccaccgcgtctggctaatttttgtatttttagtagagacagggtttcaccatgttggccaggctggtctcaaactcctgacctcaagtgatctgcctgccttggcttcccaaattgctgggagtacaagtgtgagccaccacacccagctaatttttgtatttttagtagagacagggttttaccatgttgaccaggctggtctcgaactcctgaccccaggtgatccatccgcctcagcctcccaaagtgttgggattacaggcgtga

SEQ ID NO: 118952 - DNA, 1034 bp, Homo sapiens
caccatgcctggctaatttttgtatttttagtagagatgggatttcaccgtgttggccaggctggtctcaaactcctgacctcaggtgatctgccccactcagcctcccaaagtgctgggattacaggcaggagatacagctctggaccttaaagcagatttaatacaaaaattctgcaaaaaaaaatgatagtaagatgaaataagaccaaagatggtggcacttagaaggatgaggtggccaggaagaaggaactgtactttagaggaacaaatcacatggaaggaccaaaaagagtgagaaaatctgacctagccatttgataaaatattagggattgagagaattgtctctaactttgtttttggactttcaggggctgcttggatggggttattacttgataatgcttccattccggtttacctattacacgatacttgatatatttaggtatgtacctttggatttatgtattagtagaatagtaagactttggagctgaaatttaggccaaaataagctttatgctctatcaatgttgacttaccaatttgtcatgagatggaatacacttcccgaactgtcttttaatacaacatacaagtattttaaattgttgaagcattggcaggcattgtgaaatggaattgtttttaaattagtcttaccttttgtttgcaaaaaccagtctgactatatttatttgtctccccctcccccccccaccatatttgtcacctctacacttcctagttgatgtccacaccctttcctttctaaccactatcatctcctagcttcacactccttagaactttcttcctcaactacttctcctccacctgactactcacaatcccaacaaattctcttgctctgagattacccagtttgcccttgattcctcccacaatagttggacctccctagacactcctgttacaccttttctttctttttctttctttttttgaaacagagtcttgctctgtcgctgtcacccaggctagagtgcagtgccaccatctcg

SEQ ID NO: 118953 - DNA, 1055 bp, Homo sapiens
tggggaacttaaatgttcaagggcatccaggccagcagatggagctgggatatgtagtctgggccttccctggaagtacaggttccctgtacttcccttcaaatatgggacagcctttaccctgcctctagggagcagaggctgaagttgtgggtccagcagctgcataagtacaagggtcagatagtaccttttatattggacccttggtgttttatgaggctgtctacttaatggctttcttggtttagcaacattcttcatgatcactaattgcttagtactctttccatccccattttatttaagaatgaacatgtaaaaatctttaaaatcataatgaaaactaagttgacatctctgtttttttctaaaaaatcaaaaaagctgattgtcctaaattgtgtagatcgtgggaatattgtgtaatgaggaaaaaaaaataaaggctttaagagagaattctaaaatgcttaatttcaaagaaagtagttaaaacatcagtcttctgatgaatttctaaccattcccccacgtatacaacttactacattttgtgcttttaattcgctctggaacgttgttgtcaatgaatttggtttgattactcgggagaaattccaagtagaattgtatacacagggggaatttgttgggataatgaattgactcactttttgttaaggaaaagtatcacagtttaatcaccttgtctgtgctgaaaacgttttaagtaaatgaatattgtttgcttttctagggaaaatatgcacggcatgtattactaattttaatgcagctgtatcatccaaccagcttgtttaatgttaggtaacacattatcctctgtcctgttgccttctctggaaacccaaaggataaataaatggtactatacaaatagggtaggccctttagaaacagatgtgtggtaccattaggtatgtattcttcactttacaagagctgccagtactccacatctgccagggtactgtggagcagttttataacttcctccatggttgccatcaaccataaatcatcaagcaaaa

SEQ ID NO: 118954 - DNA, 1040 bp, Homo sapiens
taaacacgtggctgttgagcacttgaaatgtggctagcattactaaggaactgaattttaattgtatgtaatagatttaaattcagaatagccacatttgactagtggctacagtacttagacggtgccattctagagagtctgggtgcatagcctgacacatgatctttttggatactgtgtcttcccttccaaacccttctagccctaaattgttctacaaaaaatactcaggatttatgtaggccagtgttggaatttataatcccagtagtttgcattcttcctgaacaggcaatagaataacacttgctgctttatggcttttgaaccagactctactctcggatttgatggtccactcacagactgttcacctccctttgttgccgtgcctctggctctgttacaggaatctgtacaaattggcccactcgatatgcactgtagtaagctggattcatgtgatatttattccttcctccccaggtttgctcttcgttttatacggcctgaccctcgcagccgggtcactgaccccgttggggacattgtttcatttatgcactcttttgaagagaaatatgggagggcacaccctgtcttctaccagggaacgtacagccaggtcagtgccataaaccatatagatgccaacttaccgaaatgattctatcctcaaaggagagcacagcccagcactgatcatgtccttcttgtactcaaaaaccttaattagctcttcactgcttataggggtgggtaataaaaaagaccaaaccttttagctggcccctctttgatctaatgctgcccttcttttgaggtcttttctgcataacttattttaccataccctcagttccagctgactcattccctgaacatagtctgtacttgcctacctctgtgcctttgcttttgccggtccatccacgtggaatgccttcctcacatttttgctaattggaatcttgccagtccttcaactagattatgtcacgccccacttacagctatccctgattgttgtgccctgt

SEQ ID NO: 118955 - DNA, 1781 bp, Homo sapiens
aggttgtgaatagaaggaaggtaaggatttttttttaatagaagtttataaaatctcttatttcacaccataaggaaaacataggtaaaactctgttatggtaaaaatcttggtcatttggacaccaatttttttttttttttttttgagaccaagttttactctgtcacccaggttggagtgcagtggtgcgatctcagttcactgcagcctccacctcccgggttcaagcgattctcctgcctcagcctctcgcctatctggaattacaggcgcgtaccaccacaccctgctaatttttgtattttttgtagagatggggtttcattatgttggccaggctggtctcaaacccctgacctcaagtgatccaaccacctccgcctcccaaaagtgctaggattaaaggtggagctaccagcccagcctcaactttctattaataagcttctttggaacagaaaaactaacctttttaagggtggagaaaagttacgtggggagaaaggataaggaaaggattaggcaagagaaaaaaaaatgatgatggagattattatcagtatcatcaggctgagacttgcagccttgtgcccttttaggtttgagcccttgtacagggaaaaactgtgccagattctttatagatcctttttgtaccatcaagtagacattatccttaaactctgcagccttccctggcatcatcacaacaaccacaccgccaccaggaaagcctgtcctattctagtcaagcacctagggataggcatgcaaattgataacaaaaacaaaagattacaaaactgggaggaactgggcatggtggcacactcctgtaatccctgcttctcaggaggctgaggtgggagggtcacttgagcccaggagctggagaccagcctgagcaacatagtgagaccctggctcaaaaaaagaaaagaaagaaactaggaggcggggaaaaagcggagactaaatgatacctctcgtcttccccaaccaggattaaaacagttctctctcactcattgtggaaagtctaagggttgatctttttcaccgtcaagtcctgcccttgatctgttgggtctttttatcagtctcacaggctttacgagagaacacctatccattcctggccatgattatgctgaaggatcgaaggatgactgtggtgggacggctagaaggcctcattcaacctgatgacctcattaaccaactgacatttatcatggatgctaaccagacttacctggtgtcagaacgcctagaaaggtacaagggagttcccttctggaacagagagagaccagttgtaaatttggagggctgacctctggggctctaccaatcctgacttcttctgtgcatcaggccgctattagcttttagctttgcccatttattgtcaaaatatttacatactttgacctaaattactctatatcaggtaatctgttcttagagatgttcaaaataaagacaagggctgggtgcagtggctaacacctgaaatcctagcacgttaggaggctgaggcaggaggattacttgaatccagactgggcagcaaagcgagaccccatctctacaaaaaataagaaaaaattagctaggcatggtggtacatgcctgtagtcccaggtccttgggagcccgaggcaggaggattgcttgaggccaggagttcgaggcagcagtgagctctgattgtgcctctgcactccagcctggatgacagagcaggactctgtctttaaaaaataataaatgaa

SEQ ID NO: 118956 - DNA, 1006 bp, Homo sapiens
gagagaaaataggagatatgccaaatgttataatgttttatctttgattagtgattctctgaatgactctgaaaactctacattttcagatctgctacaatgtgtgtatggatatatatgtgtgtgttttggttttatgagatcagtacaaaaatgcagtcacccaaaatggtatttacttgtaaaatatgatattgatgatcccttcataataacagtactgtgtcacatttgttagaattaggggaaaagttttattttaaaagaggagaggaaagcttgctgtttccttttctgccaaattaaactgagaaaaaaggtggcttattcagattctgccacgctctgcttttggaatcccttatggcagtgtgaaatcgtcatctgctaagaatatcaacatttttacacacacacacacacagaagatttcaatataagaaaacacagaactttgtgagagtgctgtttttcttctcttgcttttgatctattcacagggaagaaagaaaccagacccaagtgctgagacaacagcaggatgaggcctacctggcctctctcagagctgaccaggagaaagaaagaaagaaacgggaggagcgggagcgtaagcggcggaaggaggaggaggtgcaacagcaaaagttggcagaggagagacggcggcaggtaatggacgtgtggctttactccctgtggttcccaaactgccgagactttgccatcttggtcttaagtgtgaaaggaaaaaatgatagccaccttaaacagactaagagggaaaaaaaaaaaggaaaaaggaaagaaaaaattacaacatgttggaattaggggtgatttaaatttttcataccatttaaatattcattcttttttaaataaaaatttaaaaaaagagacgggctttgccatattggccaggctgctctcgaactcctgacctcacatgatctgcctgtcttggccttccaaagtgttgggattacaggcgtgagccaccatg

SEQ ID NO: 118957 - DNA, 3059 bp, Homo sapiens
cccaggcgagtgctgccctgcatcccttcagaggagtggcccaatccccctacgctacaggaggccggactcagccacacagaagttctttttgttcaggacctaactgacgaatgacatttttttcttcctgtcccctcctaccccagtccctaaaagaaatggggaaaaaagaaaacaacagcaagtcagaaaaaaaaaacaagagagagaaattcatattattattattattataatacaatattttttttaaaagactgctgcatccttaggaaggatcagaaaccatgctgcccgtaagagtcacaacctgtgtgtgcgcgcaaggttagcaacaaacgtacccgcttggcaagcccacccttcctgtggcctctgtgcacgcaccttccagtgaacagagactcttcaccttcgacccatccattgtcccagctgggaaggggacattcccactagttctcattcattcttgcttttatgaaaaataaaagtgaaaaacctccatcaaccagctacttgcagcatctcctgaggacttgcttctcctgcctctggggaagagagggaagagaaagcacagagcagagaagcagagatgttccttgaactgcccacaagttttcaataacttttatttctgttttgtaatgaccaaaggaatgaggctgacataggtatatatatatatttttttcctttatttgataaagagccaattctttaaacccatgagtttatgccctgggctccttagcccacaatagtgtaataaaagtgccccgggctggtttgtgcttatttctgccattgtccctctcacgttcccagagaggtcattctttttggtccaactcttgctgtcctttcttaccacctgtgcaccccacttggagcagtgggaggaaatctgggtttgtggccccacaaaggctgtatatgtaaagatacacctatgtatgtggtggaactcacctttacacacaactgcagcttttccttggagtctgtaccaggtggtggttatggggtctgaaccaaaggatagcagctcttcattcctcttctgacatgtgcatgctgctccccccagccctgggctttcctgaattgccaagcctggtgcctttccaaaggactagcagggcctgtggtggagccagcagaaccacaggagagtgccctgcctgtctcagtggaagtgtattattgttttaaggatagaaccagaggccttgaagggagccaagacagaactcccagcctgtgtaatctattggaaggcacattttcatttctgatgcagccaccttctggaggcagcttttatcctttctctctattgctatgttgaagtaatagggttttttttaacctctggatgtctcgtctgtggttgagtttatggtaatgggtacatgggtcaggccatgtattaacagatgccagtgcgctctgacaagtattccaaagtgttctgtagctagactggtgcaggctcgttgtaccactgcaaccgactgacgttactgtagttcctagaatgctgtgagggcggggggttcagatcaacataaagcctaacttgctggagttgtagtctcaaggctttctctcttgcttaactaaaacctaaggaccactgtttttggtagcaattatatggttactatccactgcagtcctcagttgttggggtaaatcccacatggcagagtaaggcaccccacagaaattaacttggagagcctgagaaattcccagtggccttggcatagctgtctagaacaccatctctaggaaaatttaattctgtccctggccagctattgttcttccacttcgttttctgctgtcccaaggccagatgagtggaatcaccatctgactgctgtcaataaaatgtatctggcgtgaacagcaggataacccatgttctccacataaggataaccttacgtgaaaccttcctgctgacaaccatgcagaggaatttttccacttaagtcagagccttcctccccatctggaattcacagctgttccctggcagcacacaggagggtattaaggacctttgtgaggctaggtacactgtccacacctctttggggaagttacgattttttttttccatcataattcagtctcttcttattctacagtgtgcactttatgcctctcgccttttgataatagttgttcagtgaaggaagtcagctgccagaatattaagaagggtctccctttatgtcagtacaactgttagggcggccttcccatttactttaggtttcaagaggattcaccggaagcacatgccccggtctagtcccatttgaaacagttctgctttactgagaccctaggccggtctccttgctgaccctagcgctgctgcctaggtgccatttcctttcctcctcagtcaaatacaggctgcacattttgtcacttaatgccagtacaatctgtgttactcctaaggacttttgggattttgatgagacctgcgagggagaagacactgagaagccagtgatctgcaagcatttgctcttgtttccacatcacctctgggatatttcagctgttgtttccaaatggcaaatcatcaactaaaagcacttgtttcaagttttgttctgcactcccacgactgaagttgtagattgagctgaataaccatgggaagtgaccaagcaaagacactcgattggagtcagttgaatatttgtaccctcagtggagcccttctggtcttttcttccacttctgcagaatttcctctagcaaatacttctttctccttgcttgcctccaccatgatatttgaataagagatggccagaggataacacttgtctcttaaaaactaagctaaaaagaacctagaaccttcaattgagcagttgtgaaaattgctaatggtgccaaggccaagcaaagagtttcagaaaatgactgagaaggagcgataacccccagaatgcaaaatcaggggcatcattatccggtgcttgaacaaggagctccgctctacaactggttttttt

SEQ ID NO: 118958 - DNA, 2878 bp, Homo sapiens
gcggaccaagtccccccaggtggctgcacagatgtggtgggttggggctggtgagagcaacgcctgacgtgcatgttcccacaggccaaccggacgtgtcccatctgccgggccgacgcctccgaggtgcccagggaggctgagtgaggccacgcagccgcctgcccgggagaaccctgcctgaagctctggaaacttgtgggtggggcccagggaggatggggagggagtggcccaggcctgccccttcgctcctgcctgcatttccagagctggtgccagggtcagcccagcgaggagtccctgcaataagcccctgcatttgccaagctccaaagactccctccctagtctgcctgcctgcccgcccgccacggagctgcctgagtgtccctgatcgggtctccctcctgtgcaccctcaggtccctccttttcctgctggcactgagtgccaggggtccgctccctcagtggggccggtggagatccttggccccaggatgggcagacagagcaccatcctgggtcagaaggtctcatgctctgaaatggcgtgccctctgcccaggtggcactgccaggtgcgtagacagacggtgtcacgagccatttcctgagccccagggctgaatcccccctccttgaccccgaacagtgaactcaggcagctggctctgtgttggctgctgtgagggctgagtctggttccctaggggaccctcatcccaggaacaacattccagccccaccctcaggctggagggcgtcccagcctaatcccgagctggggcacacgtatcctgaggggcttgggccatacggggagagggagccctgtgttcccggtggttgtccctcccagggatgcagccagacccgtgcccaatctcctctccctctgttgttttgcatgaacgtgaggagcagcagtttttgttcattcatttggcccaaaatcacgtgtaggatttggggatgtggatatttaagacaatttcttttttcttttggtttaataggggcgggtatagggaccaactgggaccgagtgcccagggggccgagcacggtcatgctggccggcctgcatgcatgcgtgtgccgggctgggctgggcggccggcggtcgtggggcagggttgggggtctgtgctcagctgataactgccatgcactgtactgcacacgtccctagagcctaccgggacccgacgcttttcagggcatttctccctccagccagggcccaactcccacctgcctgggcgaatctcctccaaggaagtcccaggaggatggggaccaggaaggctgtggacccccatctccagggggccttcccagcctgatccctgtcctccaagttctggaggaggccgctgtagggtctggctgagcttcccacccactttccctggtcccaatcctttcttgtcctatacccagctggggttgctgccctgaacgaactgcgtgtggggccggcacatcctagcaggcagcccctggcgcctgctgcctcagggatgctccaaccaccctcgttctcctcgcagtggccctggctcccacctcccgccccagcctgccgtggggcccgtcagcctggtcccacccccatggagaacccaaagtcttactgtatataactccaggtgacgtttctatatttatagcagtgttgaaaacccacgtgttttacacagaaccaccctctccaacccctcccttcccgaccccaacaaaacgttttcaaaccccttacagttcctggggcaggcggaaacaggctcacagattgtgtgtcggctgcagcagtgattccaacaagcagctattgggggggaaacacagcatttaaaaagatcatcattaaaaaacaagatttatacaacaattacttaggatgtttgtgatctgccgaccttgctatagatgccatgttaccaatgatttcctgtggtgggggcttgccattgtttactctcttatttaccaacttctggcctaggcatgacagtgggcaccttcccccagccctggctgggcccagcgcctgtgttctgtgttagaaaggttttatatatatataaaattacatatatatgtagaaatatatgtaattttgggggccctgttccttgcacattttacagttacctcatttttcccatgtatgtatttgagaaaatgctaatatatagagaaaaaaatggttcttaaagcttaaatgtgtggttttttccattccatgggattcacattggtttgtagcatttaacataactagtatgttgtattatatatatgtgtatactgattgaaatttttaacagatttgtactttttttaaaatgaaagttgctagttctgcttgaccaagtagtgcaatcattattttttttaatattgttgctgatttcagagggatattcactaataaatgtatgatgtataccaacgaccgcccacgctgcctttggctgcccgtgtctttttggtgggaggtgggatggggatgaggcttaacacctgtaatcccagcactttgggaggccgaggctggtggatcacttaaggtgaggtgttcgataccagcctgcccaacatggtgaaaccccttctctactaaaaacacagaaaaattaggccgggcgtagtggctcatgcatgtaatcccagccggtggctcatgcctgtaatcccagcactttgggaggctgaggtgggcggatcatgaggtcaggagattgagaccgttctggctaacacggtgaaaccttgtctctactaaaaatacaaaaaaaaattagccgggcgtggtggcgggcacctgtagtcccagctactcgggaggttgaggcaggagaatggcg

SEQ ID NO: 118959 - DNA, 1004 bp, Homo sapiens
acctgcacctggcccctcttgcagccatattctcacatgatgccacggagactgagcacccagagataccgcctgcagcagccactgcccccgccgcccccacccccacccccaccaccctactaccccagcttcctgccctacttcctgtaagtatccgcacatccgccccaggtccctgatgccctgttctcctggaacctccagtggttagacctaaacacagctccaggggccccagggcctctgaagccacctggcgttccccccttaacctgacaggcacgccagctgggctcccttccccgctgcaacgttctgggctctgtttgcaaggagggagtcaggagagcggctctgtgtgccccactcctgaccttgaccctgggcccccacacttgtctctctctagctcgatgctgccaatgtcaccaacagcaatggggcccaccatcagcctggacctggacgtggatgatgtggagatggagaactatgaggtcccatggagccccatgctgggaggtggggtttgggagacctgcagccctgggcgccgctgaccccgtctcctgcccgcatgcaggccctcctgaacctggccgagcggctgggagatgccaagccccggggtctcaccaaagcagacatagagcagctcccgtcgtaccgctttaacccggacagccatcagtcggagcagacgctgtgagtaccctgccccacctcccacccctctgaacacagctggctgccgtgggacgcccctctcaggggagtcacactccactgagccttcccatggccctcagcgtggaggtgacgctccgcgcccctccacaggtgtgtggtctgcttcagtgacttcgaggcgcggcagctgctccgagtcctcccctgcaaccatgagttccacaccaagtgtgttgacaagtggttgaaggtaacactgcccaggtctgctcctgggtattcctcatgcagtgacggggggatgggctggc

SEQ ID NO: 118960 - DNA, 1776 bp, Homo sapiens
ggagtcaacgtgtggccgggcggccaaaggtgagtcggtgccagggcccccaacttcctattcccccacccatggaccttctgttcccctcccctgggaatgggggccgtgatctaggtggctccgtaggggttaatcacgggcggtccagactgcgggcagcgagaccccagggatcaggaaccccccccaaggccccccgtggccgggccgtatctcccctctcctgcagctgagcgctgcggttggagaggaaggagccgcccccctccccctgcggccgccacttcctttgttgttgcttttgtctcacgccgagcacatggtccgggatcctcggctcttaaagtcgcagcgttctggcccctgcgctgcagtctcgcctcccgcccccggtgtccctccgagagcggcgcaaaagagtaggaagcggacgagggaggcccctctcggggctgtgtccgcgcctcggccccccagcactatgcctggggaggggtggctgggtaagcttcccagagccccacagcgtgcacttggcccgcgttggggagcccccccttccccaggaccctggtttcctcccccactagtgtgaccacctggtttcttctggactcttctggttttatttgggcgctgtgggaaggaaagatttccacccccattttatagctgtgccaactgaggcgctcagaagcaaagggatttccttgaccaaggtcactagggagtcttctctcctagtctggtggtccggccctcagcggcctccaggcaccacacgttgggaagctctgcttgcgctgggcagagcctgcttgtttcgggtggggtgtggggaagtaggaaggggggcttctcttcctggctgagtctgctcatgcccccagggtctgactttgtttttatctgcaaaagggagtgtctcttcctgcaaacagatccctggggctcttagaccaaggtcagggtaggtgcttggggcactggacttaaggggttggccggctctcatgggtgggtgtggggggttatgttaactgcaaaatgcattgcgtgcctggggcggacggggctcagcgacgggactctcaagacccgttcacacagagctccgtgataggacagcatggagatgtggacgggcagagcagttgttaggggaggccacctggccacccttgctatttgaccttgagcaagttgctagctccaactctgggccttgcttgcttctctgtactacagagctaaagatgggtgcctgaaagagagtgctctcccagcctcctgtatggcttggagactcgggattaggtgatttcctccagctactgatgccacaggagttatggcttgggggagtttgggcctaggaggccaactaggaccaattccgttctctctggtcttgtggcctagagtaacttacttcctttctctcggctccagttttctcagccatgaagtgggtgtaacccttctacgccacccctgttcctggcagggcttaaagaaccaggatccactcttaccagctgaggtattcccctagagtggcatatctgcctgctgccccggaagtggcacccttcaagctctgcttgaggttggaaatggaggtcagcgtgtcgtattcgctaataatgatcattcacacccaagctaagttcaaactttacaagttgcttctgctgttgccttggagcagtccttgatgggaaactgggaggtagttattgggctgttcccattttacagatgaagatactg

SEQ ID NO: 118961 - DNA, 1066 bp, Homo sapiens
actgtgatggatagagtttggcgttccagggagcatcgatagcactgcatcatgaccttgctcttgtgttgcttagagatctgccgacagccggctcagttccatcttcagtcattgtgttgcacagtgatacgatcattgctggtctaaacattgccataaacatgtctgttccccaagctgaaagggggtttctgattctaagggaacaaaaggttttctggcttaaaagacttaagacatagtctttataatagctttctttaaaaatttcagtgggttataatgcatagggtttttaaaaaagagctaatgtgcaatatatacaatagtctatcctactgacccaacttctcccttccagttctccctaaggacaattgttaatcagtttcctgtatacccttccagaaatatatgcagatgtggcatatgtccaattaaagaaacctgatacatactgttagaactgttcagcatcttggtttcaatttttatataaaatttaggattacgaaatataccaaagcagcatagaaaatgagccccccatccccctgccccatggcccaccacacaggttaacagatgttaacattttgcattggcgccttgtttatggctgtcttggagatagccccgtgtcgcctccagctgcctctttgtggtaactgcccaagagtcgttattgattatatgcatgcacccaatattcattattcgacctgttccagctcttggatatttagcaaattactgattttctgcttatataattgtggtggaggtaataccccattttgtataaattttgcccgggtgggtgggcttcgaggcaaaggagaacgaggctcggctttggattaggttcacactcctgctccgccacacttctagttgtgtgatctggagtaagggaaggccctcactttccccatctgtaaaatgaactggctatagtaatccctccgtctcatagctgctgagaggaatagaaaactaaagtatagacgcttcactgggcttagttcccagtttccctggctagggaggtctccgcggggac

SEQ ID NO: 118962 - DNA, 1032 bp, Homo sapiens
ttcagcaaccacggggcccctgtgttggcattcatggttcacaaaccacacttaatgtgagatgagaatgggatcccaggtttgccccttgatggctgcatgacactgggtgagtcctgtcacctctcacctcatctgtaaaatggggccaatgctggtggccagctcttagaacatgatgaggagaggatcaggataggacttgcccagagcttgtagaagactctaggacccccatttcccccatagaacctcacagcagatgccagagcagaggtgggccactcccatctgaggtttcacacttctgggctctgtggcgagggtctgcccctccatggctctgaaccgctttcctctgtgcgatgaaagtaaacgacgtctccctttgagggcttggggtacggggagaacaaggctcgcacagtaggtgtgcaggccacgtccccacagcagggttccaaagcctaagatccatcagtgaccctgaggagggattcgaagaaaagttcagatttcagatttctggcttcatttgaaaaactggaaaattctgggaaaattgtgcctcccttcccacttgctccagagtgatttcacatccacgcgtgaaggtttttcaggttggtggagatgtgttattggtctctggcgctgaggggaaactcaaatgactggggatttactgagggtttcctggggcagggacagggcagcggtttcctggtcctgcaggagaagaggcagatccagagccccattcctgggcatccgccacccagcgtgagccaggtcctggactgggtgttgtgggccctgctgggagcaggggcagcagtcacatggagatggtcttctgctctcatgatgcaatgtgatggtaatcctaacactgaggaagccagcgcaagccggcagggcagggaaggcaccatccaagggagtggtctttgagctagtcccaaagcataagcaggattttgcccagtaagtaggggatattgaggacatattaagcagggagaatgccac

SEQ ID NO: 118963 - DNA, 1046 bp, Homo sapiens
tcggtcaggtgtagaggctcagtatactggcgccgtcgctacccccgctgacacagctgctattgctccttggcaggagtgtcttggccaccgtctgctccaatttggagttccaggaaggggcccctgatgtccatcccaaggctagcagagggttcagtcctccaggctgtgtcctgtggggaagaagcactgggatgtgttcttgggaagatggaaaggaccccggatcccgttcacagcccttgtgcctcttcctctctccgctggaaaggccctggctaccggggaaggatgaggggggagggtcctggggctgctcccagccctgagctctttgttgctgcccttgcaggtgctgggagccctgttcctggctatcggcctctgggcctggggtgagaaggtaaggcagcgggcgggcgtggagctggtatgggacgaggtggtgggaaggtcagctccccacacctgcctctgctgcccggcacagggcgttctctcgaacatctcagcgctgacagatctgggaggccttgaccccgtgtggctgtttgtggtagttggaggcgtcatgtcggtgctgggctttgctggctgcattggggccctccgggagaacaccttcctgctcaagtttgtgagtgctgccctcaagatcccctgggaacccccatctcctcccatccagttcttgcaatacagttggagcttaatgatgggtagctttattattatgctataatcgtcatcgttagattcatgttgtctatatttactaggatcctttccgtggtatggtaagtgaccgagacctggtggcccaagcataaaatatttattgactcaaataagaaaagtccagggttgtgctggctgccggtgcattttgatccaggggctgccacagtttcacttggcctggtttctccctgtttctcgggctccccccgtttggctccattcccaggtggcaggaggctcaggaacagagccggcttccccatgccctcccaggaactcctgctggaggctgagagctctct

SEQ ID NO: 118964 - DNA, 1129 bp, Homo sapiens
cgcccagcgtgctggaacttttctaaggaaggggtgctccttgctcactgtgagagtgagcaggctatgagctagagctactggtggctgccatgtggtgagagcccgcctgtgaggaaaaccagcagagaggagagcagagccaaagcacggagaataagagcagtcctaacaagcccctggatccagctgggcctgaagccagctccacttctggacttttcagtaatcgatgccaatacattgccttttataacagagcctgagttgggttctgtcatttgcaatcaaggagttgtatgtgctgtattcctgaaagggacaaatatgtgcctgatacacagtaggctctcaatacatgctgaagataaggataagacctttgtgagaacagccagtctcaaaacatattctatgatttcctgggcataacactccacacacggcagaattatagagatggcaagcaggctggtggctgctgggagctagggctggtggagggtggaggtgggtgtgacatcttcacggggatggaacaggtctagatcttgagtgctgtggtggcttcatgatctccacatgtgacaaaatgacgtagagccgtatgcataccctgtgccaatgtgggtttcctggtctggtattgtactagagttatgtaagatagaaccactgggagaaacccagtgcagggtacacggcacctctctgtactatttttgcaagttcctgtgaatctgtaataatttcaaaacaaaaagttacaaagaagaagttctttgtaggcgtaccacccagcagctcttggaccccaaaaggcaaatcatgggcattgaaatcagatggaccagagctcaaatctcagcatggctgttcacctgctaagtggccttgggtcagtcacgtctcttctcctaccctcagcgttctcatccgtggagtggggctcactggggcttatgggcccgccccatggggtggtgatgacagaggatacagtcaagaccgtgctctgtctcgctcaggacctggctgtgggaggcgataagcttcagcagcaggccatcaatacagggcttggcagggggccttgcgcggacctggcaaggtcttgggttctgagcca

SEQ ID NO: 118965 - DNA, 1069 bp, Homo sapiens
cacgcacacactgggcctgggccagggccccagagctcctgcctgagctggaccttatgcaaacatttctgtgcctgctgggtaggggcacgtctgaggggccctgctccaagcctgcaggaccgagggccacagccggacagggggtagcccctggattcaggcacacgaccaccacacgagcacgtgccacgcatgcctcgtgtgctcatctcacacacacccccctcccgggtcacgcagacaccccccaaccacacacatctcatgctgtacacctgaggctgctcacgtctcacgcccagtgttggtgcacatttgcctctcacatgctgccctctccacccacccagggacaccccacggctcctccctgcccctgcccctcccccagccttgaggtgccctgcccggcggggcctgtgaatatgcaatgggagtcccaggctgtacagtggtgagtgtgtgtgtggcgtggcgtgcccgtccccagggctggctggtgccccacgcggggcctgtcatgtgaagctcgtgtcctgactttgtcttaagtgcattcacgcacttactcttggccttatgtacacagccttgcccggccgccggggcacataggggttttatcgggcgtgaatgtaaataaattatatatatatattgctaacctgagtgctacttctctcagggaaagccagggagcaaggccaaatggccgcagaggggtcacacatgggatgtcccaggagtcctgggtggctgggcctggctgggaaacaggcagaccccgacccggctccagcaaggctgcggcggagacctcctcagcctggaggtttcctcagacacgagtcaactgcgcaaggcggcaggcaacagcggtgaccagggccgcacctttgccggacccatcctctgactgcaggaacgtgaccacacagcgaggggccagctcccgcactgtggccgccaccaggctggagaagctgtgagaggagggctgaggtgagcccaggccaccagccccacctggccacacctccctccccagcccgcacacccagactca

SEQ ID NO: 118966 - DNA, 1025 bp, Homo sapiens
gcgattctcctgcctcagcctcccaagtagctgggattacaggcatgtgccaccatgccggctaattttgtatttttagtagagacggggtttcaccatgttgaccagactggtcttgaactcttgacctcaggtgatccacctgcctcggcctcccaaagtgctgggattacaggcgtgagccaccgcgcccggccataggcaagtcctttatctccattagccttcagggggtggggaggattagactttattttcctccattttactgatgaggaaacagagactaagagatatgaaatggcttacacaagagtttcctgctcaagggtgtggtatgagacagcttctaaatcttggtcaagatgacagaaaaagaagaaactcacttctgagcaagcctcaggcatgagtttggcactaaaatcgtctgtgtgcctgattgtagcggctacattgagggagacatgcaggaggaactggagaggcgggaaaggaaaggtctcaagaacacaacttttgaccagataaccctgagaaagtccactctagactgtgtcacccacttggggcgggagcggcacctgtgtggcaaggtggcaaaaatgacatgtttggagctgaaacacctcagctcaagctcctgtcatgtcttaaactcaagtcataacacttctctatatccctcttcatcacctgtaagatgatcagcccaaccttgcagttgtttggagcatgaaaggagatcgttaccagctcagatatgaaaagctcagtggaaaggggctgcatgggtgagagcccagggccccatggcagcttcagtcacgctgctcttgaaggccttagacaagcatgaaacaggaacccagtgctgaacttaccagctctgagctgtctgagggcccgggcaagccctcctcagagcaactcagggtttcttccccctgccgcaaccctgaagacccaatggagtccatgagcttccacagtggaaggtggccacctatgggagaaaagggaca

SEQ ID NO: 118967 - DNA, 1025 bp, Homo sapiens
tagtgaggaaagactggttgtattaactgttctgagccacagttttctcactgcagaacttttcagagttttgtaaagattggagctcatgtaggcactcggatggctatcattactatatttcatagaggacctcacttgagtgtgtgtcataccagatagaattttgcttgggaaagtgtaaatccctcccttgagtgctgcaagctgggatagtacacaaaaaccttttcttggtgtggagtagatctttagatctcatggcttagcatacagcggaatatcttgtggcggacagaatattgtcaaaacatttgttttggtgcaaatgttacaatcgctattctcaattctagaaagattgagacttcccaaacaatgcacttcttccagtgggataaggttttaaactttgcttcttcctgtgcattttgtcttttatattcagagtctactggcagctaactatgtgtatatatatatattttttatattaaaagtattgactcggagacaaaaagaggccaagaccaagagtgacagtgggacagctgcccagacttctctagacattgacaagtaagtaggtatgctgcattcacggagctcttgtataacataccatcgtttggactgaataaaaagaccaattcctatcttaccctgtatttctttggcctgccaattgcttcattgcttggatgcctgaattttcttttcttttcttttcttttcttttcttttcttttcttttcttttcttttcttttcttttcttctctctctctcttttttttttttgagatgaagtttcactcttcttgcccaggctggagtgcaatggcgtaatctcagctcaccataacctccgcctcctgggttcaagcgattctcctgtctcagcctcccaagtagctgggattacaggcatgcgccaccacgcccggctaattttgtatttttagtagaggcggggtttctccatgttggtcaggctgtctcgaactcctgacctcaggtgattgg

SEQ ID NO: 118968 - DNA, 1315 bp, Homo sapiens
aggaattcttattatagatatgcctgagagttaacagagaaggaccaaggcctaaaataggcttgacttgtgactaagcaaaaatgtgtaagacctcagtatctctaagtaaaacttatttcttaaattagacaaagttgggacttgttctgttctatatatgcctacctaaatgtaatttgtaccctgtccagtcttctcacttatattaatgtggcctttgtggtacccaggataattaagtatattgctgcattgctactggtacgtagctactgagatattgacaattgtgaaatagcctaggtttcatagaagtaataaggattttggggacagactgacctgtggggatatatacaaatcaaatatgggccctgatctcactgacatttcagttcaattaggtagataagacatgaacatgcataactgtaatgcaaggtcagaactactaagggacatacaaataaaaatactgtagtgtttcagaggaaatacaattagagattgagaggggagggtattaatgtaagagaacggtaggctaaaatcacataaatagaaaaatgtgaagagtgtgtaggaaagaacaagcaattcagtgtagttatagtgtgggcattatgaaaggaaatggtgggcagttggagaatgacaaatgtaacttgaatcatgtgggttaacatttgtatgaattatgtgggtctacattatggaacagcatttttttcaactcaaataattattggtgagtgttactaaaataattatttgtgtgtttaccccccttgtggtatataggactcttggatgcaggtgttggaaatatgatttcagtaaccttaagcaaaaaaaccaagttaatgtgtgtaataattggcaagtctggttagggcttaggctgagctggatctgggagctcagataatgtctctccatctttgaatccagtggtctctgttcaacagatggcctcttcttaagggacaagcaaaatggctgccagcagccatagcttttaatggaaagaaagaatttttttttccctcagaccataggttagtctagaggaagactctgataggcctttcttgattgaagtgtccacttacggtgtagtcactgtaaccaagtagatgggtacaagtcagaacaagtaaaggaaaacccttttactaactatgagaaattctgttagtatctgtcagaaaattctgtaagtcacaataacagaaaacatcattaacagtgggtttaacacgtgggatttctttctcctcacgtcacaagtccagagtgaggcagttggctc

SEQ ID NO: 118969 - DNA, 1043 bp, Homo sapiens
agtggtgcgatcttggctcactgaaagctccgcctcctgggttcacaccattctcctgcctcagcctcccgagtagctgggactacaggtgcctgccaccatgcccagctaatttttgtattttttttttagtagagatggggtttcaccatattagccatgatggtctccatctcctgacctcgtgatccacctgcctcggcctcccaaagtgttgggattacaggtgtaagccaccacgcccagcctgcacctggcccatcttttaacgtattaacttattcttttacataggtaggctagaaatcagtgcagtgcagtggaccttgcatttcaacttatgtattcaaatattgagattcctgtggaacttgaactaagttccacgtttttcattcagaataaaccccttgtaggttttttccctctttttgtagtttgttttaatagaaattttacctagagacagcagctgaaaaatatcactaatttacattcatgtcctacatatcatatctctgctgagttaccgaggagctgttggtttatctctttaagagtgtaccagaggctgggcgcggtggttcatgcctgtaatccctttgggaggctgaggcgggtgggtcacctgaggtcaggagttcgagaccagcctggtcaacgtggtgaaaccctgtctctactaaaaatacaaaaaattaaccaggcgtggtgccgggctcctgtaatcccagctactcaggaggctgagtcaggagaattgcttgaacccgggaggcagaggttgtaatgagccgagatcgtgccattgcactccagcctgggcaacaagagtgaaacttcatctcaaaaaaaaaaaagtctgtaccaaaatccctacttttcagacagcataagacattgatcaagaaaatcttgttaatcacagcccttgaaataccacctctgatttggcctgtttatgattttaaactctaaatatagtcatgtcagcacagctctctgtggtctaacatgctgaatgtaaacctaggtaattggaa

SEQ ID NO: 118970 - DNA, 1003 bp, Homo sapiens
cgtgtacaaaaggagtgtgctaataactttgtaagattaaatgagtaatacatatagagtgtttaatacatagttgtcagtataaatatacttacatataaatgagtaatatataaacttactgataaacgagtaatacatgtagagtgtttaatacatagttggcagtataaggcactgaataagtattgactctatcagtagtatctctcaatctttactcctgaatttgataagctgttgttgtctctttgaaagtaagtgaaatatggggtggagtctcttgcagttcgttgtagggaatgatatgaactaaagctgttatgattgctgtttgtcatgttcttcaggttggtaacaaggaagatgctgagaaggaagtagctatttctaccttctcatccagtaaccaggtatcctgcccgctatgtgaccaatgctttccacccacaaagattgaacgacatgccatgtactgcaatggtctgatggaggaagatacaggtaaagacccagcaggacagccaaactcttacttttttgtgtggtggttttataatcctatacattacaatgcagggaaaaaacatagctgttcttcaaagttaaagttgttgttggtcttgggttttttctatctagttatttttctagtacttttatgttcatcattacttttagcaggtattttgtcctgttacacatgcctcaggagaaggggaagggaaaagtctttcattttttaatgtttttgtttgtttgtttgttctgtttgttttttgagccagagtctctgtcacccatgctggattgcagtggcgcgatcttggctttctgcaacctccgcctcccaggttcaaacgattctcacgccttagcctcccaagtagctgggactacaggcttgcgccaccatgcctggctaattttttttgtactttttttcagtagagacagggtttcgccatgttggccaggctgctctcgaactcatgacctcaag

SEQ ID NO: 118971 - DNA, 1017 bp, Homo sapiens
cctcatgatccacccgccttggcctcccaaagtgctgggattacaggcgtgagccaccgtgcctggccgaaaaatagttgtataatattttaaaagaagtagaaggcgagcggggagggatagcattaggagatacacctaatgtaaatgatgagttaatgggtgcagcacaccaacatggcacatgtatacatatgtaacaaaccagcacattgtgcacatgtaccctagaacttaaaaaatatatatatataaaagaagtagaagcaactctgcaaagaaatccctgactgcatggtcctaataaaagctgctttgcttgcctttttcccccttgaggttcttccctagtagttaatacttaaatagactttttaaatgatgctgggaaaaaataccttattttaacataaaaatgttcagaaaccttcagggttgcctatgaacagtggttggaagtgggcttatattcataataagacaagtgactactccctcttgaatacattaatagttaaaggtacattctctgcattgtatagagctgtggtgaatacaaaggagtatagtgctcaatgtgggcaccagtgacacatttgcgtcatgtaacatttctgtgcttagtgaactttagaaggccaagtaactgcccattcaccaccaactttaagtaattaaagactacttgcaaattttagggtatattgatcccctttacccccctgccatccttctgctcaaatggctttgctatttgtcttttcttttttgaggccgggtctccctctgttgcctaggctggagtgcagtggtaggatctcggctcactggaacctccacctcttgggttcaagcgattatcctgcctcaaccacctaagtagctgggactacagacatgcgccaccacccctggctaatttttgtattttcagtagagacagggttttgccacattagccaggctggtctcaaactcttgacctcaagtgatccattcggcttggcctcccaaagt

SEQ ID NO: 118972 - DNA, 1049 bp, Homo sapiens
ccatgcccagctaatttttgtattttagtagagatgggattttaccctgatggccaggctggtctcaaactcctgacctcaggtgatccactaggcctcccaaagtgctgggattacaggcgtgagccactgtgcccggcctgggatttttaaaaaagtttttacaatagaagttagatcctctccctggtctctgcgctgcaggtaactgggtaaatattctgccttcatgaatcatgcacactgcctggttctctggaacctgatctgtcacaattgaccaagattccctaatgccagtggtggtaggaaagatgatgacactccctgctgcagagtgactgacgacagatcctgctccataatgtcaaaatggcctctggattgttttctcaggaagaaacagaatcttctaaatgggaatgagggaatagaatattattaccatagtcatcctaacatacagaagaagcccttagttaaggctgatttcatacccatccatgactgcagacgagactgttctttgggtcaaagagcatgaaccctgtttagaatttatggtgtacacgtctgtgctactatatatcaaatagatggaatcataatagcctttctcacattgaatgtcctctttttggtgttgctgtttgctgatatctgtggatgtctctaaacagtcttagaagtttgcattaaaagggtgcagcacaccaacatggcacatgtatacatatgtaacaaacctgcacattgtgcacatgtaccctaaaacttaaagtataataataataaaatttaaaaaaataaataaataaatttttttaaaaaggggaaaactggagttttaactactagaccaagattacacattaaaagaatgactacataaataaatatagtaggaaaatattttaaaaaaaagtttccattaaaagaagttagatatactgtagattttaaatcatgtactagttacaagtcacttattagacagaatggaacattttatgtgcacaaagatagtataaagggtgtggactcttgcc

SEQ ID NO: 118973 - DNA, 2097 bp, Homo sapiens
caaccttgaactcctgacctcaagtgatcctcccgcctcgtcttcccaaagcattgggattgcaggcatgagtgactgtgcccagccaaactttttaaaaataaaagactagataggaaatattttaggccctgtgggccgtatagtctgttgagactatttggttcggccattttagtgcaaaaacagccatagacagtacatagatgaatgagcatggctgtgttccaataaaaccttacttagaaaaataggcagctgacaggatttggcccatgagctgtatctagttttctggcccctgaactagactacaagggaccccatcttagattttcatattactgatagcgagtataatgcctgggacttgatgttcaattatttgttgaattaatagatgctgcttaaagaatatattaaagaaaggcatatctttgtctagaatgtatattctatttctggtcccaatttctgtttttgctaatcatctctttaacctcagcactaacattggcaggttcttgttttctgtcaaatcagtatactttaaaactagaattacagtggaaataagccagttgatcagttggtcaatgaataaacaaattgtgatatatctatacaatggaatgctactcagcagcaaaaagtatgaactattgatattatgtgacgacatgggtccatctcagacacattatactaagtaaaagaagctggacacaaaagacatgtgattctatttatatgagagacaaaattataggaacataaagtaaactggtcattataaagagttcattgcagtgaccaaagaggtaggagattgactgcagaggggtacagagaactttttggggtgttggaaatgttttatatcttgattatcgtagaggttacatggtataaatggtagtatataaatggtatacatttgtcaaaacacattaaactgtatactgaaaatttatgaattctgttatttgtaaattatgcctcagtaaagctttaagaagaaacaaactagatctattaatatattgccaccacagtattgtcatatcctaaactttaggtgaaaataggcatgtttgtttttttaattatgaaaacacaaaatgaaaattaatgggattttaacttttttaaattacagagacccagctaagttcctctgaaacttttgaccttgaaagagaagtctctccaggtagcagagatatcttggatggagtcagaataataatggcagataaggaggtgaatattttcctctatattttttctcagtggtttctttccgttggcagtcctctctctgatgcaacgttgacattggctgaaaagatttaggtggcagggggttttagttttgggggcccttatgttagggagagatttttatagttaagattagttcagcattgtttctaaaaataacagtagttaccatttcttgagtacttttgtatgcattattatttctattagagatggggaaacagaggcttaggatgtttaatttgctctaaatcatactactaataatggtagaaatataatttgaacacgggtttgaatccaaagttacagggcattttttattatgtaccaataagtaacagagacaaacagtcttggaaaaaattactatatttatattatgatgtatacataacttccagccctaatttgatcagaaatgcaaagtcaagatagctgtctgataaaataaatctatttgcatcattacctttcctcactttacatatctggcagtaaccataaagctgattgatacaggttcatacttctgattaagattctcggtgtgtatatttttccttttcttttcttttttttgggatggagtttcactctgttgcccaggctgcagtggcagtggcacgatctcggctcactgcaacctctgccttcctggtccaagtgtttctcctgcctcagccacccgagtagctgggattacaggtgcacgacaccatgctcagctaatttttatatttttagtagagacggggtttcaccacgttggccaggctggtattgaactcctgacctcaagtgatctgccca

SEQ ID NO: 118974 - DNA, 1019 bp, Homo sapiens
tcataaaggtctttatttattttaaaaatcggactatgttggcttttttcttttttttttttttttgagacagagttttgcccaggctggagtgcagtggcgcagtcatggctcgctgactgtaaccttgaactccttggctcaaatgatcctcactcctcagcctcccgagtagctaggactacaggcatgtgccaccacacctaactaattttaaaaattattattattatttttttttagtagagacgaggtcttggtgtgtttcccaggctgaccttaaactcctgagctcaagtaatcctcccgctttggcttcctaaagtgctggggattaggcatgaaccatcgtgctcagcctatgttggtttttattgaaagtggctccttaattcatttgaaatgtgtttggattactgcctaacaatacccactaagagactacactaccgagtgctcagattttggcaggagcactcaagaatactgtgctacctttgtgaaaagaaagctttccccctctgtctgggactactgacttcctagaaggaaatcactcagtctgtttaggatgatggcgtgtgacatcaccatgggatcttgcaggaggaacctgcaaatatattgatcttgaaaggcctagttaatgagagggaaaagcaggcccttcatactgaggttagatagcttttatgatcatgacttgctgtcattagcctgctaattaagtccaactgtttgctgacataaaccacttctaaatgagattgcaaaaggtattcattacattaatgttccttttgctaagaaagtataactgcttcaccatgaagccaaactcctgggtttctttttaaatatataatttagaagttatatatataaattatctgaaaaaatttgttccaaatgggtgaaacacatatttagtgtagtagactgttacctgtttacttttgtttcatatttctgacagttcaggagtctaatatttaagattacaatatctttttagtgtt

SEQ ID NO: 118975 - DNA, 1030 bp, Homo sapiens
attttcctgctgttaagacagttttggaagtggttttaacagagtatgcctttactccctataggcctctctgctttattgtggtgagccttgtgcagagcagatgtaggttttaataaatgattatacactttgtcaccaggagagagttggaatcgcaggcaatgtggtttgacttcaaattgattagcccattttataaatgtcagaaaattgttttgtgatggaccctttgaatagagcactaatgttacatgcagagtaaactgtctggctggggtttataacaaatgctatgagatgttttatttagagataaatcacttgtggttttctatcaggatttagttatttatcatgagttcagttgtagctattctgtcttctctgtggttcttggttgatgtgaggatttttgttttcaagcatcctcttgcatacttgatcaaactaatcgtaaagccctgtgaagcatgagggggctagctcagatgctcagatcagccatgtattcctatgtcaggaagagattgcactccatgagcagtcagggaaaaccagaaggttggatgaaggaagccattcataattaagtttttgttagaaaagagattcaatttatgtgggcagatttttgctgtagggcagtttggaattgttttttatttttgttgcatggaaagcaacatcttgagataaagaggagatttaactgcaaaaggaggagaaagtgtgttgtcagaagaatctctgtgtcttctcttgtcagtttacaaatctctagccttcagaaggctgagatggaggctataaaacacctttgacatccttatattggagtggagtttttgccttctctgatattcacagacagttctcacccttcaaccttcctttgtgaaaactccaaaagggaatttgttttcattcagtgatttcactggaactgaagttgtaagcatatttattttccatatttctggtctggagttttcagtactgattccttgctttcctattgtgcttttgt

SEQ ID NO: 118976 - DNA, 1028 bp, Homo sapiens
cttaccagttaatattgatacaggtcttgcatgttatgaagtgcattgtgtacattatcttgtttaattttcacaacactctgtgaggcaattgttaatacccattttaagatgaggaaagagattcagatgtcatttacccaatcacaaatttagtaagtgatttagttctgatttaaataccagtcttctgactttacaggatgtgcttgttttattgacacttactggcttatggaaaatattttcttcttattgttaattgttgagggagaacattgaacaattaaatttttttaaaaaaggaagagaagccagttcacctgtgcctgtatatttaagatactacgtatttctttgcagtcttcccaagggattgttgaagaaacttctgaagagggaaactctgtacctgcttcacaaaggtgagagattatatgttgctatgcattctcctctgatggttgccagcataagggagatgaaccacatgagtgagactgtacgtggacagcttgccagagaacttttagctcttttataagtgaagactaggagaaattttattagtatctctaagttctcagatgtgcatctcatagaagcccagaatattaagagctggaagagatcctagaggtcatcttgtccaggccagctatcttggcataaatctcatttacattatttctgaaaagcggtcacatcctgcaattctcttaactaattacactagttttctatgccaatttgaaggctctagactgatttctttatagtccttctattcttagcccctttctctcttttccccaactctgcttatgcttattttatctgtatatctaaaccttatacatcttttaaatttactcttgagacttaacatcctcttcaaagtcttcatattattcaggccacacaggacctgtgtcactctcactgtctgtcctgtgccacttttaatccgtttgtgcctcctatctcctgtaaaggatggtatttgcattacctcctccattgttctt

SEQ ID NO: 118977 - DNA, 2543 bp, Homo sapiens
acctcaggtgatctgcctgcctcagcctcccaaagtgctgggattacaagcattagccacctcgcccagcctgaaatgattttaaatgtgaaggatacttgccagtggcaggtcctgaaccatctttttatgccatttgcctccctgttttaaaaaagggtttagtatagtgatctagtacaacactttgcacatagacattcagcatatgctgtgaaattaaattgagccatttacattttagaaagagaaagtcttatgaacggtggcctcccattttgtccttcctgtgacccttcatatatagttattttaataataaacctggtctggtatgggatcacttgtttcagagttgccggccttctgatgcttccgctaccagatctcgacctctggccactggaccgtcttcccagtcccatcaagagaaaaccacagactctgggctcactgaaggcatgtctccctgttctgactccttccattcatcaagtataactgtaccacagggatctcatgctgagagtagatacacggaaataccccagatccttttggtgataataaagaagttaaatcaggaagtagttgagatcataagaatatccggcatacttttatctccaaggaaaaaccaacatttggttaaacccaaagaagagcctttcttacccatattatgtaattcttggtaagtgataacttaccaagccctcttaataaaaaagtttgtccttagccctactttttctcaaatacctacaggcatatggcagctggtacctccatcactgtttaaaggctcacatatcagtcagggaaacgaggctgaggaaagagaggagccttgggaccacactgaaaaaactgaagaggagccggtctctggcagctcaggaagctgggaccagtcaagccagccagtgtttgagaatgtgaacgttaaatcttttgacagatgtactggccactcggctgagcacacacagtgtgggaagccacaggaaagtactgggaggggttctgcttttctcaaagctgtccagggtagcggggacacatctaggcactgtctacctaccctagcagatgccaaaggtctccaggacactgggggcactgtgaactatttctggggtattccattctgccctgatggagtagaccctaaccagtataccaaggtcattctctgccagttggaggtttatcaaaagagcctgaaaatggctcagaggcagctccttaataaaaaaggttttggggaaccagtgttacctagacctccttctctgatccagaatgaatgtggccaaggagagcaggctagtgagaaaaatgaatgcatctcagaagatatgggagatgaagacaaagaggagaggcaggagtctagggcatctgactggcactcaaaaaccaaggatttccaggaaagctcaattaaaagcttgaaagagaaacttttgttggaggaagaaccaacaaccagtcatggtcaggtaagggtcagtgatgctgtaattaaggatgatttattcacagattaaaacaaggattattttagctgttatttttgtggtcttcccctccttgattattaaagtaatacatgttcactatagaaaattaggaaagtacaggagagtataaagaagaaaaaaactaccatttttttttttttgagttggagtctcgctctgtctcccaggctggagtgcaatggcgcaatcttcggctcactgcaatctccacctcccgggttcaagcagttctcctgcctcagccttccaagtagctgggattacaggtgcttgccactatgccctgctaatttttgtacttttagtagagacggggttttaccctgttggctaggctggtcttgaactcctgaccttgtgatctgcatgccttggcctcccaaagtgttgggattacaggcgtgagccaccacacctggccagtcatcatttctatgcatacaaaaatacatgaaaaaattttttgaacaaaatgaagactcttctgtgttaagttttgttcctctccctactttatagtttatcttagatcatttcttaatagatgacttattctaccatagataaaccataatttattttttgtataaattttttttttttttttttaaagacaaggtctcgctctgtcacccaggctagagtgcaccgatgccatcttgggtccctgcagcctccacctctgggatcaagcgatcccccaacctcagcccgtcgcaatagctgggaccataggtgcacgctactacgctgagctaatttttatattttttgtagagattgagtttcactttgttgcccaggctggtctcgaactcctgtactcaagccatccacctaccttgttctcctgaagtgttggcagtgtaggcatgagccaacacgcctggtctaaaaattattattatttctgaaaggttaaatttttgaataggtaacaatattcacatggctcgaaattcaaaaatatataagtaaaaagtcttaacttttctc

SEQ ID NO: 118978 - DNA, 1014 bp, Homo sapiens
tacaaaaatacaaaaattaggctggatgtggtggctcatgtctgtaatctcagcactatgggaggctgacacgggtggatcacctgaagtgaggagtttgagaccagcctggccaacatggtgaaactctgtctgtactaaaaatgcaaaaattagccagtgtggtggcgtgtgcctgtggtcccagctactcgggaggctgaggcaggaggattgcttgaacctgggaggcagcggttgcagtgagccaagatcgtgccattgcactccagcctgggcaacaaagcgagaccatctcaaaaaaagactaagttgaatagcttctagaaaacttatactttaagtaaattatgatctttttattctagacaaaattattgtccttttattctagacaaaaggatgccacggagaaagaaaaaagttaaagaagtctccgaatctcggaacctggagaagaaggatgtggaaactaccagttctgtcagtgtgaagaggaagcgtagacttgaggatgcattcattgtgatatccgatagtgatggagaggttagtgaagtagagctgaaaagtagagctgtagctctcaaactatgcttctttacccatggggagtttgtttcgtgactgacttcaccttaatgccagctcaccaaaaccatgaaatttttactcagctttgttttaatttgtaaatggaatgaagaattacttaaggtagtaatcctgttgcttggttgaggatggatcatagttcttcagttttataatatagtaatccaaagtggcattttggaactatttgaatcatctaaatcaattgtaaatcttagttttcatgtgtctagaaagtgagaggaaaaacacgtgaatgttcttaagtctcttgatatgttctacatataatagcacctagccatctgtagctgtttaaaaataactaaaattaaaaatcagcttctctgttgcactagtcacatttcaagtgattaaagacacataaggctagtgtca

SEQ ID NO: 118979 - DNA, 1031 bp, Homo sapiens
aagtcatggaaattggagtccagttttcatgtcaggagacaaaagtgcaagtgcctactgtgtttgggcaagttacttttctgaacctgtgtttcctcataatgatatattctggtttcttaggatttattgaaatattcactcatcaaatatttattattattattattatttttgagacagagtctcgttctgtcctgagctggagtgcagtggcacgatctccgctcactgcaagctccgcctcctgggttcatgccattctcctgcctcagcctctcaagctgggactacaggcgcgtgccactacgcccggttgattctttgtatttttagtagagacggggtttcaccgtgttagccaggatggtctcgatttcctgacctcgtgatccacctgcctcggcctcccaaagtgctgggattacaggcgtgagccaccgtgcccagccatatttattatttttaaaaactttttattaagatatcatttatatacagtagagtgaacccgtcttaattgtacagttcaatgtgtacacccgtgtaagtaccaccaaggtatggaacattttcagaaggctcccttgtgtctttcccaatcagtaccctccagaggtaaccgatgttctgacttggatcaccagaggttaattgttttattttttatttttatttttttgggaaaaggtctcactgtcaccagtctggagtgcagtggtgcaatcatagctcaccacaacctcgaactcctgggctcgagatcccttctcctcagccttctgagtagctgggactacaggtgcacgccactatgcccagctaatttttttttttttgtttttttttttttgagacagtcttactgttgctcaggctggaatgcagtggtgcgctctcggctcactgcaacctctcccttctgggttcaagcgattctcgtgcctcagcctcccaagtagctgggattacaggtatgtgccaccatgtctggctgattttttttttttttttttttttgggaaacagag

SEQ ID NO: 118980 - DNA, 2122 bp, Homo sapiens
agagctgggagctggcacttggaactcaacaaatagtatgtattattagcagtaatatggaaccttagctgtactactacttactagtagcgagctcttgagttaaccatttttaggttctgggcctcagtttccctgtgaatgaaatggcgaaaacactcccacataacgggaccttgagaacgaaatgaaaagtatcaagggctgaccgtgagcaaggtgagagccatgagccaaaaccacacgagcctctccgggaggggggggtcactgctgcggaatcagcgacaggtttccgaatccacggcacacgctctgaggtaccagaggtagcaaagcaaaataagcgcggggtcccgcacggcagcgcgggtgcagcgcccaaacctcgcgagatttgttggctgggccaagtaccacccaccaaatctcgcgatacctaggcgcctgagaggctctctaccggtgagggtttgcggggaagatggagtatcccgcgccggccacggtgcaggccgcggacggcggagcggccgggccttacagcagctcggagttgctggagggccaggagccggacggggtgcgctttgaccgcgagagggcgcgccgcctgtgggaagccgtgtccggtgcccagccggtgggtagagaggaaggtgagtcgggggctttggaggcagaaagcccctcgcccgctgcgcggctcgcggggaactgcggaagcgccgacggtcacaccccctggcccgcctccttgcgtgctgcgccccgggacccccagacttgtgctccccatccgggcgcgggcaccccaagaatcgggcccccagcgcgctgagggtgaagggccgctcacgctcaggccctgggttttcctcctcctccttcatcattcactacagcgcagtttttcccacattcgaggactgtcatccctatactcgtcctgtcggagacctacagtctttgccatcccggtaagccaagccgagtgcccctcaccactccttgactccccatcgtcccaatctccagatttcctcctagggcctctcgcctcccttctctcaagccccacacttccgagggctctggaaggccttctccttaccccctgggttcctcctggtcttgatgactgagccctggcttacccgtttttagctctctggcctctacttgctgggtcccttattctaaggtggggacaaggagcctgagaaactggtctgggtttgctttggctccagcttctttgtgtcctacacttgacccaaagttgctgagaacagtgtatgcaaagccacgttaggggtcactcctgggccgaagcgccccagcttgctctgcacttgacctgagactgggtaagatgggatgaaagaaagagaaggatggaaaagagctgtcctgacctgcttgtgtgactcccttcactgtcctttacagagccagctgcttgatgctaacccagatgtacaagaactctatctgggcttctctgctaaccttgtcaggtatctggagggaaatcagatttctccagtgatttgtttgcttgctgagcagacttgtcttcgaaagtttaatatgctatttgtgaactgactgccctggataaaattggataaaattgaaattttgaccatatctaaggaaggtacacagacctataccctggtatatacttctccaatttaaaaacaagtctagcctgtctcctaagtttatatatatatataatgtatattatatataaaaaagaaggagacagggccccagaaatggtgtgtgtgtatgcgtatatataatatacacacacataaatgtatatatataatatatacacacataaatctgtatatatatttttatatacacttgtaagtattttatgtatacacacacacacacacacacactatttctggggccctctctccttttttttttttttttttttgagagagtctcactctgtcacccaggttggagtgcagtggcacaatcacactgcaacctccgcctcctgggttcaagcaattctatactgcctcagcctccggagtagctgggattacaggctgctgccatgacgctcagctgatttttgtatttt

SEQ ID NO: 118981 - DNA, 1816 bp, Homo sapiens
gggttcaggcgattcccctgcctcagcctctgaagtagctgggactacaggcacgcgccaccacacccagctaatttttgtatttttagtagagatagggtttcaccaggttggccaggctggtctcaaacctctgatctcaagtgatctgcctgcctcagcctcccaaagtgctgggattacaagtgtgagccactgcgcccagccgcctggctgattttttaaaaaatttttcgtagagacagggtctcgctttgttgcccaggctggtctcaaattcctggtctcaagtgatcctcccacctcaggctcccaaagtaccaggattacaggtatgagccaccacacctggcccttttctcacaatttataattcagaaaggcaagataaactctatgaccctgggcaagttattttacatatttgcaccctattcagagatcaggctttctgagagagatgctgggatccctttatgtagtcttgaaatacatggtttcctagcctaatcataatcaacaagtagaacgcaatgggaggctgggtgcggtggctcatacctgtaatcctagcaatttaggtggctgaggcaggcggattgcttgagcttgggaattcgagaccaccctaggcaatatggtgaaaccccgtctctataaaaaatacaaaaattagccgggtgtggtggcatattcctgtagtctggctacttgcaggggtgggtgggagaattgcttgagccctggaggtggaggttgcagtgagccgagatcgtgccactgcactccagcctgggcaacagagtgagaccctgtcttaaaaaaaaaaaacctaatggtccacttgttcagcaaactctgagcatctactgtgtgccagactccagctgggtgtgaaggataagaaacaaaaatgagtcaaatagtccgtgttccaatgtcacacttgagttcacagaaaagtctcctaagctatgacactgtcagtttagggtggcaagtggtatgacagaggtctatttaatgtactctgggagcacagaagaggagcagggttaattcttcctggaatacacaaagggacttgacagttgtttactgaatgatgtttttttttttttgagagaaagtcccccagaggaaaagcttatatttaaattgggtcttgaaggctaagcagacacgctgccaagcaggaaaggaaggaagcacattttagacagcaggaatggccaaagcaaagcaaggaagcatcagagaataaagtgggggatggtgagtagagtctgggacaaagtagctggagaagaatctagaaagtaggttggggttaatgtgtgaggggggccataaatgcctgttctgttatgggcagtggggaaccattgaagattttctggtggggcagtggtatgatcagacctgtgttctttcttccaaccagaagagcagcagaagcaaagacaagaaccagtgctgccccatctgtaacatgaccttttcctcccctgtcgtggcccagtcgcactacctggggaagacccacgcaaagaacttaaagctgaagcagcagtccactaaggtggaaggtactggttttcctgagtagtgctatagtgggacccctgccgtcctcagggcactactgccaggggctcacagagatcctcactgaggccacagacttgaagaagttgaattgcttttgagaacccttaaaaatctccaagtagacccagcttcactgaaatgcaatctcagaattatgctcacctaacctccctttctttggttataggtttttctctataggctg

SEQ ID NO: 118982 - DNA, 1060 bp, Homo sapiens
cctttttgtgtttactgacaactgtgttttggaagccttcaaaggtagggtgaaaaatcactcataattttttttttttgagatggagtctcgctctgttgcctaggttagagtgcagtggcatgatctcggctcactgcaagctctacctcccaggttcatgccattcttcagcctcagcctcccaagtagctgggactacaggtgcccaccaccatgcccagctaatttttttgtattttttagtagaaacggggtttcactgtgttagccaggatggtctcaaactcctgacctcgtgatccacctgcctcggcctcccaaagtgttaggaatacaggcataagccaccacgccggccaaaacctttttttttaaatagagatggcttctcactatattgctcaggctggtcttgaactcctggccttaagtgatactcccatctcagcttcccagagtgctgggattacaggcatgagccaccacacctggccactcataattacacctttttatcacacccacatctagttattcatggtatgaaacagcagaatgtggactttgaagtcacagagtcccaggtttaaagcctggcactgttactgtttatatgacttttttgtgtctgaactgcctaacctataaaatgataataatactgtctacttcatcggttgtgaggatacaataatgtgtattaaaaacacaggacataggccgggcatggtggctcatgcctgttgtaatcccagcactttgggaggctgaggtgggcagatcacttgaagtcaggagttcaagaccagcctggtcaacacggtgaaacccaatctctactaaaaataacaaaaattagctgggtgtggtggcacgagcctgtagtcccagcttcttgggagactgaggcaagagaatcgcttgaacccgggagctggaggttgcagtgagctgagatcgcaccattgtacaccagcctgggggacagagcaagacctcgtctcaaaaaaaaaaaaaaaaaaaccaattttataaggtcacagacttctcttcccac

SEQ ID NO: 118983 - DNA, 2120 bp, Homo sapiens
aaatcctcaaaacttccccagttgaagtgatacaggtatggaagagcatctgagacatatcatctgtgagtcctgctgagccccatcagtcctccaccactggtgggggcttctgggccccacatttttaaagcagtagttgctaggttgacaccatttcagccacatggacttgttagtgagtcgtggcatccgctttatgaggcagcagcgcagcctagagtcaacatcaagccatatgttgatgcacaagaggctcgcatgtatgcctataccaggctctgattcactgaattcattggccagaatcagggatgttttctgaaggcgtaagtaagagctatagccttcaggtcttcttgccacactggcagcctggcatagcaaagagagcacaggctttagggtcacagacctggcttcactcactggctgggtcaccttgggcaagccacttcactcatctgagcctcagtttttctgaataatgtggcaaagtgatacctacctcattggggtagttctgaggaccaaaggagaaaatatatgtagaaaacacatcactaatttttttttttttgaggtggagtttcgctcttgtcgcccaggctggagtgcagtggcgcaatctcggctcgctgcaacctccgcctcctgggttgaagtgattctcctacctcagcctcccaagtagctgggattacaggcacacgccaccatgcccagctaatttttgaatttttaggagagacagggtttcaccatgttggccaggatggcctcaatctcttgacctcgtgatccgcctgccttggcctcctgaagtgctaggattacagatgtgagcaaaacgcataactaaatgttaatggtcctcttttctctctactcagcctataatatgcaatgtagcctaaaaggcatccctagtatggttaccttttctgaatgaccttgtatgagctccaggaactcaagcctcaatttctgtatctgtgcatttgttcccagctctgcaactgtattactttaaggatgagaataaaactcccaaacttcgtgtcccacttgctgtgaagttctgggaagtactgaggtatccctgcaagagtgcaagtgtgcatctctagtctattgtaacttggcagcctgacaggagaagctcagggcctcctaagaatatgagaaccaccaggatttgtgggcttaaagtagttaaagccgctgaatgaaatagccagtctttgggctccctcaaatcttcccaggtttcccaattagagaatgcattcacctgtgtgactcacacaggcagtgccacatctgcagtaggattaactggtgtcacagccctttctattcagcatactcaaaagcctgacaccttctgggttttttcattgtttctgtttgaactctctcactgcagctctgtcaaaacgccttacaaatcctttccttgtggcctccaccttagccttgcaccagaatagagagatgatagacccagacaagttctgcagcctctgccatgcaactttcaacgaccctgtcatggctcaacaacattatgtgggcaagaaacacagaaaacaggagaccaagctcaaactaatggcacgctatgggcggctggcggaccctgctgtcactgactttccaggtgagggggcctagctcacacccagagctggaccagggtttggccactggggctacccggaccagctgacgttgtgcttttcctccttaggtcttgtaagtagggtttgcgaactcagatggctacagaagccagatgagaaattaaaatgagagccaggaaggggatatggtcagctgaagagtgaatgccattcctactcagctgttaccatatctttcaggttttcttttcttttttttttttttttttttttgagacagagtcttgctctgtcacccaggctggagtgcagtggcgcgatctcggcttactgcaagctccacctcccaggttcatgccatccttctgcctcagcctcctgagtagctgggactacaggtgcctgacaccatgcccagctaatttttttgtatttttagtagagacggggtttcaccatgttagccaggatggt

SEQ ID NO: 118984 - DNA, 1050 bp, Homo sapiens
cactttgtcattggagcagccctgagatagggtctgtgattcccagggtagaaagacagattgattatcataaccagcgttctcactaattactgttaccgcaagccctaggagagtggcaccttcccagagatctctcagtgaaggacgtccttaatgaggccacttagcacagtcaaggtagaaatacagaccaaatgtcacctctctgttctgtcattcttttatcactcagcagacagctagtctgggccaggctctacgctggaacgagggacacaggaatgaggatcttcccaaccccaggaagcacataggcacacagtctgtgcctccttagcactgtggcctctgggttctcatcagggccagcaacctcacctcgcctcacctgtccgtccttagaagggcatttgtacactctgaaaagcaacggtcttcaggttccttctttctggattactaagatcttgattttgatgtgtttcagctggaaagggctacccctgcaaaacatgtaagatagtgctgaactccatagaacagtaccaagctcatgtcagcggcttcaaacacaagaaccagtaagtaaccattttttgaaattctaggatccatagcaggagctcaggacttctgcatcagaacaaagccaggtagttctcggctgaaatggaatcctggcagtcttttttcagtgaacagaagatgaatcatgtaacaggaacaagtgtctcctctatatgtatttctccaccagcttctgcccagcctttagacctgttggactcaagggtttaatagagaagcatacatgatttccttggtgggaccctaagaacacctggctgtcctagtctgtagcactctgactggggaagtgcttttccactggcctggagaccctctccttttctggcaggagttccctctataggtcattatcaaatatgaccaggccctctcattccttaatcaaatatatattgagcatcttctgaatgatggccaagacagacccagtctctgctctcctgaccttacagcctg

SEQ ID NO: 118985 - DNA, 1790 bp, Homo sapiens
actgtgaagtatcctcctggagcagtgacacaatcttggcggagcattgctacccccgctgccccctccacagttcctgaatggtgctaaggatctgcagcagttggcaacgagctggggctgggggcggcctccatgtccactgagatcataggacactccaatggggatgggacctttcccctcctccatcagaggtgctctgaccctaggttacacgggaaagtgccccacatgcaagtctccctgagggttctgcccctaaaggcagactgcctcatgcccgctagctgtgaggttcattgctaccctcggccctactagccctctcttcccccttgtgcagcggaccacttgcccagtttgctgtggtgctagccttccccatcatccaccgggtgatttctgggtcccagggaaagaaagagagagctgatgcaggtttctacagtgaggaacaggcgtttcccaggccccacacccagatttctctatctttgctgtgttttatggcctgggactgagtccacacggatagatttttccttgtaaccttgagacgagaattccaaggagtgtcaccatcagaggcttctcttcattgtgtcaaagaagcccctagctgctctcgtggcctccttcccccactccctatcccttcacctgtgaaatgcctttgctttgcatattgtgtgtggatgtgtgtgtgtgtgtgtgtgtgtttgtgtgtatgtgtgtgcttctgtgtgtgcctaatgctctgtctcttggtcactgaagcatccaaataaagaatttccctcatgggccagactacaacttaacagacctagggttttgagccatattgccattggatctagtatgtctgtcttgacccctcacccccaccccattcagacctcagtagtccccagtagtcactttaggagttgggacagagtcgagcaccctgtgaaagtctcccttgagttcaggtgccctgaactcagtacagcctcatcttctcatccaccaccttctcctgcttctcctgtcacatagggcctcatgaaggtctttaaagggtttaagctggggatctgctttatgtttgagagaactgttctggctgttatgtaaaggagtgcagggaggggcaggaaaggagacaaggaggccagtatggacactgtgtccagtatggctttccaggctaatcacttagggcagagacccagccttattcatctctacttcctgatgtccatagtggtgtgtcatgaatttttattgaatgaacaaatgaggtgtatgaggagagatggttttctcctgctcagctcttacacagtgataggtttgttccatgggacttatcataggcctggtgattcttgaaagagcatttttcatgactcaaaaatgagctgagaaggagtgttatggccaggtgcggcgtcatgcacctatagtcccagctgctcaggaggctaaggcagaaagaccattcaagcccaggagttccagcctgaagtatgctgtgatcatgcctgtgaataaccactgcactccagccagggcaacataacaagactctatctaaaaaaaaaaaaaaattataaaaataaatttgaaggctgggcgccgtggctcacgcctgtaatccaagcactttgagaggccaaggcaggtggataacctgaggtcagaagttcgagaccagcctggccaacatgatggcaaaaccccgtccctataaaaaatacgaaaatcagctgcgcctggtggcacacatctgtagtcccagc

SEQ ID NO: 118986 - DNA, 1037 bp, Homo sapiens
gcttccagcaagcattcatctatcactgtgtctgcgagagaggactggccttgcagggcgcagggccctaagctgggctgcagagctggtggtgagctccttacctgggtgtgtgtgcgtgtgtgtgtgtgttctgtgcactgggtgtgtgacctaggaggtccaggcagcatgtgtggtataagcattatgagggtgatatgccccggtgcagcatgaccctgtatgtggcaccaacagcatgtgccttgtgtgtgtgtgtgtccgtatgtgtgtgtgtgtatgcgtgtgtgtgtgtgtgtgtgtcttggccactgtcgtgtgcactaaatgctgtgtgtgtgacatgccccaagagtgtggcatttgccctgggtgtggcatccgcagcatgtggctgtgtgggtgtcaaggagtggtggctccttcagcatgcgttgcaaagtgcttgtgccctgcatgtgcggtgtgttctttgtacacaggaggctgcctcagatggggctgcggggtctgctgacctctgccctctgcccacagagccctgcctggctcccagcctggagcagcaagagcaggagctgacagtagcccttgggcagcctgtgcgtctgtgctgtgggcgggctgagcgtggtggccactggtacaaggagggcagtcgcctggcacctgctggccgtgtacggggctggaggggccgcctagagattgccagcttcctacctgaggatgctggccgctacctctgcctggcacgaggctccatgatcgtcctgcagaatctcaccttgattacaggtggtaagagactctagcagggagtgaagggatgcctggggagacagacctgcccctcttggaccttagatgcttccctctgtccctgatgtagactccttgacctccagcaacgatgatgaggaccccaagtcccatagggacccctcgaataggcacagttacccccagcaaggtcagtaggtctccaaggacttgtgtccccgctgctgctcatctgatcactgagaagagga

SEQ ID NO: 118987 - DNA, 2462 bp, Homo sapiens
cggcctccgcctcccctcaggtagcaggctgcggggcgcggggccggctgccctcccgcagcaaactttgcttgctgctgaatattgatgagagcgatcggctcggctgggaggtgctgccgcggctgcgggaaggagcgcggcccgggcaggcggcggcggcgtcggcagcagccatgtttttcgagctgtagcagctgctgctaccctgactgggcttcgctggccgcctcggtttctccctctgccgggtccaggcctcttcgccctgcagctgcggatccagcaggcctgcattcaggaaggcgagctctggggtgcagccgcctcggccggctcgcctgcggcctgcgcaccgccgctgcaaaggctccggcgctggctgggcgcagggtgcagcgctattgtgaccgctgcgccctagcgagccaggaaggggggggtacctttttgtgcagggtccaggagcccccctcggaccccgcagccttttgcttttgagagatccagctgctcgacccctggcgagggagggggaggactagtcctgtttgagaattgggaattttgacgggcagaggggttttaattttagttcatcccaagtgtccaccagtctacagaggaggaaaaagagacgggctgtttctatgtagcaggatcggcccagcttcgggaaaatggagttttcagaggctcatcgaggccattttttcatctccagtcgggggaactttttctgcccatggaagtgcagcagaaaggcatagaggccactaggccttgaagtggctgccattttaaagagtcgagtcagatggcctattaactcagattaattgctgtgcttttggattccaggttgatgccggcccaggatggatcagacctgtgaactacccagaagaaattgtctgctgcccttttccaatccagtgaatttagatgcccctgaagacaaggacagccctttcggtaatggtcaatccaatttttctgagccacttaatgggtgtactatgcagttatcgactgtcagtggaacatcccaaaatgcttatggacaagattctccatcttgttacattccactgcggagactacaggatttggcctccatgatcaatgtagagtatttaaatgggtctgctgatggatcagaatcctttcaagaccctgaaaaaagtgattcaagagctcagacgccaattgtttgcacttccttgagtcctggtggtcctacagcacttgctatgaaacaggaaccctcttgtaataactcccctgaactccaggtaaaagtaacaaagactatcaagaatggctttctgcactttgagaattttacttgtgtggacgatgcagatgtagattctgaaatggacccagaacagccagtcacagaggatgagagtatagaggagatctttgaggaaactcagaccaatgccacctgcaattatgagactaaatcagagaatggtgtaaaagtggccatgggaagtgaacaagacagcacaccagagagtagacacggtgcagtcaaatcgccattcttgccattagctcctcagactgaaacacagaaaaataagcaaagaaatgaagtggacggcagcaatgaaaaagcagcccttctcccagcccccttttcactaggagacacaaacattacaatagaagagcaattaaactcaataaatttatcttttcaggatgatccagattccagtaccagtacattaggaaacatgctagaattacctggaacttcatcatcatctacttcacaggaattgccatttgtaagcagtttttggtacaacttaaatatatacatatatgtatatatacaggccacttaaagggaaacttgtaacaaatttgtttttggttgcttatcagttcacagctgaaatcctattgctaatcataagctttgggcaaaattttactttgatttttaaatttatctctgttgtatgaatttggttgttttaagctttttccaaataactcttcattgagagtaggctaatgcttttaaaggcatttgattgagttcaggtttaatttctcaagttggaggtatacatatatgattaaaaaaaaaaaaaaaagatgggttttggcctgccagcaccatgagtgcaggtgaaccaatttagtacttggagtcctgttgctatatgtggcagattatttttttacttgatgacttgactcttacttcaggttgaagggcattttgaacacagattaaagtggctaagatgaagttttcttggacattgtcaaaatctaaattaggctagtttttctgaactacctgttttgaaggtatagcatcctgtgcttttgataactgccaccattagctcttttttttttttttgaggtggagtctcactctgttgccaggctggagtgcagtggttgatcactgcaacctctgcctcttg

SEQ ID NO: 118988 - DNA, 1248 bp, Homo sapiens
gtatgtgtgatatgtatatattccgtgtgtatagaaatggagagtatcttatttgagttgttgttttcagtaatgctgtcaagtattgttagagggtgataaatgataacatttgtttttatttgagcttatgaagaatttcttgactttctagctaaatgatcagttcacttctcttagcctcaattttattgcgtctaaattccagaagttcttgattgctataagattccttcagctttaaatattaatatttgatattgattttgtttctgcccaaacacattgtttggtcaccgccggtaatgttagcaaagagaattttttttggccaacaaatgtctcataccacattcagtttttataagaaaaacttttatggtatgttgttattctgagttcattaaacattcgctttaccttatatccctgctgttctttaaagttacagagggagaatgtgggtgtgtcacttttgtttctgttgatttgtatcttaattatgccttggtactccttggtttcttggcaattgcagatttaaaaaaatttgctttagtggttatcttgagtctgaattgtcctacacattagggtgggtaggctgttttgaaaacctattggcagctcagacaaatcctttttcttgggttcacgttgaaatttattttatatatatatcgtgtctttgtttttgcacataaatttaaatctgagaatggagatagatgtttctctagaagcatacaaatagaattgtaaacctgtttctcgtcaaagagatgttagtggagtattggttctattaaaaaaaaaatgaaggctgagtgtggtggctcacacctgtagtcccagcactttgggaggctgaggtggacagatcacctgaggtcaggagtttgagaccagtctggccaacatggtgaaactccgtctctacaaaaattagccgggcgtgatggtgggcaactgtaatcccagctactcgagaggctgaggcaggagaatcgcttgaacccaggaggcagaggttgcagtgagccaagattgcgccattgcactccatactgggaaataagagtgaaactctgtctcaaaaaaaaaaacaacaaaaaaacaaacaaacaaacaaacaaaaaactgaaaatattggagcctttagatagtaggttacatgtctaaaatgggagttagcaaatgtataaatgtagaagtttttttttcagggagaaattgaaattgctcaaa

SEQ ID NO: 118989 - DNA, 1121 bp, Homo sapiens
caacctccgcctcccgagctcaagcgattctcctgcctcagcctcctgtgtagctgggattacaggcacccgccacgacgcctggcttttttgtatttttgtagagacaggttttcactgtgttgtccgttctggtctcaaactcctgagttcagggaatccaccgccttggcctcccaaagtgctgggattacagtcgtgagccaccgcgccctgccacaaaccatactttgaaaacgttgcttccatttttagataatttgttaggaaaccaataaaatcatacatacttgtgattttcccttagtaaaacacaaattttagtgttttttgctgttattattaatacttctaaagttcctttcacattgctagtgaccttatataaaataccataatgctcttctagcaattgctggaaagataaaatctattttagagaatgaacaattatattttcacattagattaaattaaaagtaattactggttatgtgatattccctcacataccagagtgagtctgaaggtagtctttctttgtaaattatgaggctatatttcctgtgttatctctgatttctcttgatgctgtaattggagttgttgggtctccctggtgaaagtaggtgatgtgcaagttgtgtctatacccagtgaaaataacagacattaatgctacactaatttgtcattggaattttacattcaaaagcatttctttttaaaaatatgattgtaaattggtaatttatagttgtatataccaaaggcatttctttaacgttatagttggttcaactgaaaatacgttaagtctgtttttataattagtatattgaggaacagcacttccatcgtgtcacaatatattaagaattgccagcagggcacggtggctcacgcctataatcccagcactttgggaggcctaggcgggaggatcacctgaagccaggagtcgagaccagcctggctaacgtggccaaacccctatctactaaaaatacaaaaattagccaggtgtgatggcgggtgcctgtagtcccagctactcgggaggctgaggcaggagaatccagaattgaattgaacccaggagacggaggttgcagtgagcc

SEQ ID NO: 118990 - DNA, 1044 bp, Homo sapiens
gggtttctccatgttggtcagactggtctcgagctcccgacctcaggcgatctgcctgccttggcctcccaaagtgctgagattacaggcatgagccctgcaccaggcctaatttttgtatttttagtagagacggggtttcaccatgttggccaggctggtcttgaactcctgagatgaggtgatccgcccgccttagactcccaaagtatggggattacaggcgtgagccactgtgcccggctgatttaaacattctcaattattctgttgatgccaggaaggtgttaggccatttttctaatgtttacattgtccggaatcaccttttagtatatttacgtatttctactttaatcaggtttgtatcattttttataatataaaagctgaaacaattgtaaatgtttattaataattttgaagtttaaaattttaatttggagtatttcctttaaatgctattgtttgtttttcagttgattgttgtgtttgaatcttaggtaccttagttttaaattactctaaaggatggggctgaaacttgatttatttttattttattttattttagagaagaatttctgctctgtctcccaggctggagtgcagtggcgtgatctcggctcactgcaagctctgcctgctgggttcatgccattctcctgcctcagcctcccgagtagctgggactacaggcgtccgccaccatgcctggctaatttttttggtatttttagtagagacgggatttcaccgtgttaaccaggatggtcttgatctcttgacctcgtgatctgcctgcctcggccttacaaaatgctgggattacaagcgtgagccaccgtgccgggccaatttttgtatttttagtagagatggggtttcaccatgttggccaggctggtcttgaactcctgacctcaggtgatcctccttcctcagcctcccaaagtgttgggattacaggtgtgagccactgcacctggcctgaaacttgatttgagctgtccttttttctgttaggatggtagtgattttatt

SEQ ID NO: 118991 - DNA, 1816 bp, Homo sapiens
gtttttcacgttttcttgggtttttttttgtatatatatttttgttgctgtgggcttactatatacatcttctgtatttttggaacaatgaaattatagactgatagtgaaggaaacttacctgtctactatcttaatttcttctttgtagttaatctacatttagctggttttgaagctataccacgtcatcagactagactactgattctttcataacctcctgtgtattttcttgccacacatatataatacttaaaattttccttgtgtatgatctattctaggttgtctagttcagtgggcatgttagttgtttccagacagtcttctttggcggcaatgatgtggctgttctcttaatgatgagaagtaatttctttgatctaatgattctggttctcttacccttacctagtttccaaccggaggccctatcggcagtactacgtggaggcttttggagatccttctgagagagcctgggtggctggaaaagcaatcgtcatgtttgaaggcagacatcaattcgaagagctacctgtccttaggagaagagggaaacagaaagaaaaaggatataggcataaggtaggaaacgaaaaaggctttttattgagtgacagaagcaagtaagaaaaagaaagaaaatggcctcttatttattttcgagacagaactttgctctgtttcccagattggagtacagtggtgcaatctttgttcactgcaacctccgcgtcccaggttcaagtgattctcgtgcttcagcctcttgagtagctggtattataagcgagcaccaccacgcctggctaacttttgtatttagtagagacaggatttcgccatgttggccaggttggtcttgaactcctgagctcaagcagcttcccaaaatgctgggattacaggtgtgagccactgtgcctggcccggccttttaaaaatcattatctacttgggagttagcagagaggaggcagggaagaagcattatatttttgaaatgtaagttatttcctttggtagtagaatatctgtgagaaaagagctagggagcagatgcaggtgggttttttttgtttgtttgtttgtttgtttttcctccccagtgggctggggctagcttgtgacatatttatactaaattttttgataaattattttagtcaactttactgtgtcactcagtagtgaaaattatgacatagcgtgaccattcttttgttatcttttatgcatgatgaaagtatcattaaaatgaaatattctgcttcttgccacttggactaattatttctgttaatgagaataatgtggtttttttgtttgtttgtttctttgtttttggagacagagtctcactctgtcacccaggctgaagtgcagtggcacactcttggctcactgcaacttccgcctcccaggtttgagccattcttgtgccttagcctcccaagtagctgggattataggtgcccgccaccacacctggctaatttttgtatttttagtagagacaggttttgccatattggccaggctggtcttgaactcctgatgtcaggtgatcaactcgcctcagcctcccaaagtgctgggattacaggcgtgagccactgcgcccactgagaaccataaagtttttaataattttcttttttatgtttgtcagtgcttaagtctaaagtttctactctagttatatttcaaccatcagtattgtggctttttttcttttgcttgatgttttatgttaaatttggctgagaaaaataccagcttattttaatactcttttttcctccagttt

SEQ ID NO: 118992 - DNA, 3473 bp, Homo sapiens
aactacctggctggttccataaaagcaggaggcctgacaggtttgtaaaagcttctgatttcaggccgggtgcggtggctcatagctgtaatcccagcactttgggaggctgaggtgagcggatcacttcaggtcaggagtttgagaccagcctggccaatatggtgaaacccctattctactgaaaatacaaaaaattagctgggtgtggtggcgggtgcctgtaatcccagctactcgggaggctgaggaaggagaatcacttgaacccgggaggcagaggttgtggtgagcgaagattgtgccactgcactccagcctgggcgacagagcaagactctgtctcaaaaaaaaaaaaaaaaggaataaaaaaaaaagcttctgatttcatctcccttttcccccacccatttctttgataagtgataattctttttctcctttaaatttaaggttcctcagaaaattttgagtaaatgggaagccagtgttggacttgcagaacagtatgatgttcccaaggggtcaaagaaccgaaaatgtattcctggttcaatcaagttggacagtgaagaagatatgccatttgaagactgcacaaatgatcctgagtcagaacatgacctgttgcttaatggctgtttgaaatcactggcttttgattctgaacattctgcagatgagaaggaaaagccttgcgctaaatctcgagccagaaagagctctgataatccaaaaaggactagtgtgaaaaagggccacatacaatttgaagcacataaagatgaacggaggggaaagattccagagaaccttggcctaaactttatctctggggatatatctgatacgcaggcctctaatgaactttccaggatagcaaatagcctcacagggtccaacactgccccaggaagttttctgttttcttcctgtggaaaaaacactgcaaagaaagaatttgagacttcaaatggtgactctttattgggcttgcctgagggtgctttgatctcaaagtgttctcgagagaagaataaaccccaacgaagcctggtgtgtggttcaaaagtgaagctctgctatattggagcaggtgatgaggaaaagcgaagtgattccattagtatctgtaccacttctgatgatggaagcagtgacctggatcccatagaacacagctcagagtctgataacagtgtccttgaaattccagatgctttcgatagaacagagaacatgttatctatgcagaaaaatgaaaagataaagtattctaggtttgctgccacaaacactagggtaaaagcaaaacagaagcctctcattagtaactcacatacagaccacttaatgggttgtactaagagtgcagagcctggaaccgagacgtctcaggttaatctctctgatctgaaggcatctactcttgttcacaaaccccagtcagattttacaaatgatgctctctctccaaaattcaacctgtcatcaagcatatccagtgagaactcgttaataaagggtggggcagcaaatcaagctctattacattcgaaaagcaaacagcccaagttccgaagtataaagtgcaaacacaaagaaaatccagttatggcagaacccccagttataaatgaggagtgcagtttgaaatgctgctcttctgataccaaaggctctcctttggccagcatttctaaaagtgggaaagtggatggtctaaaactactgaacaatatgcatgagaaaaccagggattcaagtgacatagaaacagcagtggtgaaacatgttttatccgagttgaaggaactctcttacagatccttaggtgaggatgtcagtgactctggaacatcaaagccatcaaaaccattacttttctcttctgcttctagtcagaatcacatacctattgaaccagactacaaattcagtacattgctaatgatgttgaaagatatgcatgatagtaagacgaaggagcagcggttgatgactgctcaaaacctggtctcttaccggagtcctggtcgtggggactgttctactaatagtcctgtaggagtctctaaggttttggtttcaggaggctccacacacaattcagagaaaaagggagatggcactcagaactccgccaatcctagccctagtgggggtgactctgcattatctggcgagttgtctgcttccctacctggcttactgtccgacaagagagacctccctgcttctggtaaaagtcgttcagactgtgttactaggcgcaactgtggacgatcaaagccttcatccaaattgcgagatgctttttcagcccaaatggtaaagaacacagtgaaccgtaaagccttaaagaccgagcgcaaaagaaaactgaatcagcttccaagtgtgactcttgatgctgtactgcagggagaccgagaacgtggaggttcattgagaggtggggcagaagatcctagtaaagaggatccccttcagataatgggccacttaacaagtgaagatggtgaccatttttctgatgtgcatttcgatagcaaggttaagcaatctgatcctggtaaaatttctgaaaaaggactctcttttgaaaacggaaaaggcccagagctggactctgtaatgaacagtgagaatgatgaactcaatggtgtaaatcaagtggtgcctaaaaagcggtggcagcgtttaaaccaaaggcgcactaaacctcgtaagcgcatgaacagatttaaagagaaagaaaactctgagtgtgcctttagggtcttacttcctagtgaccctgtgcaggaggggcgggatgagtttccagagcatagaactccttcagcaagcatacttgaggaaccactgacagagcaaaatcatgctgactgcttagattcagctgggccacggttaaatgtttgtgataaatccagtgccagcattggtgacatggaaaaggagccaggaattcccagtttgacaccacaggctgagctccctgaaccaggtaaggacatctaaatgtgataaaaaaaaaaaaattggagaaagtgctgataaacattgtccttctgaaattggtctgttgtaatggtaaagtgaagtataaactagcggggaagaatcatcacttcaatgaagaaggagttttatgtagaaaggtctgaattttgaagatgagatttccatatatattcaaaagttaaactttaccagaagcccttttccccaaccttttcaagtaaatctctataacatctttctttctcactttctctctctctctttctctctctctcttttttttttttttctaattttttttttcttttgagacagggtctcactgtgttgcccaggctggtctcaaactcctgagttcacgccatctgccagcctttgcctcctaaagtgctgggattactcttgcctgacctgttccccgtttcttaccttttaaaatcccc

SEQ ID NO: 118993 - DNA, 1039 bp, Homo sapiens
ctgatcccaagcgtttcagataaggcatacttagcctgtaactcaagatgtattttacctatttacctgatctagatgctacatttttgttaggtatatattagctttatatgtacaggtgtcagtgactataagacctggctttaaatttaaccttttccttaattttggatgggccacatatattctattatttgtgtatataaggtaacacaagtccttttgtctccccccagctccttttgcatatgagaaaacataagccattttgtgcctcttgcatcttaagccatagtctattttactatgtggtttcccatctggttacttttgggagtatcagatggtctcataaaaacagtgggttttcctgaagctttttgattaatgttgaatttgtttatcatcttttagctgtgcggtcagagaagaaacgccttaggaagccaagcaagtggcttttggaatatacagaagaatatgatcagatatttgctcctaagaaaaaacaaaagaaggtacaggagcaggtgcacaaggtatgttgcaaaatttcagcaaactttcactggtccttaggaaactgcaattttatcttcaatgtcatactttatcttcatgaaacaataatttccttaactgagatcttgttttttattctcagcttctagcacagtacttaggatttagtggttattcaggaaatatataaatgaatctacatattgtatttatttatgtatatatttttccctctttgccttcaaagagtaatgacttaggaatattgttatgatttaatcttaagtaaaaatataggctataaagtgaaatatatatagtctgaccctaatttcaaaagtaaatatatcttatttgtcttatttttcaactcagttttttaaaatgaaatagagacatcttgacattctacccctacatagtttaatatgtagttaaaaaatggaacattttcctttataatcaatttaacatatttacatcttatataagatctgtttatctgacatcaactgtc

SEQ ID NO: 118994 - DNA, 2590 bp, Homo sapiens
ggtagccaggatggtcttgatctcctgacctcgtgatctgcctgccttggcctcccaaagttctggaattacaggcgtgagccaccacgcccagcctattttatccatttttaagtgtacagttcagtagcatgaagcacagttagattgttgtgcaaccatctccaccatccatctcgataatttttttcatctttccaaattaaaaatcaatacccattaaccaataactcccttttctgctcagcccctggcaattgccattctattttctgtctcaagaattttcttattctagatacctcatatacttgaaatcatacgatatttgttctttgtgtcttaagtaatttcccttagcatacataatgtcttcaaggttcatccactttttgtagcctttgtcagaatttcattccttttaaagtgtgttattctttttgacacttaaattacaacaattttggcctgtggactctatttttattttttgttcttaggtaagttcccgctgtgaagaggaaagccttctagcccgaggtcgatctagtgctcagaacaagcaggtggacgagaattctttgatttcaaccaaagaagagcctccagttcttgaaagggaggctccgtttttggagggccccttggctcagtcagaacttggaggtggacatgctgagttgccgcagctgaccttgtctgtgcctgtggctccggaagtctctccacggcctgcccttgagtctgaggaattgctagttaaaacgccaggtaaggtggggttggggtctcagtatttgagcagatatgattagaggaagcaggagattttagtatgttttgatgtaaagccaacattgtatctatatacaataaactacccccttttgtcctgggaaatacttaaaatgatggttaattagatatagttactaaccatgaactgtggcacactatcaagaagatgtatttttaataactatgctccttgctccagtgttgctcttcatgattgttgatcagccactgtgtaaattaacaaccaggataacagggcttcaagaggagtactgcacattagtggaataagcactatgcttcaagtgctggctccaccaatccttgtgttacttgggaagttgtttaatctctgaacttgtttcctcatctataaatggagatcataatgtattaatgtgtaatgttatatacctgacaacatagtaattaccagttcattagaagttaattaccagttacttctcacttgatcattctttatatatcacctggggagagttggatctaaacatattgtctctaattcaccttgtaactattgaatattatagtcagtcaaggaatggcaagaatcctcttttctgtacccctttaaattttggatataacttttttacattatcaacagtagcttttgatgttattccttaaagaaacgattccaattgtgcttaaactagttgggtataataaaaaagatttttgaaagaacagtaaagatagttattatttcagtacctactatgtgccaaaactctattaagtcagctcttttatattattcttgagtgatcctatgaattatcttttacctattgaattttatttacttaggggcagagcagaaactataatctttgtccatttatgaccatgatccaagttctatttcactccacttctccttattttatcctcaccaacaatcagttgttataaaggcagttccgtccttctgacttctcccttagtgattttgtgagttaaagtcaccacacacacatccctcacattagttggtgcttgcattgaaaactgtttacttgttttgtttactaatattttataataagcaaattaccatcctgcctcttcccataagatgacggggaaaacatcaaaaacattgagattcattttgtgtggtatacagattttttaaaaattaacttgtgcccagtttctaaatcatctaatgtaaagatacatgcatttcaggaaattatgaaagtaaacgtcaaagaaaaccaactaagaaacttcttgaatccaatgatttagaccctggatttatgcccaagaagggggaccttggcctttctaaaaaggtatgttatttttgtaagttctaaaagaaataaactcaggaaatgagaaattttaaaaatgacattttgagtagcagttataacattgatgtacatacatatagaaattagtgtgtgtgtcagcagtcatacatgatctgagatttcctacatgaaaggctgttttgcagttgtgtgaccatgtatgtgtataaactggtttcaggtttcctttccaagtgaaaaaaatttttaaatgctttgaagattaagtttgtgtttgttataatttcttttctgggttcaaatcctcttacctgttttctactaaactactatctcaaatatcactagtctactctcctattgccgtgtcgtcgtagcccttttgttttgtttttttgagacagggtctgattctgtcacccaggctggagtgcagtggcataattttggctcactgtaatctctgcctcccaggc

SEQ ID NO: 118995 - DNA, 1031 bp, Homo sapiens
catttcagtcacagaaagcattgtgtatctagtctatatgttggaaatctctggcaagtctttattttttcttaaggagtaggtggtgttcacaggtctgttggagcattgtttttgttttgttttaagatggagtctcgcttttgttgcctagactggagtgcagtggtgcgatcttggctcactgcaacctctgcctctccaagttcaagcaattctcctgcctcagcctcctgagtagctgggattacaggcatgtgccaccacacctgactaattttgtatttttagtagtgatggggtttctccatgttggtcaggctggtctttaactctcaacctcaggtgatccacccgcctcagcctcctaacgtgctaggattacaggtgtgagccatcatgccctgtctgttggagcattttaaaatctgattcctttccccctgaagtttccgttcaaccctttactgtggtcaggttgatttctttaattgctaaaacaagtcaaaattcaatatccatggcagctgacaattcagactttggcatataaagtaaagggtttattttttcattcctctgtaaatggtgttgttttcacttatttatagtgctatgaagctggtcacctggagaatggcataactgaatcttgtgccacatcttattcaaaagattttggtggaggtgagtatttttgagatttaaaaaacgtaatgcagtagtaagtttgaagtgctttgtctgttaaccacaaaaattgttacatgtgtaagcccgaccagtgaggtacaagttttaaaactggtttgcccaaaatctgcttcctgaaaaagaaaaaatattgataaattgaatatctactctaccaggacttttagtaggaatgctacctgtaatctctctaaagcgttacagagagttaggttattatctatagtattcctgttttatagaagaaatgtgaagatgaacaaggtagcaaggtcagggaactaaatccacacctgaccaatttcatggtcatactc

SEQ ID NO: 118996 - DNA, 1017 bp, Homo sapiens
ttaatctttaaatcatatagtgatttgtattattgtctccagtcttgaagtctagggagtggtatcttttgatgactagtaaaatgcatttccccttcatctataggatttaattcctttgaagaactacaagatttgtcatttcaatcatataaattaaaatttctgtaataacctatacacttactatttaatctatatgagggagcagttacatatatgtagccatttcccttcttgttatgtcatcatgagttagtctcaattattatttcccccgttttcctaatccacaaagctggagaattaaatgagttttaaggttggtttttattctaataataggataagagattttggacatgtgtgttagtagccagcagttaacacctattttcctgtcataggcactaccaagatatttgacaagccaaggaagcgaaaacgacagaggcatgctgcagccaagatgcagtgtaaaaaagtgaaaaatgatgactcgtcaaaagagattccaggctcagaggtattactcagttcctgatcttttcaccttctaaagagaagctacttttcacgccagaggccacatccctctttcccttgagttttcttaagaatactattctactgaaatggctgatggccataaggaatcttggaggaaaagtagagccttatcctaataataaggcaaggcatgtattgcagctgtcaatatggtctttttaaaagatcatcacatcctatgctgtaggtgtccaatcaggtatataagtgtttcatcgttaagtaaacttgtaaaaccggagagtacaatatcaagtcaacatatgatctgaaggaacatagatactgtcctataaaagttgagactggccaggtgctgtggctcacgcctgtaatcccaacactttgggaggccgaggcgggaagataacttgaggttgagagttcgagaccagcctcgccaacatggtgaaacctcatctctactaacaatacagaaattacctg

SEQ ID NO: 118997 - DNA, 1103 bp, Homo sapiens
aagatttaaaaccatttacttgcaaagcatcagtgcaatcattgatattatcttcgggtttccaactcaggttaaaagagagaagtcaggtcagcatcacacattatgatgcagaatgtttctttccaggacaatttgaatagaatgcccaagaggggcattatttaggaaacactgatcttggaaggacaaataagtaatcaaataaacttaagaatgttttctctcccttagtgaaaccttaaaatggaacagctcagaaagttccagtggaacaaacagcctcagagcagttagtggcagggcatgaggcgcccactacccgcccaatcacagcagggttagaactaacattgcatgcagtccgcccgagtgattggctgaacatctgtaagtgcttaatggctagacaaatagcagcccagagggagggggtcaaatggaagagacatcaataatacagatgtgggacattattttttctttgcaagggagaactaatgcctcacaggacggccacaagccccaaggagactgttgaggaaggtgtagaacacgatcccgggatgcctgcctctaaaaaaatgcagggtgaacgcggtggaggagctgcactcaaggagaatgtctgtcaggtagagaaatgtttgcccacttgtgttttcattgcatgttcatctttaaagggaaacccactccatctctttatgatggtttcttggtagaataacaatgcttttggatgattccagtggagtcactttctttaaggatttgacccctttttttctccccacaaagaaagatacttggagaaatagtttagtgttggtgaaccacgtgcccttaaggcccatgaaggaatatatgccgcgaaacaagtctgagatggaatatgtgaatctctggttgcttattcaaatataattctccagtacttctcatggtgtcacaatctttgggtttgtaagaaacttttcaagggtaattttagctttgagatgtttttcctttaatgtggtgactttagaaagcctaccacctatattgttttatttatttaataaatatttgtagagtatttactatgtatgaagtattgt

SEQ ID NO: 118998 - DNA, 2526 bp, Homo sapiens
cagttcgtgcctgtaattcccctgctggggaggctgaggtcattggatcacctgaagctggggaggtagaggctttagtgagccatggtcatgccactgcactcccacctgggtgactgagaccctatctcacaaataataaatagtaatagataaataagttgagatctctaaaaaagtaaactcagaccagaaaatgttattgtggccaatataatttcaatccagtttctttgcctattatcttcactattacattcttggaccagatcccaaacaacagtcttaatcctcaaaaacagttatgcccattatttacttagtgagacaagtcagagtgtaaatacattttacaaagatcatttaatgaaaaggttaaaggtaaggtgaccctgtggtcctggcttgtctggatcagtctttgtgtaggtcccttgtgctgtcacaatttattaatagcacttcttttcactctcaggtgtcccggtttgaaagataaattacgtggttatcccagttgaataattagtctataacatttagttaatgcaaaaactttatttctaattcacgttgtaattaacgttttcctatttaagtgctgaaggtcagtttttttttttttttaccatatatagaaacgttattggcactctgaatatgcaaagtacaatatatagtgctatttttcagtttttatatgtgaatagtagataatggggagtcagacatttgaggatatctcagactataggttgataaagtccctgagttcccctatcaattccaggctacctctctaacctttctccctaaagctgtcctgttttttatttaagctttgattcttaagtgatcaagacctattctgtttctatgagttcttgaagctaaaacttacttagtcacctttccccttgtttgcttttcatagtagtacaaggctttaaaaatatttgggctgggtgcggtggctcacacctgtaatcccagcactttgggaggccaaggtgggtggatcatgaggtgaggagtttgagaccagcctggccaacgtggtgaaaccccatctctactagaaatacaaaaattagctgggcatggtggcgcatgcctgtaatcccagctactcgggaggctgaggcaggagaatcacttgaacccgggtggcagaggtggcagtgagccaagattgcgccattgtactccatcctgggcgacagagcaagacttcctctcaaaaaaaaaaaaaaattgataaatcttacaatgttttatagtgacagatgcccattgttatttcctaagcgcctgtcttaagtgaggccctatcttagctgagattatttcagaaaagtgatctctctctgggatggttgtaggtatgtcccaaaagggctgtttagaccttggtgggagctcttttggaactttatgatccaactctagctagccagtgtctgttgcttgaaccattcagtagctttctggtttatctctatgctcttttctgacctttctactcttgaactcgttttccatgtagcagtcagaacagtctttttaaaaatgaatacctgattttagctttcctttgttaaagctctccaatggtacacctttgtaactagactaaaatctacaactacgggcccttgcctctttctcacctccttttctgccacttttaacctttgtttactttaacccactgacactggttttactcttgattctcaaacatggaaaaacagatagatgttttctttctcttaacagaattgtgaaaaattgggtgagctgctgttatgtgaggctcagtgctgtggggctttccacctggagtgccttggattgactgagatgccaagaggaaaatttatctgcaatgaatgtcgcacaggtaaagtagatatcgaacggtcttcctccaaagaaagtttgaattttaagtttttcaggaaagacatttattggagacactattttgtggcaacactgggctagttgttacagatatagaaatggtgctgtggggtcactgctttcagaaaagctaccaagtgaataataaatgggtagcataatacagtgcaaaaagcattgtgttggtgatacatttagaatgtaatgtaagcaaagatgagctgatgccatagaggaagatatctgtgtttagctttaagagagaaagagaaattgatgtcgggaggggaagtgcagaaggtctagtaatgaaagcgtgtaaaacatttggggaatatggaatacaggccaatgtgtttatagagtttaggatattttaggtaaaaggcataggcagtaactaagagggcttcttggttactggtaatattttatatttcttaatctgcgtagtgattacatgagcatgtttacttcatcaactatactcttaggatgcgtgtactttatggtgtgtacattatacatcgataaaaatatttaccaaaaaagtaaaaagattatttgcgggttataatgcttagattgggttagaaaata

SEQ ID NO: 118999 - DNA, 1339 bp, Homo sapiens
tatgtcgggtgatttcctgtagtgtaaacttttttatacatctcttaagtttctacttatctttaacaatactgcccccacactttttttttttttttttttttttttgaggcagggtctcactcttatcacccaggctggagtgcactggtgtgatctcagctcagtaaacctccaccttccaggctcaagcaatcctcctgcctcagcctcttgagtagctgggaccacaggcatgcatcaccacgcccagctaatttttgtatgtttagtagagatggagttttgccacgttgcctgggctggcctcgacttcctggactcaagccagccactcacctcagcctcctgaagtgctgggattgtaggcgtgagcctcctctcccagcccaacttaaatttcgttggttgcctcctggaggtatccccttaacttgttcctctgtcatccatatttcctgtaaacttgtagttagtccaggggcttgattaggtttaatttcagttttttctttttttggcgggggtgccagcggcaagcattttctgtagacaatatgtactttctgttgtatcacgtcagggagtatctattaccagattgttcatttataataatactaagattgttacagtgggttcagacgatgtcaaaccgatcagtccattataaaatttcttatgaacttttcacctaatggtttagcatttggtagattcttgaattcttactaatttatcttcttttggcttctcaggaatccatacctgttttgtatgtaagcagagtggggaagatgttaaaaggtgccttctacccttgtgtggaaagttttaccatgaagagtgtgtccagaagtacccacccactgttatgcagaacaagggcttccggtgctccctccacatctgtataacctgtcatgctgctaatccagccaatgtttctgcatctaaaggtatggatttcttatgtggaccagtctaattgtaaaacctcagtttaattggcaacagatattttcttttttctttctttttttttttttttttttggagacagagtctcgctgtgttgccgaggctggagtgcagtggcgtgatcttggcccactgcaagctccgcctcctgggttcacgccattctcctgcttcagcctcctgagtagctgggactacaggcgcctgccaccatgcctggctaatttttttgtatttttagtagagacggggtttcaccgtgttagccaggatggtctcgatctcctgacctcgtgatccacctgcctcggcctcccaaagtgctgggattacaggcgtgagccgctgcgcccggccg

SEQ ID NO: 119000 - DNA, 1101 bp, Homo sapiens
tggctaccttctcgtttttaattgttattacagattgcattagagggtttggtggtggtttcgtgatggtttataatagatgaagtatttgaggggatgtgtttcctctggagagggtagagaggttcgttcacttgaaaggctttaaaagaatcacagagttccaggcaagcattattgttgtctcccctctccctatttattctggggctgatttcctagttgtcaggacagtggtttgagttgggctttcccttgttgaagcaggctcactgacagttacgggatttgattccttttggagacttatcacatagctcccatctgagttttcttgatggatcgagtgtttaagatccatcatcttagtggtcattccttctatttgtgacattttttcagtgctaacaaatagacttgaataactcacattctttttatatttaatatttttgtttttcttttgcttgtccctgattttcctgctttaggtcggttgatgcgctgtgtccgctgtcctgtggcataccacgccaatgacttttgcctggctgctgggtcaaagatccttgcatctaatagtatcatctgccctaatcactttacccctaggcggggctgccgaaatcatgagcatgttaatgttagctggtgctttgtgtgctcagaaggtaagaaatcatttcttcctctatttgtagtctaaaaagggattaaatcaatgttttaattggaacaaaaatacttttcatcatattgccactggaaaaaatattagaaatgatactattcatctgccattcaggaaatgatgtcccgaattaatgattacatagcagaactttttttttttttttttttttttttgagacaacgtttcactctgttgcccaggctggagtgctatggcacaatctcagctaactgcagcctccacctcccaggttcaagcagttctcctgcctcagcctcccaagtagctgggattacaggtgcccgccaccatgcccgactaattgtttgtatttttagtagagacagggttttaccatgttggccaggctggtctcaaactcctgccctctagtgatttgcccgcct

SEQ ID NO: 119001 - DNA, 1013 bp, Homo sapiens
taaccatatggagatactacttatgtgtcagacgctactaggtaatttattagctaggtgaatcttcaaacagatgtggttattgtttattagagaaaactccttaccgctgaggaaattatagctcagcaaggaaagtgaatttcccaagggcctgtggtcctagagctagaattccaacctgaacctgacgagagttaaataaagcttatgctgtttatactctggtcattatgtgtcactgataatgtttttatttagtatatcttttagtgaagagaaagaaaatatatatatatatgtgtatggatgtacacatacatgacttgcagtcttgtgatctgaatgccacatttttttattcccacaggaggcagccttctgtgctgtgattcttgccctgctgcttttcatcgtgaatgcctgaacattgatatccctgaaggaaactggtattgcaatgactgtaaagcaggcaaaaagccacactacagggagattgtctgggtaaaagttggacgatacaggtaagcctgaagaatagcactcatctcttttaccatcctctgtttcttgagacctctcagatacaatgcttaacgtatttctaatgatctacttaattactcatggtactcctcccctcttcttcttgatttttttccttataggaagagaaacctaactttatgatttacaattataggaataatacatgttctctgtcgaaatttttttttcttttgtgtattttgtgaaaagtttttttttttttttttaaatgaaaagacagtaataatctcacaaggcaggcgcattgttaacatttcggcatatgtactcccagacgtaccaatacgcagttatgccccccaccatccaaaataactgtttttacagattatactctgttatgtgtcttgggttgtttgttttgagacagggtatcctctgtcacccagtctggagtgcagtggtgtgatcattgctcactgcaacttcaaactcctggg

SEQ ID NO: 119002 - DNA, 1034 bp, Homo sapiens
gtaccatggataatactattattttcttgatgttgagcatttatactttttccagtttttccttcttataatgcttcagtgaatgttattgtcataactctctgttcctatatcattatttcctttaagtagaatccttgaagtagaataattgagtctaagggagtgcgcgcctgtgtgggaatgtgggcagatgttttccagcttctagcacatacgacttgtttgtgttctagttaggttgtaagaatgccgtaagatggactttaatgtggacagacagacattgctaatccttacttttatatgagtaggttattttcctaatgccttgcagccttctagaggttttccttctccttttcacctttcccaggtggtggccagctgagatctgccatcctcgagctgttccttccaacattgataagatgagacatgatgtgggagagttcccagtcctcttttttggatctaatgactatttgtggactcaccaggcccgagtcttcccttacatggagggtgacgtgagcagcaaggataagatgggcaaaggagtggatgggacatataaaaaaggtaactttatcctttttgtttctcaggcaaacacagacctctgttacctgagtgtctgatctgttttagaattcacatatgctccattttgaaactgcctttgtcctctcagggcattatctggctgcaaatacagtattttgcaaggaagttgacccatgtaactcattatttttgagccttaacctttacttaatttgaatttccttgagcttttttttgacttatcagttgttttgtcagcattccatcaaataatggagttctgaaactatttcatagaagaaacacttcagtttgctagacagaggctcagatctctagcagagctacatttgctccaaggagtcttgtcttgtcttgtcttgtcttgtcttgtcttgagctcgttgggaagaagtaaaattcaccagatattgtagaacaaactagtaaaggtcaaagcataaatg

SEQ ID NO: 119003 - DNA, 1040 bp, Homo sapiens
ataaaaaaaaattagctgggcatggtgatgtgcgcctgtaatcccagctactcgggaggctgagggaggaaaatcgctggaacccgggaggcagaggctaatgccactgcactccagcctgggtgacagagcaagcgagactctgtgtgtccacccacccctccccgcccgccccaccaccatcaccaccaaaaaagaaagaaagaaagaatgagactaatggtgaattgttcatggggatggagaatatgatttatattggatagatgttaaggaggtagactaggacatgctgaataatgttctagtctacctccttagaagaacacattttaggaaaatttagatgattctcctggaaagaacacattttaggacaatttagatgactccatggaacacatacaaactctggtagatggctacaaggaaatgaagaaaaaaggataggtcagaggggagaatttctttaaaggattgacagacttggggaaaggcacagagaaagtgggaagaatgggattctcagagtttttaatgtgggtgaagaataaggaattacagttttaagtgcagaatgagaatcttaagattttgttggacttttcagatactgcaatcttttaaacatgagaaagtacaggggccgggcacagtgactcatgcatgtaatcctaacactttggaaggctgaggcaaacagataccttgaccttaggagtttaaggccagactgggcaacatggcaaaaccttgtctgtacaaaaaaattagcctggcatggtggtgcatgcctgtagtcacagctacttgggaggctgaggtgggaggatcacttgagcccataaggtcgaggctgcagtgagctgtgattgctccattgcactccaaccagagtgttagagtgagaccctgtctcaaaaaaaataaagtacggtacttgagtgtagattagctatgaagatctgtgtatcattagagctaatagtttatatttacacaacaagtcttaggataagaggcaagaaggagaacaaagc

SEQ ID NO: 119004 - DNA, 1080 bp, Homo sapiens
cagttgtctaatcttttggcttccctgggccacactggaagaagaattgtcttggaccaaacataaaatacactaacagtaacaataactgatgagctaaaaaaaaaaaaaaaaaaaaagtccatgcataatttttatgatatccgccaccacagataagcaaaaaagttctcgtattcagatggatggatgccagtgatctaaagggtgatagtctgtattgtgccatttagttctggattatgttttgtcttaatactatgtctgaataccctttggactacattacctgtttgaaaatagctgttatgtgttttctttttcatatagcattggtcgatttttgtgtaaaacatggagtttctccaacttaaaggggaaaaagtaaaaaataagtgaataaataagtaattccacccagagattttgaagtgacttgtgctgtctgttttcatagctcttcaggaagctgcagcaaggtttgaggaattaaaggcccaaaaagagctaagacagctgcaggaagaccgaaagaatgacaagaagccaccaccttataaacatataaaggtgaggagaaaatcttgggggaccttctctagaagagaaatggaatagctggctcttcccactctgttcatgacaagaacggaagcacaagcatagttcgttttaggtagaggtatgagcttaaaagaagatcagaaatagccgggcacggtggctcacgcttgtaatcccagcactttgggaggccgaggcgggcggatcacctgaagtcaggagtttgagaccagcctggccaggcaggtgcctgtaattccagctacttgggaggctgaggctggagaattgcttgaacccgggaggcagaggttgcagtgagccgagatcgtgccactacactcaagcctgggcgacagagtaagactccgtctccaaaaaaaagaagaaaaaaagaaacaagtaccagaacaccattcctagcgcattgccaggattcccagtgtcaggagaattgattttaggtggacctaacctttaacctacctagtgaaatagtcatcaccattatcatct

SEQ ID NO: 119005 - DNA, 1374 bp, Homo sapiens
ttattttattttattttattttattttattttattttattttattttttgtgaccgagagaccgagtctcactctgttgcccaggctggagtgcagtggcacgacctaggctcactgcaagctcagcctcccaagtagctgggactacaggcgcccaccaccacacctgtctaattttttgtatttttagtagagacggggtttcaccgtgttagccaggatggtctcaatctcctgacctcgtaatccacctgcctcggcctcccaaagtgctgggattacaggcgtgagccaccgtacctggctcgtattttatttttttgagatggaatctcaacatatcggccaggctggagtgcagtggtgaaatcttgtctcactgcaacctccgcctcctgggttcaagcaattcttgtggagttcatattttgtatgtcaagtgaggctctgtttttatatgaaactaagtgttgatagttcaaaatcatgggaaatgtggctgcaacttcaaggaaaaaaagtttgcctttttcaggacgtgaattgtcttctgctgacttgttttatgcggtgtactttgtgttacttttccaggtaaaccgtcctattggcagggtacagatcttcactgcagacttatctgaaataccccgttgcaactgtaaagctactgatgagaacccctgtgggatagactctgaatgcatcaaccgcatgctgctctatgagtgccaccccacagtgtgtcctgccggagggcgctgtcaaaaccagtgcttttccaagcgccaatatccagaggttgaaattttccgcacattacagcggggttggggtctacggacaaaaacagatattaaaaaggttagaaaaagctaaattaccatatactttctcctctttgcagttgcttgatatcattgatccttgacattagaaaattcatcatagaagaaaataacacagttaataattaaccttattgttgtgtcttgccatatccttctaccgtttagaggcttacgaatggatggttttgatctcccaagtcctttgtattgatcatggtcactgtgtaggaggttggaaaaaatgggacattcatagagatgctatggctttgtttgcttttttgtgaatatcctacagctggtaattaagagagatgacagtgagcacatgatacagagacattgatccacctactaataaaacatttttagtgaggaaaaaacaggtctggcttcatgaaacatgaaggataagaaggttaagccttattggatgaaaatgcagtcatgtcttcaacttaaaacttggcaggatctctaagtttctaataaataaataatattgtatagtcttttttttttt

SEQ ID NO: 119006 - DNA, 2838 bp, Homo sapiens
aaagtataaagggctctagagatgtgtgacaaaggaactgaaactagtttgtctctgatgatattatattttattttatttattttttgagagagggtctcactctgtcgcccaaactggagcgcactggtgccatctccgctcactgcaaccttcaacttccaggctcaagtgatcctcccatctcagcctcctgagtagcagggactacaggctcgcatcaccacgcctggctaatttttgtattttttgtggaggtgaggtctaaccatgttgcccaggctggacttaaactcctgggctcaaattatcctcccagagtgttgggtttacaggcatgagccatcactcttgacttgtgaggctattttaaattgagacttgaaatataagtagctgttgacccaggcaaggtgcattaaagccctgcaggttaggagtgaacacgtgtgaaaagccagagtgactgtagcataatgaatagggaggatggtactttgaaatatagagcagagcaagcaccaaggaagatgaacatagtttatttggggaagccaattctcgggctctggggcaggtagagattggccatccatctctctttataaggacgctctagtttacttactaatcttccattctggaggatctttagtatccagtgtatcctaatctttctgctgctgacagtggtaggagtaaggaggtgtttctcattatcaaatagttggggatcgtaaagtaattatgtgtgcctaaaattatactcatgtaatctgctttgtagaatgtgatgttttcattaattttttaaaaaaatgtatacatttggataccagtgtccttttttgccattaagtcaggaggtatttcttgttctagggtgaatttgtgaatgagtatgtgggtgagcttatagatgaagaagaatgcagagctcgaattcgctatgctcaagaacatgatatcactaatttctatatgctcaccctagacaaagtaagtaatgggaaatgctgttttcactgttacaagattgtaaatttgtgttgtcccagccatagtatttgtaggcatgtaacgcagttcccaaggtagggtcttttcccatacccattgggattgctggattggggttctggagtaggtaagagtgctcattttctgggtattcatggccagaggcaatacagcagcttttagcattgtttttgaacaattcaatgaaaattggagcttatatctttgagtattttttctacaggattacaagtttgaactcagaaaagtacataattcttttttattttattttacagttgagaaaattgttaaatatttaattattttactgataagattatgtaaatttttttttaaaattattttgagacagagtctcgttctgtcacccaggctggagtacagtggcatgatctcggcttgctgcaacctctgcctcctgggttcaagcgattcttctgcctcagcctcccaagtagctgggactacaggcatccgccaccacgcccggctaatttttgtatttttagtagagacaaagtttcaccatgttggccaggctggtctcaaactcctgacctcaggtgatctgcctgcctcggactcccaaagtgctgggattacaggcatgagccaccgcacctggccttagtttttataataaaaccctttcttggtatttacctttgtaaacatttctcaaattgtgcactaggatttgtgagatcttcacttccagatattctgatcttactttgggattgggactccgcattagtatttaaatctccttaggtgatttctaatgtgcatctgggttgaaactacctaaatagaaagtgggacaagctgctatttgtagggcagtggtcctcaaacttcaatgtagtcagaaacccctggcagccttgttatatataacgcagaatgctgcaccccacagtctctgctttagtgtatttgaagcacaacccaggaatttgcatgtctaacaaattgccaaatggtgatggtgctggtccagggatcacactttgagaaccaaagttctttgggatcttttctctgagaggttcagtctttacaaatagaaactccaacttattagagagaatagtcaaattttaatccacagcagaggtctcaggaagtctgatgtgtagcttcttttggaattctaggaccgaatcattgatgctggtcccaaaggaaactatgctcggttcatgaatcattgctgccagcccaactgtgaaacacagaagtggtctgtgaatggagatacccgtgtaggcctttttgcactaagtgacattaaagcaggtaagaatcatttcaggattctgcagctgacatctgaatttcagggcttttgttttttacaaacagcttcctcagattataattttaaacatttctatatgtaccgttctctggaattaagttcatttacatttttgtgcaaccatcaccaccatccgtctccagaactcttttcatcttcccctgctaaaactctatacctactaaacactaagtccccattcttctttttcttcacagcccctggcaactaccattctactttctgtctctgaatttgactactatatgtacttcatataaatggacaatatttgtccttttctgaccacctcatttcattcattcattgattcatttttaatgtttagggacagagcattgctctgttgcccaggctgcactacagtggcaccatcacagttcactgcagcctcaaactgggctcaagcaatcctgctgcctcagcctcctgagtagctagggctatag

SEQ ID NO: 119007 - DNA, 1123 bp, Homo sapiens
cttgggaatggaaagactgtttgcaaatgtggagccccgaactgcagtggcttcttgggtgtaaggccaaaggtaccacccttctagacttctgctttgggattagtggtgcggtcctccctccctaacagtgttagggcagtctacattttaagaagaaatctctttgaaattaatgacattcagccaggcatggtggctcatgcctgtaatcccagcactttgggaggctgaggtgggcggatcacctgaggtcaggagttcgagaccagcctggccaacatgatgaaaccccatctctaataagaatagaaaaattagctgggccgtggtggcatgtgcttgtagtcccagctactcaggaggctgaggcaggagaatcccttgaacccaggaggcagagattgcagtgagctgagatcacaccactgcactctagcctgggcaacacagcaagactccttctcaaaaaaaaaaagaaaaattcaatgacattgaataggtgttgatagggccacttgcaattcactaagcattcggctgatcaattatataagaggtttttggggatattgttgaagtgttttgggccatctgactttaattggtgctacttttctaactaataatgctgtgaaataggaccttataaagaaggttagttacctccctcgtcttgatctcacatctcctaataagccatatagattcttggtatatctgtgtctgtccctgtctttctctcactttctctttctgaagataccaaaaaatctgcagtttaagcttctaaatgtagcataacatcatagataaaagtagaactcttaatctcaccattataaaaaagtataagcattgttgtgtcttcctgtttttttagtatgcactttctgaataattgaattctaattctgtaactgttaagtatcatttccatgtctatattctccttattttttttgttgttgttgttttgtgtttttttttttgaggtggagtctcgctctgttgcccaggctggagtgcagtggcgcaatctcggctcactgcaagctccgtctcccgggttcacgccattctcctgcctcagcctcctgagtagctggaactacaggcgccc

SEQ ID NO: 119008 - DNA, 1047 bp, Homo sapiens
tgagtatgttccatatgcctttttgattgtgaagctcaacattaagaactgaaaaatgcaaattaacatagaagccaataagaaaagagtaaataaatttttttttttttttttgagacggagtctcgctctgttgcccaggctgaagtgcaatggtatgatctcggctcactgtaacctccgtctcccaggttcaagtgattctcctgcctcagcctcccaggtagctgggattacaggcccctgccaccacacctggctaattttttgtatttttagtggagatggggtttccccatgttggccaggctggtctcaaactcctgacctcaggtgatccacctgcctcagcctcccaaagtgctgggattacaggcgtgagccactgcgcctggccagaaatgaagagcactcaatgatcattttttaatcttgttaaataaggagaatcacctctatattatactggattttattgtgctttttgtttagttttgttggtttaacggtgttgttccttaagatgttgacttgtttcctataaattaaaatagtaactcagtttaacctgtacttaatggtattaagtgtagtgcggatgtcagtttcagcatccttgatgtctgcatgggatagcatttcacaggagtcagtcagaggtagatgctagagaggtcactgtgtgctcttagtagatactggtctgtcagaatagggtggacctccattaagccttacagattggtcctggatgtttctgggttaaaatgaagaatgtgataagatgatttggtgaccaagtgtgggctgcagggaacaaagagagaacatctgctggctgctccagggtctgccttgggagtggtggacctgaagctaatttgacttgatgtgtagtcttattgacggcagggaccatgaattaacttttttgtgtcttaacacattgcttatagtaagttcagttatgctttgttgaatgaacgagaaataggcatgtgtacccacacacagaagtctagtttagttctgaaagtagacgaatat

SEQ ID NO: 119009 - DNA, 7609 bp, Homo sapiens
ctgggcaacacagcaagactccgtcttgaaaaataaataaattaattaactaataaaacttatgaaaggcatgtcatttaacaccagccttatggatcagcaaaaacacaaagatttttgtcttctgttttgttcaggtggcaggagtagttgatacaaaaattattgctacgtatctgtgatgtaccaggtacctttcctgcattttatcttcatgacaatctcttttcccagagaagagaatgaggctcagagagggtagttaacccggttaagattggtactaatgtgttcacagaatgctgactgttcaatatctgacctgtagaatcaacccattgccacggaagaaaagtcaaagaaattcaagaagaagcaacagggaaagcgcaggacccagggtgaaatcacaaaggagcgagaagatgagtgttttagttgtggggatgctggccagctcgtctcctgcaagaaaccaggctgcccaaaagtttaccacgcagactgtctcaatctgaccaagcgaccagcaggttggtgccaaaatccatttgtaccgctactcgttctctccatcatactcagggtctcatgccatttgcatcagccttgaagaaagtgccatttggtctttccatgcataattttgaggggtatggtctattttcttattttggaaataatgaaagcaaaggcttagaattcttagttatgaagaatgggacagcggtgcacttgctgtgtttcaggtcctttacttacagtcatgtttatttcattcccccagcagcccataatggttggttttcttccataatgcatgtgaagaaacagagtgaggattggggaggtgatctttcacacatagatagaggagctggattgagagctgggtttttgactccaagactattaaatcatgttgcctttctagagaaagaaagattgagatagtaaagcctttaggtggttctagtcagtgagagatggattgccacccttttagcacttcctaccttgctcccctacgcctagtgcagtctccccccatgcagagtagacttttttcctctaaaggagatttggttgtatcagttaatacatgagaaagctgctcaggtggatgtggtacccaggaaatttgtagttgaagaaattgagaacctttgagtagtgatttggggttagagaattttagggatttggatatgccatctattttaatgaacaaaaaagagaaaccagtagggagccattccagggtgaggagattatacattactagtgacctgcttccaagagttgcagaacgttaagaactttagggtataagtaaaaggaatttgtccccaaattggctttccttcactgtatattggccagggtcatgaaataaaagaaactgaggtaggatgagggcaaggccatcacattgacctgtcagcaccaggaagtagaattgtttcagaatcaactgctcagggtcgtcactggcgcaggctatgatagaaccaatcttgcctgtgtgccaggagtgggagctggtgtagttgatttgaaggtggaaacactgtccctggtcaagaccctcaggtttcatgaaatgtggggaggcaggtaaaagcttaggtcagctttgggtcttttctactgattccatgtgaacaacatataacgtgctgtgctgatctcaagacttaaaatagagcaaaggtaaatcttccatttttcatgattttatatcttttctattactgttaatagcaaataagcaggaatctaaatcaccaggatatttctctttgagttgcttatttaaaagctgtatagtacaaatggagattgcaaaaatataaaagtaatatcttaagtttcatgtaaaagaaactttttgttgtccccacccccgcccccccctcacctccttgctggaaatagtcatagaaataccaatttactcttctgcttgtatatttagttgatagtagttgctatttgataattcgctgttactttatgtattctgtgcacaaaaagaagctggaattctggggcaagaggtggctggtgagtggcataagctctctgaagcagggacagtgtgaaggaaggtcatcatccacaccttcggactgtagcatagccttggcccatgtgatatgtatctcttttttcctaaacttttgatttacttctgtgttttcagggaaatgggaatgtccgtggcatcagtgtgacatctgcgggaaggaagcagcctccttctgtgagatgtgccccagctccttttgtaagcagcatcgagaagggatgcttttcatttccaaactggatgggcgtctgtcttgtactgagcatgacccctgtgggcccaatcctctggaacctggggagatccgtgagtatgtgcctcccccagtaccgctgcctccagggccaagcactcacctggcagagcaatcaacaggaatggctgctcaggcacccaaaatgtcagataaacctcctgctgacaccaaccagatgctgtcgctctccaaaaaagctctggcagggacttgtcagaggccattgctacctgaaagacctcttgagagaactgactccaggccccagcctttagataaggtcagagacctcgctgggtcagggaccaaatcccaatccttggtttccagccagaggccactggacaggccaccagcagtggcaggaccaagaccccagctaagcgacaaaccctctccagtgaccagcccaagctcctcaccctcagtcaggtcccaaccactggaaagacctctggggacggctgacccaaggctggataaatccataggtgctgccagcccaaggccccagtcactggagaaaacctcagttcccactggcctgagacttccgccgccagacagactgctcattactagcagtcccaaaccccagacttcagacaggcctactgacaaaccccatgcctctttgtcccagagactcccacctcctgagaaagtactatcagctgtggtccagacccttgtagctaaagaaaaagcactgaggcctgtggaccagaatactcagtcaaaaaatagagctgctttggtgatggatctcatagacctaactcctcgccagaaggagcgggcagcttcacctcatcaggtcacaccacaggctgatgagaagatgccagtgttggagtcaagttcatggcctgccagcaaaggtctggggcatatgccgagagctgttgagaaaggctgtgtgtcagatcctcttcagacatctgggaaagcagcagccccttcagaggacccctggcaagctgttaaatcactcacccaggccagacttctttctcagcctcctgccaaggcctttttatatgagccaacaactcaggcctcaggaagagcttctgcaggggctgagcagaccccagggcctcttagccaatccccgggcctggtgaagcaggcgaagcagatggtcggaggccagcaactacctgcacttgccgccaagagtgggcaatcttttaggtctctcgggaaggccccagcctccctccccactgaagaaaagaagttggtaaccacagagcaaagtccctgggccctgggaaaagcctcatcacgggcagggctctggcccatagtggctggacagacactggcacagtcttgctggtctgctgggagcacacagacattggcacagacttgctggtctcttggaagagggcaagaccccaaaccagagcaaaatacacttccagctcttaaccaggctccttccagtcacaagtgtgcagaatcagaacagaagtagtaccaatcaatgtcacatgaacaaacaagctgcccccagggtaccatttggggaggggaaatcttttctttctttcccccttaaaaaaaaacacatctgccccgaacactttcccactgttattctttcctcatatcccaacactcagaactcttgtgacattagccagtgggggcttatggttgtgtgaaccatgtatgaaaatccagtgggccccaaccaaggagacagacagacttgggtctctttcccccaacttttccacatggtcatcgtgaaataaaaagtccactctggagtcaagtatggaattcaattccgctggtcaggttggaaggtataggggctctcaaagcgatttccccaaccagacagagccccattgagggcacctaggaacccttgggaggaaatggtgttctttcaaatcagtggcgatttcctgagcattcacgtgttctaggccgggtgctagtcactgatgagagatacaggcctcatccctgtgagcctggattccaaggctttcaggaacctttgaccaggaagtaacaggaagttctgaggggccctggggctttagactcattttgaaatgtcctttgtggcaccagaagtggttgtgttgaggaagtgtctcttggctgcggtgtgcatgggtgcgtgtgcatgcgcgcacactcacagaggtctcctctatagatgcaagggtgctgcattgaggccagcaaggctgttggctgtggggtcgccgctgctgcttttgtctgggctgtgcagagtctcaagatcagtccttggaggagcaggtggtcaggggcagtcgggctctgtgcgaatgtagatttccagcagtggaagaaggcatttggcaagcttctctttctttgcttttgtttctacctatttttctctttgtacatgaatccaccccatccctatttccctaaaacactcaggtgctttcagatttcagagcctcgggcagtggacatagggaatctctggcaagctctgagctagacacaccagcttcaggaagagtaccagatcctgatgggaaatttcttttccccattccttttccctcctgagtggagggagtcctcttcttcgcctccctgagaattgctgtgctctgtattgagagcacctgcctgctgacttagctcaaaggcaagccagaacccttccctgaagactggcaagaggtggtgtttagagcaacgtccaggctaagagatgactcctattaactgctgattatctgttactgctgccctgagctggggcccaagggctgggaaatctgttggtgctaccctgccctaccattcacccagctcacagactgccaacaggaagtgctgtttggctagtttcctcccacttgtctacccctcctttgtccttagaccaacatgtttacctctctgctttgccaacttagccagcaggccatccccggccctaacgtctcctggccattatctcttagttatggctttcacgctctcaataggattctgtatttggtcccaatttcctcaagttcttattgaggttactcccatcaattccacggagggaacagtagttattatagaagcatttgcgctttatctaaagattaaaaatagaatctgcttttatttcccaaagtctgtctctgaggttgagacacttgaactcaggcagagggacgaggctgggcagggctgtcctgagtttaggggcctatccctgcatttcactgagacctcggaatctcctctgtgaattccacctgcctagttctcccctttcatcctctctctcttcccacatcatcaaagaggaaaagctctttgttcaaaaggaagagaaaacgtaaagcatcttattttcttttaaaagaattttaaaccatgaaaaagatatttttaaagaaattcaccgagaacattaaagttcattatattaagtatttatcatgtgtgagaataataaatatataactgcagctagtaggtccctttccctaatcttttaggtcatatgagtagggtttgcttggtgccagtcctgtgcccttttctctccagtcatctgtagttgtgatcagaaaaaggtatctgcactgcactgtcagagtctcctttcactatgttgtgtgttaaattaccgtagctctttgtttcatgaaataaactgtgaatttggggggggcggggggagggcgtgcaggccatgtaaaaattttccgtggagaagtttgattctaaagtagcttctctaaagtaggctttggtaggtaatcaacttgacagcagtctagatgtctcacaggacaggagggagtgagggaaaggggccatgattggctgctttgtggttttattttggttctttccattctccgccattcattggaggcttcgttccagacctgcctgggaaaacagcttctgagccattttggggagcagttcttcatctgaatggatggacatctgggcttccttcaagggccattgaatgggaactagaaaaccactggaaactagaaatttgagctattgggcccaccagtagcagcatgtgatactagatggttaaaatcatgaaagcagtcactatccaattagaagcagagtcacaacaactgttgggaaatgtgactcttggaggaaggtggggagggagtggccttgccagccctgtgggacgtcccctgaagtttgtaataagaccccttttccaaagggatgtgaattggagtgaaaaggaaatctttcatcttagaaaacttctggtccttaacgcagggtggtatttgggtatgtgcttggaaattgagatctcaagagtgtttgccttggagccagctccccaggaggccttttccagggacaaggcaaaagttgaaattctccatgggtagctagaaagccaatacatctagccctgctaagtcagaaaaagattatgaaaaatgttgaaatttacattcaaagcctcatttgcttatcttgctggagccaacccagtctaatagcaaaatagctgtcattgatacagaaacatcctcatttttaaatgtctgctttaccctgttactgagtttgagatgacttaaatcactgtgttgaccctcttctgaaccaaatctttagcattgatgaaaatagttattttattctttacatccttcaccccacactatggtcagggcatgaaacaccctgttgatcccttcccaggctcggcactgtctgctcactggagccggactcccaggttgtaattctaatgttgcctcatgagaacagaatggcagaaagtttagtcctgacagattcccccatagggagtaatgaggacagcatgaaacttggataggttttacccttagtccctataaggtggattttactaaggttttttaaatgatactgtcatcctcttggggtttatcagccaggttagaggagcccagtgtcctaacctctctcagatcatggcagagaaggagctgcctccagcccctttcttgctgagtttcatttgagcagttccatgtgtagacattccaagtcactgcttggtagttgctgtgggagcctgtcattggctatggccagttagttctcagctgagcttcctagggccagtgcaacagggccagaggctgctatagtgtaaattgaaataagaatagatcattgttttgtacacacacacaataaaatgtaatgatggtgctaatttcacggtataaataagcactgccaag

SEQ ID NO: 119010 - DNA, 1069 bp, Homo sapiens
catggagaatttcaacttttgccttgtccctggaaaaggcctcctggggagctggctccaaggcaaacactcttgagatctcaatttccaagcacatacccaaataccaccctgcgttaaggaccagaagttttctaagatgaaagatttccttttcactccaattcacatccctttggaaaaggggtcttattacaaacttcaggggacgtcccacagggctggcaaggccactccctccccaccttcctccaagagtcacatttcccaacagttgttgtgactctgcttctaattggatagtgactgctttcatgattttaaccatctagtatcacatgctgctactggtgggcccaatagctcaaatttctagtttccagtggttttctagttcccattcaatggcccttgaaggaagcccagatgtccatccattcagatgaagaactgctccccaaaatggctcagaagctgttttcccaggcaggtctggaacgaagcctccaatgaatggcggagaatggaaagaaccaaaataaaaccacaaagcagccaatcatggcccctttccctcactccctcctgtcctgtgagacatctagactgctgtcaagttgattacctaccaaagcctactttagagaagctactttagaatcaaacttctccacggaaaatttttacatggcctgcacgccctccccccgccccccccaaattcacagtttatttcatgaaacaaagagctacggtaatttaacacacaacatagtgaaaggagactctgacagtgcagtgcagatacctttttctgatcacaactacagatgactggagagaaaagggcacaggactggcaccaagcaaaccctactcatatgacctaaaagattagggaaagggacctactagctgcagttatatatttattattctcacacatgataaatacttaatataatgaactttaatgttctcggtgaatttctttaaaaatatctttttcatggtttaaaattcttttaaaagaaaataagatgctttacgttttctcttccttttgaac

SEQ ID NO: 119011 - DNA, 1102 bp, Homo sapiens
tgggtgaaggaactgcgcagcctagaggaggtaggtgaacagacctcactagaacactaggggctggggttttgttggcctgtggaggtgacccttgtcttctgcctcagggctgccaaatctacttatgtggcaccaagagtgacctgctggaagaagaccggaggcgtcgacgtgtggacttccacgacgtccaggactatgcagacagtagctgctcctcagccctttggggggtgggggtgtgtggctgtctgggtggatcaaagaaaatagggactgccttggctgccagggcaaggtgctctaggaggtcttcctggcctccttgaactgtggggtccaggagactccctgaactgctagccctcccttttgtctgtttatctaattctcaggtatgaggctttagtcacttctctttacagatatcaaagctcagctctttgaaacatccagcaagacaggccagagtgtgggtgagtgctgtgctggagcctcacagcaggaacatgcaggggcaccagaggaagctgaatagggcacagagggctgggtcactgggagatcccagggctactggcattgggccctcgctgatcatcatttttcctgccagacgagctcttccagaaagtggcagaggattacgtcagtgtggctgccttccaggtgatgacaggtgtgtgcttccccagcctttatggagacttactctaggcccacagcatctagcccctttcctgagttacctgatcccaacagaatggtgctgagctgccacctctctttttgacagaggacaagggcgtggatctgggccagaagccaaacccctacttctacagctgttgtcatcactgagtcagcactcacctggcctgggggaattaaaggaattccccgtaagggctggacccagctcctttctgggcttgggtagtcaaatgtctgagctaccccaggtcctcatgtcagcagagtggcgcctgcctgtgctggcccatggaacggagacagcattgggctgactgtgggcatgaggagggataaggctgatttggaccccaggcttctgccctggacagcacttgtgtctgca

SEQ ID NO: 119012 - DNA, 1064 bp, Homo sapiens
gtgaccttgcggccccgccccctcgccctctagccccctcccgcgggagtcgcggcgctgcgggtaggagccgggttgcgggagaccccaggttcggttgggattcccagccagaacggagcttaagccgggcaggcgagcgaatgacggagtagcgagctgcacggcggcgtgctgcgctgttgaggacgctgtcccgcgcgctcccaggccgccccgaggcttggggtcttcgaaggataatcggcgcccggggccgaacagcgggggcacacggggcgctgccgaagtgcaaggccacggccagagctcgagcccgacgcgctgtctggagtcgtaggttggcgccgtttggggtcggggtctgaggcttgggcgctgcctgggccgagcggagatcggggtttgcctcccgtccccgctcaggaccctgacgtggctgaagcggccccgggagcatgagcgggcagcgcgtggacgtcaaggtggtgatgctgggcaaggagtacgtgggcaagactagcctggtggagcgctacgtgcacgaccgctttctggtggggccttatcagaacgtgagtgcatccggaggggccaggcacggtgggcgggggagtggggggccggtaatctgcacctatggccccgatctcttccctctcgttgcagaccatcggggccgccttcgtggccaaggtgatgtcggtcggagaccggactgtgacattaggtatttgggtaagtcccccggccatctattcttgggagactcattcctgaggaggtgtaggtcctgcctattactggttgatttgtggcctcacagacccatttctcatagacccgtttccttatctggaaaatagcggggtctggagaacgtggccttaagtttgactcaggccttactctttaggacacagcaggctctgagcgctatgaggccatgagtagaatctactatcggggtgccaaggctgccatcgtctgctatggtaaggggggggggggtttgggctgtctcacaagaaaagatgggtgccaggctagccagagaacagccc

SEQ ID NO: 119013 - DNA, 1274 bp, Homo sapiens
tttttagtacagacaaggttttaccatgttggccaggctggtctcgaactcctaacctcaagtgatccgcccgcctcggcctcccaaagtgctaagattacaggcgtgagccaccgcgccgggcaaatgtttttatttggactgtcaggaagctccagagctgcagctggtggaaggcggctaaaacactgcatgcgtctagatgcacaaaacaaaatccaggagcaggatgggctggaaggccctttgttgatctcaagagagagaccttttgccttctagtttaagagtcagaagagaggttttcgagagcaaaacgaccttatttatggcttcttgttctgtcagtgccacttggaggtgcagtcaggggaaggaatggattttcattgtattgcttcgcctcatgaaaagtgacagggagtcagatttatgtgcaagttggcaaaatgaaagactgttccacgattgtggttggcctctgcataggtggtggaggaacgatgtgtttactgtgtgaactctgacaacagtggctggactgaaatccgccgggaagcctgggtctcctctagcttatttggtgtctccagagctgtccaggtgagcagtgttgttggggctgctggggctctgggacccagtgctttcggtgttggggctgggctggggtcagtgggcaactcagtatccttcccattctcatctcatgccaggaatttggtcttgcccgattcaaaagcaacgtgaccaagactatgaagggttttgaatatatcttggctaagctgcaaggtgagtttctgggtatgtggatattcctcatagggagaggctcattcagcctagcgggcgtggagtctgggttagtcattgccctgctctgagctgggactccttgtctgtactgggggtgggaggagggtgaataccacctttttagtggagcctggcccagaggagattggtgtcatgggggagggaaattaggttggtctttcaggcatcttctaaaggcagccacctgccgttcgcgacaggcgaggccccttccaaaacacttgttgagacagccaaggaagccaaggagaaggcaaaggagacggcactggcagctacagagaaggccaaggacctcgccagcaaggcggccaccaagaagcagcagcagcagcaacagtttgtgtagccagtctaccaccaccacagcaccccagacagctaggcttagcctctctgccctcccttcattgtactttatcattaaaaatcaa

SEQ ID NO: 119014 - DNA, 1115 bp, Homo sapiens
gggctggcaggggcggccgagcgggagcggctgcgggcggacagtctggactcctcaggcctctcctctgagcgctcagactcagaccaaggtgagtgccccgaggctgaggggttgtgtggccctcggggcgagccaggtcttctgaccggacccctccccgcgcagaggagctggaggtggatgtggagagcctggtgtttgggggtgaggccgagctgctgcggggcttcgtcgccggccaggagcacagctactcgcacggcggcggcgcctggctatgatgttcctcacccagggcgggcctctgccctctactcgtgccaggcccacttgccaggcaggagccctccccaagccttcagggctgctcggagtcacctgttggaatggactaaaaggacccttgtgtgggaacaggtgctccccaaacaccctgctgctggctgccaggcaggccctctggaagggaaggggcaggactcatcaggacctccctggacccctgcagggcaggcagcttgggcccgagcccaagcatttggctctgctgcccccaaggggacaggaagcctcttgggcctcttcccttcctggacaaggccccctgcctttgcctcacataaactgtacagtattttcattaaaagcctctttcataacttcccgtccatagtcttgcctaatgaaaacgggggaactcccaaccacagacccactggaagaggaaataatatcagttcccatcactgacactgttggccgtgccaggcagtgcacttaattctcacaacttgaggctgttctgtctccacttcacggatggtagaaatgaggctgagtgacgtgactcgcctgaggtccaaaaacagtgaagccaagattcaaaccagagccttccgactccagagctggggccaactgaattcaacaagtatttattgagtgtctattatgtgctagatactgagacacatcagagaacaaaaccaaaagccctgcccttgtcgggcttacagtctagcacttaccgccagttaacctgcaggctacctggagccccgggcaagtcaccgcacctctgtgcctcggtcctcagctgcccaatgggagaa

SEQ ID NO: 119015 - DNA, 1814 bp, Homo sapiens
ccagtttctccattctgctgctgattggaggtggtttagggcttttgctctgctacatgatactgctctaagcactcctggatgtgtcttatttatttatttatttatttatttatttttgagacagagtcttaaactctgttgcccaggctggagtgcagtggcacagtcttggctcactgcaacctctgcttcctgggttcaagcgattctcctgcctcagcctcccgagtagctgggactacaggtgtgcaccaccatgcctggctaatttttgtatttttagtagagaaagggtttcatcacgttggccaggctggtctcgaactcctgacctcaagtgatccacccgtctcagcttcccaaactgctgggattacaggcgtgagccaccgcacccagcccattttcagttttactagagggtgcctcgctgctctccaaatcgggccgtgaccacagtggggtggcacctgccgagatcccctctgtccctcagcacctgatatagtcagagctttccatttttgacaggtggatgcaaaagctttcgtttgtttctctgctagccatgttgggatgtgtgtgcgtttattggcatctgtgtttctgtgtggtggtttagtccgggccctttcttccggccgtgtaggagtgcctgtgcggggctcctctggtgatatgcccttggcgcataccttccagtgtgcctgggggcttttgcttttcaatgacgtcatttgatatacagcctataatttagtgtgatttcataatctattctaaagattttgtttttgcttaaaagctttaaaattttgcttttcaaatttggcatttaatcgaagtggagttaagctggcgtagggtgtgatgtagggaatccatttttccaattgtctccagccagttccagcaccatttaccgacccctgggtccttctgcaccctctgaggcgcacactcaggtggccacgccacatctgctcctaaccctgcccctcagcttcctcccctctcgggctggaaggctatatacttggctgagctcccggctccttccagctagggcggccgtgtgcccactgcggctggtcagatgcccgagcctgccgacgagggcctccagttcctctgggtttccccaggtgaggagatctaacagcagctggtgtggccgggcccgctcccgtcttcctgtctggaatgtggaagggacccctggcatgcagaaccccccgtgtgaccacaagggctgagtggagcacccggagcctggtggagggagagtccttggcgtggctgaggtgctgcccagcccggactgccagctgcaggggttttatgttaaaaaaaaaaatgcctatttgttcaaactactgtgagtcatgttttctgttcttttgtggctaaaagcagccctgcctttatcccctccgtgtggtgagttttctgacatgtataggtctgctccagactgccgctgatggtcacagtccattctgtgccacacacggcattaggcactggggatacaacagaggacaaaagggacaaagatctctgtccccatggagctcatagtctagtggagagatcgggtgaaataagtatgttacatagtgcttacattggtttcctagggctgccataaaggaccacaaactgaggggcttgaacaacagaaagtgattggctctcagttctagaggccggaagtctcaagtcagggtgttggcagagctgcgctgtctctgatggctgtagaggagagcccttcccttcctgttcccggcttctggccattctcagca

SEQ ID NO: 119016 - DNA, 2646 bp, Homo sapiens
acttctgaggagaaagcctcagctttctcctttcacgatcccttctctctcggtgaatggccagtgggttgggctctcttgcccccacccatgttggcattgcttgccttttaggtacccatgggacggctcctgtttctcccattctgagagcatctgcttataattctagggcctgtgtttggaagcaaagataacttccacggcttagccatcttcctggacacctaccccaatgatgagaccactgaggtaggcccctgctctatcctgctgagcaggaaaggaaggactgggcagtcggctagaggagggggccctgggacttccatggtcccagcacaagaggagcctccagggattggggtggtgggtgcccctgctcgccccacaggctgggctgcttgtggagtaaccgatgtcttggtcccagcgcgtgttcccgtacatctcggtgatggtgaacaatggctccctgtcctacgaccacagcaaggatgggcgctggaccgagctggcgggctgcacggctgacttccgcaaccgcgatcacgacaccttcctggctgtgcgctactcccggggccgtctgacggtgagcaggctaggcggtgggggtggcagctggtggccctgtgctggtcccacagaggctcaggagggcaggctgctgtcctgcgaggtgcttagcgtgctgggccctgcaggtgatgaccgacctggaggacaagaacgagtggaagaactgcattgacatcacgggagtgcgcctgcccaccggctactacttcggggcctccgccggcaccggcgacctgtctggtgagtgggccgggccaggcgttggttcccagcccagctcaccctgagggactgggagctttccatgcagttgattgcctgccttcatgtggtttctgagctcacctggctgtgttcctcctcctcctttcttctgtaaatggcctgtccgggcctcagttcctgtggtttctgggctcacctggctgtgttcctcctcctcctttcttctgtaaatggcctgtccgggcctcagttcctgtggtttctgagctcacctggctgtgttcctcctcctcctttcttctgtaaatggcctgtccgggcctcaggccttgaacggtcccttggcaaccttccccatcaacaggaggcagcgggtcagttagatttgggcaatgtagattcccagatttatctccagcccagaccgctctggacctgctcagcccttgtgcccacagctgaggccacatcttgcccatcgggatgtcagtggcacctgtgcccctctatttgcttgctgtctttccggacccttctttctctcacatggcacctctggtccatcaacagtccctgtggctttattttcacagcacgtctcaccacttccctcccctccctgactacctggcggcttcaggccaccagtgtctctcacaggagtctcccaagtggtcccctccttcaccagcccccaacagtctctcgtgagcacagcagccgtgtaatcgccttcagtaatcgccttcagcccgtgtgaggcctcctgctgctctgcgcagagctctgcagggggcgccagggcctctgtgccagccctgccacctctggctccctgctcactgctccccctgcctactgtggcttccagctgctgcctggatgcgcctgtgccctcctgccccggctgtttcacccttgtctcctagggccttgctcagatgttacctcctcagtgcggccttccctgatgccctcgtggaatgtcgtgccccctcctgtgtccccagcccactccccagcatctttgctggctttatttttcttcataatatttaccatctttgagtctaccgagtaattaattttattgtctctggccctcctgctcaattgtaagctctataaatggctgtttggcccagggcaggtgctcagcgagcactggggtgcctctaacctgctcaggcctcactggtcaccaggccgtggtggcccttggctgtggttctcggtttctctttggggccctgagcaggtgccaggcccagggccagctcctgaccagaactggcacgtgacacgggggacctgacatgggcggtttatcctcaggatgacccattccagggcctgtagtctgcccactgcccaggagcctcctctctcagcatggaagtgcttgggtccgctcagaccccagaacatccattgtttgggggtttttcagtcacatacccagcagaggagagaggtctggtaagcacccttcctgccaaccagctttcatcatttccagctcgcgcctggctggtttccctcctgccccgggttgcctggaacttcatcacactgtttcagcccttgtctttggagggttcttgataggagcagagcagcaccagtgctgtggccggtggcagctctcacagctgttgggagagcccagcacagagtggaggaggcaccatgaggggagccgtgtctgaccactggtcaggggtcatcagtgccaggcaccttacgggtgatgtcacctgatgtatttttaggcagatggccatctcgttccctttttactcaaccattgggagtttgaaaactgaaaggatttttcct

SEQ ID NO: 119017 - DNA, 1029 bp, Homo sapiens
agtcagttagcctctctgggcctcacagccccaaaacagctgtgcccacctgagggttgtggtgagggttctgaagaagattgtggctaccacactgcagagctggaagctgttgtgggggcccagggcctggtggtgtgggcacatgccccacccatgtgctctcgggctgtggacccagcagcttccatcactgccaacagagcgtgactatcacagcctgtgcgagcggcagcccattgggcgcctgctgttccgagagttctgtgccacgaggccggagctgagccgctgcgtcgccttcctggatggggtggtgagtgcagcccagccctgcccagccccgcgggtggccgaggtcctggccccatgtgcccctcctccccacacctgctgcttgccctgcccagacctccagcttctttgctttccaccctgcaggccgagtatgaagtgaccccggatgacaagcggaaggcatgtgggcggcagctaacgcagaattttctgagccacacggtgagtgagcagcgatggagagatgatgggagccaccagagccccgtgtcaggcacaggagtgaccacagtgtcaggcttctgagggtggtctcttcatacagacacatgtaacacacagcctggacagagagtgccctggagctgctccaggcagcacggcgggcatgcagcccagggtatgggctgggcttgggccaggcggcctcccagtggctctgctgcgctctgcctcatgggtgggcagcaggaaggacttcagcaaccaggctggctggcacaccctggcctgcagcctctcatggcaccagcccgagttgcctgacccctctcccctggaagtgggcagccatccaagggagcccctgcactgacctgtctggggcttgttcccagggtcctgacctcatccctgaggtcccccggcagctggtgacgaactgcacccagcggctggagcagggtccctgcaaagaccttttccaggaactcacccggtaagcctgtccct

SEQ ID NO: 119018 - DNA, 1038 bp, Homo sapiens
gtcaggggctggcgggtgagctgggcctgcctttcctcaacaggctgacccacgagtacctgagcgtggccccttttgccgactacctcgacagcatctacttcaaccgtttcctgcagtggaagtggctggaaaggtgagctccctgaaggctgggccgggacaggccaggtcgccggggttcttcataggccttgggctctcctgctcagccagcgtttgcttccccaccccttgccacaggcagccagtgaccaaaaacaccttcaggcaataccgagtcctgggcaaaggtggctttggggaggtgagtggccaggccagagcccctgggagagtgaatagggtgggtgtgttgggacctggaccaccccctggatgcccagcaatggcacagctggcccccattcgcccctgtctgtctggccacaggtgtgcgcctgccaggtgcgggccacaggtaagatgtatgcctgcaagaagctagagaaaaagcggatcaagaagcggaaaggggaggccatggcgctgaacgagaagcagatcctggagaaagtgaacagtaggtttgtagtaagtacagaaggagactctcccttccccttggccacactggcgcaccgaccgtccccaccccccaggccccaccctcccatgtgggatgccaggaagggcgggtttggggtgttgacaccaggcttggggagcaggctgggcccaaggagtggcaccgagaaggcttttttgggcagccctgccgccaagcgccccgcagctcctgcctgagggctcgggtcccctcggccacaggtgagcttggcctacgcctatgagaccaaggacgcgctgtgcctggtgctgacactgatgaacgggggcgacctcaagttccacatctaccacatgggccaggctggcttccccgaagcgcgggccgtcttctacgccgccgagatctgctgtggcctggaggacctgcaccgggagcgcatcgtgtacaggtggggagggctcggccaccccaggggcttagtcctt

SEQ ID NO: 119019 - DNA, 1613 bp, Homo sapiens
aggtattcagaaaataggagtttccttcttctcgctgatattaaatccagaagttgcaaaatggtagccacatgggcccaatttggcctacatttgtgtttaagtcaaactgtttttagtaagccagatggtttcacatacaaaatacagatttctgacttcttgtgtaaaatctgaagacccggggaccctgggcgcggcctcctgcagggccgtattcaccccgcttgatggggcctgtgctctcctactggccaaggtcccccctggccagcgggtgtgagtgtatcccagacctaacgtgcactggcgttcctggggcctgagggtccactgcccgcctcctgcccagccctaactcccatgccgcccgcccagctccggaggtggtgaagaatgaacggtacacgttcagccctgactggtgggcgctcggctgcctcctgtacgagatgatcgcaggccagtcgcccttccagcagaggaagaagaagatcaagcgggaggaggtggagcggctggtgaaggaggtccccgaggagtattccgagcgcttttccccgcaggcccgctcactttgctcacaggtacggcagctcacagaagcctggccagccagggctggggtggatgcacctttccctccctcccacccactcacctgcctggcctgcctggccgactcacccctgccacagctcctctgcaaggaccctgccgaacgcctggggtgtcgtgggggcagtgcccgcgaggtgaaggagcaccccctctttaagaagctgaacttcaagcggctgggagctggcatgctggagccgccgttcaagcctgacgtgagtgcagcccactcctgctgagggcggggcccagccagggctggggctcaggggctcttgtagtatcagccaggatgcttccagtgcaagtggcagaaaaaacaatctagtggcttagccacagaaataaagataattcacaaaaaggaaaagccccaggatgggtctggcttgtggcatgcctggatggggcttggagcctctgacaatgtcctaggaactctctctccttcccctcactgtaccgttgagtgtgtagtcttcatattggggtagctctccccatggtgcggcagcagtgggccccagcagctcagccaccacagtagacagagagcttctcttctcttttctcttctcctctcctctccttccttccttcgttcttttttcccttcttttttcctttctttcctttcttccttttcttttctttttggagacagggtcttgctctgtccccgaggctggagtgcagtggtgagatcttggctccctgcaacctctgcctcccaggttcaagcgattctcctgcctcagcctcctgagtagctgggattacaggcgcccaccaccatgcccggctaatttttgtatttttagtagagatgaggtttcaccatgttggccaggctggtcttgaaatcctgacctcaggtgatcctcttgcctcggcctcccaaagtgctgggattacaggagtgagccatcgcgcctgcccttgcccaataatttcaaaagaaatcctcatgggggaaaagaagtcccaaagct

SEQ ID NO: 119020 - DNA, 3048 bp, Homo sapiens
tcccagtgtgggtctggggaggtggagcagtgggagaccgtgccagtcctctgattggctgggagagaagacggcaagtcccaggtcatcgcagggcggggagccagggagtcaccagctccaggctctgcgtggtggtgcccagcggaggggccggctgagattcagcctgtactccccgccccaactgcatacccaggaagctgtgggcaggcgaaggaggtgcctggcattggcctttacacagcctcacagtcattgagcagtgaggaataacgtacgcagttcacagaggggaaaaccaggcttcggagagaagggcctgccccacttaggaagtgcgtggggcacctggtttctccaaatcagagagctgctggtgtcaggcagcactaggccaagacccgaggcagaatcagggctgagctgccttcgcgtgtgcgtgtgtgtgtttcctatctgaccgttgcctctgtcccaccagccccaggccatttactgcaaggatgttctggacattgaacagttctctacggtcaagggcgtggagctggagcctaccgaccaggacttctaccagaagtttgccacaggcagtgtgcccatcccctggcagaacgaggtgggggcctgccctgctggtggggtgggctccaggaggctgccctggggacagctgtcacagccgcctgctcctcagcagatggtggagaccgagtgcttccaagagctgaatgtctttgggctggatggctcagttcccccagacctggactggaagggccagccacctgcacctcctaaaaagggactgctgcagagactcttcagtcgccaagtaagccccagcagcggcctacctgggcccctaacctggctccaggggacggtgggtgggaggcagagccggtgcccgcatgcgctgggagtgggcgtcctccagtcctgttgtggtgcccagggtctctggcctcattcccgcctgtcccccacccctggctgggctcatggcctcttttctctttccagaggtgagcagtgtgggctccccgtgggttggccttgctgcctggcctcggggagccacgggcagcccttccatggcaaaggcaagatgtgggagaaagaagtctggtgcccgccccactccccctgcccactgctttgatcccctgcaccctggccccttcgagctgccagctttgcttcgcttgtctccccgtgccctgtctctgccagccccaggggagagggctgggcagaggccttgccctggcagaccgtgggatctacccagcccccttacttcagtctgttgccggcagcctctgcaatgacgcccacccacgtgtggcctgagctgctgctccaggctccttgtggagaggcccctccccagagtgcacccctcaggcagctcctggcctgccctggcagggtcggccccatgtgacgtccctcgtggttaatggcacctgctctgcctctctccctccctccgtgtcttccccgtccctccaggattgctgtggaaactgcagcgacagcgaggaagagctccccacccgcctctagcccccagcccgaggcccccaccagcagttggcggtagcagctactccgagcgccgtttacagttttgcacagtgatcttccccattgtccactcaagtcgtggcctggggaacacagacggagctgtccccagtgtcctccgtccctcagcccctggcctggctgagtttggcagggcctgggccatccctgggacaaaggtgcgtcccttcagctcttctccgtggagctcggggctttctgtatttatgtatttgtacgaatgtatatagcgaccagagcattcttaattcccgccgcagacctggcgcccccgccttggctcctgggggcagccagccctggctgggagagcgggagctggcagaggagccactgccaaactcaaggctcctctggcccagcttggatggctgagggtggtcacacccctgagccttcagcactgtgctggccaccccggcctctgagtaagactcgtgcctccccctgctgccctgggctcaggctgctaccctctggggcccaaagctgtcccttctcagtgcttgtcagcgctgggtctggggcctctgtatgccctaggcctgtgccaaagtggccagagattgggctgcctgtgatacccatcagcccactgccccggccggcccagataggtctgcctctgccttccagctcccacagcctggtccctgatactgggctctgtcctgcagacacctctttcagaaacgcccaagcccagcccctaggagggggtggggcatccctggtcaaccctcaaacattccggactcccctcataacaatagacacatgtgcccagcaataatccgccccttcctgtgtgcgcctgtggggtgcgtgcgcgcgcgtgtgtacctgtgtgggtgaaggggatagggcgaggctgtgcctgtgccccaggtcccagccctggcccttcccagactgtgatggccatcctggtcccagtgttagggtagcatgggattacagggccctgttttttccatatttaaagccaatttttattactcgttttgtccaacgtaagctgccacatgtctctgtgtgaatagtccgagcacaaacctggctagccgcccctgcctgcctctttcttgcttccggtgctccaggggtcttcctgctcccctggcccagctggaagcgggaagggattggaggtgggcctggagggaagcagggtgtgcccttccgaggcccaggagcccccagggctgactctgaactagcctctccagacagccaggctttggtagcctttgggctcacccagtgggtttcccaacttcctaaatgggatggggcctaaggaaagaagccttgggtacccactgggatgtgggtctgtttctgactgctggtaaggcgggccccgttggtgtcctcccctccaaggctaaggtggcctggctgcctaaatgtggacgtaagagtagggtg

SEQ ID NO: 119021 - DNA, 1001 bp, Homo sapiens
cgtcacccactgtctaggtctttgcccataatgtgtcaagggcaaaacagaggggtggatatgatgcacgtgcctcagcccggggcccgtacatggctggcgtccaggtaacgcaggcctggggcagacattccttacacagctcccaccctactcttacgtccacatttaggcagccaggccaccttagccttggaggggaggacaccaacggggcccgccttaccagcagtcagaaacagacccacatcccagtgggtacccaaggcttctttccttaggccccatcccatttaggaagttgggaaacccactgggtgagcccaaaggctaccaaagcctggctgtctggagaggctagttcagagtcagccctgggggctcctgggcctcggaagggcacaccctgcttccctccaggcccacctccaatcccttcccgcttccagctgggccaggggagcaggaagacccctggagcaccggaagcaagaaagaggcaggcaggggcggctagccaggtttgtgctcggactattcacacagagacatgtggcagcttacgttggacaaaacgagtaataaaaattggctttaaatatggaaaaaacagggccctgtaatcccatgctaccctaacactgggaccaggatggccatcacagtctgggaagggccagggctgggacctggggcacaggcacagcctcgccctatccccttcacccacacaggtacacacgcgcgcgcacgcaccccacaggcgcacacaggaaggggcggattattgctgggcacatgtgtctattgttatgaggggagtccggaatgtttgagggttgaccagggatgccccaccccctcctaggggctgggcttgggcgtttctgaaagaggtgtctgcaggacagagcccagtatcagggaccaggctgtgggagctggaaggcagaggcagacctatctgggccggccggggcagtgggctgatgggtatcaca

SEQ ID NO: 119022 - DNA, 1334 bp, Homo sapiens
aagtggccattgcagggtggggaggaaaccaggtaatgatgggaaagctggatcctacccatgtatcatgagaaaggagcctggggtgggtttgcccctctgccccaggctgttatgaggtgggagtgggggatttttaggtaggtgttagcatgtcataccaaagcccagccctgggcaggtatgcaagagagcgcgtgccaggtggatgtgcaggaccctgaggcactctgcctgcacctggatcaggacaccctggccagctcccccttgggctagggaggcatccagggaacttcttggctagggttaaactcaccttaaagctcttaacacagtgggtccttggcagagggaactcccagaattcatttcccaagaagcttccctgagctgtcctccatgcccagctctatggtgggaactgggacccagatggagacgaggcccctggcagcttggagctcagtctggtagggaggcagacgtgggaacagcgggacccagtgtgatcagcactgtggaagagaggattctagagctgacagggttgggggtggggcagcaccaaacagggaggccccttgaccctgaaggtgtcagaattggtgccctccaggacacagggtcagatgtacccaagtagaggagccagatggatggtctagggctttagtggtttaggatggctgagcatgggaggccaggggtggaagcaaggaatggctggagctgaagtcagtgagacacagccagctttgaaagctagattaaggatcacagggttaaggcccagatggggcctcatctggaaggtaggggattccctgaagggtttttactggttgtgttggggtgtttgctccagcatgtacaaaagcacccccagtctctgtccatgtggtttagacggggctgggcttgcaccccctgcacacgcatactccacacacatacctagagtgagagagccaggtgggaatgttgcaagtgacagaactgtcctcccgctaacttagaaggtgttccaaggatatggaggagcttcggggtcttagttgtgggctccattctcatcaggagacacccaccagaaccaagatgatagagccatttggttttgcctctttgagcccagttgcaaactcaaggagtctgagtggccaggctggatacctgcctgctgtgcactgtcagggagcagggcacttgggttcacagtttcaccaggatggcacccgtggggcagtgattcccccattgaaatcagggtgcctgtatacaaagaaaagggagcgggtactgggaggccattccctttgcataaggagcac

SEQ ID NO: 119023 - DNA, 1417 bp, Homo sapiens
tgagcttgcctgagagtgatgcaaacagaagcagatacgtgcctgacaccattgcgggaacacctggaagcaactgtgaccaaagctagaatctaccctgggacttgccagttgcatgaaccagtcccctttgagctcaaagctttttcttttctttctctttttctttcttttctttctttcctttcttctttctttctcttttatttttctttctttctgtcctttctctttcttctttctctttttttttttgagacagggtctcaccccctcccttaggctggagtgcggtggcgtgatctcggctcactgcaacctctgcctcccggattcaagcgattctccacaggcgtgcagatttttttttttttttggtagagacggggtacagctcaaacctatttgtttgggagttctgtcacttcaaccccaaatgttccagctaatatggtggtggaggggtttttggcaaatcatcttaagtgcagtagagaagttggacgaaaaacagcccagttaagaggccgatggacagccaacttcagagtggcctctgcaagcttggacctcggggtagacagtggggcgctctctaggggtcatctgttccctgctggggtaggggggaggcatgtccacggaggccagggctgtgggttcggcactaggtcctcctccccgtggcttcctagtaggcatgtggtggtgtacgcctgctgggcacctagcgagaggggtcgtgagttgggagggagccacgttggggtgcctgcctgctcgggggcccctgcccactgcgtgtgcgcagcgcctgtcaggatgtgacggggacctggacatgtgtgtgctctccgagctgagctgtgtgcgcgtccgggttctcgacctcagctgcctggctgtgcatccagcgtgcacgaccggtgtggcctgggctccagcctggagtgtggaccgggtcggccggcgtgtgcctcccctgtgagggtgccctggcgggtgtgagcccggcgggctggagaaccgggtctcggcgccgcaggtgggtgaccgtcctccccctccttccctccgggggcagcctcctcgcggcgtgtggctgggggtgcggggccctctgccggctgccgcgcgcgcgcacgccgggctcagcacccgccgtgtacgcgcccgtgcgcgcgccccgcgcctccagcccagcgctcggagccgctttcgctgccactgtctgctcccccgggccgccgccgcctccccccgcaggcccggggctctgtccgctgggcccgcgctgctcgccccgagccaggagaacgagctcgaggaggatgcctgggcccgtgagtaccgcggcggctgcgggccgggcgggcacggagcgcgggcggaagatggtcccaggactgagcccttc

SEQ ID NO: 119024 - DNA, 1092 bp, Homo sapiens
gaagactctaaagggaggctcagggaggtgagtgacttgcccaaggtcacactaccagtaagtggcagagctgagtctacactgcaggcttctctgggggcaaagctcctctctgcctgctagctaacttctcttgtaacccaggagaagaactgtagagccttcttccttcactttcctccagtgaggacattccctgtctttcgggtcttggtacatttttccttcttccagctaaatcagccacattcttgctcccccagatgcattataggatggggccagctttctccctcccttcttcacttcctccctccctccattttctccggtgagaccaagcagcaaagggctgcctcagtcccctgggaaaaccccaagccctggtcctcggctcatgggctccatggcctgctcagcttgcagtcttggctgtgggagagaaaatttagcaaagatgggtccatgcactgctgcagcctgtgggtgctcagtctagctccaggcattggaaacccacatgcttccaaggatcaggggggaaatggaatgagtgaggcgggccagggagccgctcagctccaatctttgtcactgtgtgaaatgtggacttggtatgacctgactgtccaattttcaagatgaaccagaaatccagacctttatataaaatctcctggatttttaaatgttggcaattaatcagaatgtttttaaaaatggattgtgaacatggattgtttttaaaacatgtctgagaactgtgtccaacctaagggtcctgtgtctgagacctctggtccgtgggaaagggaccgcaggttttgctgggccgcctccaggctgtgtacactgtgacaccaggggctgctttctgcatttgagcctcttgaggctgcagggtgatccctcatcagagggagttctgttgtcccctcggcaccctggtcctactgctgaagaaactccagctcaggtatgggagtagccaggatgggatcacatggctcggtgagggcagaagccagatttgagctcaggcctacccctcggcactctgcatgttacccaggctgccccccacagggtgtc

SEQ ID NO: 119025 - DNA, 1088 bp, Homo sapiens
cgcccgtggggccgcctcccctgggaggtcagatcattatttccatgccagctgcggggatgaaggcacagagagccacaggctgaggtttcagaggaggaacctggtctctgaaaaccctgccctgaggagggccggagctgagcgcagtagacactggcctgagggagggctctccacctacaagcccaccgaggcctcagtctctgtggtcttatttgtagtttcccaagccctgggttcctggcttggtgtcagggttaggtcatctacctgcaagcaagggtgcttgccactcagtaccctggcctaggcggagggcggttctggccagctccaagcctggctgactgggagtggagacaagtcctgtcaagtcctctctggcctcagttcctctgtgttgatgtgggaagggtgtaagggtgtcaccagtggctccctgaaatgcccttgctgccgggaccgaggactttgtcatcacccgggcttcacaccacctggctatggagacctgagctggacccactccttgagcctacatccttgtctgtagagagaacagcagccacctcctgagttttccttagataactagcatagagaccagtagtgggcctggcgtatgcaaggcacacaggacaggctgtcagtctgtcctgccccccagccctcaccccctgctctgagttcctgtcccttcccttgaagaccagcagctctagcctcaagtccaggtgtgacccagtgcccctgctgcccgggattttccatccccaccccccagagccctggtgtgtgcctccgtacagccttttcctttgattcacgtagacacatggggtctccacttgcttatgaactgccctgccaggcgggggctgggtgatggctcttctctgagtgacgttttggtgaatggctgacatttcccaggaatgaattggacacagagccagcccttgaggtactcccccggtcccacagctaaaagaccaaccaggtaacgagccctccagcatctccttccataggtggttcttgagccaattactgggtgccagctggtaaggccgatggtgctcggc

SEQ ID NO: 119026 - DNA, 1065 bp, Homo sapiens
gaaacagaggcaacttggaggttaagaaactcaccaagggtctcgctttcatccccctgccgtgctcccagtgagtgtgtggcccgagaaaacatgcagagcgatatggttcaaaagcactacagataaatcaagatgcaaccctaaaacatgttcaaataaccttcaagaaagtaagaaaagagaaacaggaaacagaacgtgagtaatcaaatggcagacttcggtccatctgcagggcatcgctccgagcacctgaatgtgttgggtaggtaggaggaggcacgtattggctactaccagtctggagcagtgtgggcagtggagggagtggctgggagcagcaggctgcaggcaggctctgagtctgaaaggctcccagacaagggcaagagctcacatagtaaaggagcagtaagggggcatggttttttcgggaggctttgccaagtctggcctggtcaggtagagcattttgaaaggtctgaatgaacctctgatgtttatgtattgagcacctatggtcggttagatgagagtctactgagcacctgggagggaggcttcagacaggattccagtcccgtgggcctgctgtggcactgccgagaagacagcgttcagtgtcaaatccctacccactccacctgggggtggagccaggttggggccagggggctagttatgtgaccttaagcaagagccttcctctctttggcccaaagttgcctagtttataaaatgcagctatgacggcacccagcaggtcctgggcgtggcctgccctgtatggcctaatgccccacctgctgagctgggcgccctcagggcacagagggccctctcttttgtctcttgctaacctggcgctgccattacatctccccttcatcctgtagctctttctcacactgctattccacagcagagtcgggctggtgatcaggcatgccagggccctggtgggaagggatgggaatgcattttggctgctagctggcttgtctgcccagtgcccccatggctgccacttacatctggcacagagtttggattcagactcag

SEQ ID NO: 119027 - DNA, 1045 bp, Homo sapiens
tcaggctagagttttgtggccaggcctgggttcaaattatggtgctaccacctgccatctacacagccagttgttcccccaactcctcgtctgtaaaataggaatcattccagttaccccaaaggctttcgttcaaacctgtgtgtataaggcattcaggaaaggctcagttctgttctgtgggggcggtgagcagtcacctgccacccttcactctcagagtcagggctccctcctacctccctcttagggtgcaaggttccccctctcacccgcagctgtggagaggaggaagcggaactagagatgcccatctggagtgagtgcaggaccaggtgggtacgaaagactagcttccaaccctcatctagttttcctcccctccgcgagagggaaagggagacggcggcctgaagacagaggcagagccaagtggggctgtgcaagggcaggaggcggggaagcggagttggagcaggcagggcgcctggaggaaaggaagagagtgtggcccacgcccggcgcggcgcgctaggctcagacaaaggcagggccggtggcacgcattaccagtcggagccacccgcctgagcccccctacgggagcggcgggagacccggagggcgcggtgcggagccagttgttccgggctttgggcagccaggggctgccaggcgtctgtacagggcgtcgggtggctgtctgtggggctctaggagatgtaccaccctttccccgccgcacagcaacggcgccgagacgcctcttcagggacctggtgcgcacaggctcctgaaaccctttggccccgggactgcggatggcgaatctctcgttcggactcagagctggagtccgtccttcgcgcgccccctgctggcccgcctcggctcccctcggcgcccgggctccgcggcggcggccggggctcagatcggggaaaccctaccggggaaacctcgaggcgtgacgtcaccctcctcggtgacgtcaccgggcccccggggagcgcgaggttcccacggaggaggctttccccggact

SEQ ID NO: 119028 - DNA, 1086 bp, Homo sapiens
tggccctgcattcctcatgcttgcaccagtacccccttctctgtgacccacattatttgaggggaagtccatcccaccctccctccctgggccggctctgcttttgttcccaaggcaggcatccttgtttccctggcaaccactgatggaatcattggttgctggggaaacgggctcaggcctgataggtcagccccagtcctgctgggtggggccaagtgacctgatgctttcccctgcaggccagtgaggggtacttcagtcaatcacaggaggaggagtttgcccaatcggaagagctctgtgccaaggctccgcctcctgtgttctacaacaagcctccaggtagtactgggctggatgatggggaggaatttgggtgcgggggctggatttgagtgtgggtagccaccccaccactacccaccgctcacagaggctggggacacaagcggtctgctaggtccctaactcctctccctttctaacgccacagagatcgacatcacatgctgggatgcagacccagttccagaagaggaggagggcttcgagggtggtgattagcggtggcgccagccctaggctacccttgccaaggccgcccacctgcatcagcctctggccagacggcccgccgtgcctgcattcgcagcagctccgcctggcacccactccggattccggccctggctggggacttggccgcttccctacccacagggcctgacttttacagcttttctctttttttaaaaagttgataggagacttgtacagttgactggctttcctctcgttggtagttgagacgctgttgcaaattccacccctccttccctggtccagattgtagctcttagtcctccctgctcagctggccgggttggaggcctcaccctgcttggggcctggcgtggggggagctctggtgggaaaatgtcccccacctcttttcctagttttatgtttcttgggaaaatatcactttgtattctctgtccagggcttcagatattttgcacgaattttaaaacatggcaataaatggctcgtgggctctggctccctgggaccccctccccg

SEQ ID NO: 119029 - DNA, 1039 bp, Homo sapiens
gcacccgtgggctctgcctgcgtggcctggtgcccgagtctggcctgcccggtccctcttagctctcaccctttaggtgtcgggggttcctggggcattcagcctgcttatgctgggtccttcgacactgcagggcaccacctaccagaagacggatgcagctgtggaaatgaagcggattaaccgagagcagttctgggagcaggccaaggtatggaaccctgagcccggcctggctgagccacccctcatggaccccatggggcaggtctgagtccctcactgcagtggcatggcccatgccacgtgccccgcccccagcgctgggttagggaggggctggaggggcagggtccaggcgcctaggctcggggcctacccttgttcgcaccggggcttgcagaaggaagaagagctgcggaaggaggaggagcggaagaaggccctggatgagaggctcaggttcgagcaggagcggatggagcaggagcggcaggagcaagaggagcgcgagcggcgctaccgggagcgggagcagcagatcgaggagcacaggtgagcctgcccgcccggagcgctccaggggcccccgggcgcaccctgacgggtgctggctgcttatcgttccaggaggaaacagcagactttagaagcggaagaggccaagaggcggttgaaggagcagtctatctttgtaagttctttgccaaggctcccggtctctgggtcagggaagtgagaatggtccctgtgttcctgggccttgtggggagatcagtggctcagggacagtggtggctgttctggggagctgcatgggcacagggtgccatggagcatgaggcctggcacctcatcacgtggggctctggcctctggccgtggaaaaagactactttggagaagcttgtgctctagattggaagagaaactccatctagacccagaccctcactgaccaggctccccctcccctgccctggggtttctcggcgattagacactgttctgcactctgaggggccacaggagtgaggca

SEQ ID NO: 119030 - DNA, 1074 bp, Homo sapiens
tcactaagggcccagataacattttgaaaaaggggtgtgaggatcactttctacacaagagaatatgaataccccagggcccagcatggaaccaggggtgcagtgaggtctgaagactcagaggcagaccctgcacataggtccagagggaggggtgtcttgggtaaattgctgtctgccccccgacccttaccttgcctccaatggggaggggtggttgggggagttcactcctaggtggcagggcctctgaagtgcaccactactctggcacagggagcaggggacccaggaaatgaggttgtgtggtgggaagggccactgttgtcctggttgtgatatgactcactgtgatcatacacaagttcctggtcctcttggaaagaaaagggattgggcccagcactacctcggatactgaaggcctttctagcaccaccatcctgagagtgatggtcctgcggggtccacctgccctcagcccccgactccagctcaccctccaccccagctcaccccccatcccagctcaccccagggtctctggaactgccacattccagctcccacctcacgctagttcagtttatctggctagatggcttttgagttggtgtcaatatcacacatacttctggtatgcggtgtgctggaccccaggacccagagagcaggatgtgctgattgactgagtcagcgttcctgccttcaccaggcttacagctgggggcagtgtctgtctccaggagttggagctggtgagatgtgtagatgcctggtcgcctaccccatcctgattccctgtggtttcgccagcttccacctggtgcaccaccaggctcggggtgcctctgatgtggttgagaagcactggtctttgtattcctgctgggatatggtgggtgctctgggaggggcagctcaggagaggctgctgggggccagcactgggctctgaagaacggaagcattccactgggaataggcgtggggtagaggagcaggtcttgccttccacgtgaagagaactacataggcagaggcttcagggtgagccctgtccagaaccctgct

SEQ ID NO: 119031 - DNA, 1240 bp, Homo sapiens
gaactgtgaagccctctccgtccgtcctcggttcccatggatacaagcgagaagggcacagggacggatggtaactgtagccgggagcccgtctgggaacgccgagcagcacggccagatctgccagtttatcgacagcgtccagaggttcagatttgtatgtgagatctggtgtttgaatattggcaactacattagattttttttttaatcctattagaaaaataacaaatgtgggccaaatccagcatgaggacggccagggcccagcatagtgaggaggtgagacgccggaacaccagcatcacagcactgggcaggaacagcacggccagggcaggaggacaacaacctccagggaaggggcaaggaagcctggacagggcaagagcgtgtcaagaagctgccgacaatgtcaaccaggcagataaggccgaggagtccctcgtggcatttcacaacaaggtgacatttgccagatcagtttagccgagctggggcggctgccagggttaaagaggaacaaggcgggagggtggggaggatgtggaaggagagagtgcagacagctcttttaagaggtttggctgtggtgggccaagatgaccgccaagctcagctgagaggccagggtgtgggtggcgggagaggcctgggaggcatctgctggaggatggtgggagaagatgggagaagttgggagggggccgtaaggagagagtggggtgaagggcaggggcaaatgcagaaccgtggagctggagctggcctagagtggggcaggagcaggtgccaggcacctccttgaaacagccaccctcactccgtaggccggaaacatgatgcaatcacatgtcatttaatcatcataacacctttgagaacacattattacaggcatgtttcagatgagggtactgaggctcagagaggatcagtgacttgtacagagtcacccagatggaatggcctggactgccactccaaggatcaaaggccaaagtgttccctgctgacccaccagcactccccagctcctctcatgcgtcccccatcacctgggctcccatccagactttgccgctccaccagctgtgtgcctccgggcaagacacaacccttctttgagccttggtttccccatctgtcaaataatagcagctgggcacagtggcttacacctgtaatcccagcactttggaaggccgagatgggtggatcacctgaggtcaggagttca

SEQ ID NO: 119032 - DNA, 1050 bp, Homo sapiens
tgctcagcagatttttaaatctttttgtagagatgaggttttgctatgttgcccaggctggtctcgaactcctggcctcgagcgatcctcccaccttggcctcccaaagcactgggattacagacgtgagccactgcgcccagcagatttctctttaacacctagatttcagcctgagccaggcaggcattcctgaatgaaccagtagtactgctcccagaagaagaggtcctcctccgtgtgacacagtccccacttggcccttgcagggattggatctgggatccctggatttaaactcagggccatcctcataacagcctcacaaggctgggattagcttcccagttcacaagggaagaaaccaagacttgagaaggtcaaggtctggccagacccacacatcttggaccctcataccgcctcgaggccccatgctgccctctgcctgctccagatgtgaatactgctggccctggctggccccggctggccccgagggtcctagggatgaacagcccagcccagggagagctcagccccttgtgcctctgccccttcccacctcctgcggaggccagtcgactcacccacaaagggccaggcactgtggggatagatcagctaacaaaacagttgatgcttcctgcccttctgggccttacattttggctggaagaagaggggagaggcagactgtaagcaataagcgcaataagtaggttgcctggaagtaatgttagatcacgttacggaaaacaggaaagagcagagcgacaagtgctggggtgcgtggtgcagggaaggcagctggctgctgctggtgtggtcagagtgggccctcatggagaagactgcattcgagcagaaacttgaagggggtgaggggtgagcctagagatatctggggcagagcagtccaggcagaggggacagccggtgtcaagcccaggacaggagtgtgcctggtgtgccagtttcaggcaagaggccagtgtgcagaggcaaggtgagaacgcaagggagagcagtggcggagacggttgggaa

SEQ ID NO: 119033 - DNA, 2888 bp, Homo sapiens
agtggccgtgggtgactgggtgctgagcatcgatggcgagaatgcgggtagcctcacacacatcgaagctcagaacaagatccgggcctgcggggagcgcctcagcctgggcctcagcaggtatgcgggtggacatggatgggtgcgcccgcgctggcagtggggatccctgcgggcccggcccgctgtcacgctttccttctcctccagggcccagccggttcagagcaaaccgcagaaggtacgaggctggccgggacatccgggcggtgggcggtgtgggcttggacggccaggcctgctcgccctcctggcacattctcggtaccccaatccctggccgggagtggagggcagaaaccggagctaaggcgggtctagggccctggagttgagccaggggctgctgcacggtcctggcaccacgcatgtccgcctgtctgtccgcctgtctgtccgcctgctgcctcccgccgccggcgctgcgtgctcgcccgcactcggtcagccctcggtcctgcgtggactgagatcgccactcccaaatgggccccttgaaacctgagtcgtcctctccccgtagcctccaaatagatgtagggggtggggtgggggtggggggctggagctgccgctgtcctctgctgcaggcgccccacttccacccaggcccccaccttaccctgcccgcccgccctgcccggctgtgtctctgcccaggcctccgcccccgccgcggaccctccgcggtacacctttgcacccagcgtctccctcaacaagacggcccggccctttggggcgcccccgcccgctgacagcgccccgcagcagaatgggtacgtcggcccctgcccgcccgcgcccacgccatcaggcccactgtggccccacgcccgctgcccgctgctgctcagtctgtgctgcgccccagcccggcggaaccgtgcggcagcgccccctggcggccggggtggggctgcaggcacagggcccctcccgaggctgtggcgccttgcagggcaccgccctggggaggggtctctgaatgacgccgcgccccctgctggcggctgggggttgggttgtggtgtcgggccagctgagccccagacactcagtgccgccttgtccccggctgttctgacccctccccgtctttcttcctctcctgtgtctgtccctttgtccctttatctgtctgtctgtcttatttccttcacaggtgcagacccctgacaagtcagtgagcccccctctgcctgtgcctttcttcttccttttggcactctgggtggcggcccctccccaccctggctgccctcctctccacttcgccctcctgtcctctcacctacccgcccagcagggctcctggcctcacccttacccactccctcccatcactgtaacccaaacccacatgcaccaaatcctgggaggggctgcccccaccgcccacccccagtgtggggttctgagccacaccctccccacagacagccgctccgaccgctggtcccagatgccagcaagcagcggctgatggagaacacagaggactggcggccgcggccggggacaggccagtcgcgttccttccgcatccttgcccacctcacaggcaccgagttcagtaagtgccagcccagggcagggggtactttcctcgcccccagcccaggcgtgatccctgaccctgtgtcttttttggtcaatgcctgcctctgccctctcagtgcaagacccggatgaggagcacctgaagaaatcaaggtacagggacgggcaccagcccctctcccacctcctgcctcttccattccagctactgccctgtgtctactcctgaggctcccagctggggctctcaattctcccttccttccttccttccttccttccttccttccttccttccttccttccttcccttcctccttccttccttctttcatttcttccctccctccttccttccctcctccctccctgcctcccttccatctctccttccttccacttcttcctccctctctctctgcccctcagggaaaagtatgtcctggagctgcagagcccacgctacacccgcctccgggactggcaccaccagcgctctgcccacgtgctcaacgtgcagtcgtagcccggccctctccagccggctgccctctctgcctccctctttctgttcctcctgcccagggcacccccttagtgcctccagcttctgcctacctcaccccccctttcgtgcccctggcctgagcctcctgctggcctggccctggccgcccacctgggttcatctgacactgccttccctctttgccctgtggtactgctgtctgccaggtctgtgctgccttgggcatggaataaacattctcagccctgcttgctctgcctgtcttctatctttgtggacctggtttgcatttggggtgtgggggtgtttcgtggttcggactgtttgggccctgccgtcctcgttttcagtgggagggggtacctggcaaaggggccctgccctgccatcacagatggcttcctggcatgaggggaaccccaggagctgcctcagaagcgggagccctgcctcgtctcccagctagagaccgcacaccagctaactggacattgctaggagaagctgcccttcccatccctaccccagtgggacctggaatccaactcggcagtttccacgcccccagtcatctcccgtggggccagcaggacccaggttggggggtggggccatgtcaggaagctcagccatgcagggccttgaatggcagatcttgcagccaggtgcccaggacagaagccccagccccagcctcatctacaccccaggagccctggcctggtgagagggagtg

SEQ ID NO: 119034 - DNA, 1076 bp, Homo sapiens
actggcctgggggtcaggagggggtggggacttcctgcccctatatccgcctgccccaagagacccacccaggcgccgggtgggcaggcagctgttgtcaggaagcccaaggcaagcccagcctggaggggcccagagggtcgtggcctgaggaggggctcaagctggagtctgtctgtaggagctgggcgtgggggttagggtgggcaggccagcagtgctcttctcaggggtcctttgatggcattctcctggaacctgccccgccagcagggtagtgaggcagtggttgccctatgacacacgtcccactacatagccctcacacagccctgaaacctacctgacgtcctgctccctgggaaagtgctggcccagtgtgtctggggagcctgaacctcagtttcttccctgatggagatgactttcagatatggcctgttgggggcactccgggctccagctccctggtcagcatccctggcatgtgggcggggccactagctgatcccagccctggagttggacctgggcccacatgggtgggtgaggtgggcttttctgagttaggccagccccctccccctcccctgaccccagaatggagggaggtgggaggggcaagggctggctgtgggcccaggcctgggagatgaggtaacgtctgggactggggggctgggctgctcaggctgactcacccccacctcatgcagggtccagccccctggctttttccctccttggttcctctggccttaccctgcccctggcttgagcccctccctgcctctctccagccacccgcccagcgctgtcttctgctctcctgctgccctccccacgctctgaacacccctcatcctctgtgcttcctgccctcctcactctgggaagggaagccgtccccgccccccaccccctctccaggagccagctagctgcaccccaagacccccacctcgggctcagcccacagctcccaggagccagccctgtgggcagggagtggctgggccaggtttcccttctactgactcaccatgaccttgagtaagtcacttcccctctggggt

SEQ ID NO: 119035 - DNA, 1042 bp, Homo sapiens
cctccccagaccaggaggaacggactaaggccatcgaggcattccgggagggcaagaaggatgtcctagtagccacagacgttgcctccaagggcctggacttccctgccatccagcacgtcatcaattatgacatgccagaggagattgagaactatggtaagagcctggggcccaagggcatgggttaggccggaaaagggccaagccaggcccctagtgtccagcgatgggccagagactctgtccttctctctgcagtacaccggattggccgcaccgggcgctcgggaaacacaggcatcgccactaccttcatcaacaaagcgtgtggtgagtctgttaccagcgccaccttagctgttccctgggtcccctgcctgtggccacccaggttctggccacagagcccaggatgggccctgatgcttccccactcctcccccagatgagtcagtgctgatggacctcaaagcgctgctgctagaagccaagcagaaggtgccgcccgtgctgcaggtgctgcattgcggggatgagtccatgctggacattggaggtgactgcagagcgggatccccgagtccccagccggcaggtggcaaggaggggtgctggaagtcagaaacgtgaaaccggtggaccgagggtgcctaacggggggcccgaagtccagggcatggatcctggtccttgacttggctgacccctgtccccattcccccaggagagcgcggctgtgccttctgcgggggcctgggtcatcggatcactgactgccccaaactcgaggctatgcagaccaagcaggtcagcaacatcggtcgcaaggactacctggcccacagctccatggacttctgagccgacagtcttcccttctctccaagaggcctcagtccccaagactgccaccagtctacacatacagcagccccctggacagaatcagcatttcagctcagctggcctgggatgggccaggctggtcctggctgcctgttccctgtgctcttcagaattactgtttttgtttcctttt

SEQ ID NO: 119036 - DNA, 1071 bp, Homo sapiens
ggcgtgcccaagacgccatgctctgggagaggttgggcacctggcaggccgccccgactccggatcagctgtctccgctgcgtacgtcttcctcttccaatgggcttggattgagccttctagcgcatattccaagtcctccaatgtcccacaatgccttgcagccggtttcgccctcggtcctggcaactgtcgcgtaaccacccatgaaagcgtccatgcctcgccgtgcgatagtatctccggaacaaatttgtccctctgcgcgatccggaactccgaggtcgttcctacgcgccgtcgttcgcctcttcacatcggattgggtctcacgcaaggatgaggcggggtttcgccgtggcgcgcatgcgtgcagcaaagaatggaggagtcggaacccgaacggaaggtaggagagaggcgagaccccgcgcgtgtgggagcgggcgtgaagaggggagcaggccgtgcctgactggcgtgtgcttgcagcgggctcgcaccgacgaggtgcctgccggaggaagccgctccgaggcggaagatgaggacgacgaggactacgtgccctatgtgccgttacggcagcgccggcagctactggtgaggggcacgcgtccggggagggatggggccgtgaccgcggggtcgcagggggcgggcgtggcctcggcctccgtggggaggagggcagtctgaggagtgagcttcagtacaccagggcgcggcccccagacaaacgagggaccgacggcttgatctgaggggtagggcagctttgcgcctcgggcacaggatcctcgccccaaagccaggatcctgacgctgaccttgtggactccatgcccatcctatctgtggatcccgggtggaacctcagctccagaagctgctgcagcgaagacgcaagggagctgcggaggaagagcagcaggacagcggtagtgaaccccggggagatgaggacgacatcccgctaggccctcagtccaacgtcagcctcctggatcagcaccagcaccttaaagagaaggctgaaggtgggctgggcagcactgcctgggcgagaaa

SEQ ID NO: 119037 - DNA, 1018 bp, Homo sapiens
agtgccaaaggctggatctactcaaggattgtcccccaccttgtcaggatcctgggactggggctctgtctcccaacccgttaacctgcatcctctgctacaggtgatccagggaatcttcaacattttcagcccagggaacaaaaatagcagccagctgtttctgctaccagagacccatgggtacccaagtggcatggggaggctggagcatggctcattgcttactgtgattctgctctttttttctttctcaggccctgcccaggctgagctgcttcagggcgtcctgaggccctgactgccagctgaaggcgtataatttttccctccgtgtgccccacctacccgtccaagaccctctgtgctccccaccatcctggaccaaccaaaagctgaacggatgccacactgtgctggggccccttgacctcagcagagccgcttcctggtgctacgcagcctccacactcagagcccgtggactgggctggcctaagggccagggctgatggtactgctggcccaacactgctctctttgtgtttggtttttttgtttttgtttttattttgtttttttccaattctttacttttgatactgtgaagatctttcgtgccgaaagataaagcaacatttggacacagagttggcatgttggtgatttgtgggtctgggcggggagggagttgagggtgtgctcagaagcatgggctctcccttagtcactaaccctagcatgcaccatgcatcagcagtttggtgctattgtcccattttacaggtgaggaaactaaagccgataggaaagtgactcagctcaacttagtctggctgattagcattgagcgcagactggtatgattatggcatctgtgcccttttctccttttgggaggtctctggtatgtgagcctggggcagccccttccccactctttcctgtttccctctttgcaagatgggtgagttggaggggttgaagatggtctctgtgcatctggatgtgagaagag

SEQ ID NO: 119038 - DNA, 1103 bp, Homo sapiens
aactcacagggcctggcctgctgcctcacagcctcaatggtcggtaaatggttgtcagatggaattgagaaacataggaacttctgaagatcaggcctgggtgtattgtcctggctctgccacttcctagccacctcctcctcctgttctttccaaagtcgaggtttctcacctataagcagagggtcatgatgcagcaaagacagtggcgaggattaaaggagacatctatgggaagtgctgacggtacagagcagaaagtgtgtgtttctgtgctttctcctctggcttccagagtgtatatggttccatatcattccctccacaccagcagttgtcaaacttttttttttttagcagccaaacttttctgtgaaatctgtgtggtgctgggggagcgaggtgaagggcccttggtcctcgttggtccaacccagggcctctgagccctactcacagctagaaatgctgctgcagctgctgcagaccaagctgctccctgagggccacgaagcccagccccaccttcgcacatgggaaaggaccccacacagactctcagctgtcctcatactgaccctggaatgtagagatgcctcttcttcctaatttacaaataggaaaagtaaggttcagagagaataagtgatttgtccaaggtcccacagaacaattgactgtagtccattgtggagccagggttcacaaaagataagtgcctgctgggacgcagggtcaccctctgtacattgactccgaggtggtagcaagccctggtttctctcaccagctgccctttcatgtttctcttcctccattcccaaatcagctggaagtacaggaggcagtgggagtcaatggcgccaggcgcaccacagcaacctccttcccgagggttttttatctgccgcctgtctccctctaaaggcatcgttggccttgaggtgggatggagaggttggggtgactgagatcccacagactttcattttgattccctagatccagatctgtcaaagccaactggcagggcctggcctctctgagccttccaggcctcacctgggcaaaggagcagctctcacatcttgctgtgtaggcca

SEQ ID NO: 119039 - DNA, 1092 bp, Homo sapiens
tctctcccgcctcaggaaatggaaagagctcagtgtctctctgctcccttctcccactgccagcccgtgacactctcaccttgtctttgtgtcttctgtctacacgaaggtgagagagtcatgggctgacagtgggagaagggagcagagagacaccctgcttcttaaaaactgcacccctggctctgtcatctgtgacctcctgccactcctccacatccactgaagactctcctgccccgttctcttcttcccaggtcaatccgtttctcactcacttgaatggagtaagcattgctaagtattggtaggagggcaggcaaattgacccatcactcactcactcactcaccagtactcaattccttgtcccgctgtctttccttcagacccactcagaaacactgcagccctgggttccaccccagcctggctctccctttctacagctcaagaaaagcacatgagtgaatctgtggcagccagccacgtgggctcccgattgccgagttcccgtgtcgccaggcgggcctctcatggttccctgggcttcctgtaccttagcacgtccattccccacagtccttctgtcaggcctccagtcttctcaaaccgctaggccttccgagcccacaccttattttttggcaaatagcctcactttttatttcaatgaggaaaaaagccattatacagggattctcccactgttttgccattcccacctgcaaacatactttcttccttgtcatgagagtcacccttttcccgcctaaggcctgtgcggtactttcttgacccctcagcccagcagcaggctcctggtctagcttagcctctcctccatgctgttcccgtccacatttcattgtgtccaccattctcttttttggaagcaaactgctccttgagcctgttacctctctctcaacccctccccagcctctttcctctcatcacagccacacttcttgaaaaatgatgtctgcattcactgtcttcccttccacccattagctcattgcaggcggttttctacccacaccctctccagagtcaccggtgacttttttgttgccaaatccatcctcc

SEQ ID NO: 119040 - DNA, 1038 bp, Homo sapiens
tgggcctttgatctgatggcaggagagggagatggaggcagggatgtctcccaggtgtttgcttggtgaccagcaagatggtggtgcctttcactgagccaggatgggatttgcagaagacagtgaattcagttgaggcatgttgactcgaaggttcccgtgagacatctaagtggagaagtgcagggctagcatttaccagcgcagagatgtaattgaagccaggggaatgaaccaggcctcgggactgaggacagaacctggtgatctattcctcggcagccctcctgccagatgagccccagagcttgatggcttgtcccttgtggcttctttacctcttcacctgcctactcccaactgcatctgcacagtgacacgtttaggagcccagcatccgaagagatttgggtgtaacaaccagctagttccagttcctgggtggtcaaacagccctagtgctttggaaagcagaagtgattcaccatcctttttcagccccaaggacaaccaggatccttctcccgccgcctgaagtagtgagccaaggggtcccaccgctgccttctgaaggtggtcagcactgtctttctcccatgcagtcacctagccagaaaggttcagtgggctgcagtagtctctggcctttcctggcttcttaggacagtggttcccagttaggtccccagagagcacatccggcagttcccaagtctgatgtgcttttcgtaaatatgtgtgctcagatgtctcttcccctttactgataatgctatcttctctcaccttttcttctgacaaactttccttccaagttcagttcagctgtttcctccttcatagccatccttgggtaacttccactgtactcccaacctacctcatatatctggaggctctgctcactcatcccacactgcacagctcctgtctggcaggcccaggcagaaccaggcagccctgcctttccagacttagtcgtggggctgcaggcagggacagacacacagtggcagcgtgatgcatcaagtgattatg

SEQ ID NO: 119041 - DNA, 1028 bp, Homo sapiens
agaggtgcaatgtagttggaccacctgggacctctgtggagtggggcaagtgaagggcggtcaggatggcaggtggtggttgggatgcttcctgggtttctgcatcaccctgcctcacctctgggccttcctccccatcatcagggatcccgggtgcaaggggcacaagtttgcacacagtggcctggcttgccagctgccccagccctgcgaggcagatgaggggctgggtgaggaagaggatagcagctctgagcgaagctcctgcacctcatcctccacccaccagagagatgggaagttctgtgactgctgctactgtgagttcttcggccacaatgcggtgagtgagcctgcccaggctagagagggctgggggccagccaaggtgagcaaaaggagcaccctgctctccccagagaccccgttgctcacggtggtaattaccgtgctggggccgtgagtccttgcacctgcgtctgctcgcttgatcctcacagcacatttgtgaggtaggggtttttaaacattttgctacctttgctcttctcatggtttctcttaagattgactttttttccttaggcaaaaggaaaggaaatggcagagagaaagctatgattctgatgagtatgtatacgtgtgtaatcccagagaagtgaacgcttgggagtgatgaaggcagagtggaagcaaaaaggctctcagtcccccaagtgtgacagccagccgagggacaggccgtgagcacagacggcgccaggaaggaggctcagatcagagggcatgctggctctggccagggggaggaagcagtgcagaagtctcataaggtgaagaggagagggccgctggttagggtagagcagctgaggatagaagaaatgaaagtaattaaattgctagtcacctttgagctaggggttattatcctcattttagagatgacaaaattgaggctcacaaagactcggtgactcgcccaaggtcatacagcttcccagtgacgaagcccgggctccaacttg

SEQ ID NO: 119042 - DNA, 2891 bp, Homo sapiens
taagtgtgctgcatgaagggcaaactcgctacccacttgaacttagaattttggaaaatttggggttaactttgaggtggcaattaaaaagtagactatgtctttcctttcattatttttcaattgtaaagaagtatgtgttttggcctggcacagtggctcacacctatactcctagcgctttgggagtcctaggcaggaagatcacttgagcctaggagtttgagaccagcctgggcaacatggcaagacccccctctctacaaaaaattttgaaaattagccaggcatggtggcatgcaactgtagtcctagctactcaggaggctgaggcaggaggattgcctgaacccaggagtttagggttgctgtgagcattgatcatgccactgcactccagcctgggtgacagagctttaaaaaaaaaaaaaaaaatagtatgtggggtttttttgttttgtgttttgttttgttttaacttggaacaattcagaaatgtataaggaaaaaaatgtcttcacaacctaaacttctaccactgtggtatattttcaccatgtttctgtatataaataacatacttagatatttgatatacctttcgtgtagtagtaattttttaacattatgtcatgatcatttccccagttaaaattcttcaagaaacttttcaatagtcatataatgtcttactgtatagctcaagcatactttatcattcccctattcctggatatctaggcatttccagttgtttaaccataatgaatgagactgtaataagcatccctgcacctaaatctgtttgaatgagaaatcatgtccttcagggagattcctagaagtaactcttaagtactaagaaaggttatactaacatatatttgaaagagaattctttggagaagatagaggtatatttttatgttagaaatcagatctgtgtttatcatgcatttctatcttcctattggaaagtctcctgtgtctggcacatgccgggttgacagtgtctgcagtctgccacccgccggttttcacttagcgttgcctcctcagcatatttgtgttctcttgtggtgttcttagcctctagcttcaaaggctggagaacatcgaccgcaattcatgttactgttctctagttgctgagcatttgggttattcggacattttaacattaccaacagtgtctctaaagatgtcttttcttaaagcctttttcctcttttggatttttcttgttggaatcaagttctcagaatgaaaaaagttactagttaaaggctgtttaggtgttttttgttctctttgagggttcttaatacacattgaaaaactgctatccaaaggggtctccaaactgatgtaaccaccaatgagtgctggtttcccatattcacaagcacactattttaatttttctaaaatcaattttgtggcctggtgcccagctcatgcctataatcccagccctttgggaggccgaggcagaaagattgcttgagcccaggagttggagactagcaagggcaacataatgagactctgtctctacaaaaaatttaaaaactagtggggcataatgtgcatgcctctagttccagctacttaggttgcgggggctgaagtgggacaggatcgcttgagcctgggagatacaggctgcagtgagctgacatcgtgccactgaactctagcctaggcaacaaagtgagagccagtctcaaaatagaaaataaaatcaattttgctggccaggcgcggtggctcattcctgtaatcccagcactttgggaggctgaggtgagcagatcacgaggtcaagaattccagaccagcctggccagcatggtgaaacctcatctctattaaaaatacaaaaaaaaaaaattagctgggcatggtggcgtgtgtctgtagtcccagctactcaggaggctgaggcaggagaatcgcatgaacctgggaggcggaggttgcagtgagccgaggtcgcaacactgcactccatccagcttgggcaacagagcgagactccgtctccaaaaaaaaaaaaaaaaaatcagttttgctaatgcaatagataatgaatggttggtttagaacaaacttctgtaagcaccactgataatgattcctgccaccatcttttttaatccacgtcacatgcttagcatcctttctagcagcagagagggctgctttggactgccctggaagctgggcctccacacagctccttgagctccgtccttgctctcagttcccctgccacctcagcctcagcccagcgttgggaccagcccaatgggtgcttcagctgctcatggcccagcctaaggcttcagctcttcctggctcaaattatgggatgtttcaggcgtatgtctcattcttaccctgggaaaatactctgtattacaagatatcccagtgcttcctgaaatccagaggcagaacaatacagtggagagaatatgagctttgcatagagagaaacgtgggcttgagttccccacatctcccctgcctgcacccaccatgtaccccttctcagggcactgtgcacatctcactttatcctcctgtttatcgtgcatcattgtcactgtctgtttgcatccttgagtcctggccacctgttgggcaaagcagtcaagtactcagcttcactctctaccactgcaaagtggggataatgacacttattttggaggacttgggggatggttagaaataatatgccaaggccgggcgcagtggctcacgcctgtaatcccagcactttgggaggccgaggcaggtggatcaactaggtcaggagatcgagaccatcctggctaacatggtgaaaccccatctctactaaaaatacaagaaaattagcc

SEQ ID NO: 119043 - DNA, 1171 bp, Homo sapiens
aaaaaaaaaagtccaaataatgactgtattgggcctatgctatgggcatacacagggtagacactttacctgctacgcagtgatgatccttacaacaactctgcaaggtaggtaggaattggagcccagagaagttaaataacttgctcaaggtcacccagccagtatgtgttcaggcaggaattagaatgcatatctgtttgatttcaaagcccagactgttttcaccatactcactacctctcaggagcaccaaccagagccttaccttccctctgacacaatttcccattgagttgatgctttctgactagctgtacaaacgcctcctccaaaatgttgctgcgatcctaagggaattgtgcaattcttcagaaaacccacacattctcctaaactgtccactgactaaaagcattctttccttccagatgggcattggtccctgggctgtacaggcagcccaagaattgtggacactcccagccatgccagagagggaagggccatcttctctttaacctttaagatttggggatgtcagagaattaggatatttgagcatgagttttggagccagactcactagggttcaaccactcgctagcttttaaccttgggcaactcatttaacttcttgaaatctgtttcttcatcttaaaaaatgggaataagaacacctcgtttgcagagctgttacaaggactaaattttaattatgtctaaaaagtgcctaacccagtgcctggcacgtaataagtggcattactaatattgttactattattttgaaggagagcctttcccctcctgggaaaccctgtttctgtctgttggacaggtcccccccgcctccagccagcctgtgcagacttgctgcctgctgtgtcaccgggaacgcaaaggctgggaagaaggcccttctcaaaatggactggtgttgcagggtgagaagctgccccctgacttcatgccaaagctcgtcaagaatctcctaggcgagatgcctctgtgggtctgccagagttgccgaaagagcatggaggaagatgaaaggcagacaggtcgagaacatgcagtggcggtaggtaaccgctgacaggggtccctgaatgcaggagggctcctccccaaggaagtcaggctgttccctgtcctcaggtggctctcc

SEQ ID NO: 119044 - DNA, 1083 bp, Homo sapiens
actaaaaatacaaaaaaattagccgggcgtggtggcgggcacctgtagtcccggctactcgggaggctgaggcaggagaatggcgtgaacctgggaggcggagcttgcagtgagccgagatcgtaccactgcactccagcctgggcgacagagcgagactccgtctcaaaagaagaaaaaaaaaagaatttcgagaataactatacaagattttaattgtatgtactgactttcgaacctagcatgcaaatgaaatgaaaccgttgtagtaaaattacatgtcttggtgctcgccttgtggtcatcatcatggcaggaaaagggactctatctagagttactgtggcacttcgtagctatggaaagtttcctctttgccttaatttctctgaataccatccttctctatccaccttccacccctgcagttgccattaaacaactgtcttgctcattgaaatgttcccttggcagacactgatttaggctgtatcttttgtgagttccacatgtaaaatttctgtctctctggtactctttttctaagttccttgtacttccgaaagtttcattatgcttctggtactactgtttggttcctttcttttttgagaaaccaaggacccaagtcagtgtaatggtaacattagaggtttaaggataccctaatgctaactcattatgagaaagtaatttcacgggagaaaaatgatggcattatcttattggtaggatgagggtgatacccttattattcccgtaggcctctgcagacacatgttacccagtgttgggtaagtttggaaggtatgtcagttaactaccattgcataacaaaccacctccaaaacctagtggtttaaaacaataccactttctatctctcatgagtctgctctcggctgggctcactcatgtttctctgatcagctggccaatcagctgggaagactttgctttctccacaagtctctcacatccctccagcagctagcctggtctcgctctcaggccatggcagaggttcaggagtgagcaagcccagccgtgcatggaaacaagtggaaatgtatacacaccttt

SEQ ID NO: 119045 - DNA, 1272 bp, Homo sapiens
cattttggctctcgggagagtcacattatttccattaactgggggcatctcattataatccctaaagaatgcagtcttttactcttaacgcggttaagattggaaccattctggaggtcaggtggacagatgggcctttctctgtaggcagcagtaatttcaagcagtgtctcattggactgcctgccggctgcattgccatggggacacctagcaaatctgagttctctaccacatggcccactgagtccatgcctgaagccaggccctgtgctgcactgtgagggatccagacaggaatcagacctggcacctgcctcttgtagaagggatggaagatacaggaaaataaattgtgcagaagacacaactactgtaaccaaggcacagtgtactaggaggagatgggagaggagaagtgaattacgagaggagaaagcctagaggaggttggacttaaattgagcctttagtctcagctagtcattggaaaaacatgagaagaaagtgggttttaagcaaggaatcacctttagcgaaagcatgaaatagaaaaaggcagagattattttgggaacttagggaatgacttcatggggttgaggggagagattaagatttctaacaagtcagtttagattcatcatatatgagagactcacgtttgtgtaaaatgcagtgaccatttattgtttcctattgttcctgtcgtgttaatgatgaataccatgtgttcagcaacatctatgtgcctagcactggactaggtgctttgtcacatttatttctcacagctgaccctacaaattaggacttaatcccattttacagatgagcaaacagagagggtaagtagaactagcccagcatcttacagctggtaagtgatagaggccaggattaatgccaaagccagtgttgtttccactgcgccccagtgccttccacaagtactttggcactaagtgcagtcacactgattacacacttaatttataagaattgtgtatttgcttttaaaaacagaaaacacacgtatcatacgttttattacacatttgaattgtcggttataactacaaaaccatatacagtcattcctccacatctgtggattcaaccaattgtggatagaaaatattcaaggaaagaaaaggatggttgtgtctatactgaacaagtatagactttttgcctcgtcattattccctaaacaatacggtatagcagctatttacatagcatttacactgtattaaatataagtaatct

SEQ ID NO: 119046 - DNA, 1385 bp, Homo sapiens
cttaatagactaaagctggcttctcatatatgcttctgtattcagtcttttgcaatacattgttttggttgaagtatatgaaaaaaaatccaacctcacacaaatatgtaagtgagaaagggaggaatgtttcagtagcctttccaaataatttccattattgaatttgagcccatatcagtgaagtcttcatactcatttacactaaaatctattggtcgagccagtgctttgaatccatcatgctttggtcatttggaaaataggctcactggattttgcacatcttccaaatgttttccatttcattttacaatgccaaaagataacatttgttaatatcaccaccaatttcatcagaaaagtcttcaagtatttggaagctgtcaaactcatggtggtagatgcaagtttcagaattttaattttcacttgaaagcttgcattttatatcattgcccacaaatactgtcagttgttttccttgaagtgacaggctcattttattcattgttcatttttttgagaaaatgtctgccaatacccaagtctaaatagtaagtcattctttcagttaaaaaatggtgttccatgaaaaaaagtggcttcctcttcctttgattttatctctcttttatccaggaaaaactagaatgccctaacttaatgcttctcaggccaagacaaaaaagtcttgggcctgatctggtaagggagcagagataatggttttaatggctacagatgccagccccctaggccctagagtgcacctagagctcacttggccccttcactgctctggggatgtgcatgctacagcatggatcccttgtgagtaatctcacactctccagagattctggttatgcttagagtgaagaaaaattatcttggagcttttttgaggagatcccaaatcagtagaacccccagaacttttcttccctcatcttttgcctaaggctagacctgcatcctcagaggctctgaaatttaaactgaggtgagcaggaacaatgggctgctgcccagggctgctggattcaagaatcagttccatcagcctttgtgatgaagaaaaatggttggagttttcattcattggatgaacatttactgatctcttctttgtgtaggaatactgtgccaggtgctaaaagtacagcttgggagcagctgattgaaagtctgggttgaccgacttttcagggcataaggggtcatgaatgccagaatttgggaaatggcagcagatcacagtcaaagggaactctgaaccaagagctgttctctgccaaagcaaaaatttgaaggaaccagtggcattactgactataaatataacatctctagggcttgggattcttatcaccctctagcaa

SEQ ID NO: 119047 - DNA, 1035 bp, Homo sapiens
aagaaataaatttggggccgggcgcggtggctcacgcctgtaatcccagcactttgggaggccgagacgggaggatcacgaggtcaggagatcgagaccatcctggctaacacggtgaaaccccgtctctactaaaaaatacaaaaattagccgggcatggtggcgcgtgcctgtagtcccagctacacaggaggctgaggcaggagaatggcgtgaacccgggaggcggagcttgcagtgagtcgagatcgcgccactgcactccagcctgggcgacagagcgaaactccgtctcaaaaaaaaaaaaaaaagaaataaatttggtttgggcaagtctcacttagtaagtttccctgtcatttcttccagggcagaagaggaaagaaactaacgggtattgagcacctactttgtgccaggcccaggccaggtactttacataatttatttccttctgtcctcacaactctgtaaaatatggttttattcccatttcataaatgaggaaattgaggctcaaagaaattgagtaatattccaagatcatattgaaaatggcaactgggatttgaactcacaactgtgtgtctcgtccccaaaattcatgctcttcctcctccatgagtaacgtgtgctggggttagagtagcagagtggcagtttgacctgaggattcaggtaaatctgcggcttgggccctccttgtggctcattgcacccaggaggcagttcagcggatgagctagccttgtggggatattaaaacagaaagttttagggttaaggtcactaggatcagagagactcactcccaaccgagcttgtacaaccagaaaggattctccactgactagtctcgtagtgtgaaacagctgttctacctcctggaagggcctgagcccacagcctgcatggaagtttgggtaacagctccagggcactgaggtggggttgtgtcagctctcttagaattaactgcagctctgattgtcagcattagaatagtctgagattcttctcactgattgccctct

SEQ ID NO: 119048 - DNA, 2177 bp, Homo sapiens
cccgcgtagggggggaagggcgtctccccaccaagtttttctcccagcgaactccgggtggtgaccttattcaaaatggcgcaggcggcctcgggggctagtgcggcggcgcggactccgcgtgccctctgacctgttggcagcaggcggagggggggaaccgggcgccgccatattggctgttgtcctgtgaggggagcggtagcggcggcggcggcggcggcggcggcggcggcggcggcggcgtgtggagcgagggagcggcgcgagcggcggcatgacgcggaggcggagcaggccgagcggcggtgcgggcaggcgcgagcgggctcgggccgcggggccgcagaagccccaggcgcccgagcccccgccgccgccaagcctggaggcgggagcgggtgcaggccctccggaggcgccggcggagcccgaccacgacggccccagggaggatgacgaacccaacctggtgcccggcccgcaggtaggagcgagcggggagacttcggcggctcgggcgctttcaccttccccgagcgggagcgggagtggggcggggttggggatgggccatcctgccgcggctggggtagcagccttcccccgggtccggcgccgaagctttctcccccggggcgggaatggaggctggacccctctccccaaagccgaggctcggtccgcgctcctgcgactaggctgaagctgctcccctctccccgccgcctccgggcgttccggccgtacacccacactgggactgggactgggactgggctgtgatcccgaggccgcagctccgctctcggcccgccacctcccccgggcccacctgctccctcagccacaggccatctcggggctctgggactggacgactgcagcctcttccctctgcccccgggaacggctccactccgtcccctgcagcgcctgcagccgcggccccctcagcagctgtgtctcctggcgcctcctcgccatacccagcagagcagttggagcagacagccaggctgcccggaggagtttttggtggggtttctgcactgaggtggaaacccagcagaacctgcccttcttccctcccctgctccgcaaggcagcccaccccgaccttgagatcccaggtttggagaatcctgctgagagcgaacagtaggaggattccccaaagcttccagcttgccacctggaagaaggtcactttcttttgagcaaaggagataacgggaggtaccctgccaaagttcactgagaggcgggggtgacatgggccacggttgctctgggagggttgtggcactcggggctgggtggctctccctaagcttgctctgacaaaagagttttgagttggtcttttggctgagcctgcccaggaaggcaggctcctgcaggagtcttggagggtcggatgcggcgccggatgaggatgaggcgtggcggaagatgcgtttggctctgcagacactgcatcgggcagcaggggactctgggaggctggtgcagccagaaggcatggctcttgacagccttctagtagaatctctggaattgtgcatgtgagtggggttgccgtttggggtaccttcccacaaagcctcccctgacctccccagttgcgtcaggtgccctctctgtgcccacagccctctgtgcctccctctggtagcactcccctttctgtgatgaaacattgtgttgatatgtctgttgcctgccctggactgtgaactccacagggacacaggctatgccatctttctctgatcttccacgcctcgcccagggccttgctaacacagaataaaaataactaggtgaatgagagagaaaatgaatcggtccagaacccgtgcttattgtaacccagttttcatgctgatttcctttgtgtctcagatcacaataaggtttttaattaatgaaaatgtcagcacttactgagtgtcagaagctccaccttcatccgcatccccatctcctatcctaggctgacacttccgtaggagactccccaggttggacccccaacccctactgggtctagcttccaaccccaaagctgcttcccccaccagcctactctgggacccccgtgggagtgctgttatccaaaaagggagagtgggagaagggagagctggaaagctgttgtcttctcttcttcc

SEQ ID NO: 119049 - DNA, 1048 bp, Homo sapiens
gtagaagcaaatcaagactggtagatgctgtgccaaggaaagtcagggatcctaggttcgaatcctgtctctgttcgcaattcgctccgcaacctcaaacaaacgacctcagtttcatctatgaaaagctggtaaccatcgtcagttgccaggccatgaagagagtcaacggaaataagtttttattctagggcacccgctctctctcaggtaaaagccgcgccccaatcaggtactgccgcgccagggccgcgggacatctcgggatttgtggtccacccggcggaactcgcggtcccggcaggcaccgcggcggcggcagggcgacgtggcgcggccggctgcggctgcgcaggcaggtggagcaagatggctgtggagctgggcgtgctgctcgtccggccccggcccggaaccgggctgggtagagtgatgcggaccctcctgctggtgctgtggctggcgacgcgcggaagcgcgctctactttcacatcggagagacggagaagaagtgctttattgaggagatcccggacgagaccatggtcataggtgcgggggcggggaggaaggggcgagtttggaacgtgaccgtggtcttggggcgggggatgcgagacagtcagctctctagagccgggaggagacggcctcgccgtgcccaggcggtcgcggaacccatgccacctcgcgctcctctgacctgggctcgccctgcttccctcaaggaaactaccggacgcagctgtatgacaagcagcgggaggagtaccagccggccaccccggggcttggcatgtttgtggaggtgaaggacccagaggacaaggtgagccaaccgcccccctcctctccgccagcctctcagctaggcgggctccggtacttcctcttctagttcctgcatctgctaaagtgggagagacagttgatgttgtgggaatatcctgctgacttgcagaccccgcccggtctgtgaaatgggcggattaattgtggtgataaaaatcaaagagttttgtcaactcttaaagtcatctagacttt

SEQ ID NO: 119050 - DNA, 2845 bp, Homo sapiens
tggctccgagggcaggttcactttcacttcccatacccctggtgagcaccagatctgtcttcactccaattccaccaagttctccctctttgctggaggcatgctggtaagtgggcccatgtgagacttgcaggtttcagccttcatcctttggtgaggactgggggactggtggtgctgtgggtgtgagaggattatgtcagattttgtgtctcctaagaacactgggtttccactggatgtccaggacacagtgactgagctctttgtacatgcctcactcagagcaccagcccaggcttaatacttgcttgtgtgcccagagcctcatggggctaagacactgaagagggcccagtctgttggctaaatgaacagatgaaggaaagtcggggatgagctgtcagtctctggcaggaagatggagcagggctaccagatttcccttatctcctttgtctgtcctcagagagttcacctggacatccaggtaggtgaacatgccaatgactatgcagaaattgctgctaaagacaagttgagtgagttgcagctacgagtgcgacagctggtggaacaagtggagcagatccagaaagagcagaactaccagcgggtgagtgactgggccgggagcagtgggcttctccctagaagctgcccactggctcagccaggaatttcacattaaattcattctgagacccccaagggacttacctgcactgcattgtaggtcgtggggcgggtattactaactcgaccttgtaattgaggatacagactcgtaagaggctgtcattgccctaaatcacagttacacacagaatggcacagtagcatttgataccaacaccttgggtgctgtttcagtgggtccacatgctcccaggaccagggtctcaaacttaccggtgaccaggaaccagagattaccataagtgaatctgtgaccttaaggactagtagggcagtgacccatctaaacaagcacagccactgttcagtgtcacctgggggcttccttgcagaaataccagccctggctttacagatgttccattttttcaagaggaaataggatttttatgcgaacattttaatttattttttatttttttctattgctgctgcacaaattacctgtgttttaaatgttgacaaaagactgtgcactgtgtgaggccaacaaaacatacctaaaggccagatccagcccccagcctgccagtttacagcctgtgcccaccatcttcaaggagcagtgtgggagacctaggcagagggcttagagcaagtccactcctgtgtgctccaggacagctctgcctcgtggggtgataccacaactaccttacctctctcccaggcaccagggcaggactaggtgagggctatgcctgacagatgaagaaacagacttgggagaatgagtaggttgcctgagggtaaagatagtccccaggtagagtgacactttgcaggcacttggctggaacctgggcaaagctggctgaccttgggcatcctcttggtctgggaatcagcagttctagcagccccagccaactcaggctcaccttatattcccctgcagtggcgagaggagcgcttccggcagaccagtgagagcaccaaccagcgggtgctgtggtggtccattctgcagaccctcatcctcgtggccatcggtgtctggcagatgcggcacctcaagagcttctttgaagccaagaagcttgtgtagctgtcccaggcgtcacaacccatcctcccaggctgggggagaaaggacctcctggaactgacttcttctgtcaggaggactggtttccagccatacctgttctggaagggagaggggctggaggcacccacaggcacaagctgaaggcagcagcttggctaatactgagcaggtagtggggcaaattcctgccctctctctctggcctctgggccgtttggtagtaatcacccaagggctggtaaagcccctcctcttggcacctcagaatcacagtgttactgatcagggatgtgaggctgctgttgggggtggggggaggggaatgggcaggcaagccagtcttctgtcttcctttgctaacttagggttttgagcaggttggggtatggtgcctgtcatacccacctgccaccctgggaacctcactgttctctctttcagcctagacctgctgatccagggtgtgtgtgagttgagggtgggtggaggggtttgcagtgtgggaatgtggccctgcagttgacctgagctgcttcacatggttgtccattctggggcttaaagaactgggaccagaccaagtagaggccttggtgctggttggggtggggcctgcagagtcttagttactgatttcattttcaataaatgtaggtttgttacatgagtttcccaataaaaaaaaaaatgacttcttgtccagtgcaagtgactcagtcatcagtgggcacacactgcagggtgcctcagggaatgccagttcttccaaagagcaaagcacttcacattccaaagtgaattcccaccagtcagcttcattctttccttcttctccaggccttcctgtggcagggaatagtgggtttgtccaagattatacaacaagtaaattgggctggggctcaaatttacaccctttcctctgtgccagctccctggtgaagttccctctttctagagtcagtaagcaggattgtcatggatgctgccaggaagtgcctggtaaggaggtgcattgagcaggggagtgctacaggacagccaccctgggctggcagggacaaggatgttgatgggctaaaccaacagcaagtg

SEQ ID NO: 119051 - DNA, 1069 bp, Homo sapiens
gtaccaccaccaccaccaccaccaccaccacagcccctagccacttcttatcagcacaggattcgactccaaacgagtaaggctcccatcgcagccctgtcccatccaccctctcctcaccttcacccgccatcgccaacctccttacttccacactcttcacacgcccccagtcttcctctcctcacccctcacgaccccgtcacccccacactccaccttctccctactccctcctcatctccacactccccctttccccttccctcaaacccactctcctttcacccccgcggctccgttcgcccccattcgctctcccactaccgcacctcacttcaccacggcccctctccctagcctgagccgagccccggcagctcaccaaccggtccttctccagcaagaagacgctggccgtcttgtcgaaggaccccgaggctaggcgacgcccgtcgcaactccaggccaccgagtgcaccttggcgctgtgcgccagaactcgcgcgtcttgctgtggccccggaacagctcctgcatcccaagcacgtagcgcgacgggccgctgctcactgagcaccacggggccatcgagccgggaccgctctggcccaacgccgagggccccatggctgcagcggggaccgccatgccgagctccccagcttccaactcacaacactgcagcagcctccacggcgcagtcagtcctggcgccgctgccgcacgcatgcgcccggaagagggacggcccctctgcgcaggcgcgctgtaccccgccccggaagggactacaaatcccggtatgcagcgcgtgcccgcgtctgcttacttagtaatatttggttcttttaactccaaatatgcttcacacttaacgattccgagtttttttagtgttcttatttctcccttacctattctttggtagatatatgtgtattcctgtttaatcgaataaaagaaccaacactaaccttctaaacagttaactcatcacctttcttctggggttgttccctaatccctagtcccctcccttaagagcagaaagctctggtctttttgc

SEQ ID NO: 119052 - DNA, 4549 bp, Homo sapiens
gacagtcaaaacagaaacatacttgtctaaaggagacaaattcattcatgatcatgctggtgaagtagtcacatgcagagatgagatcacaagagaagtcctgactgccaaaggtgaaagacggtagattctcatgaagttacctgtctccacttcagcaatgtcaataaaatgatcttccgatgctgacgccagcattttcccatcatggctgaaactgagggttcttacaggccaatccagcctatgatacagagtggacagaagagacaagagaattaccaagtaagaggagggaacaatgtcactcacgatgaaataaaattaatgtacccaacaagggaagtgctgatagagtcacttacctggaaaagcaccgaacacacactaactcatccacatcccagaggctgaccaaagcatctgcacttcctgtggcaaagtacttccccatggggtcaaacttgatacagatgcagttggaaggatgggcgttgatggactgcacaggcttcagttctgggtagctgagaaaaaagacagcgatcaaactgcagaagaggactgtggtgctaaaacaataataggagatgatgaagaagaaaagcaaagataatagaccaccaccaagaactgtcattcaagataacattcctgaaataaaaaaagattttgaactacattatttaaaaagcacaacacatacctgagactacagaaccaaagttaccaacatcgagacagagactagcaaaattagtggactttaaagaaaaagaaaattagattattgggctttctgacaacaacacttaatgccaaaagaaaatggagtaccatatttaagaaagatacacaagcgagaaaacgagccaaggatttttacatccagcaaaactgaatttcaaatataatgatacaaacaataagcacaataacgttttataaaatctgtaagttttagaattacgtaaataagttgtaataaaaactccaggaataatgttcccatgaacgcttcccgaggaatcttaactagagaatgagcttcaattaaaaaaatgactagagacttataaggactggtgctgaacactgaatatacagtttcttgcaaaaactatacatggtttaaagagagggtataatatgtaacatgtgcacatgcttacaacatatagtactatttttttaatgggggaagaatggaaagagcatatgcaaaaaccaaaaacattttttgtttcaagtcatcacattggtggtagcagcagtaatattgttgttctgagacatctatatgtttaccatgggagataggtaataagtaaccatcggatattctaattctatgatcccctgtgcccttgagaaccagaatactcaatttgggaggaaagaaatatatttgtaatatagaagaggtttagtaaaatccctggagtcctcaattttgattgcaagttatcaatgtgaattcataaggtattttatctttaaatatatacacacacacacacacacacacacacacgtaattcctaggccaacccagcagtaatgaacattcctaacttcagtatcatttctcagtaaaagaatgtaaggctccttttttttttttttttttttttgaggtggaatctcactcagtcgcccagaatgctggagtgcagtggtgcaatctaaacttactacaacctccgcctcccgggttcaagcgattctcctgcctcagtctgccaagcagctgggaatatacacgtgcgtcaccacgcccagataatttttgtattttgagtagagacagggtttctctatgattgccaggtctcaagtgatccactcgcctcggcctcccaaagtgccaaagtgctgggattacaggcgtgagccaccgcacccagccagaatgttaaggcttcttggagaatgttctgattaaaggtctggggcaagaaatgcacaagatgaacttggaacatcttatcaaaccagagagcaaaaaaacagaagacgatgggattatgtcaaaaaaggtctcaggaaccaacttgaagaggttcttattggccaaagatgggataatttgagcttcaacaggcataacaattacaagagatggaaacacaccaactatgtttaaaaacatcagcccgtaatgattctttaaaaaaaaaaacacctaactgctcatctttggaggtagcaggaaacaaaatcattatctgacaaacagaatcaaaattttatcctgccttccctacatgaactacactactgggtaaccacatcgcagatgagaagcagcatctctttacacaacagtccaacacataaacagcatatggaatcagcaaaagccaaactgggagaatctccacaggttaacagtctggtttttcaacagctacgttttcggaagtttcttttgagtaatttaagagatacaaaacacatatcaatttttttttttttttaatgagcaaaactagggtatctaggggctgcacatgtggtagataaactatgaagaaacactataaaagtcaggatagtgtttgcttttgtggaaggaagttgtaattaggacaaaacacctggatggacttctgggatggctggaaagaactacttctcaacttgggcggggttgcacaagagttaagcctataagagttcattaagctatacatttattttatgtggttttcaatatctgtgttttataataaaaagatttttcttaaaaagttatagaatccccattgcctacaaaataaaacccaagatactaagcataaaataaaggccttttataatctggtcccaaattagacttcatcttcccattatcatgccctctcttatttcccttatctgccaccactcccccaacaaccctgacctaaccactctccaagtaagtcatgctcactcacacctgctttgtcagttatgtggttcccttttgcttattcttaaaattctgctcatctttcaagatcaagctcacaagctccctccttcaaccccccatatagtatgtctgttctttccatggaatttcacagcaaactcctggcctcccactcacagaacctatctcacttggtcttgcattgttcacctgggatagtggaaggctagaattgaacagacctgaatttcagctccacagtttcattcatttacagaacaaatatttactaagatcctactacgtggagcaggtacaggactagacattagggattcaacactaaacaaggcaaacaccatccctaccatcaaggaattcacagtctaacaggagacacaggcaaataaacatgcaattacaatatagaaagaaaagtgcttcctacagaaagtatataaaatacgcctctaacctacctctaaccttggggtagcgggggagcttccctgaaggcaaagtgatatttcagttgaaactttaagagtacgaattagccagaggtcgggctaatcacctgaggttgggagttggagaccagcctgaccaacatggagaaaccctaaactacaaaaaatacaaaattagccaggtgtggtggcacatgcctctaatcccagctacttgggaggctgaggcaggagaatcgcttaaccccggaggcagaggttgcggtgagccaagatcacaccattgcactgcagcctgggcaacaagagcaaaactctgtctcgaaaaacaaaaaaaaagggagtatgaattagccataattcaaggtgcatccagttctagcacacactagctgactactgatgtaacctctcaccctcagatcctcatctgtcaaatgagaagcaaatcatcaacccctagaatttctgtaaggactcagtaaaatataaagtatataaaatatacagctcaaatgtacttaagacaggttaggattctctcttactatttgtgttttaagctccttcaggataggctcacatctaattcatctccatatctgacacagcacccagcacaaagacatgacagtcccctaagctagaccccctcacctgaggatgttgatacaaccattgccatttgtcaggaagaacatattattgtcattgttccaggagatttcgttgacctcgaacttgaactgctcttctgctttggaacggtgtgtcttggcatcaataaaggtcaccacatcatccttgttgcctacagcaatggtctgcccatcaggactccagcagatattaatgttctcccctgggaacccagacataatcagcaagataatctgtttgctcataatcctctacaagtttattgcactatcctagaaagaagaccagagctttcttccgggcttactcattaaagtcctagacaatggaagggagctaccacttacgattcaacaataagtccagaactttcatctacacatttccccatttggtcttcacaatactcctctaacatacactttattatctccatttataaaatctataagattttatagatgaaggaaataggagataagacgacaagccaaagtgt

SEQ ID NO: 119053 - DNA, 1243 bp, Homo sapiens
cagctaaggctggtccctaaaacccacacctgcctttggtctctcagaggcctggcttgccctctgggcctttgctcccccgctgggtgcccggcctggaacacaggttctgtctggctgtgtgagtggcgtctctcccttcctttgagggaagctcagctttcttacgcgctcatcgttggacgggctgccatgcattgcgtgcttactgggcgccaggtgctgtgctgggcccttgtgagtgtgggggcacaggctgaattagatgagctcctgccgcagggggccctgcacactgatgtcagctcaccagtctcttccctgacagggcagctcagggaacttctgagaagttatctgcagagagccccacctcactccctttggctaccctggccgtgcctggcagcccctcaggccccacaggtgggtcctggttgtgaagtggagttagtgcacatggatgtcaggggacgggtgtgaggcatgagctgggggggccccctttttcagggcagagaatgaggcgtgtgcactgtctgctgtggggatggtgtgtttatggccatgtaagtggcaggtgtgtgtaaagatgtgcttgtgggtggtgggtgtgtctgagggggtgtgtttgggagcctggcctccaaaagccagtgtctgggttggagacagtgcaggccccttcttggccccaccctctaccccattccttcctgtcagccccagtctgtcttggcactggccaggcttgggtggagcctgtgtcccagacagatcccctaggcctatctgagacccatacaggcccacacctgagctcctgtctgcctgaggagggaaagggggagtggccaggtcaggcaggccagtcgtctacacacccccttggtacccattcccatttcacaaactcctccaaaccccaaaccccaaacggaaatctctgggacaatggctcctccagagggcccctcagagccaggtgctggccagatgccttgatcacagcctccatggccaggggcctgtcaagccaggggcccacacacctggtgccagggtccaccttggtataccagctcggcagaacagttccccacccagcgattagggagctgggctggccagtacagccagtggggagtgggtgggaggcaccaaaacttggcagctgtgccagaaaccaaagccaggcccagatgtagggggagggcacgagagctgaacctgagcctggggc

SEQ ID NO: 119054 - DNA, 1015 bp, Homo sapiens
caaacgtccagtcctcgtgcgaccgcgctgggtcggaagtgagcaggtgcgcaccgggctcggcagggctatggagcagggtctttggaaggatgactaggagtttgcctgtcgtttgcatgttaatgcgggtgaaactcccagtaggcgctgctgtccagggaaaatgatgggctttttcctccctccagttttggttaatgagaaaagaaagattagaaacttcaagtaggactgtatagtaaaaaaaaaaaaaaaatggaggagggcgatatgacacggtaactggtgtgagggtggggcggaggggtcagtattagatactgtggtctagcagagcatctctgaggacgggacatttgcgttgagacccaaattaggaggcaggcttaggaagatacgggaagagagtggtccaggcagcgggaacagccagtgtgaaggccctagggcagaaatcaactgagagtatagtcaaggaacagaaagcaagctagtgtggctaaagtatggtaagaaagggaaagagtggtaggagatgaggtcggataattggggtttggtcacatagagtctgtaggtcagagagaggaatgtggagttttttctaagtacagtggaaatcttttggttttaagcagaggagtgacatgtagggtagagagtggatggaggtcgcggctgcaaaagcataagaattggctgggcacggtggttcacgcccgtaattccagcactttgggaggctgagactggcagacggcttgagctcagcacttcaagaccaacctggccaacatggtgaaaccctgtcgctccaaaaaattaggctgggcgcagtggctcacgcttgtaaccccagcactttgggaggccaaggcgggaggatcacttgaggccaggagttcaagaccagcctggccaacatggtgaaaccccgtctctactaaaaatacaaaatttagccgggtgtggtggcaggtgtctgtaattccagctacttgggaggctgagg

SEQ ID NO: 119055 - DNA, 1052 bp, Homo sapiens
gctagtctcaaactcctgagctcagcagtctgcctgccttgacctcccaaaatgctgagattacaggtgtgagccactgctcccagcctatatgcatatacttttaatttacataaatggattctgcctagacctcatttttttccacctcagtgccatgtgtggagcttgtcgatgttgctctgggtatatttgggatgcagtttctaaatgctccacaggtttccatagatgcatcccccacattttacttacttgattcctctagtgatgaggtccctagattgtttcccactccttgctacaatgcaatcccgtacccatctccttcctcagctttgtaaatagaattttatcgcttctcagccttttcgctgagatcaagtgtagtaaatacaatttcaagatgctgatttgagcttggctttgataagcctggtagctcttggtgtctgacagggccggattgtttgaccttcgtgaggtcctggcttttttgagccatgtttatttttgataaattgtgattctagttcccagacactcttggccaacattctagtgtcctgccatcttccccagttgatcattctcacgagctctgtggttaattttctgtttctcatcatcattaatggttgctgtacactcattccaacacagatatttgctctttcctttcctggtgaaacagtggcctgtgaagctggtcctgggagtacctgtgatgtgaagtacgtagagaaggactctgaggccagagccagactgtctggcttcagttcagttcccagctcctccacttcccagacgcctgaccttgggcaactgatttaatctttgtgtctcattttctcatctgcaaagtgggtctaatcattgtacctacctcatagtgttttcgtgagcattaggtaaatgaattaatgtatgcaaagtcattagaacggtgcctggcacataacaggctcctatttggaatgtcagctgttaataatagcaataataataattacgtcatttcagataggagaccctgttatattttgcca

SEQ ID NO: 119056 - DNA, 1099 bp, Homo sapiens
agaacaggtgggacgggcatggcatgctctaaatgagtgtggtgtggcgcatagcaggcacgaggaccctgggtggtctgcgctgaagctataaactaaaggtatggcagatgtgagagaggaggagtctagagttcatcctggacacgaggggtcagagaagtttctagttggggagaggcatctgtgtaacagacagccccacatgggtgcagggactggcagcctgatgtaacctaccacatccagacatgtgtcaggccaggcagcacaaccccagctgcctgggcactcaccccgctggtgcagccgagcaaagggctggaagtgccgagcatagctgagggcctccagctgcttcgcggggcctcctgccaagaggcggatgaagtgcagtcggtgcagcttgaactccagggagctgttgagttccagcaggcgctgcctgtgggagacggcccatctgggaagaaaggggccagtttagtgtagagctggtgggggctaggacctgagagccagcacctgagaggagggccccaaaagcctgtgtgaggctcttgagacagggctgcaggcaagtcaagtacatctgggtgaaatgaagaccacagtcaagccctgtgccctgagaggtcgaagcagaatgctgctggcccacccaagggcctccttactccaacgcaggacccaggtcttgttcgtgcagggcttccaggattcgattcaactctaggaaaggctgcttgaaatccaagtccacattcagcgttgattcctacaaggagagagagaagagatcccaccactggaagatggtgtttccaaagttctctgctatgcacataataaaagctcacccgccaaagacaggccagagagctgggctttgcttgaggagcttggtctcctgccagccacttgggcctctcttgttcccatctcagtcctggggaggctgagtatgacatgctgacctcgagtgcagactgcagaccccaccccacaaccgtagcagtggagacagtccccaggctacgcactgagttgcatggcgagaaaattactcctcttcaatcctcctagtacagtagggaaa

SEQ ID NO: 119057 - DNA, 1051 bp, Homo sapiens
tagagacggggtttcaccatgttggccaggctggcctcaaactcctggcctcatgtgatgcacccaccttggcctcccaaagtgctgggattataggcatgagccaccacgcccggccccaaaacatgactgaagttttagctagatactgctgcctgttgaaagctcttaacctggggttgctctaaatggagattagtgtggagacaccagtgccaacctgaggacttatttgatccttgatgcagtgggggaggaaagagaactggaaaagaactgtcctcattcctgattctgtgttagtaatgcctgttctcatcctgcagaagcagcctggacctccacctccccagtggattttacagtcaaatttgcctgagggcattttcatccctgctcagtctcctcaggggcttgggagccaccgggctcagcatattgtgctgtgctgcacagtcctgctgcccgcttgggggtggacccagagccctgcaccccctgagctgccccctctggttgccttgtagagatccaggtgatgatgggcagcctggtgtacctgcggctgggcttggagaagtcaccctactgccacctgctggacagcagccactgggcagagatctgtgagacctttacccgggacgcctgttccctgctggggctttctgtggagtccccccttagcgtcaggtacaacccagccctgtgagggcagcacaggtgggagggtagagaggtaatcatcatttgccaaggccctgccatgtgccaggaacagtgctcggtgctttcagagaccgaaactggctttcttagtcattcttcaggagaggaattacctgtttttacagttaaactgagactaggaagagttatggcccgaggtcaccatgaggtcagtggcatggtcaaggttcccattttgtaaggtctcctgaatgaggtccctgcctctcttgcacctcaccctggatcattgcaagaccttcccagctaacccacgcccctctgcagcccgccttcctcatgacctaatgtcttaaacacc

SEQ ID NO: 119058 - DNA, 1044 bp, Homo sapiens
tactaagtcaaacgcaaacagaaacaggaaaagacagcaggagcacagaggccagcatctccctttccttatgccatggagccaggtgccaggcgtgggctggtccatctccctcctcagcctctgccaaagggctgctccagtgctcccctcagtggaactcctcagccaggcgctctgaaaccaaccacagtccactgaagttgaccaccctaccgagacagaccaaggctcacaggtgaaaacccctttcaacaaaattccttccaggtaggaatcagaatatgatgcgtttcccatctgccgggttctgctccatgggacagtagggacacttcagcctgcaaagggaggagaaccgagaacgtctcaggggtggccagtaggagagccaagccaaggtggagtagagcacggggaacttactttcctccattaatgagcttattgagtgcatctcgggagataacatggccacagatgagcttgatgggagggttggaatctgacgtctgctggcggaggatggggcaagcgaacacggagtggtaccagcacttcatgcctagttcaatctcaatctgggaagggcagcgaagcgggtgagttccacttcctgtcatggctgtcctccccagtacctcttgcccacgattccccagaccaggcctcaccggtaactcgtccttgtgattccagaccccagtgcactgccgctgctcaatcacagccttgatgttcatcaacacaggcagcgccacacagccagaggcaaagctgcagacaaggaacaggggctagagtggctcagatcacagcagacaggcaaaaagggccagcgcgccatgcttcagcatggaccttgagacagggctctaaaatggtgcacggtcaaatcggtcctcaaagatccctcacattgttcataagatgtcacatatgtacttatgtatgtctgactctacagactcattctaatgcaccccaaaatttgagaacctacagggaagacttcctatagctctaggggcagatatctgctca

SEQ ID NO: 119059 - DNA, 1752 bp, Homo sapiens
agatttttctgacaattgaagaaaggattagagaggtacgagtaggtttgggaaagttcaggtagtagactactgtagtcctggagaggtgatggtggagacagagttaaaggggacagatttgaaaggactttcagatgtggagaatggggaggtattgacgacttctaggttctgacatgcccagctggagggacagagggcccaatcttgagatgtgaacagtggagggggaccagatttgtgtagaaagatcacaaatttgggtctgggtaagtttttgaggtgctgtagagacacatgacttccaccccgccccacaccaggagaactgtcaaacaggcagatggctataggggtttggagcatggaagagagagggccaggctggagatagtacatctgggagttttcagcacatagatggcacctgaccccatggcagtggctccggtcagccaggaagaaggtcctgagaggagagggcagccgaggacaaggctgtgaggaacactcacagtgaaaggcgcttaacagaaggggagccagcagagggcccagaggagcactaggagtgcggaagcattctttcagccgagggctctgtccttgtgtgtccgcctgttatccagcatgggagagcagacttttccttctgtgtcttaggctcctgaggcccttgccccccagccttgacacctggccagctaggaaccctggctgagtctctggcaagctttcattgcctcactgtcactcttgggacagagcccatgcttcttagcctggtactcaaggtcttgggggtgtcccctgccagtctctcggctgtgtctggtgccgttctgattctcacaccacatgctctcccccgccccagcccctccgtgggctgcctgccacacagtcatccatcagcgtgctgttcaagtgtcacctcctggttgaacccttttttgactctccaaagagagctgagctcatacaccttggcacccatcctgtacttcacctgtccgagcactacatcactttggtggcacctgtatgttgccaagaggtagagatcacccccaaatagtgtgctcaccaaacacaattttgtctctatccctaagacccagcccagggcagcacttaaaactgaaagaaggaaggagcaagccagagatgacagtgttttctctcatttcaggatcatggttttggcaggagacacactgcccattgaggtatactgccatctcccagtcatgtgtgaggaccgaaatttgccctatgtctatatcccctctaagacggtaaggagcacgtggccccctgaccttgctcagcactggggtgtctgggatagtctgccatagcaggagagtgtgggaaagagccaggagtgttggagctaagacaggcctggatggattctcagctccacatcttcttagttttgggactacagatatgttacttcttgcatttcagttcccatcttgtaaagtgggaatcccagcccaggcgctgtggctcacacctgtaatcctagtgctttgggaggccaagacaggaggatcagttgaggacaggagttcaggaataacctgcgcaacaaagtgagactccatctctacaaaaaaaatttttttaattagctgggtgtggtggcacatgcctgtagtcccagccacttgggaggctaaagcaggagatcacttgaacccaggagttcaaggctgcagtgagccatgatcatacacc

SEQ ID NO: 119060 - DNA, 1150 bp, Homo sapiens
tctctagtaaaaatacaaaattatctgggcgtggtggcgcatgcctgcaatcccagctactcgggaggctgaagtaggagaatcgcttgaacccgggaggcggaggttgcagtgagtcgagattgcgccactgtaccccagcctgggcaataagagcgaaactctgcctcaaaaaagaaaaaaaacgaggcagcctttccagcacccagagccccgccctctccggccccgattcccagggctccgccccttgcctcacattccctccgctccgccctaatcggttccgcccagtcccttggtccggggatggccccgccttaaggaccatgactccgcccctctccgctctccgtagttacgaagctgggcgtcaacgattgggctgagtcggagacttcctttcctgattggccgtgttgtacggcggcttctcgcgcagctgatgacctggaagtgatgcctaaagctgtggaccgcgtgggctcgcctccctgggactaggtttcagcggccgctgcgatgaccaaaataaaggcagatcccgacgggcccgaggctcaggcggaggcgtgttccggggagcgcacctaccaggagctgctggtcaaccagaaccccatcgcgcagcccctggcttctcgccgcctcacgcggaagctctacaaatgcatcaagaaaggtgaggcggacggcggcgtggccgggatgggtgcgcgggtgggatgggtgcgcgggtggctgagcgaggcccccgaccgactcttctgtcgttgcagcggtgaagcagaagcagattcggcgcggggtgaaagaggttcagaaatttgtcaacaaaggagaaaaagggtaagaaccttccttcctctggattttgcatttctaaacgttaacggagaaatctctacttagtaggcgcgcagtaaaaaggttaactctgacctagccccatatacagaagccaatcaagcagtcggtaaagtccctttggtacaataccggtacgacaataccggtacaccacgtataccagctcaaagtgaattccaaagtgaagcgaattgtgtaagcaaagtcccttagagtaaacccaccttcattaattcagggaccctcctccccgggctccgctccttgcctcagattacct

SEQ ID NO: 119061 - DNA, 1012 bp, Homo sapiens
cattaaattaaagctggcctgaaagttttcaaagtgctactgtttccaactgatgagatcttcagttttctggattttctgggtgacgattattttcaattcctttttctggtgatatatacaagaagttacagcagatatataaagggaaggtcagaaacctgctgtccaagttcatcaccacttgttcctgatcctttttaagtataagtatttgatagccagttgttctactacatactagttttccactactatcaaaagaagccaagcgtaatctaaatgctatgctccttcgaggccgtaaactgacagacccgctgcgtggctgattcagtgtattgcgtttgaaaatgatgtatccattggtgtaaattacaagtaggtcaaagccgaagttaaaacccgtccaacaccagtagtattcaccatctttggcaagctttctaccacacctcatgctatttccctctaggtcttctttattgatttcttgaggccctacctcacggtcttgttctgcccgcagcatagcaaaccactgctgtttatacacagaagacagccattctgaaggtactataccatcttgttcaataattcttgcagaagctaggtcactgataatatattgtaaccttaaatgtctgaatactgacacaaatggttttcctggttcagtttcaagaaaggccataccttcaaaatcttttctctgtttagaaaaccagacatctgtttctgtcaaaagctgttttaaagatccattccaagaaggcacaagttgaaggaacatccacttttttagagtggtgtatacatccatctccacttgcatcacaaataagttagaggaaccaatgagctgtttcatgacatttataccgagttctttaaaaagtttaacattctggtgagtcatcaaattgtttagaagccattcaaggcactttttctttacagaatctaatccatagatctctactgatgtgtaataaccgcatacagtttt

SEQ ID NO: 119062 - DNA, 1050 bp, Homo sapiens
cggaggttggaggcggcagtgtccgctgcaacggttggggctgcgcgtgagaaggtggcggtgtaggcacctgtgctcggggaaggctggcggcggcggccgggccatggccagagaccccctcctctgggctccctgaagtcctggggagccgtgacccatgggatcgtcgagcagccgggtgctgggccagccgaggcgagcccttgcccagcaggaacagggtgccagggccaggggctcggcccggaggccggacactggagacgatgcggcgagctacggcttctgttactgcccgggcagtcacaagcgcaagcggagcagcggggcctgccgctactgtgacccggactcgcacagggaggagcatgaggaggagggggacaagcagcagccgctcctcaacacccctgcaaggaaaaaattaaggagtacatccaaatatatttatcaaacattatttttgaatggtgaaaacagtgacattaagatttgtgctctaggagaagaatggcgattacacaaaatatatttatgtcaatctggctacttttctagtatgttcagtggttcttggaaagaatccagcatgaatattattgaactggagattcctgaccagaacattgatgtagacgcactgcaggttgcgtttggttcactgtatcgagatgatgtcttgataaaacccagtcgagttgttgccattttggcagcagcttgtatgctgcagctggatggtttaatacagcagtgtggtgagacaatgaaggaaacaattaatgtgaaaactgtatgcggttattacacatcagtagagatctatggattagattctgtaaagaaaaagtgccttgaatggcttctaaacaatttgatgactcaccagaatgttaaactttttaaagaactcggtataaatgtcatgaaacagctcattggttcctctaacttatttgtgatgcaagtggagatggatgtatacaccactctaaaaaagtggatgttccttcaacttgtgccttcttggaatggatctttaaaaca

SEQ ID NO: 119063 - DNA, 3548 bp, Homo sapiens
ctcgcccaacctcggaagcccgggttctgccacttccagccacgcgtccttgggctgcgaaactttctccagcccagtttcctcttttgggacatggggaggcggaggctgccaatgctgggatggagtcctcgagagcaagagaccagcggcctcgacgagcttacaatccgattaggccctcccaccgatgtgctgtagctgcccgccgccctggacccggcgccgtcccgcccggcttcgggagccctccgtagcggccggactcgcgcgcgttctaaaatgaggacaaagcccgcccaggtctagagcgcgcgcgccgtggcggccaatgggacgctgaagctaggttgagtgacggacttgagcagccaatgagtgtgcagtttgttgcgatgtggcacccggctccggcattataaagggcgccacgagtcggcattgtcaggcggcggcaccgcgcgggacggagcttggctgttggtcggtgggttcccgtgcggcggcggccaaggaggaggagacacagttggagcagctccgtgggctgactggggcgaggcctcagcagcgcgagcttgagtgcggccgagcctgcggcgccttcccctgcgggtggggacgagcgggccccgcggcgtcatcggcggcgaggtgagcggcggccggcgggcgggagctctggcgggagccgcgccggcctgacgcgctgtcgccgctggttgcaggagccgccgcgcctcggcctagcatgtcggaagcgggcgaggagcagcccatggagacgacgggcgccaccgagaacggacatgaggccgtccccgaaggcgagtcgccggccggggctggcacgggcgccgcggcgggggctggaggcgcgaccgcggcgcccccgagcgggaatcagaacggcgccgagggcgaccagatcaacgccagcaagaacgaggaggacgcggggtaggtgcggccgcgggcggacgggggcgccgcctttgttccggggccgccttttgttggcgccacgcggcggggggaggggcggcggcctggcccgggtcggggctggtgcggcccgcggactgtcgccgctgcgttcgcgggccgggcctggcgctgccactcgcgctggagtttgcgggagtttgttgggtcgactttggcgccgccccggggccgctcgcgcgctgccagggccagggccagggccggagccggcgcaggggcgggcggatggcccggaagagggaaagcgctcggacccggggcccggcggcgtcttgggccgcgccggcggctgcgtgggcggagttggcgcgagccggggcccggacctccctcctccgcctctcccgggggcggagtcacggtctgaaccctgggcgggcttggtccccggaaacatcgagttccttgaaacgagttctcaggagttggtggagacgctggccctttgctacatggttgtagaacacatgaatttccagttatgagtggttaggtcccatacccctggtgaggtggtcccttctttgcttctcacaggctggggctgcagagccttgttaagcctcgttagggtcctggttgagttcaatttggagggtagtggagatttaacatctttctaaggtgctccttgcagactctaagggtagctgtagacttcgtgagaactttgccagggccagtcctttccaaaatcacagcttgcttacaagacttgttgccgtgtgtctcaccctaccatttcagaaaaatgttcgttggtggcctgagctgggatactagcaaaaaagatttaaaagactattttactaaatttggagaggtcgttgactgtacaataaaaatggatcccaacactggacggtcaagagggtttgggtttatcctgttcaaagatgcagccagtgtggagaaggtaagctgggtactggatttcagcagtctcagtggaaacgatttgaattctaagaggacacctttcttaaagcatgactagtttgtgtggtctgcatgtgatttaagtgctttgggcaaaacccaaagccggaggttatgttccggtttttgaggggatgaaaatacagattaagctgggagtgagagaatgtgctggagtggttcgggaagatgacagttgacattcattaccttttatgtgcctattctgggtacggcgctaaacatctgggaggattacaagagagtccatgattggtatgataggcttttagccccattttacaggacaaaaaccaaaaccctaaggctcagaaatgtaagtagaagaggtcacagctagtagggagtggagggaggattccttcccctgtggcccatcttcagcctatgctccgagtccctgctgcttcgcttctggagatgggcctcacgctgggactgcttgggcaggaagagcatgatcaaaggcttaagtgtgaggactgttttctaggtgtcgaggtaaaccagctgtacttgaggtttgatgaaaattgggttgggaggttaagctggggtagaatttggagggggtgaaacacatgtttgtatctgtactggtgtctttatggcttagagagaagggccttgtctggctcgtgctgctgagtcagcctgacccctttctgttggaacaggtcctagaccagaaggagcacaggctggatggccgtgtcattgaccctaaaaaggccatggctatgaagaaggacccggtgaagaaaatcttcgttgggggtctgaatcctgaagccactgaggaaaagatcagggagtactttggcgagtttggggaggtgagtgtggctctgggaatagcccatcagctgcccctaaggctgccttctttctggtccttggtatccttggctggctagaccctcccaggcagggcttatttttcaccctctgtcttcaatggggtcttttctcctgtgagtcccctatatgctctggggtagggaggtattgggcctgagtttgcctatgctttttgcagattgaggccattgaattgccaatggatccaaagttgaacaaaagacgaggttttgtgtttatcacctttaaagaagaagaacccgtgaagaaggttctggagaaaaagttccatactgtcagtggaagcaaggtaaggtgttcccagctctgcttggcctcctgtgctgctggagagctggcccttagagggatgggttaggggttgggcctcatgcaggagctctccaggttggtcagactttactatttctctgaagcgtatgctgccctgattggggcagtgttccaatccttgaaagacttctcaggctgggaggactgccaataaacaacacaggatgtgagggaggtaggagaaggtggcctctgtgaatagagcaggttgagtagcctctttagctcctcacttaaagctagaggtgacagttctagattcttgagtccaggggtatgaagcctgcagtttaaggtctcagaagatcctagaacttctgcaactcactgattctcctctgtggtgaagtttttcttattccaga

SEQ ID NO: 119064 - DNA, 1155 bp, Homo sapiens
taaggcccctcatctgagaagtcttgtctgaccctctagcccagcaggaccaaggtgtggtgcctggtcccagcctgtcctctgctcccctgggctgcagttggcccagttgcctgcctccattagatacggagttgctctggggctgagatgcccatctcaagtgcattctgtcggaagggttctctgctggaaggcctttggttttagttgggattccatgagctttagcccaaaggtggcctcccatactagcatattttgtttctcagcaaatggacctgatccaccatttgatgtttgtcgcagtgaaggtgtttgggcagtcactgccctgagtttgtcctactggcctgaccactgtcctcttgacttttagtgtgagatcaaggtggcccagcccaaagaagtctatcagcagcagcagtatggctctgggggccgtggaaaccgcaaccgagggaaccgaggcagcggaggtggtggtggaggtggaggtgagtggaacgtggatgaagataggtcctgtttccctgcctacatggagccttccaagcctgtcttggggctccctctggtgctgtgcagcaggggtgggcagattgtgtgaggttggggacgaacaggaataggaacggctctgggtcagggctgtatgcttgaggctgttgcctgctgctgccccttggaatggcttgggtgcccagggcagagagagcatttgtgttacactctgggggaggggatgtgatgggtgtcttggctttgtggatgtcctgagtctggtacacctgtgagcaggtaggcagaagggtgggtagggcagagctgtgccaggcatttatccccttccatcccaggcccctctgactccaaagcctgaactgcatctttttaaaggctaagctgccaaggagagtgggagtgatcagagagtgactgagtgagtgagctgccttgtttgccccaagtaaagttagcatcctggtctctgatcctctgcttgggtctctcagatgcagggttgggcccagggcccttatacaccagaacagcagccccttggcttctgcctgagttgccacagtaaccctgccaccccaaagggcaggatttcctccatcctagctcctgcgtatgctaaatggtccacgg

SEQ ID NO: 119065 - DNA, 1575 bp, Homo sapiens
ggtcagagtcagagttggaatcagggctacggcaactactggaaccagggctacggctaccagcagggctacgggcctggctatggcggctacgactactcgccctatggctattacggctacggccccggctacgactacagtaagtaggagagagggaggccccatccgctcacccctcgtccccaggggaggcaggacagtgtaggagccactggcagcaggggctttggagtcagacaggcctggctcagccatgggagctacttgattttgagccttagacttcggggtcttaataacatgaggaaggcagtctctgctgtcacggctggtgagggtcctgggaagatgcatatcaagcgcgtggcacagggcaaatgcttgtaaatagtagctgctatggttgttctcgtccctaggtcagggtagtacaaactacggcaagagccagcgacgtggtggccatcagaataactacaagccatactgaggcggcagcaggagcgaccaactgatcgcacacatgctttgtttggatatggagtgaacacaattatgtaccaaatttaacttggcaaactttctattgcctgtcccatgtgcatcttatttaaaatttcccccatggaaatcactctcctgttgactatttccagagctctaggtgtttaggcagcgtgtggtgtctgagaggccatagcgccatcatgggctgatttttattaccaggtcccccagaagcaggtgggaggctctgcttcctgctgccgctctgcagcctggacctgtggaccctggttgtaaagagtaaattgtatcttaggaaaccagtgtcacctttttttcaccttttaattttatattatttgcgtcatacatttcctgtaacggaagtgttaattttactgtactttttggtaccttttgggaatctaatgtattgtaaggtattttacacgtgtcctgattttgccacaacctggatattgaagctatccaagcttttgaaataaaatttaaaaacccccaagcctgggtgagtgtgggatatgctgtgtgagacctcttgctcagggtcgagggaggcggggggggggtgccaggtgccctggacttggggctttctcctgcagcaggctcttccagctgcaggcccagttgtgggggtatcctttaaggactgccctgcctagggctgagccccccttcaaagaaaggaatgagaggcctatggggagtgaggatggggcagtgatgagggcttacatccccagcaggcatgtcccctcctgggacaccttggaacaccaaccttcttggctgatgaatgaaaaaatgggattctttacacactagggcagtgccagggccgtctgaattggggcacaatagtgctcctcctggctggtgaagaaaagcctgctctggcaggggatgtttattggctggattggagcccaactccaggtctggtatttagggcataagactaggtggttacaagaggcaagggtgggttggggttccacgtggatacagccccataggtttcaagggaggatatagctgttc

SEQ ID NO: 119066 - DNA, 1440 bp, Homo sapiens
atctgcagcctttgtagtcaggcactgggtacagaactgctaacaccacttatctctgtcctcagctgataggatcagctgtcccccaacaactgcccccacccgccagccccagccctctttcaatcaagtctgtggcccagagtgctgggggtacagatgaggctcctttccactggccctgcaaagaggtacctgtggtgtctcctactccaggaagcaacttgtttcaagaagaaaataccttgataccaagtaggcagcctcttcagttgctggtgtccttgtggcctcatctttgatcagatccacaccaatgaagagcccaacacccctgcaagggaaggtgacgacatctcaggaggccaggcctgaggggccagggtgctggcctcagcctctgggctcctacctgtgcctcctgagggggctgagtgcaggaggcaccttcagaaggtggtgagaatagtttcagggaataactgggctgggagagatctttggtgtggacagaggagagaggctcaggggtagctagggatcaggtcatgtcctagctttctcctccccaggagagccgttttgggcaatagcacctctcagtgtctcagttcctcttgagagcggacataaccccaccatcccaggttgttaggaggtgaagaaaatggtaccacactgggccttggcaggtgggtggtgactgctgcccccagagcctcacctgacatccccgacgatgggatgtttgattttttgctgcccgaggagctgcatcaggaagctgcctacactggtggcatgatcctggagctgctccttctccaagacattcaggacggccagccccacagcgcaggacactgggctgcccccaaactgagccagggacaaagaacatgtcagatgccctggcagagtgggccatgccccagagtgagggtgaggcagaagaactgccacacgtgttccaaggccagtggcaagagcagaggccccaaaccccttagggcgcacagtcctcagcagtagtaagtggggttcaacatgggctgtcctggctttccaggagctaatgtgactgcaactcaggtcaggtatccctgaagtacagtaggagcccctagaagatacagaatcagaggagagggtgtcctgtttgttcccacagggctagtctttaccaagagaggctttaaggccccatctcctgggcccagacccagaggactggattaggcacttcctcctccagggagagtgagcgcagcacgccaagccccacccaggaaaagctgcttcacacccctggagggctctggctcctttccctcgcccaccctgtcctcatcctgcaggtatctgagtggagacctgtgttttagaggatcacgagcaaggtgtctcctgcaaaccacgttttttgtttcgtttttaaac

SEQ ID NO: 119067 - DNA, 1164 bp, Homo sapiens
agcagttaaatatcttcccacaaaacacaaggcccagatggctttataggtgagtttttaccttcaaaggacagatcatcccaattttatgtaaaagaaaaagaagaaatatttcccaatttattctataaggttagtaggacccagttaccaaaacccaaggtataagaaaaaaatttgagccaacattttactcctgaaaacagagcaagactccgtctcaaaaaacaaaaaaaagtaaaggaaaacactgtagtatgacatgcacaaaggatgtaattggattcctgattcacatcgtgtacaaaaataaactccagatggattaaggacctatatgtcaaaacaaaatgttaaaagacttaagaggaaacataaatgaatatattttataacttggagtagggagagatatcttaaacaatatatgaaaaacaccgtctataaaacaaaatgataagagttgacaatgttaaaatttaaaactttataaatatgtaaagggagtgaagacaggttataaactggatgaacatattcacaaatacacaatagacaagggattagcataatagatatgtatgtgttggtatatacacacacacacagacacacacacatacaaacagacacaaaactcccacaaataaaattaagcactggtaactcaataaaaaaaaaatgggcaaaagacacaaaagacacaaataggcatttttttttttttttctttgagatggagtctctgtcgcccaggctggagtgcagtggcgcaatctcggctcactgcaagctccgcctcccgggttcacgccattctcctgcctcagcctcccgagtagctgggactacaggtgcccgccaccacgcccggctaattttttctatttttcagtagagatggggtttcaccgtgttagccaggatggtctcgatctcctgacctcgtgatctgcccacctcggcttcccaaagtgctgggattacaggcgtgagccaccgcacccgaccacaaatgggcatttcattgaagagcaaacaaatggtcaataaacatatgaagagatacttcacgtaatctgaaatcagggaatggcatatcaagaccatacaagctactgttttacgctccacttgactggcaaaaattaaaaggcactgaag

SEQ ID NO: 119068 - DNA, 1665 bp, Homo sapiens
aagaatgccggatgcagtggctcatgcctgtaatcccagtgctttgggaggctgaggcgggcggattacctgaggtcaggagttcaagagcagcctgaccaacatggagaaaccccatctctactaaaaatacaaaattacccaggtgtggcgcatgcctgtaatcccagctactggggaggttgaggcaggagagttgcttgaacccaggaggcagaggttgcagtgagccgagatcgcgccacagcactccagcctgggcaacaagagtgaaactcttgtctcaaaaaaacaaaaacaaaaaaggatatacactatatacactactggtggggtgttaacttgtgaactactttagaaaacaaatgtcattatcttttaaaatgaagggtaaacacataccatatgggccagcaattccaccctcaggtacagtcctaagaaaaactcttgctacatgtacaacagagacttatgaaaactattcaaagcagcactgttcataattgcaaaaaaaaaaaaaaaacaaaaaaaacatggaacgacctcaaagcacagcaatagtaatggatgactgaactgtggtacatttatacaaagattataaagcagtcaaagcaaatgaacttcagtgacaggcaatagggaggattcttagtgatatgttagtagaaaaaaaaatccccagagtatatacagcatgatagacttcatataaactcaaataacaactaaataatatgggattgagagtgatggttaccatggttattcagagtgatgggtggagaaggcaacaagagggaattggggggaacatctggagagatacatgatattatcaaggtctaagctttcattagggatgctggcttcccaggtgcttagaacattaataaaggttaactgaataactagaagagggctatgcacagacagatgttgagagtcttccatgaaccaaggattctatctaattatgtacacttgagggtcaagtaaaacaaagaaataaacaaaagtcaggatgctgctccactgggcctttgttgttccccttacacaacccacttgatttcctgctcagccttccagactgagatctggtcttgccttctctatgaagcctctactgcttgtcccacagctcttcacccacctcttgcctgggatgtcctttgtgctctcacagcaccgtgaacacactacttccactcatcctccacgctgtcatgaccatgtgtctgtgagcctgtctttccccgacagtgagctcctctgaggctctatgtgtcacatggacagagtgatggtttttggctgaatgcaccaaagtgtcacttccctcacccctaaggacattatcttgccttatctatcttgccaaatcctgacatgttttagtccccaattcaaactggctctttttgaggaacttacagtgaattctcaaccctctgtccctgcccttcctcctctgggcctcctcctctcctccctggatcagtctgccttcctccagttctttctccacactgagcaccagagatctttccaaagagtactctctccaggattaaaaccctcctgtggtcctcactcttcaagatcagtgagactcctcggctctttcctgtggggctcgtgctgccatcctctcaccta

SEQ ID NO: 119069 - DNA, 1828 bp, Homo sapiens
gctcaagttccagcacctgacacagggcgtggcacagaatgggtggcatctgctgaaaggaagacagggactcctatttttgtatatattttataagacatggtcccttgtgacagcttttggattgacactaattttaaaagatgttttatgttttcttacctgacctggctataatctccttaaggacagcgtcttggaagcgtgtgctgggcacagtgctagccctgtagcctttgctgactaaggacaggctgatcaccgggggcctatcagaacccatgttgctcccttgacttagagccatcactcaccgtgttgaagtactcaacgccggtggcttcaaatgccctcgccacaggctgggttgcggccacgcaggcaacagggtggccgttgccaatggacttgcccatggtgacgatgtcagggacgaagtcttttccctggagctggaaggcccagaagtgcttgcctacccggccaaagccaacctggatctcatctgcaacaaagacccctccggccttgcggatgtgcctgtggcagaggagatgactgacacgggggctgtggttgagagggataagatcaggacccaggaggtctcggggctttgcaccctggctctgccagcagtaaggtggggaccttgggcaatggctggccttctctgggccattctttctttaagggctttgtctcaaaattctggcagtcaggacaggctgaggttgggatttggaccagaggttggaaaacctcattagacccctgccctccctagagcagaccccgcccacctactcactctgccacttgggagaagtagccagcagggggaatgatctgccctcccacactgggcagagactcagcgaagaaggctgcaatctgtgaagagatggacattgggaacacgaccatggggttgtgcagtgaccggcttagcgtgccctgctagtgctggcttagtccaagcaagacaagtcaccatcagtgctgcacccctactttgggttccatgttacatctgaaggtttgtgactcagttttctctcaggcctccagccaactcttactacctggatgcctccaggcccctagtacttggcatgccccaaactacatgcactgatttttccaccataagccagttccttccctgtcccccatttttgatccacgcctcctccctcaacccatcagtcagcactgcccaaggattctacctcagccccctctctaaacctactccttgccctctgcctggacatgcctgcctcctgcagatttgcctgtttcttccttggactcctgcagaggtcttctaactgaatgccttttccagtccatcctccacatggccaccagggtgatgatgcctcaacccagagaactgagcatgtcactgttgtttaaaacccctcagtgaccccttctgcatatggcaatgatttcccaaccatattctgccttacaggtgggagggcagggccaatgggatgggatactggtcccccacacctgttgcaatcagagcaatctccttttttaggttttatagaagtggtcgcagagcacctgaaacacacaggcaaggctcccctggtcgggttctgctaacctttctggccccacaggctgcctttctttgtcgtacctcctgtgtctggctctgtcactccttcagtgaagccttcagagagccctcacctgtcgccaacagtcttccctctgttgtcaccgtaggtaacacacctctctctcctatgtctgcgcctccactccatctccaccatactgcccccgtcaggcctccccacag

SEQ ID NO: 119070 - DNA, 1651 bp, Homo sapiens
cattcacacggttcctcagccacccagtgggatgcccttcctctgctactccccaccccacctggagtggctgacccctactgtgtcagagagcaccccctccaaggaccccgcttggtacctcccaaggcctgctcaggctctggctggctaccacgcccatgctaggccgtgcactcagactctctgctgagcccaaactgcccctatcccagattcctggagggcagggcctcgtttggttttctctctgggttcccagcatctagcacagtggcggtgacaacggaggtgacattcactgttggctggattggacaggcgcggacacggttaccttcctgcccttctcctgtgcactgctgaccacacgtttcacctcgttggcataggccatagctgggttggggtggtcctcccggtaggggccccggtaggtgtctgggagaggtgcctgtggggagtgacagcgccatgttatccgggcttggggacaggcaccgacctgttgttgagttgggcagtgcataccacgtggacccactccttctggccatccaggttgcggaacttgtagggactgatgtcaatcagggagctcaggtggccgtgatacgcactggggaggagaagggagggtaggctcgggtccgggcagcacctactccctggcccagtctgaccatcgtctccccacccctgaagacacacaagggaggccaactttcctgacagagcccccaagttcttgggctgggaaagagcacaagctttggagtcagcaacaattcttgcaagactgctgactggctatgtgacagcagctcatcatttaatctctctcggttgttttctctgctgtgaaatgaggtgggatttcctccttctggtttataatgaatcttaaatgtgttgatattgtcagcctcggctttgtgcacatcacatactcaattcatgggagctactgctggagtagtttgaacatgtacaatgttgtgggaccacctttgagtctcttacaaagcgcactctgctccccagagctgccttcccagaatggtggcccagggtgacagagcctctgggaggtctcaggcctggtcctctgcctgccacacttgtcttcagtagcccaggccccttatcctccctgcctaaggcacccagagtcagtctcacggatcaccaagaagcctgtgggccaggcttctgggaacggtagggctgtgagttgcacttactgatctaataccaccacgtcctggtgtcccgtgtagtggcgagccagcctcagggccaggtcattggcttctgacctatgaccgaaaaggtgggcatgactgagagagtagtctaagagcttcccagagagaaatgctgagggcaggaggacccttccagcagcaagaagattctcaggacatcaactagtcagtcacttgcttgtttgtttggtatatatcaaatgcctcctatgtactagaagctgggggaaaaagagtaggtaaaacagacatggccttggcccttctggaatttacattctcgtatgtgtcatgaaagttgttttgaaaaaacccaaaccattgtttttcctctgctttcacactacaacaatcaacacagaagacttctgtgactccaaaaa

SEQ ID NO: 119071 - DNA, 1047 bp, Homo sapiens
gtcatgcccaccttttcggtcataggtcagaagccaatgacctggccctgaggctggctcgccactacacgggacaccaggacgtggtggtattagatcagtaagtgcaactcacagccctaccgttcccagaagcctggcccacaggcttcttggtgatccgtgagactgactctgggtgccttaggcagggaggataaggggcctgggctactgaagacaagtgtggcaggcagaggaccaggcctgagacctcccagaggctctgtcaccctgggccaccattctgggaaggcagctctggggagcagagtgcgctttgtaagagactcaaaggtggtcccacaacattgtacatgttcaaactactccagcagtagctcccatgaattgagtatgtgatgtgcacaaagccgaggctgacaatatcaacacatttaagattcattataaaccagaaggaggaaatcccacctcatttcacagcagagaaaacaaccgagagagattaaatgatgagctgctgtcacatagccagtcagcagtcttgcaagaattgttgctgactccaaagcttgtgctctttcccagcccaagaacttgggggctctgtcaggaaagttggcctcccttgtgtgtcttcaggggtggggagacgatggtcagactgggccagggagtaggtgctgcccggacccgagcctaccctcccttctcctccccagtgcgtatcacggccacctgagctccctgattgacatcagtccctacaagttccgcaacctggatggccagaaggagtgggtccacgtggtatgcactgcccaactcaacaacaggtcggtgcctgtccccaagcccggataacatggcgctgtcactccccacaggcacctctcccagacacctaccggggcccctaccgggaggaccaccccaacccagctatggcctatgccaacgaggtgaaacgtgtggtcagcagtgcacaggagaagggcaggaaggtaaccgtgtccgcgcctgtccaatccagccaacagtgaa

SEQ ID NO: 119072 - DNA, 1114 bp, Homo sapiens
atgtgtgtctgtgtatttatatatatatgtgtgtatatacaaatacacacacacacacgccaccacaaagccaaaaaagaagaagtgatcatttttctaagtgctacgatggatgccctgggagagcgagccagagggggcatgtttatgggctgagctgcacccccccacccccaatttatgtgttgaacccctaatccccggtagctcgcaatggcccgtatgtgaatggatatggagataagagaggtgattacattaagatgaggccgtcagggggcccctcatccaatctcaccagtgtccttataagagaaaatctggacacacaaagagacaccagggacacctgcactcagaagaccaaccagggccatctccaagccaaggagagaggccttagaagaaaccaaccctgcgaacaccttggtcttggacttccagcctccaggactgtgagaaaataaatgtcttttgtttaagccactcagtctctggtattttcttatgagagccagagcagaccaacacagagggtcaggggaagcgtctatggggaggtgactcatgtactgagtcttgagggagaggtttccaggcagatggagcagcatgctccaaggccttgtgaaggaaaagagctcagtgtgctccgggaaccaggagaagatgagggaggccagggcctaaggagggcagggtaggagaggaagtggggagacatgcaggggacatgtgcacagggctgggaaggagcctgagttttcttctcagtgccatgtgaagccactgaagagttttaatgagaaaagggacataagtcagctcctattttaggaggtggcctctggctgtgtctaatggagttgacaagaataaaagtagaaggagaagaccaaggaggaggacgccaggtgagagcaggtggtggccatggagatggagaggtggagggagttaagaggcatcatggagatggaggaggcaggattgatgcaggactggggagcgtgtggtttctgcctggagcagatataggtggtgatgccctttacaaggcaagatgagcgggggtgagtggggatagccttcttgggcaggtgagggagaacag

SEQ ID NO: 119073 - DNA, 2469 bp, Homo sapiens
tgacaacatcgtggactatgcgcagaggctgtcagagaccctgccggagcagctctgtgtgttctatttcctgaattctgggtaagtggactgtggccagcccccgggaagagggtgagacggtaacaaagacagtcactcacatgggcccagtgtagtgtagctgaccgagtgtggactcggagaggcagcccccactgcaccaggctcctgagattcccggctgtaggccctgatgctttctctgttggatccagtttccttgtctcttattgaaggatgttattacctcctttctaggatcattgctggagcttagtgaggtaatatgttcctttatttctgccttaaggatacagccaaaatccctgcctgtgggttgctcagtaaggaaggaaaacatcaagtgattcttcaaagaaatacagaattgcaaggagggctctggaggaagtgtacagggtatcatgaggcctagaaaaagtgaggggacctgacctgggggttcagggaaaccttccctgaggaagggctgttaagctcagagctgactaggagataactagaagaggaggaaggaagggtgctgccactgcatcagaagtctcgtcaaggctgggcacgatggctcatgcctgtaatcccagcacttcgggagatcgaggtgggcggatcacctgaggtcgggagtttgagaccagcccggccaacagggcgaaaccccgtctctactaaaaatacacaaaatttagctgggcgtggtggtgggtgcctgtaatcccaactactcaggaggctggggcaggagaatcgcttgaaccgggaggcggaggttgcagtgagccaaaattgcaccactgcactgcagtctgcaggacagagagaggctctatctcaaaaaaaaaaaaaaaaaaaaatagtctcatcaaaactcttgtcaaggttggtcaccacacagaactgcctgtggaaaggccctgtagcaggaaaggatatggtacccagcacacttgaggaaccgaaagaagtccacgaagggaaagcagaggctgtgagctgttgggaggcaagcagggcgcatcacctagggccttctccgccaagtggggaagctgtctttatcctaagagcattgggaaactatcggaggctttaatcaggaaacgatgtcttaaagggaacggagtgcaagagtggacactgttaggtgccagttcagtggccaggtgaaaggtcatggtagctcacactaggatcggcagtggagacaaacaggcaggcgattacagtgtatctgggagagaacattccaacaaatcgtaggtggtggcgttgaattatagtgatgattactgtggccactcacacagtacagacatctgccccccagataatttctaggaagtggaattcaccatcttcattttacaggtggggtaacagcagttcaaagaaaggaacttgagcccagacatttgccatgtcaagagctggagcctctggaaagagaagggagctggtgcttcctcagtggtggtggaggaggggcattcttatgccaccagctttattctgtgtggattccagggacttccatgttgccaaatccaaagcaatctctttgctgcattgtcttactctgtcccagcagtaattgacagttaccactctccggaagtggtctgtcatcttgcttcccgggcactgtgctctcctgttttctatcagcttctctagccactccttccctgtcttctttgctgattcctcctctgttccttggggctgatcctgggccacttttctctctgagccctctcctcaggtgatctcttccattctcttggtattacatagcatccatgtgttggtgactcacaaatttttttgagcccagacatgtcccatgtgttccaactcgaggttctaactgcccctgtgacatctgacaaacatctccagcttcatgtgttcaaaagggcaagggttgattggaccatggtactgttctccctcacctgcccaagaaggctatccccactcacccccgctcatcttgccttgtaaagggcatcaccacctatatctgctccaggcagaaaccacacgctccccagtcctgcatcaatcctgcctcctccatctccatgatgcctcttaactccctccacctctccatctccatggccaccacctgctctcacctggcgtcctcctccttggtcttctccttctacttttattcttgtcaactccattagacacagccagaggccacctcctaaaataggagctgacttatgtcccttttctcattaaaactcttcagtggcttcacatggcactgagaagaaaactcaggctccttcccagccctgtgcacatgtcccctgcatgtctccccacttcctctcctaccctgccctccttaggccctggcctccctcatcttctcctggttcccggagc

SEQ ID NO: 119074 - DNA, 1001 bp, Homo sapiens
ggatttggcaacatggaagtccctggaatccacacagaataaagctggtggcataagaatgcccctcctccaccaccactgaggaagcaccagctcccttctctttccagaggctccagctcttgacatggcaaatgtctgggctcaagttcctttctttgaactgctgttaccccacctgtaaaatgaagatggtgaattccacttcctagaaattatctggggggcagatgtctgtactgtgtgagtggccacagtaatcatcactataattcaacgccaccacctacgatttgttggaatgttctctcccagatacactgtaatcgcctgcctgtttgtctccactgccgatcctagtgtgagctaccatgacctttcacctggccactgaactggcacctaacagtgtccactcttgcactccgttccctttaagacatcgtttcctgattaaagcctccgatagtttcccaatgctcttaggataaagacagcttccccacttggcggagaaggccctaggtgatgcgccctgcttgcctcccaacagctcacagcctctgctttcccttcgtggacttctttcggttcctcaagtgtgctgggtaccatatcctttcctgctacagggcctttccacaggcagttctgtgtggtgaccaaccttgacaagagttttgatgagactatttttttttttttttttttttgagatagagcctctctctgtcctgcagactgcagtgcagtggtgcaattttggctcactgcaacctccgcctcccggttcaagcgattctcctgccccagcctcctgagtagttgggattacaggcacccaccaccacgcccagctaaattttgtgtatttttagtagagacggggtttcgccctgttggccgggctggtctcaaactcccgacctcaggtgatccgcccacctcgatctcccgaagtgctgggattacaggcatgagccatcgtgcccagccttgac

SEQ ID NO: 119075 - DNA, 3135 bp, Homo sapiens
ctggtttcacttcaccagccaagggggctggtggtaatcttgattgtcaaaggccaaggataataacagtgaatatgtactgagagctcaccatgtgccaggcacattcagagcaagctacataaattaacacacttaattctccaaacaccttaaagtgggtacctagtatcattatgtctttcacagataagcaaactgaggcactgagaattaagtaacttgcccgagatcacaagttagtaagtaggggacagggatttgagcccaagcagtctaagactagagtctctgctttttttttttttttaacctcaactttattcatcttccatgtgcctgctgagtctcagactccctttctttccatcagctctggcagcctcatcaagatgactgaattcctacttcagctcccttgcctagcacctgagatggccaatggggctgaagcactgccatgaccccagcacttggccagcactgtgctacgttgctggtcacagctgggccatctgccactttgtgagctcatcatcagtcccaagtggaactagactcacagacctagattgctgacccctgcctggtttagcacagctccagattgcagaattccacagctatattgcgaaggctgagcctcctctgcatactgacagtgcctcaactccacccaggttctccacacctctcggcaatctcaggtcaccttgggaccaggttcacagcactgccttcctctcctgccctgccagcctgaggtgtgatactgaccgtgcgccacattgctgatgcaatcgatgtattctgccccctgttcatcgtacatgtactgcccttgggcccggacaatcttaacaggatcctcgggaaaaaagagtctgcaggaagagctgtggggacaggcaaggagtggacagccatgtctgaagaccgaaagggtgaagtctactcatcgcagacccccgcccaccccttcccagtttctggtggcgggggggaaatgagagctggaagggcaaggtgctgcttccctgccttgtctctccactccacaggtggttgcaaagcaggaagcagatggggtaacaagtcgctgaaacttcggattgtttctgaaagcattttcagcctctgtggcctccttgctcatttctgcatgtgtccgcgtcagtctcccggatcctgagaaaaggtggctgccccgtcccatggggactccataaggccgcgtgtcttcgatgggatgggccagggcaccaacattaggtgcctggctctcagccctaaacagctccttgccagccacgtggccctgctgcccctcgctgggtgccagccctaagctccagtgggaggcgacctcacccaccgtcccaccgagggccccctcacaggtcaagtgtgctgcctgtgaaccgactcccccgactctcccttgtctgccctttcagccccctcccaggtcactctcgagccaggcccaggtgctgctgacgggccaccctgggtgaggtcctctcaggcgccagggtgaaggtcttctccggagtaaaggctgccaagcgaggctgacacagccgaacagcggtgagggcggggccgtctcctgaactgggcggcctggagacggcgctgtcggggaggcggccccggagaccacccgccgggactgcccaacggcgccgcccgcctcgggccctagaagctccagcggggccggggcagcggccggacgggatgggtagcagcggcttcctagccggaggcgcgtgcgtagtgcgtgcgtgcgtgcgtcgtgcgtgcgcgtgcctctccgcgcagccccgcgccccccgccgcccgccccccgcccgggtacctgatgagccgttgcctcagggccagcgtgtcggccttcgggcgctggtctgcggccatggtgggtggccgtcagtcggtgccgtgacgccacgcggagacgtcgccgcgcgggctgggcctccaaggccccgctccgggccccgcccctgcctgggtcgggatttggggctcaggttcgcactcggccccgccccgaagcgcccgcgttgcggtggttcatttcttcgcttgcccactgggcctggcagccttccggcccgtggtcgtgccttggcagtcccgcgcaggaactcgagcgctgccccgtctctggttccgggacgcgccccgggcctcgccccgcaggccccgccccgcaggcccctgcggcctcccttccgggaaagggtcccggacgaccccgcccctgctcccggcgcccaggcggggctcggagctcctgcaggccttctctgggccagactcagtctttgagtcgccttgtgcataaaatgggatgaactgtgaggcctaagtgcgagtatgtgactggtaccttacccgggcctggtacacagtaggggcctcagggtgggagaagcaggtcctaggttttcccagccccatgaaggggcagcaggaagagcagaaggagagcccagggtcccttctggggctgaccaaggagatcaccatgggcttgaccttcagggcaccatagttcctgctagaatctaggcagggtgaaccggacgagctgtatcgtcgctgagagaatcatgcagcgtttgggcaagaagagaggttgggaatcctccttgtggtacatgtcggtgaccctgaagcccagaaagggaaagggttttgttgtcagacacgcagcaaggctgcagaggctggactcctactgaggtcttcttgactcccagcccagggagtgagaagaaaaagcctcccaaggggctgggatatgagagaaaagccccctcctggggtgaggcactggggctttctgccttgaagaaccctggaacacgggcctgggactgcagcaggtgcaggggaggctcctgattgtcccttctttctgtccacatcatgattcccaggcctctgcttcactccctcattgctgatttcttcttctcttcccaatacagttgtaagatgcataaggcatttattgaactcttgacctcagatgatctgcctgcctcggcctcccagagtgctgggattacaggccgggtgagccaccgcacccggccgcttaaggcatttattaaagaa

SEQ ID NO: 119076 - DNA, 1824 bp, Homo sapiens
aggccccctgctcaggccagctgggaaccagccctgagctttgctttgcctgcacagcccacctagagagccatttttggccagagttctgggtgggagacttggggccagtgagacccagactctgagtgggaggcctgcctccctggtccaggccatgtcctatcttgtccctctctgggtgataatggaaacagagacaggaagtagcagtcagtccaggctgggcccctccatcctcgacactctgctccctggagctgggtccacatcacagcgatcacagagctcagccactactcctggccagaggacatgtgctctcatggcaggctggcctcctgaggcctcctgaatgtggtagagctagaccctcgtgggggatttccactcactgctccccgggcccagccgcaagtgctgggcgagtcttgtccgggggccaagtcttgtccaactgcagaggcagctggttgtggttgagtttggaggctgatgaggccaggagcaacagcagccgctgttccacccctgggtcttcttggatagggtgtgtcccagggactccagagttttgcgggggcaggttcttacagggcagtaccacagctgagagtctctctgctgatcaggtgactgaaggcccaacgtagcatctttctagccttgcccgagccaggtgcttctaccttcatctccttcctgggaaagcccaggcccaagggtgcccctcaggtacacatctccctggtctggcctgtccactttccggcagcttcacatgccggtggctttggggctgggtgggcatactcttgaatgttaaaaggccacaggtagcgcattccatgaaaaaagatcaatatattactgttttgtttttacaaaaattaaaaatgtccacacggatctgtacaggtgtgagctgggcctgtgggtcactggaaaaggaggaagagactgaaggtgacgaggagcccgagaagctccgcccccatccaggccaccttgcctggcctccccggtcctgcccatttcctcctatcttccctccccccactccctctcagtgggccagttgggacaatatcccagggggcactgatggctttgccctgcctggtccaggtgtcagttgagtccatgtgacccacaggatgggttatacaccatcacccaggaccacagccccacgcctcacatgcaagatgggagagtcaaaaccagggtcatgatgggaaacctggctattcagtcactgtgcgagaagccgcagacacccagaggtttgagtgacagcacccaggctctggggccctcccattcccccaccctcccctgcctctcccaagcctgccctggagacttccctgcacggtaccttatgccagcagccaggcacaggcagcccgtcggggccctggaaaggaagaaggtttcagtgatggggatggggcctggggagctcctctacaccccacatgccctcccctggtctgtagggaggtgcaggccagggagcggccatgtgagactgctgggccccactgaggcaggggcacaatgcctcctctgtccacccaggtagtggggtcatggggtcatggggaacgacggcctctcactgagcttgtcctgagtgtgttccctctgtgctttgtggggactgctgtgcagtgggcaggaacaggagggcactaggaagggatgagcattgtgccagacatgtacaggctggcctgggtcctgccgagagccgtgtggcttcctgtctgatgtgacagtgactctggcctgggtcctgccgagagccgtgtggcttcc

SEQ ID NO: 119077 - DNA, 1031 bp, Homo sapiens
ggagccagacataagcaggggccgggtttcctcaggcagcctggagggtggggaaactggagaggaacgaagactgactcatcagggacaccaaggcgcaaaacatgtcattctgttccaaagcacaggaatgagcctcagacactgggcatcccctggaatattcccatgtgtacaccagggaccaggctaggcaccaaagggaaggtggggaggggggcagaatggaaaggaagcagaagcgaggaaggccggggcagagccaagggccctggctgccccgaaggcccacacagcacacggcacacggcacacagcaggccaggccgcctaccgcagggcatggcccattgcccctcgcagggccccgccagcctggtgcccctctccggcctccgcacgtgggattctcctgtttcaaaggagacaagggcttactgatttggaggggagtcctgggccaggccccggagctgcggggctgggccaccctgcccctgctgtccccgccctttctgtgcgctgaccacttcgctcttcaagtccttttctcattgacttctcaaaactgtccgaggggagcggtatcccccactgcagggataaggacactgaggaacagaggccagaggtctgggagggggtctctaactctggcaccgctggaggttgaggccggcctgcacacatccccgtggctggagtggccacgtctgaatatctgtccagttttagtacgaaaacccagctgttctgtttttcctgtcttttctgagctccaccggaagagtgtgacatgtaaaccctccctactttctagaaaaaggaactaggcagggcacagtggctcacacctgtcgtcccagcactctgggaggctaaggtgggacaatcgcttgagcccagaccagcctggacgacattgcaagaccccagctctacaaaaattaaaaattagctgggcatggtggtgcatgcctgtagttcttggctacttgggaagctgaggcaggaggatcacttgagcctgg

SEQ ID NO: 119078 - DNA, 1029 bp, Homo sapiens
atagaaaaggaatgagtcaagaggcatgctagtgacaggaattaacacctttgggacaaacaacgcttgtgagactcacaggcaggccgctggggcctctctcacccgacgcacccttctctccctttgctccatccaagccctggaggcaaaggagggaaatcagtcaaggggaaggggttagacagacagtaggacaggcaagcttggagactgcaagggagctgggatgtggacagaggaacagatcgaggctcccccaggcctggccccagcttactccctggtgagggtgatcaggaggagctctggccatgcgcattgcgccttttccagaacaggctccctcagccccatggaaggtgattacggtcacacccattccaaagatgaggaaagcaggtgcagacggggggcggggggggggggacaggcccagccacacagcgggaggcagcagagctgggtccccatcaggcttctacggcaagccttggaccctgtcctgatagcagctgcctctttgaaacatgaactgtggtggccttaagagaaagcagaaccagaagcagagcacctggtggggctgcaggctcgggcctgggcttccacgattctcagtcccacatctggcctctgagctggggaagcagagatttgctcacgccaggagggtggtgtgacaaggagtgaggccaggtggcctccccttctgtgtctgcctccctggggcagggcatgcaggcaggccacactcgaggacttaacgtaagagcagggaacacgccatcatgtaatatacaccaagcccaagactttgtgcttagactgtggcagctgagagacagatgtgtgtggggcgggctgggatggggagaggtggggacagtgcaaggaactgacaggcacagacaaaggagaaggggacaagcagtggaaacggtggtggacctgaggaggagagagggacagactggggtcccgggcagagggagaaagtgggagaggagagcctcaagggtggagagg

SEQ ID NO: 119079 - DNA, 1033 bp, Homo sapiens
tggctctgggacctagcccccaccccgcctcttggtttcctggctgcttcaaaccaaaccaaagcaaaccgtccttaccatcgggcctggggggccaggggggccagggggccctggctccactatgagctgagcctagggagggtgagagacaggttagtcacccaccgcctgtcaccctcacctacccgcacccgagctcatcgcacactgctggatcgagagtctccttcctgccccccagagggcagagtctggtgagcaggtggcagctggtctgcggagcttatagtgagccgaggttgtgccactgcactccagcctgggagacatggtgagactctgttctcagaggggtctcgctccccttactctccctcccctactgccctgggtttgctcaggccaggtggcctttttgtcccaaggctcagggtccccacccagcctggactgggtgttgggggaagccctgacccccccatacccccttaccaggctctcctgtaggctgtcagacgccgactcccccttctcccccttgaggccgtcagcgccctgcaggacggcaatggcctgtgagtcctttgtgtccagcacctgtatcaccacccacggtgcttagtgacctcccttccttcccccatgtggctcctgagagcagtcatcagttagctgttgcaactgaaaagttttccctacatccatgtgccacgccccgggtggtgggcagtgtgggctttagaaagcacacgagcagccgcacacattgttttcctggggtgcagggagcaaccgggggctgtgaagcaaagaccccggggtcaaaccccagtgccccctctagcccagtgaccatcagggatggacactggaagtgtcccagtggtggcgtaacagctggtggctcttccagtcgggccacaaaagcaacgaaaatcatgaggacaacagtgggcatttgctgtgtgccagccaccactgtcagcccagccacgcatgcccttgagggaggggaatgatcacccccact

SEQ ID NO: 119080 - DNA, 1045 bp, Homo sapiens
aggcccctgtgtgtgagagtgaagccggtcagtgtcatgggttaggcagggcctcccttcgctacccatccagctccccacctggaatcaagtccccgtccagctgagcagagcaggggcagggtccttggggactgcttcttccccagtcaggtcaggccacactgtgcaaggctttatctggcctcccaggcttgggggaggccaggaggtgacacccagcatttgacaagacaccagtgtctgctgccatggacggccctctgccccaatccagatttcttcacgatgttcccctgctcaagatcttgctttggctccctattgcctctcaaagcaagcttaaatcccctgctggcattcaaggcctgccaagaatgacatccccaatggtggcccagcaccaccgtctctgactgtcctgtgagctctctgaccttctggctctgctgcctgccatctgctgggcctagggagttccttagtctcgcaggtaggggtggggtctccagtgtttccaggtccgaccccactctcaagctcctgtcctgatccaggctttctgcaggctacctgccaccagggcccagctggccccctgctcagcctccacactcctcccctcccttctgaaaaactgcaccctgcccagcccctgccccacccctgccccggaagctctaggtctctcccctcccacctccctatcctgtgcccttcttgttggtgtcccattgagatgtccctggcctccatcttatctaccctcccccaggcccaggcccaggacctccctgcctggggtccccctgctccctgctccaacacctgctttcattcactgtccatatcattccctagctagccttcccccaatatgtttttattttttattttttttttatttttgagatggagtctccctctgttgcccagcctggagtgcagaggtgcgatctcagttcaccacaacctctgcctcccgggttcaagtgattctcctgcctcagcctcccgagtagctgagactacaggcgcgcaccac

SEQ ID NO: 119081 - DNA, 1080 bp, Homo sapiens
ttcgaatgggattaagggtctgggttgaagttagggttgggtttgggtctggggtcagggtcaggatctgaattggggctggatcttggttggagttaagtttgggcccaggttcagtgtctggattagggttaaggatagtgtggggtctgcactagagatggggatggggatggggctggctctggaatcaggatttggggttttggtcaagtcctgcgtggcccaactccatgccctctcttaccgctgggccttgtgctcccctggggccatctttcccagtgtcgccaggagggccccgggccccaggaggtccagggggccccggaggcccagcagctccatcttgtccttggtctccctgaaagagatggggcttggcatgactctgagggggagggggtccagcctccagagagaggctccctcagatgggcagccccacgccatccccttccccagcccttgggcaggctcaaaggggagggctttgttattgggcctcttgccacttattgggagctgcatgaaggaacaggtccccataccttggtgtaagaggccctacaggaccctttacatgccaaggaatgtgccagctctccagcgcctgaagcccagatccagtgtttaggagagagatggcacacgctgcatgtgggagacagcacgtgtgtccagctgccccctcttctttctagaacggggtctgagtgtctcctgaaggaccttcctggttggtcaactcccacttcatttaagtatggaggggcactcttgggcatttatccttgttcacagctgctttattagtaacagccccaaactggaaactaatccgaaagtcctttggtaggtggaaggttaaggagctggggtacatccacatcatggaacacaactcagcaatcaacccaaaggaacagggcacgacacatgcaacacctcagatgcatctcaggagaattatgctaagtggaaaaagtccatctccaaagcttaatactgtgtggctgtatctacgtaacactcttgaaatggcaacattgaagagatggagagcccataatggttgcc

SEQ ID NO: 119082 - DNA, 1069 bp, Homo sapiens
agtgtagtagtgtcatctcagctcactgcaacctccgcctcccgggttcaagtgattctcctgactcagcctcccaagaggctgggattacaggcacacactaccatgcccagctaatttttgtatttttagtagagacggggtttcaccctgttggccaggctggtctcgaactcctgacctcagttgatctgcccacctcggcctcccacagtgctgggatcacaggcgtgagccaccacaccggccctggttgcctttttttacacatttacctgcctttggagaagtggtaaatgggagggaaaacaagtcctttttttttttttaaaaaaaggatatttgtagttaatgccagagccacggcactctcccagaccctctgccaggtggtggtggtgacataaggtacatacaattcctgccctctgagagcttgcaatcaagtagataaatcatctgccagcaggtggtagatactcatttacagcactgctgttgctgtgggaataacaaagtcacctgatgctgttgctgatgctggcccagcacagggcggagttgtttccccacatgagatcaacagaggagagcgtgacagcagagggccagggtcccccttctcagctccctctgtaaagctgggagtcttcccactgcaggaccggagcacacagcagcatgaattatgtgccctcttgctgtcctagccccagctgcaggctggttacatcagcttggacttcatgcttggggcacagagaagctgtcaaaaatgcaagcagattgggctcagatctaaggagctcccaagaccttatctgcagatggaaacagacattggatagacaaaagaggaaactgacacccacccacctccccaaataataatacttagcttttacaacaataccgcacttcccctaagattcaggcattcccaacttcttaataaatgctgtttcctttgcctggaaccctctgctaaccttgtccaattccccatccccacataggctaatgagaccttcccagttaccccaagctaagagcaatcatgcagcctgtg

SEQ ID NO: 119083 - DNA, 1064 bp, Homo sapiens
ccagcctgggccaggaagtcccgttcagctgggaatgagccacactcccattcccttctttcacctcatccggagattaaaagaggagaaaaaaatacaatacagagcccacaggggtcccggactccaggatctggttccagaaacagaaaggttactttattagctgtcacagaaatttcactgtgaccccaaagtaatttccccagagagaggcaaatctccaggagccaggaatagacgaaaagattattgctcgccccgctgggcacacagcgcctgcatccggtgctggctggaaatcgagcgagcggtgctggacgggtgccgaccccctcccttgcagcagaggcccctgggaaacacagtcttgaccggcggcagggtcggggctgggctgccctgcaagggctgagaccgagggttcagaagtggatgcctgccttcctgcagcgggcagaggctttgaaaccagccctgagctggaatcccatctccattaagctctagcactggggccctaagaaaatgataccccacagccctccaccatcccaggcctcagtttcctcagcggtgaagtggagatgttggggaggcaccggcctctagaggggcacaggtagggtcagattcttccctccctcagcagcaccagggccagagccccccactgtctccagattacccacctgggatgcaaggccaggcgcccagctggggtcccaggaagagcgccagtggaaggccccagggaaggccccaggctggggctcagctgcccctcctctcctttgatcttcacccaacctcaccattttacagatgaggtgtgaggttcagacatgtgagagtccatgcctgtcacacagccgcccaatgtccaagtcctggtccaggcattttgcccgaggccaccgtgctgcaggggcgctgtcctggtgggaccatgtgtggttgctgcatctgtcctggagaacagtgcctcggggccagtgagtacgtgaggaggaggtacccaagaaggctgcagaggccagcagaaaagcccagcctgccactga

SEQ ID NO: 119084 - DNA, 1028 bp, Homo sapiens
aaaactagaactataaaccctgaatttggtgtcttattctcccaaatgggttctgtaaagggagcactcatatagggaaggatttaatgtactgtcaattaaaagtttttgcatagtaaaatgtttctatttgttttaaaatagctttaggttggtctcagccttgtgatgtttggagcataggttgcattcttattgaatattaccttggtttcacagtctttcaggtacgtggctagtaaattccatttaataattcataacaaattgtaaacgttaaaggtatgctaaagttttgacttccatattggaaaattgccatacatcattattcttgagattaaaacttaggcaaaatggtcattctttaaaaccacagttgaatgaaatattactatgagtgagtgatcatagttaattttgcatgtgattagtgtttgtaacacatggttcatatatggttcatactgtctccttttttaaattgtagagcttcttcataaatttgcagtagtgttaatgtggccagttttcagttatagttatgttgactatcaatatggccatgaacgagtcacttattcctttttataaaagaattcagaaacaacaagggattgtattttactcttaagtattaagcatctataatgtcttaggcatttctaagtataagtacataaaggtgaagagacaacatctttctcaagtcatgcaaaagacattggaaagttatcgcagtatagtgtagcatttgctgtgatggaacaacgtagaaagtgtaggtagggagggccaggcggggtagctcacacctgtaatcccagcactttgggaggctgaggtgggtggatcatgaggtcaggagatcgagaccatcctggctaacatggtgaaaccctgtctctactaaaagtataaaaaattagctgggcgtggtggcgggcgcctgtagtcccagctactcgggaggctgaggcaggagaatggcgtgaacctgggaggcggagcttgcagtgagcgagatc

SEQ ID NO: 119085 - DNA, 2128 bp, Homo sapiens
gggaattatcacttcatataaagtattttatcaaaatgttttaagaagatgttatatggaatctgctataatatgttctgaaagattattttaaatggcatagaggaattggtaattaagactatgctttagagcataacatggcttcagctcactcttgtacatttatcatttttatcttaattttatttttaagggatggcatgcatgtagcagtgaaaatcgtaaaaaatgtaggccgttaccgtgaagcagctcgttcagaaatccaagtattagagcacttaaatagtactgatcccaatagtgtcttgtaagtataactttcacctaggagccatcatattacatgaaatattcaggtttccataaactgaattattattttgctctgttttagccgatgtgtccagatgctagaatggtttgatcatcatggtcatgtttgtattgtgtttgaactactgggacttagtacttacgatttcattaaagaaaacagctttctgccatttcaaattgaccacatcaggcagatggcgtatcagatctgccagtcaataaattgtaagtacacttgataaatctttatttttatttatttatttatttatttattttgagacggagtctcgctctgtcacccaggctggagtgcagtggcgctctcgggtcccagcaagctcagcctcccgggttcacgccattttcctgcctcagcctcccgagtagctgggactacaggcgcccaccaccatgcccagctaattttttgtatttttagtagagatgggatttcacagtgttagccaggatggtctcgatctcctgaccttgtgattgcccccctcggcctcccaaagtgctggggttataggcgtgagccactgtgcacagcaataaatctttatttttaaatattttttatgtttgtacctccttaacaattaagataaatctttaagcaccagaaaacttgtttttattatacaagctatatatccaaatgttgtcactaaaaaaacagacattttacaagtaaagatgaatcgtctcttgaccactatatcctttgccagtcctcctttccctcctagtacaaattaagtttgtaagtgaaactaataatgtgcttttgttctcttgtagttttacatcataataaattaacccatacagatctgaagcctgaaaatattttgtttgtgaagtctgactatgtagtcaaatataattctaaaatggtaagttaaagacttgttttaatttgggtggttgtctttaaaattaatttaacttgatgatctttggatgaggaatttcacttctgagccttattatatcctgttgtttaaccaaaaagaagtaatccttctttgcctttctcatgagcttactttgacaatcaagaagataattcatgtgctggccttttgagtagcgctataaaatgtatctattgagtttcatgtttactcaactgtgtctctctagaaacgtgatgaacgcacactgaaaaacacagatatcaaagttgttgactttggaagtgcaacgtatgatgatgaacatcacagtactttggtgtctacccggcactacagagctcccgaggtcattttgggtcagtagacaccaggctttctaatattataattgaagaagagatttttgttctttacagctttactggtggggtggggaagtatgatcttctcagcaggattcagaaaacgttttctattttcataaaaaatgtgtggacattgctataaatacttttcctgagtggtaaacatgtgatactgtctgggaaagatattccaggtggtggttatttttgaacaagtaaatcttaaatgatcataagagaacaggctgtgttagctaaatgcatcaaagaaatgtgattttgaagttatatgagtacctattttcatgccatcacaaaagcacatggctggtaaaaatactgaggaaactggttggcagatgtctagaatataggatggataaaggtcaagagaagaaagaggcttctctaagagctcctgtgataacccttgatgtgagaaagtctgggaaagaaaatgagttaaggtgcagagttttcaaataagaagggact

SEQ ID NO: 119086 - DNA, 1893 bp, Homo sapiens
agcgcaatagacactgttcaagtcatcagtcacgttcggtatgattggttttgttttcaatttgagtggagttttatttgtgtgtactcttaacgagctgataagtttctaattttttatatatatatatataaaatactatttggatatattataattgtatttatattacttaaatccttaaaggaaacctccaaattcttgtagctgatctgtatatttattagctagccctcatttgcccacatttcctcatattctgcagaccagataatgagtttattgattttaataataaaactatttttttatttgtaacatattcttatgaaaaaatcatgcacccatatcttttctttcatcttaagcattttttttttcttagaaaccctttatctggtacttgaaaataaatgtgaaatattgcactggtggacacctgaatgttactaacctgcatagagcatagttccatagtccagtgcatcattgtctgcaatgaattcttttgaagttgtgaaaatgggtgctgaatgggaaacatccaaaaagtctgcccccccctttttttttttaacactcagacatcttcacctgcttgaacagtgaactttgaattagtttctccccaagttttcttcagtaaaactagtttttattagattgaacattgaaattaactagcctttattttccccttttattttaatcatgtatattttaaaatattgctaaattagaataatttcaaatagtcttgacattttaaaacatttttctgaaaaactagacatctcaattcacagcatatgctgtttatagcaagagataagtaaatcatgacattgcattctttaaatttcagacttcaattaaatcagtattttaaagagacaattgtgttgtttttttctattgccactttaagtatcttatctgaaaatctgttccttgccatgtttttcttctgtaacataaactgtgccctgtgaatttctggggactgaatttgaaattgctcctgccaactgttcgtggcctggtgcttatctgaatgcctgaatatctccccgctgaatgaattgcgtattctgccctgaattcactctgatatattgattggctggacgatcttggtgctgcccacttgccgttccagaagagccaccgaaggaaaagatccaggagtatagaggatgatgaggagggtcacctgatctgtcaaagtggagacgttctaagagcaagatgtatagaatatttttcaacactttttaaactttgcagaaagaataatctttttaagaatagtttgtcagcggggggctaaagaactcttcattgcttttttattttgctttttgtgggtttgtttgttcttttatatttcttcttttctgtagaatttaaatatttctattctaaagttccaaaataatcagtggaatttgagattagagcaagaaagatagctctatctaattgtttttgtagcagctgaaactaaaataatttgagtgctgaaaccttagttatgctttgttagagatcatttgaaaatattccacacttaagcattcattgtttgaagaactagacagtttgtactcaggtacttacacctctttttccctcctcactctagatgaaatcgtggacactttgggtgaaggagcctttggcaaagttgtagagtgcattgatcatggcatgtaagtttgttttttccttttcaaacattctgatgtttttggtggggaaagattcataattcagatgaaattttatttatttatttatttgagatagggcctctgttgcccaggcttgagtgcagtggtgctatcttggctcactgcaactgccgcctcccggcttcaagtgattctcctg

SEQ ID NO: 119087 - DNA, 2129 bp, Homo sapiens
gtatttttattgatttagaagagctttttattacaatattttaaccatttgtcatatatatattgcatagtgtcttttctttatgatttgtcttttggaggtagcctgtgaattggtctccctttctacaggcttagttaatccattctgcattagaaagactgatgtggctgtaaaccctacctttatatattgtggtcagaagcctgtaacataaagtatcaagtcttaaaccagtgattctccaactttagtgtgaataagaatcaccttggaggtatgctgaccagatttacagtcagtgagtatgacctaaggcccagggttaccatttttaataagaactccatatttgatactgttgataaatagaccgtcctttgagaaataatactctttagcctagcacgcagggtttttaatgatgctattctcagcttacttatttgtctacattcccctatgtgaaaattgctcttgctgggattgtctttttcctgagtaatgcatagacaattccatctctaagccattgtggctaaaagtgccatatgaatttaagatggtaatatgccattcttctcccccggaatttcttctgtattctactttttccaaatcctggcttccctttaagatgcaactctatttccatcttttttgtaattattctctgaccattttaaacagattttttcccccatctctgactctaagcactcatgtgttgtaaccttttagaatttcctacattgttggattttgtttcatttttatgtgagtaatctcaaattgttcattatttgttggcagggactttgccttatataattttttttttatctcccacaggacctgtgtggatataaaaacgaatgcccttaccctcatccgtcttggctatttgaaaggctatagtgaaatattcactgggcattcagtggatattttaaaaaattaaatcagtctgttcatcctgtctaccctgtccatagcctgtgtaattctgtagactttgtttatataatctctcagccttggtcattggccattatctattgaagagactctcatccttttagtttgtcctcatggtgttcactccatgttttgttactctatacgttgtttatggcttagcagctctaattccatgcagtattccagctaaagattgttagtgctagttttttctaatagaaggattttggacttttatgggaaggatgcccttaagagtatggtcacgtctagcttattgtattggtgatctctccctgacagttccaagccaactgatcagatatctgacctagactacccacagtcttacccaaatatcctgagttgtttctccaataaatacaacttaaagctgatgctagggaaagagaaccgggtttctgtatctccccagcctggatttgatgctagccctattgggtagtagttgtaaagatgcttctatttctgcctaaaccagccccctgggaaaaagaatgacagcatattctggggaaaggaaaggggttggtgagggcaatctagtcaacatccgtcactccattgcttgttaggcttattttagccgatgtgtctgactgggcaggtgtcccctctctccctcagtgctccatgtgcatccctcttgaagcttcgcactctgttgaagaggacactcatcccaggtagagagggggacgggaaactgggccaattgaatctatgtccttttctttccatcagatcaaggccacttaactgggatccattgacatcctgaggcccatgacctttgaaattccttgccaagttttgtttatgtgtttcttaggaaagagagtccatggctttcagcagattttcaaagggatctctagattaaagcacgatggcactagatgatggtgttttctgttgtttcttaggtatttctcaaacaggaatgacaggaaattagaaatgcaaagggaagtagggtggtggaactattgtaatgctaaactacaggatccctttcttattttagggggatatattttagatgcctttggcacatgaggcagtcctcaaaagctatgttttctatttctcaaacaggaataacaaggctagaaatgcaaagagta

SEQ ID NO: 119088 - DNA, 1830 bp, Homo sapiens
ttgtaggttgagttctttttcagagttactccagatttactacaaatagattttaaggttaagaataactgctggataagaaaatgaacttgttggatagagaaaatgagttcataaaatcacataaacatttaaaaaaattttttttgtagagacagtttcactatgtgtagcgcaggctggtctcagactcctgggcttggcctcccaaaattctgggattacaggcatgagccaccgtacccggcctaaaatcacctttttatatctcttcagtttctctgttgaatattgtgttctatccacacagaactaatattctcaaagcttagagtcattctgagatttagagaaaagaactatggagaatttgagaaaaagaagcttcatcattgaatagctctttaccattaaaacaaagtcacctcccatatttagtatccctaagtgtttttgtcttgcacttcagttatttgtattacagtactttgccaaagctgcatgacactgatattatttctccttaaatcagctcacattttaatgttaacatttttaaaagaaaatatgtcaataacttaattggaaaatcactaataagtagaaagtaacaaaataagataaataaaaacgttactaatttttagctaaatactcttgtctgctggaaacactaggcctgaacctttttatttgccccccccggcttttttttaatttttaaaaaggcagttagcaagtgttagttgaagacaagcaccaagctgagaatttgtcctggctgtaatcagaattcaaaaaaaaaaaatgtcttaaggtatcagtattacccacaatttaatactagatctctatgcctcttagcagtcatctgacataccagtgccttgggaagcattaccacctaaaaagattttggagcctgtaagaccctgtgtgttgggttttgataacttaaataatattaatatataataatttacctatcacacatctgtaacctccacaattcccttttcatttctatcaacagatgcggcattccaaaagaactcactgtcctgattgggatagcagagaaagctggggacatgaaagctatcgtggaagtcacaagcggaagaggagatctcatagtagcacacaagagaacaggcattgtaaaccacatcaccagtttaaagaatctgattggtaaattaactcttgaactactagcattttagctctaatagttttaaatgatttgtcatttgcttatatagctttcatctgtcaaattgttttataattcagtcaacaaatattcgtttagaaaatatttgagtacttattttagataggcgctgaggctacagctgtaaataaaacaaagttcttatccttatgtatgtctgtctgcctgggagtggtaggagacagttgatcagtaagtgaatgtgaaatgtattaaataacatggtgagtcccaactgccagtaacgtgattagggagatgacacacaaaaagttaagtaatagtgatagaatgcccaatgagtacctttaacttgtatgtaggagggagatgggtatgttgtagtgctcattgtttcagaaataaggtagggttttataggggaggagttattccaacagagaaaagcagcatgtattattagtcacttataccatgtcgtacaggttatatttgtagatgaggccaagggatatgtttgggatttttagaagctggctttatttaagaactattcttttgcataggtagtagctagtaatttgggaaatggcctcaataaaaacttgcaacagcatgtgtgctgttttatt

SEQ ID NO: 119089 - DNA, 1030 bp, Homo sapiens
cggccgaggagggaagacggcagtttggcgacatttctcggccgaagggccatttgcttttgcggaggtagggttgcagatggtgtgtgctgggacaggcggctgtcggtctttaggtctccgagccaggtgtcggagaaacgaccgcgttaggggcctgggcttctggagctgagttgggagttctgcgaggcgctgctcggctggtgcacgccggcagcaccgaaagttgctcgggcgtcgcggttctgccgctgacccttctctgagggccctggccgctcgcgtcgcggctccggaggccgtgggctcgcggtcccctgctgcctggcgagcgcggctgttggttaaccctgtcgggacctcttccagccggcgggcgctaggacctgtcgggagacccttcgagagccgtctctggcattcgtgttgtcggagatcaagtcttcccctggattcctggcctgggccgtttgtagcgtttcgggggttttccagagtcaagcatttgcccctgtcttgagtgcgccaaaggcactggccgggtgcccaggagccgggaggtggggaccgggcgtccgtgcaaatccaggtggttgagggcagtagctgcttgtgagaggtggaaatttgcggaggctagtcctctgtgctatgctgaacacaacattgttgcagcgaacctgcgtttctggtggttttgcatcttattatccctggttgcctaaatagtccagataggcttatccgatccttaggaaaccgccccgcaaactgaactcgccagccactttgtcttgcctcatagctgtcctgtgcgattgtgctttttacacacccctacaggcttgtaacccattaaatgcagtcctcttggagccatccaatcctaaacttataacctgtttcgatgtttttaagccatgtacgtagcgtaaagttgtcaagaactacaggatcttaagggcagtggcgatggatctacatatgagatccattgtgtcattattttttgaaagatacctactct

SEQ ID NO: 119090 - DNA, 1004 bp, Homo sapiens
tactcagaaggctgaggtgagagaataacttgaacccaggaggttgaggctgtagtgagcagtgattgtgccactgaactccagcctaggcaacagagtaagaactttgtctcaaaacaaaaaacaaaaacgttgcacctcaaaaacatactcaaaacaatatagggagattttatagatctatagttactgtggtagttaagatagctttgtttatttcacacacatataccaagtcctaaatatgtgttagacatgattagaaaatcaaaatgagtaagacatattctttgatttataagggttaaactacaaaagtggcagtatgatgggagaggagaggaagaatacaagcaatcacaagcagaatctaggaaatttggtaaatgactaaatgtgccacttgaatgagaaggaagagtctaggatgacttggagttcttattttggtagataaggttgccataattaaaaacacctatagttgcccaattttgtggggcaatgatgagttcactttgggtacatttccatgagtctgtgggacatccaagggaagggtcctgataggcagcagagtaagtgataaaggagacacatttgcaggactgtcattgatgggttaggtggtaaaaagaggaagcagtagacgctaagtggaataaacagcaaaaagaaaaatagaaaaatcaaaagttggtgccacaaaggtaaaaagatagctttaacacagcgataggaatagttaatactgtgaaatgctatggagggcaaagataaaaacagaactatgtcggccagtcgcagtggctcacgcctgtaatcccagcactttgggaggccaaggcaggcggattacgagatcaggagatcaaaaccatcctggctaacatggtgaaaccctgtctctactaaaaatacacacacacacacacacacaaatagccaggcatggtggcacatgcctgtagttccagctactcgggaggctgaggaggcaggag

SEQ ID NO: 119091 - DNA, 1029 bp, Homo sapiens
atagccttctcctctggcttgaaaggttatgtagcccaccacctgggacctctcctgacacagccatgcctggaacattctcatagccttccctactgtgaatgtcagtgtcatctttcccaggactcatagagatggcccgagttgaggcagaactaggactcagtgaccgcctttcccagcaagcctggtggtgttccacctatatctccctcagtgaatgtgctggtgcctccttccgaaacctgactgtcaggtgtgacctgtaagatgagggtttggtctaggtgatcggacgtttccaaatctaaagttcagtgttttcttgctctgattttgtttcatgggttcaagtgcttctcttggttggcctctgtgttcaagcttcctgaggggacggtgtttcactcaccataggtaaatgataaatgtgtgcttggtaactgaaaagttgtccagaaacacttgaaatacttagaaccctaagttgtgacagggttgcttctcagtcttctcgttgtggggacagtcctggatgaacaggagtgggtttgccattccaggagtccgtgacgttcagggatgtggccgtgttcttcagccaggacgagtggttgcacctggactctgcccagagagccttgtaccgggaggtgatgctggagaactacagcatcctggtctcactgggtaaggaactttcctcctgatgcagaatctgccaggagagcaccttagcaccctcagggggcacatttggagggcttggccaggtcggctcacaggtgggctccaagagtggccattgccattccccttggttgtatggagagaccttggcttagtagagttgatgaaggggtcttttctctgcttttcctgtcttctgcccactgagctctgttccctgagccccacagggtgttcctgctgagaggagtgcacaaccagagccctgactttcttcctgggaccatctcctggttgtcctctaggagcccagtttgaagcctctcagaacaaacctcc

SEQ ID NO: 119092 - DNA, 1035 bp, Homo sapiens
ctcagggcttgccttctttgctgtgttggttcagagtgagtagtaggtcagttctaggattggtcttcatgctatttgttcaaacttcatttgcttcctcatgagcagggattccattttcaatgccaaagttgattcatcagttgcagcaaggagaagatccctgcatggtggaaagagaagtcccttcagatacccgtctaggtaagtgagaggctgggaaatgggcacaaggggttctttatagacaagtaggtcacaaagaggcagttcttgggaaactcttggaaatactgagtcctcttgagatgctcaggccagttgtattttgtttgagttgtataggttaaagtacacacaattacctaattgcagttatctaatgttaacctattttctatcatggattgatgaaaggaaatcaggttttaacagagagtagtttagagtcacctcgaactaaatcttttcacccagaatcaaagctgagcttggggcttgggcatttttcaggactttaagacatactgacttcaaatctcctgcagattttcattattctcaagagattcctacaaagagagtgcagtcttttggttgcagcttattagaagaaatgaatatgtctctctttgtgataaaataaaaagaggaaaataaaaagaaaggtaatatgaaaaaaattgttattcttccaatcaccagggacagattgttgcacaggggtgatttactccatgttttcctcttttttataatgagcatcttaaacttcgatcacatagaatcatcacagtcatgctgcagggctgttgtgattttcaaaacctgaatgtccccccactcctttttttttttttttttttgagatgagtctctgtcacccaggccggagtgcagtggtgtgatcacagctcactgcactctccacctcccaggctcaagcgatcctttcaccttagcctcctcagtagctgggaccacaggtacatgccaccacgcctagctaattttttgtatttttggtagagacgg

SEQ ID NO: 119093 - DNA, 1063 bp, Homo sapiens
ccagtgtattctcccatgccattccttaacctgtttacctcactttcctttatcccatcctgttcttcccaagattcaagtcagcatttgaaatctgattgtatcactcttctttcatatatactgttaccagtttttttgtctcaccgatacatcagtttgtttcttccagcagaggaggcattaattcttctgattcattttaggtttcaagacttggcttgaaacagaagcattgcctcatagacaggacatttttatagaagaaacatctcagggaatggtaaagaaagaatccattaaggatggtcactgggacattaactttgaagaagctgtggaatttgagagcgagatagaagaagagcaagagaagaaacctcttagacaaatgatagattcgcatgagaaaaccatcagtgaagatggaaaccatacaagtcttgaattggggaaaagcttatttacaaatacagctcttgtcacacaacagagtgttcctatagaaaggatacccaatatgtattatacatttgggaaagattttaaacagaattttgatctcatgaaatgcttccagatttacccaggaggaaaacctcacatctgtaatgaatgtgggaagagcttcaagcagaatctgcatcttattgaacatcagagaattcatacaggtgagaaaccctacaaatgtaatgagtgtgaaaaaaccttcagccacagatcatcccttctttctcatcagagaattcatactggagagaaaccttacaagtgtaatgaatgtgagaaggcatttagcaacagttcaacccttatcaaacatctgagagtgcatactggagagaaaccgtatcgatgtagggaatgtggtaaagcctttagccagtgttcaaccctcactgtacatcagagaattcatactggagagaaactctataaatgcggcgaatgtgagaaggccttcaactgtagagcaaaacttcacaggcatcaaagaatccatacaggtgagaaaccctataaatgtagtgagtgtgggaagggatacagccagtttaca

SEQ ID NO: 119094 - DNA, 1058 bp, Homo sapiens
gagaaccttcacacgtattgtaacccttatcgaacatcagcgaattcacactggacaaaaaccttatcagtgcaacgaatgtgagaaagccttcaaccagtattcatcctttaatgaacatcggaaaattcatactggggaaaaactttatacatgtgaggaatgtgggaaagcctttggttgcaaatctaacctttataggcatcagagaattcatactggagagaaaccgtatcagtgtaatcagtgtggaaaggccttcagccagtattcatttttaaccgaacatgagaggatccacactggagagaaactgtataaatgtatggaatgtgggaaagcctacagttacagatcaaacctttgtagacacaaaaaagttcacacgaaagagaaactctataagtggaaggaatatgggaaacctttcatctgcagctcctcacttacccagtatcagagattttttaaaggagataaagcctatgaggtttagttcatctctcaaataatccaagacttctcactggggaataagggaataataaatagggtacaaactcctaatagatttgtcttttttacttctcctgaaggaaatatgttagttgccactaagtcatgataaaattgatcagtgagactatgaagagcactgacttgttaaattttaaaagaaccataaattctaaggtatctaaaaacctatgagtatttaattcatagaaaaaatgtaaaaggtctttttaaaaatcatgaaaaatagttgaatatacattttgtttctctcataagaccatattccctttaaaagagtaagcttcaatatgtgaattttcttttaaaaacagtcactgagttaataatgtaaataagtgtgtggccttctttaaaatagctggctaacataggaggcacttcttttcataaagagaagctaaacataaaaaggaattttaaatttaactcttcacatggaaataataaagctctttatatgagctgtcccaccagcaacttatatatgtaaacatacatatatacacatatgcatgtgt

SEQ ID NO: 119095 - DNA, 1664 bp, Homo sapiens
aggatgcctctagcagagagaggtgtggaagcaggtgctgctcaggggccactcagtgaggcaggcagggggcagaggcaggtggcgtgaaagagaacggcaggcaggaaagtcaggtgtcagacaagccatagcaggtgacatctgactaagcagagggccccagctgcagtgtggctgttacaggcagaacggccacggggcttgtgtggtgacgggctgggggcctgctgtcagccagatgtcacaggctatgagctgtctgctgtggtgtcttctgagctgtgccagccgggggcagttgcctgtggtagagagggcattggggccttgaggagaagcagcgcctgggagttaggccaggcctcaccttcccggccaggctatggcagcatctggagccgcctcttgtctcctcccaggctatgctcctgtcaccggcatgtgccatccggtccgcagctgcaccctgaaccatgaggacggcttctcctcagcgtttgtggtggcccatgagactggccacgtgtaagtggcctggggaagggtggggcacagaggggccaccctaggatccccagccctggctgcccacttctcctctgtgccttaagagggacacgccctgtgtcaaagccacttggggtgtggtctcctgtcttcccagcgctgggcagtgctggcccgaggcccacttttgctgaaggaaccaattgaaggaggaagggcttgcctgcagactgagcaggcgctctgggccagctagagctggggaccttgccccattatcacatccaagcccccaggcagggtgggctctaccccatgttatagaggaggctcggaggtttggagggtggctcgccctgggttagaaacctggaggcagggaagccacggtcccccccaggtgtgcatgcccctcctggggacaggatacctgggggactgcccgctggacactgtctccccagagtgcctcggctttcaaattgcagcaggtagatggtcggtgccacccggctcagagtgggccaaggtcaggaggcccgttggggaaagatggggcaccctcctatcatcggggtggggtgggactggcagacccgtgtgccagtgggattcagccagctgcctcggccctcgcaggctgggcatggagcacgacgggcagggcaaccgctgtggcgacgaggtgcggctgggcagcatcatggcgcccctggtgcaggccgccttccaccgcttccactggtcccgctgcagccagcaggagctgagccgctacctgcagtgagtactgcccatgtgccccgtgggcgacccctcagtccctggggtcagctctgggagggtgcaagtccccatgcaccagagccagagccctccgacctcaggtcctctaagcttgtgtgcgggggaggagagagggcacacctgtgagagaagcctggtgtctggaggagaacccattgtcaggggtctgtccttgaatggcaagtgggcacggcggctaccctggggtccgctcaagccaggtcctggtgtcttacaccaaggacaagagatgcagcagggaaactgaggcagcacagccaggggccgggatgtgcaggtagggctgccatggcagctccagcaggggcctcagctgcctccagggc

SEQ ID NO: 119096 - DNA, 1093 bp, Homo sapiens
gtgcatgtcacatatgcacacacgtgtgacatgcacacacatccatagactcacatacacgcacatgcactcacatacactcacatgtgatgaatgtatgcatgtgcgtttgtgtgcatgtaagagcattcgtgtgtgtgagtgcattcatgtgtgagtgtgcgtctgtgagtgtatgtgtgtgtgcattcatgtgagtgtgcatgtgagtatgcgagtgcattcacgcgtgagtgcatgcgtgtgcgagtgcattcgcgtgtgtgtgagtgcattcgtgtgagtgtgagtgcatgtgtgtgagtgcattcgtatgagtgtgcatgtgagtgtgagtccatttgtgtgtgagtgcattcgtgtgtgagtgtgcgtgtgtgagtgcgttcgtgtgagtgcatgtgtgtatgtgactgcatgcgtgtgtgtgagtgcattcgtgtgtgcgtgtttgtgagtgtctgagtgcattcgtgtgtatatgagtgcatttgtgtgagtgtgcatgtgtgtatgtgagtgcgttcgtgtgtgtgtgtatgagtgcattcgtgtgagtgtgcatgtgtgtatgtgactgcgtgcatgtgtgtgtgtgcatgtgtctgaggagtgatcactgagcaggccagcctgtgatggtgacaccccagagcgctctcctagaggtggtgccacgcaaggctggcaaatggtagttagcaaaatacttgacgagtgaatgaacaatgaacaaatgaatgaaaatgaaggttttgggagccagagaaggagacagtgacttgtcctggtggagggcatgggcccagggcaggcaggtaggaactgttgcaaacaggaggaaagtcaggctggacctggaagcagggggaggggttgcctggcagaaagtggcaacaggactgggtgctctggggagggtgctcctgccctgggagaagcatgctggaggttcggaggcagctgggccctgcaggggctgctgccagacttgatgccctctcagggcttggcaggagtcagttcacaacatgcaatgctgtgatggcagccacgtcacctctgcagggcaggcaggagcacatgggcagct

SEQ ID NO: 119097 - DNA, 1030 bp, Homo sapiens
actgagggagcaggcgtggcgccgggttcggagcagcccctggactccccgggctgggcggacagacccccggctggtgcatctggtgcccagttccgggtctgaggttctgttccccgggctcccggcacctatacccgtgcctggatgtcctccaggcccccgcagcctggagagcaaacggccgatgatggtctcaagagggttctgcccttgtgtccagaacgtcaggtgcctgtgctcctttgttctaggcaatatcccgggagctcccagcattcttggccttcatcaccacgaggacaaagctgggcttggatttgtcccgaggccttgaactgggaaggagtgtggggactcacaggcctgtaggaaccacctcggccacctttgaaactcacaatgtgggcccttggtgacagagaccccggggaccaggcctgggcctccctttcttggtgtccttggtgctccccatgggctgtggtgaccccagtgatgggccaggcagccggggccgccagtgtgggcctggcctgcggagtccttgctctggcctgacctcagtcttctcgtctgtatgtacatcggggtgctggactaaagccaggcctcagccctgcagctcttgggcggcctcgccgccccaccccgcaatgttttatttgactcgtacaacggcttcagaaatgttgagtgtacacttaaaaatcaggaggtttcacatgaaaatctcaattttcagttccttcagaaggcctggccaccctgggcgtgttcctgccagcagcactgggtgggaggctctgtgcctcctctggatgggcgaacacaacccctccctccctgccgattcgtgcctggcccccccactcatgctggccccgcctgcctggtttgcagtggagtgtgagactcctggactctggttggtagttacacgtacataaactctctccgtctctctctcctctctctctctcacacacacgcaggcatgcacacacccatggtcagagcagacacatcc

SEQ ID NO: 119098 - DNA, 1196 bp, Homo sapiens
ctgaggcaggagaatctcttgaacccaggaggcggagcttgcagtgagctgaaattgcgccactgcactccagccaagcagcagagtgagactctgtctaaaaaaaaaaaaaaaaaaaaaaacagaaaaaaaccaaatctgtggcttgtcttgcagaagagcatttccattgtgtgatctctctgcctgcccactgatgggcatgggatttgaggagctttgcacagcatctgtacataggccccatcctgagagattctgctttatcagacctgcgtgagccctggggtctgtacttttcaaaagctacacaggagagtcttttgtacagcatgacgggtgctcactagcgagggctgtggggagtgggggctcacagaccagacttggggcctggctcttctcttgctggcctgtgaccctccattttcccagttaagacaccacctgcctcacaaggtgtgtgtcagtgagggagcagagggggatgaggctggctggcctcagtcaaagggaattccatggggggcttgaggtggaaggaagcgatggccagtgggcatggcccggcttgggatgcgggaagctgccacagcggtgtcggctcctggccctctgctctcgggtctctcacctggaaattcagagccccggcagaaggaaggcagccgccgtcgcatggctatccccaaggccacacagtagggaggggtcctcacaggcaagcgggcaggataagggggtgagggctcccagggcagtagctggcctttgctgcagggctgtccacacttggcggccacctggagctccatgggcgttgagcactgatcctgcagacctgatcagggcaaggtgggggcagtggtaggcatcctccttggtgctcctcagtgccctcccaggcaggtgcccaggccctgggaggctcctggtctcctctccttcccttccttcccctcccttcctctctgcactcctccctcccttcctctcccatcccctccctccctcccctctgccctcccctctctgcacgatggctggccactggccactgatcccagcacactggccctgagctgaggtctgggcttctggggcaatgcaggttgggtcacagactgaggtactgtctgagaccctgtgatagtgggaaattataaatgtatgtttgttcttcatctctggttcct

SEQ ID NO: 119099 - DNA, 1077 bp, Homo sapiens
gctcacgcctgtaatctcagcactttgggagactgaggtgagcagatcacctgaggtcaggagttcgagaccagcctggccaacatagtgaagccccgtctctactaaaaatacaaaaattagccaggcatggtgggcacctgtaatcccagctactcgggaggctgagacagcagcatcgcttgaacccgggaggcagaggttgcagtaagccgagattgcaccactgcactccagcctgggcaacaaaagtgagaatccatctcaaaaaaaaaaaacaaatagctggtcagggaatctgatgtctctggtgggaatgcggtctgcccactcccagatgcaggtgctggccactcgccgtctctcctgtgcctcttacctttctagactagcccatggccgctgcttcctcccctcccaccctccgccctgcctgccacccactcagctgagtgccctgtgctgctcccgtctggcctgtcaacttgccgtgctctggcccgttccttcccaacccccagggagctccttgagggacgcaaggcccagtgtctgtccccatgctcagagcataggccagctgtgagggcatcccgagagcactcaccagaagcagacgtggaacagagctggcgtggagctggcttctggggtttgcagccagtgttttcctctttacattggatggacagcaaggcagtgtcacaggtcccctcctagtggaccatagacctcgaaactgtggttggtctctgatctttaaaatgtatcattgtggccgggtgtggtggctcatgcctgtaatcccagccctttgggaggctgaggtgggtggatcacctgaggtcaggagttcaagaccagcctgaccaacgtggagaaaccccatctctactaaaaatataaaattagccgggcatggtggagcgcgcctgtaatcccagctactcaggaggctgaggcaggagaatcgcttgaacctgggaggcggaggttgcggtgagccgagatcgcgccattgcactccagcctgggcaataagagtgaaactctgtctcaaaaacaaacaaacaaatg

SEQ ID NO: 119100 - DNA, 1004 bp, Homo sapiens
cattgtcaatcactgaaaggatgtgctggagaccaggggcctatgactggccaaggcctcccagaaagagggtgccaggatggaaagccatctgcacaggcaaacaggagaggcggggctgcccatctgccacagtcagcacagtcaccgggcagtgagcctgctctgatatgggcttctggaaccagagaaaggggaatccagcgggcaacgactcagggcactgggagggtgggtggagcccccacgtacctttctccgggaaatggagaactccttctcacactgcctacagtgtgtcgcttcgtcatctttcagccaggcgtggccctgaagaggaaaggacattctagaatccactttctgtctaagcccctgatgagtgggtagctgcgttctggccacatccattgtccctcatagcacctgtttcctagtgaggcactgtttctccatcagatggggcctcacaggactgtcatcaaggggctctttccccgtctggccgcagccgggatttctgcatcctagctccgtgctccacctcttggcctctgcaggctgccctggggcctccaggcggtctccagcatctgctcactcaggcacactcccactttcaatcagttccctttggctgaagtaagcagagcgagcttctggtgcctgcaaccctagaccctgcctgagacactggccgaagtgctagctgaactggcaggcgcggaagaagggccaaatctgagtgagactaagacacttgttgacgctgatccttgtggagagacagaaggtgatggacagcgggcactgcgtcccacaggcctgaggaagcccttctccatgcgggccaaagccctgattcttgaccagccctggggagcacatggactccattccacaggggaggcggctgaggctttgaaaggtggcccctcagagggctttctcagggcgaagcagcacctgtgatttatttgggcttagggactggggtgttccag

SEQ ID NO: 119101 - DNA, 1656 bp, Homo sapiens
tagcagtcaatggctctgacttaactccatggaggctgccatttgggcacagtgagttgcctttagtccagcttggttgtctcacttcctgcccaccatgaataggaaaagcaagagacttcccctgtgctcccttttctcaaatgccattcgagggacacattgtgaatgtttatgttaaattttttttaaaaatgccttgtttagctttaaaaatacgaagtaattttgcaatttttgaaaaacactagttttcctttaaacttaatttttcatgttgatcctgaagaatccgttaaaatggtagcacaagagtctggcaagttggtactgcagagaaaaggggttaattgaggcttgtttggagtcgggattcccctttcccaaacatgcgtctcgccacttggacagcagccatttgtactcgtatactttttaaactttttcttggaatactatattttatttgactggtagtctgatattactcctaacttgtcaaattgatctctttgcaggtaaccaaggagcagtgaacagcagctactacagtagtggaagccgtgcatctatgggcgtgaacggaatgggagggttgtctagcatgtccagtatgagtggtggatggggaatgtaattgatcgatcctgatcactgactcttggtcaaccttttttttttttttttttttttctttaagaaaacttcagtttaacagtttctgcaatacaagcttgtgatttatgcttactctaagtggaaatcaggattgttatgaagacttaaggcccagtatttttgaatacaatactcatctaggatgtaacagtgaagctgagtaaactataactgttaaacttaagttccagcttttctcaagttagttataggatgtacttaagcagtaagcgtatttaggtaaaagcagttgaattatgttaaatgttgccctttgccacgttaaattgaacactgttttggatgcatgttgaaagacatgcttttatttttttgtaaaacaatataggagctgtgtctactattaaaagtgaaacattttggcatgtttgttaattctagtttcatttaataacctgtaaggcacgtaagtttaagctttttttttttttaagttaatgggaaaaatttgagacgcaataccaatacttaggattttggtcttggtgtttgtatgaaattctgaggccttgatttaaatctttcattgtattgtgatttccttttaggtatattgcgctaagtgaaacttgtcaaataaatcctccttttaaaaactgcactctgtcttgtctgtgcttcagtgtcatgtggactgagtcttggtgctctgtgcccacctggggcctagggccacatctctggcttggcagttgaggctgttgcgtagatgtcttcagtcttccctccagtgcaactgaaggtaaactcgtctttggggccctggtggaagggctgtatgtcatttggctgcacaggacctgatctgaactgcctgtaactcattaagcacttgcacaaaacaaagggggaggcgccagtgccctcactgcatgcctgcatgtctttgaggccttcatgcttggctgggaaggtgccggaggcaagggaggtgtgatgaatatgtgggtttcttct

SEQ ID NO: 119102 - DNA, 8449 bp, Homo sapiens
aggtcggccaggagcgcgccggtaagagcctgggggcaaggggtagaaagacgcccacctcatcacaacccagagctcgggactcctatacagtcccatagggaacaggcggccgccattcccctcccccacgctggcgggtaaggctagagaacggtttcaaggaagacgcatgcgcatgaaataattataaaccgctaggactccgaagttcaatattcgcgggaaggcgcaggcgcaacaaaaagcccggcgggtttatgggtgggggtgctgagcccaaaacccaagcgtgtaataatccgccggcgggaggtgggctggctcttgaaattacgcatgcgccagagctctttgtgacgcaacggggcggtgcgggcagctggctgcgcgtgcgcagaactcgcacaagggaccttatttaggttgcgcaggcgcccgctggccatttcgtcttagccacgcagaagtcgcgtgtctaggtgagtcgcggtgggtcctcgcttgcagttcagcgaccacggtgggtaccgtttttgcgaggattgtttgtccccatatctctgggagggccacggggaccttggcgagctgcaggctgccgtcgagagccgcgagtggttcgctgaatctcggcaccgccgctgaggcctgcaggccgcgccgactctattgtgtgagaagtcggaggaggcggagcggaagcggccgccgccatttcctttcctctacgctggctctcggcccgggcccccacggttcggggcgccgacagctgttgctcaggacagctttgggggtccggtcgccggacgaggaggtgttggagtcgccggggtgggtgcatccgcccggtttttgctccgtgggggggcggtgcgggcccgggcgcgcctcggaggcgaaggacagcttaattggcgctctcagttctggtcctccccgctttgcagtttgtttcgacgccggaccgcgtaagagacgatgatgttgggcacggaaggtggagagggattcgtggtgaaggtccggggcttgccctggtcttgctcggccgatgaagtgcagaggtttttttctggtgagttagaactaggacgcgggagttcgagttcgaggccggggcgggcgggctggcgggcggccgggctggggcggggcggggcggggcgggccgggccgggccgggccgggtgggacccggggcgccccctggcgaggcgcgggcgactacactcaccgctgtgctgctcgcgcccggcggcccgctgttacgcaatggaaatttcgaaagccccgcccgtcctcctggcccttgggggagtgcggcaggtttggcagactttgttttctttacctatctttgaacaccagcttttcttttatgggtgtctttttttctttttcttttgagttggagtctctgtcacccaagctggagtgcagtggcgcgttctcggctcactgcaacctccgcctcctgggttcaagcgattctcctgcctcagtctcccgagtgtctgggactagaggcgcgcaccgccacgcccggctaatttttgtatttttagtagagacggggtttcactattttggccaggctggtctcgaacatctgacctcaagtgatccgcccacctcggtttcccaaaatgctgggattacaggcgtgagccaccgcgcctggcccgggtgtcttttttcgaaaggataaattggcataggtgggatttcctcctcaatcttgagaaaatggccgagtgattagacaaataatagtaatgttttgcaatatcttgaagtgtaacctcttgtttccagttttggtgttttcttaaaaaggagcattcttcggaaagttaaaatgtcacgtcttaatttcagttttcctaatcaagatttgataattgaagagtgttttcttatctagttcttaatctggctcactatacagttgaagacactgaagcccagggaagtgtttttgcagtacataggtttcctgaatattttctatcagaatgtccttgttcctattattagactgggaaaaagaaattagactgattaaaattctatttggatgaaattaacagcttttggcaagacgtttgtagtattgacttactatctgaatttagcgttggtaacggaaagcgacctgtaaaacaagaaccaagtacgctggaagccgccttgcagggggcaacactgggtttggcttcagctgtgcaacttggagcattttagcttggtaacactgatcccctttcaggtgagtattgggcttgtaatttgaatttgaatgagaaaccgtaatgtggctactggtaaggtaaaacggataaatgccccagaccaaaacagctcgcaacgaagtatgtttgccgtaaagtcacacagtccaggcttgataatcttctgagaaattgataaaagatgtgtgatgtagacatgagtagcaaggactaaagagataaattcattctgaaactgctttgaatattgtatgttgttgatgggttggaaatatatcaccttaggaatgagtttgtttttttttaattggagttttaggagttggtaatatcgtggtcagtatatataggcttcacaagttatgtaatttgtagtggggacatggaatagacatttcatctgtgtcacccagaggtggttttaggttttaaattctgtattaacggttgttttctttccagactgcaaaattcaaaatggggctcaaggtattcgtttcatctacaccagagaaggcagaccaagtggcgaggcttttgttgaacttgaatcagaagatgaagtcaaattggccctgaaaaaagacagagaaactatgggacacagatatgttgaaggtttgatttacattgccctagttacagtaaataaagcattaaacaatagaggtctcaccccttctgaattttaggtatttgactgcatggaaatggtcatctaagggagtttgtggcagctcttcctagcttatctaaagacccaggaagtctgaactttgttatctaattttccaaaagtgactaattctaagcacctctttcagtattcaagtcaaacaacgttgaaatggattgggtgttgaagcatactggtccaaatagtcctgacacggccaatgatggctttgtacggcttagaggacttccctttggatgtagcaaggaagaaattgttcagttcttctcaggtatgtagtcatgtttgttgctgagcagtgagttttggctagcttatggcaaggtgatttaatagacgttaaagttgagtagcttaggtatttcagtaggttgtaaattgccaatgaattaatgttttcttcctagagaccttcaaataatttaagcccatcttaaaggtggaaatgaagtacttccaaaatgttaactttgcctatatttagtattatagttcagagtagatctttcattgaggattgccctcaacagcttaactactttcctcacattggtgtccagctaagtacctcaagttaaaggtaagatccctttaccagcagatcatcagtgcgatgaattaggttgttgtaaattatggcaagtgtctgtgttgcaagagacacgtatttgggtcatgtgaccagaagcatctaatggtctaattctctttaatgcaaaagtcggtttatgaaagacttggtttaacctgtgtggtataaacttactgaaaatcagatgtagtgagagtagtttgaatgcttgtagtctcagtatctgaaataagtgttttgaaattgttcctgggcctaaagtatttgaatgtttttatgctgaagagctgataagattgcatgtttaacaatgttagataagatatcgtatattttaagtattaatatttatgatgtgatacgctggaagcaggaaatcctttcatggtttagtgtagtatgttaaaaattgatatatgtatcgagtcctaatgtcagaatttttaaaatcaagtctgttttgttttgacactaaattggtgagaattgaatgctgtcaacgttaaatatgaacataatttcatatcttctaggaaagtgctttaagtcctttttgtaagcttgggaatgtatccacggaaaggatttttcatagacggaatttccagaagtgaatcataactactgttagagcataagcatgcatgattgtgctgtgtagatcagttttgttgaaagtttagattgttgtgtttgtcaattataatttaatgtttcagtttttatatgaaatgttgtaaatgtatacctttttaaaaacttgaagttccaataacttaaagcattgaaatataaaatgaggtaaaaggtgttttgaatttagtaaaactgttatttaatgcttaaaacttaattgaattgtataattctcaacattaagttgcatagatatgtgttcttaagttgttgaattcttaatgcatcctgtgttcagcaagttttttttaatatatactgtaccatgggtgtgttaagaatagttatactttataataatggaacttcatattattgcaatgcatatttaaagagtacttgttgaaagcataccattcacctaaagttaaaaattctggtttatttaaagctataagaagaatcatttctgggcttgtgatgttaatattgcccccctactggggttatttgtccttgggttgaagggttggaaatcgtgccaaatgggataacattgccggtggacttccaggggaggagtacgggggaggccttcgtgcagtttgcttcacaggaaatagctgaaaaggctctaaagaaacacaaggaaagaatagggcacaggtggggatggatggttggttggatatgtcacttttcttatggtaaacaattaaatccatattctctctgcttaaaagaagaaattaatgttttgtagtcctaggtaattgatgttttgccatgatttccaaacttgtgtcagtcccacgttacacgcaaactaaattttaggtttgaaatttgtccctagttaattggtctgcttgacaattttgtgagtcttattaaccccaatcaatagagttgagagactatggctttaaaaaattaatgcaaacctggctttagctgtaataacacccacctagaataaattaatattaccataagaaaatgtgatactttctgatcttgtttttaaagttgaaatgcaacaaactttttcttgctgtatataaatattctgcatagtattaataagcatagctttcaagaaattgtcacaaaaggttttattctctttgcttgtgactatttttcattgaagcatgcgcttacctatgctgattcttactaaaagcataggctggggtatttattggcgaaaggaaatgtgtagtgtgggctggactgttggtggaggctggctttttagcccacttgctatacatgctgccaatggatttaagacttgaaatgttgaaagttgagtggaattatttccctcctaaaacatttatttacagtactcctctctacccctaaggttgggctctgcctcagaggagtgagttttttttttttttctataaagtttacattgtcttactatttattgagtgaatttctggtcattgcctatgcaaatataagaaatctggctttaaatattagtcagtttcatggctatgactagattgttttcttgtataactaaatacctgtataaaatgaactaatgttttctctcccctccctaccccttccttatgaacaatgctttaggtatattgaaatctttaagagcagtagagctgaagttagaactcattatgatccaccacgaaagcttatggccatgcagcggccaggtccttatgacagacctggggctggtagagggtataacagcattggcagaggagctggctttgagaggatgaggcgtggtgcttatggtggaggtacgtgaggattcgtaaggttcggcaagtcgtctgttcctttgtctaggtgttttatttgattgattgtactttgtctttcaggctatggaggctatgatgattacaatggctataatgatggctatggatttgggtcagatagatttggaagaggtaaggtaagaattgaatttctcagttgaaggatgcttacactcttgtccatctagacctcaattactgtttttcaggaatgtctgatcacagatacggggatggtggctctactttccagagcacaacaggacactgtgtacacatgcggggattaccttacagagctactgagaatgacatttataatgtaagtgtgagatgaactcacaagtcaatatttcagtatggcagtaagtcagccttattctataaatgtgagcactatgttagaaattttaggttttttttgtaacgttagaaagttggttgaattctttgaaatgccttgtgttgtagtttttttcaccgctcaaccctgtgagagtacacattgaaattggtcctgatggcagagtaactggtgaagcagatgtcgagttcgcaactcatgaagatgctgtggcagctatgtcaaaagacaaagcaaatatgcgtaagtgtgattgagcatttgtgggctcttaacaggtgattgtgtgactaacatttacaatagagaaatggaaaaataaggatatatgagaagtttcctctccagtaatagattaattcttgggggatgcgggggcagtgtgttgaaggtttgggttttaaaaattagtataacggatttgtgatatgcacatcttgaagtgtatatccttaattgacaatacagatgaatatgtaaaggctagattttggagttaaagtagatcacctaagagaagtagctagaatttctttgccaaagtatttgaagttcacagatctgcttgtttaaaaactttataaaagtgcttattctgttttgtttcaccaacaaacattttcaaactttttttttctcatttcagaacacagatatgtagaactcttcttgaattctacagcaggagcaagcggtggtgcttacggtagccaaatgctaggaggcatgggtttgtgtaaatatcactttagtgtcttttttttaagctaaccttgtatgccttttctctcatttcagaacacagatatgtagaactcttcttgaattctacagcaggagcaagcggtggtgcttatggtagccaaatgatgggaggcatgggcttgtgtaaatatcgttagtttttttaaaaaccaaaacgtttatatctgtataagtcaattataagttaagttaatctatttatttaataagtttagcataagaaacttaggcaaagcagtttcttgatatttgagttttgtatctggcttacttaaatccttgtgagttatgaagttccttaggatagataattcaaattaggtttaagtagtcttgggggaggggactacggagtgaaactacttaaattttctaagtataaagtttaaatcaatagcaaaacaggattaagataaatgtgggcataattaggtgtattgacatgcctttgatgtatcaaactgagggggaacccactaaatccagtcaagcagtttcataagatcttcacaaaatgcctctacttacggaatcatgttgattttagtcctgctgatgtgtgtaccgttagcactttggtttatcaatatttgactggctcaaatgatggatagaagggtggcctggttatagacagtaggcagaaggaggcagagggttacagtaatgtaagatcaagactggaaaatgatagctatagaattacaagcccggtaccaccaggtaccacatcacataagaaaaaaggttctaatgttttcttaacttaacagcaaaccagtccagctacgggggcccagccagccagcagctgagtgggggttacggaggcggctacggtggccagagcagcatgagtggatacggtaaagcctgtttgttactgtacttagagtaagttatggtaaagcctgttcattactgtacttagagtaagttatggtaaagcctgttactgtacttagagtaagtcgcaggcaggtgcctttagttgggaagatgcaggctcctttcggtgaaattgggttatgaaatgtatgctttcaatccaaatgtaactgtttttactagctaattttcagaaacaatcattgggagggggaagtgttctttgaattaagaactagtcattgcagctttggaatactgtcgagccagaaaatatctgcctccatgtattaaaacattaaataaagttgttcacttttttgtcttttggttagcattaagtcagttttagacagagggagaatttgaaatagtagaatggtggttgggttcaggatcgtatttattagtcagttaacctaggattggttttat

SEQ ID NO: 119103 - DNA, 3742 bp, Homo sapiens
taggggcccgcgttcgctgcaacgggcccttcctgatggccgatcgtcggactcctaccccttttgccggctgccgtttgccccgtcagcgaagggcgcgcgatgcgtcccaagtctcggctccaggaaccagacgggtgagggctactgggggttgggttggaacgccccgaaggcaccacagcaaccgacgcgggaacgcctgttaaaccagccccgccccgagacgcgcgcgcccggcggtctcgatccagcgtggcccgcccctcacctcccgcccaaccaacagccacttcctgcctcactcccggccaatcttcacactccacgaagaatagccgtagggggcgtatgggacggtgcgtagagcgatgcccacgccggccaaccggatgtcggggcttgcgcgggagggcgggacttggcgccggctgtggctactcaggggccaggggcgggcacagggccgggcttcgtgcggtggggctcgctcgcgcggcagcggtggccgaggcctcttggttctgcggcacgtgacggtcgggccgcctccgcctctctctttactgcggcgcggggcaaggtgtgcgggcgggaaggggcacgggcacccccgcggtccccgggaggctagaggtgagaggggagacctgagcgcgtcctcgggcctgtgaggacctcggggggctgggagcgcctctgcggctgaggggtcgggcgtggccggcgactgaggggtcgggctggctcttgagggcccaggccctggccgacgcgcccgccgtgagcgaggaggcccgaatccgggcgtctttggttgggttgcgggcccaggccgcgccgccggggtcgggaggcgtggcaggtggcccgacagccttctttgacctctgggaaagctgacttattcctatggctttgcttctagggctttcttaggcctctttgccggctgcctgggcagccgcgaggtgggctggagtaactgggtaaaagtatagggtggaatcgggcctactaggtacccctagtagtagggaagggtggtattagaccgagagggaatgtttacaactagcgttacagtttaatatttgaaaatccaaagcggagactggaccctagttccctgaagagaaaggggaatgtaccagaaggagaacacgcagtggttgagaaacttagcagttacagcacctattctggaggcgagtaatccagttggagagggacagggcgttaaaagcaggaaagcccccgaaagctcatctaagtgcatctctttccacaccggaggcctggaggtatgaaatgactggcccaaggtcatgcgattagtgtactgatggtgctgggattatagttcagggatagaccgtgcagtggttaacgctaaggccctggctcgagtctttgattggtcattggttgctctgtgaacttcggcagttttcttaccctttgtgcccccgttcttgtcaagtaatggatataataatacccgatggatttgtgaggattaaattaagatatgtatacaataagacagggaagtccgacatttagtaactgctcgatgatcattgcggtacgttattataatctgaatgcctttggaccaatacactgccatcctagtgaactggttcagtcctgtttcgcaggacctgaggtcacagttatggtgatagaagaaaccgggcattgtgtattaccgctgggcatgacacaagtgattgctggttgagggaagttaaactgagcttaatattaaaagattgagaggacaagattaaccatagttaagtctttttacctctgatttaggaaatggaagattttgcttaattttttaataagtagatttttttaagggggaagaattttattgatctttaaaatcattctgtatctcagtcttttcccaacattgtttgagggtcatgaatagaagcaactgccatatggatcaactgttgtacatttggtataattatacttagagcagaggtaaaggactatgtgggagttctcctgtgcatcagccagggtgcacacacaagccaggtaactggatcatgagaatgctcgagtgaactgtgtgtgggggtcagtgttgcacaacagaaattttctgacttatctgcaaatggctgtcagcattccccgacaccttactatccttactccccagttcatttagcgcattatcttctcagggccacaagggataagtgttttgacagaagtcgttgctgccgttttggcaatcacactattgcatccttttagttagagttctctttgccctggaagacagcttaaggggatgaagtggcagttggtgagcatgaattgcaggctcatgaaacttgaattgtgtgcccagtgtggtaaccttttttttttttttttagacggagtctcgctctgtcactcaggctggagtgcagtggcgcgatctcggctcactgcaagctccgcctcccgggttcacgccattctcctgcctcagcctcccttgtagctgggactacaggtgcccgccaccacgcccggctaattttgtttttgtatttttagtagagacggggtttcaccgtgttagccaggatggtctcaatctcctgacctcgtgatccgcccacctcggcctcccaaaatgctgggattacaggcgtgagccactgcgcccggcccagtgtggtagcttttgtcccactttggtttccgtaacttcaaaataggaatgagaagtctcctgggttcctcacctttagggggcaattgggaggggcagataaaatggtgaacatgaaactactttaaaaagtgtaatgaattggctgggcacggtggctctcacgcctgtagttcgagcactttgggaggctgaggtgggcggattacttgaggccaggagttggtaaccagcctcgccaaaatggtgaaaccctgtctctactaaaaatacagaaaattaacctccagctactcgggaggctgaggcaggagaatcactaaacctggaaggcggaggttgcagtgagcggagatggttccattgcactccagcctgggtgacagagtgagactccatctcaggaaaaacaaaaaaaaaagtgtaatgaactgtgcaaatagaatacgccgtttataataactcctaggaaataataaaagtacctaaacagttaaaacctatacagcttttggtaaaacttttcaggaaagtcctggttgaattctttgttactccaacagatgtactttttttttttttttttttttttttttgagacggagtctccctctcaggctggagtacagtggtgtgatcttggctcactgcaacctccgcctcctgggttcaagcaattctcctgcctcagcctcccaagtagctgggactacaggtgcccaccaccacacccggcccggttttttgtattttagtagagacggggtttcaccgggttgtccaggctggttgcgaactcctgagctcaggcagtccgcccacctcggcctcccaaagtgctgggattacaggtgtgagccaccgcgctcagccttacttatttttttagagacagggtcttgctcttcatcaggctggagtgcagtggcgtggttattgctcactgcagtctcaaactcctgctgttattggttcaagtgatcttcctgcctcagtctcctgagtagctggatccacaggcggatgacgctacactcagct

SEQ ID NO: 119104 - DNA, 2882 bp, Homo sapiens
gagctcaggcagtctaccagcctcccaacgtgctaggattacaggcgtgagccaccccaccctgcccaacgactcacttagcttcaacctgtcagactcaggcttctcctaccttagccttcttagtatctgggacaacaggtgtgtgctaccatacctggctaaatttttctttttttgattttttgtagagacaggataatttttttttttttttgtatagacagggtcaggctatgtttatgttggccaggctgggaaataaggtcttaatagaggaagttgaagattcctgggggaatagcatgtagagcagctatagagggagagggtgctgattactagctaaaagacttagaaatttttgcaaacatggactcatgatagtttttgggtgatgagtcttcttgtaggatagcttgaaagaggaggaggaaactagaggccctggtaatataaggtaacattaagtatcctgatgtcagtaatggagaagagtgaaagactatgattgattgggtgactgtgtgggcagaggatgtgaggagaaaaggacatcttgtgtgtgtgtgcgcacacatttttagttgtgtatcttctacttgttttctcccccaccttgtacctgtactttctcaagcccaaaaatgaaaatttacctgctaccaaccacatcatcttgtgcatctgtgtagctcagtttttatttctttagatctgtggtcctccgtggaaagagagccactaccccaagacacatctaatataatacacagggcgcttacgtggttagaaaagaagagataagccgggtgcggtggctcactcctgtaatcccagcactttggaaggccgaggcgggcagatcacgacgtcaagagattgagactatcctggccaacacggtgaaaccctgtctctattaaaaataacaaaaattagctggatgtggtggtgcacacctgtcatcccacctacttgggaggctgaggtaggagaatcacttgaacccaggaggcggaggttgcagtgagccaagatagtgccaatgcatcccagcctggcgatagagcaagactcatctcaggaaaaaaaaaaaaaaggagcttgttttggccaggtgcagtggctcacgcctgtaatcccagcactttgggaggctgaggcaggtggatcacctgaggtcaggagttcgagaccagcctggccaacatggcgaaaccctgtctatactaaaagtacaaaaattagccgggcatggtggtgggtgcctgtaatcacagctactcaagaggctgaggtgggagaattacttgaacctgggaggcggcggttgcagtgagctgagatggtgccactgcactccagcctgggcgacagagggagaatccatcacaaaataaataaataaaatatataaattttaaaaagtagcttgttcttagtttaatattctttttgagttctaaaacgctaatttgaaaacatgtctattgatgatatttgagcaaccgtatccatattaagccttaatatgagaggaattatcttctgtgttaatttttttttttgagacgaactcttgctctgtcacgcaggctagagtgtagtggcgtgctcactgcaacctccacctcctgggttcaagcagttctcctgactcagcctcccaagtagctgagactacaggcgcccgctatcgctcccagctaatttttgtatttttagtagagaagagtttcgccatgttggccaggctggttgtgaactcctgacctagtgagccacctgcctcggcctcccaaagtgctgggattacaggcgtgagccacggcgcccggccatctctgttatttcattgtaatgttttaacgggtaccccctgtaaattagtgtatgaaagggcttttgtctgttgtaaagcactttacaaatgcaaaagtttgttggaaattgtatttgaatgccccacatctgtgtaaccaatcctctctatatgaggatgttgtgtatgtttcagttttattttgaaattttccagaaatggaatcttttaactgattttagggaaaccctttaatctctctaggctgcctttctttatctatgaaatgaaatagtaagttctttttagctctgcgatttaaaagctttaattttaaatgagagagtggttagtgatcttcatgaagtttgataggtggcaatacatttaactgattttgctctttatgtgtagatcatggaagggaagtggttgctgtgtatgttactggtgcttggaactgctattgttgaggctcatgatggacatgatgatgatgtgattgatattgaggatgaccttgacgatgtcattgaagaggtagaagactcaaaaccagataccactgctcctccttcatctcccaaggtttgaaatggtctttgaatctattccttttacgtcttgagatgataaaattatgaagatacccgggtgcagggaaatgtagtctcaactactcaggaggcctaggacaggagtgtgagtccagccttggcaacacagggagatatcatctctaataaaatataaaagaaaaacatggtgaagataaatttggaacgttttcaaagggaaagcaaaattcgtgaaaatacttattgatctctctggcagcctttgtcttgctagaggccaattatatgggttgaatttgaaggccagctatgaaatttttgtgacagttgaaagcaaaccaggagaatagattctagataaaaaggcatgttgctgaaaatttaaatttttaattcatttatgtatttaacacaggttacttacaaagctccagttccaacaggggaagtatattttgctgattcttttgacagaggaa

SEQ ID NO: 119105 - DNA, 1323 bp, Homo sapiens
catgtaaataagatgggatagtagattcctttttggatagcatcttttatagtgaaatgtctaactttattttattttatttatttattttttgagacagaatttcgctcttttgcctgggctggagtgcaatggcgtgataccggctcattgccacctccgtctcctgggttcaagtgattctcctgcctcagcttcccaagtagctgggattataggcatgcgccaccatgctggctaatttgtgtgtgtgtgttgttatttttttagtagagatggggttttgacatgttggccaggctggtcttgaactcctgacctcaggtggtccacttgccttagcctcccaaattgttggcattacaggcatgagccaccgcacctggcctgaaatttctagctttaatatcttcagtgttaacatccatgcaggaaaatagtcttttggaatttgtggtttttacttccacttctttccctcccccactctaccctatattttgttctttgattgaggaaaaaaattttctcttgatgttaaaacatcagtggaattatctcataggtttggtactttttcatataggtttgtgagttgaagataatgtattatcattagttgtgtgacagatttaaaggttggaagtagagtggttaaataggctaagagcagaataggtcctactttaatgagtatttacataattttccctcacaagtcaactgtcattttaagactgattttgggatttgttatttacaggtggattttatccaaagccaagaaagacgataccgatgatgaaattgccaaatatgatggtgagaatcccatttggtttagatataatagcagatagaggtttgacatgttgtctccatggcatttcctaagactagtttaaaaggacatagtaggctttaagatttttccagccaggtgcggtggctcacgcctgtaatcccagcactttcggaagccaaggcgggcagatcacgaggtcaggagatcgagaccatcctggctaacacagtgaaaccccgtctctactgaaaatacaaaaaattagctgggcgtggcagcgtgcatctgtagtcccagctgctggggaggctgaggcaggagaatggtgtgaacccgggaggccaagcttgcagtgagccgagaacgcgccactgcactccagcctgggtgacagagcgagactccgtctcaaaaaaaaaaaaaaaaaaaagatttttccatggaagttttgccacctttgtgtgttgcctaattttttttttttttttttttttatttaaggttcaggggtgcatgtg

SEQ ID NO: 119106 - DNA, 2824 bp, Homo sapiens
tgaatgttggaaatttctagacagtagtataatacactacagttttaaaaagccatatctgaataatatttgccaaataaagtgtgtttatttattatttatttacttttttgagacggagtctcattcttgccacccaggcttctggaatagagtggcgtgatcttggctcaccgcaacctctgtttcttgggttcaagcgattctcctgcctcagcctaccgagtagttgggattacaggtgcccatcaccacgcccggctaatttttgtgtttttattagagatggggtttcaccatgttggccaggctggtctcgaactcctgaccttgagtgatccgcctgccctcagcctccctaagtgctgggattataggtgtgagcgaccacggctgccccagtataatatatttatgcaactaggaggtgttttttttggcatttaaaggaccttcagaggtagagttaagcagtggaacttttttgtgttgtcttgtaggaaagtgggaggtagaggaaatgaaggagtcaaagcttccaggtgataaaggacttgtgttgatgtctcgggccaagcatcatgccatctctgctaaactgaacaagcccttcctgtttgacaccaagcctctcattgttcagtaagtgaaatgcttgttggataaaagctttctgcaaagggtaatcttagaagacattatgtaacttttactctatgttaaaaaattatgagattatataagtggtggtagggatttttgggtgaatttaaacaccttgtaattaatagtttttcctggctaatgcattattttgaaagaaactggttacttattttcctgactctaaataacttgtagattttgcagaacaaatttaccggaaatctgcattaatagtttttgtaattaattaattacaaaactagtaattaatagtttttcctgcctaatgcattattttgaaagaaactggttactcattttcctgactctaaataacttgtagattttgcagaacaaatttactggaaatctgcattaatgttcaatttaattttatttatttttgtggcatttgataactattcaaaaacaatagaagatggaatcctttgtaagggtaaacatttgacctatgataaaacgtgactaagatgagggagagaggaaatacattaagagagtttcgatctttcaaaatgccatacagttttctgcttttctctctgatattaggtatgaggttaatttccaaaatggaatagaatgtggtggtgcctatgtgaaactgctttctaaaacaccagaactcaacctggtatgtaattcccatttctggaatgtggctggacacccactattaccttgtaagaattttgtaattgggccgggtgcagtggctcacgcctgtaatcctagctcccagcactttgggaagccaaggcaggcggatcacgaggtcaggagattgagactatctggctaacatggtgaaaccccatctctactaaaaatacaaaaaattagccaggcgtggtggcaggcgcctgtagtcccagccacttgggaggctgaggcaggagaatggcatgaacctgggaggcggaacttgcagtgagccgagattgcgccactgcactccagcctgggcgacagagcgagactccatctcaaaaaaaaaaaaaagagaattttgtaataattgtgaaaataaaggcttcctcccctgctgtttaactcttttgatgagttgggaaaattgactttgacgctaacgtgctttttatttgaagtgtaaattacaaagttgttaccaactgtttttatctgaatttctggttttgcttctgtgtaagttttagttttggcaagcttatttctttgttttatgaggaagcaataactgtctagatgtgtgcattacttttttttagacacttaaacgttattttaaatttactgatgattgctggttattcctttttactaaacaaacttgtagttagcttttcctttaactgtcactaatatatttggaattttataagaggaattatcatacacttttgaaacgttgcttttgaacactttgagtacagtgacttcaaataatccttttttgtttttgaaggatcagttccatgacaagaccccttatacgattatgtttggtccagataaatgtggagaggactataaactgcacttcatcttccgacacaaaaaccccaaaacgggtatctatgaagaaaaacatgctaagaggccagatgcagatctgaagacctattttactgataagaaaacacatctttacacactaagtaagaaaaagcattagtttgggggcttatggtattacatatatatcatccatttaatttaaagattgtatatctggccgggcactgtggctcacgcctgtaatcccagcactttgggaggccgagatgggcagatcacctgagatcaggaattcgagaacagtctggccaaaatgttgaaacttcacctctactaaaaatacaaatattagctaggcatggtggtgcacgcctgtaaccgaagctagttgggaggctgaggcaggagaattgcttgaacctgggagggagccaagatcattgtgccacagcattccagcctgggcgaaagtgagactcaatctcaaaaaaaaaaaaaaaggctgggcgcggtggctcacacctgtaatcccagcactttgggaggccgaggcgggtggatcacaaggtcaggagatcgagaccatcctggctaacatggtgaaaccccgtctctactaaaaatacaaaaatattag

SEQ ID NO: 119107 - DNA, 1187 bp, Homo sapiens
ttaaaaagtagaaagtagaatcatgagtggacatgcgttttaataaattggaggtttgtgtaatttcagtaacgtaataataccagctctattaaaaatgaagaaatggaccttttgtactgggaagtagttgtaagtccacgtatttgtcttctcactggtgtatatgtgtaagcccaataattgtgttagtttatgtagtttcttgttttttttgttttttttttttagtgtctataagtcaagtctttggtgttaaagattttaactatcatttgctgtaattcttagaaagccgagggactaatcatttatgtttcgtgcataaggaaatgggcgttagcttccccaagaccccaggagccaggcattgttcttaccccaaagcctcaggtcagacttctgctgcttcacgttagaagtcatgatcttttgtattatggtaaagggagcttggaaaattaagtacttttaattccatttaatgtttctttcagtcttgaatccagataatagttttgaaatactggttgaccaatctgtggtgaatagtggaaatctgctcaatgacatgactcctcctgtaaatccttcacgtgaaattgaggacccagaagaccggaagcccgaggattgggatgaaagaccaaaaatcccagatccagaagctgtcaagccagatgactggtgagtcttggggaactgtcttcaagtgtaagggagcatttcatatattccatgtggcttgaacaacgaaatgttggttgagtaagctctgataatttcagtaatccatgatgcagtctaatctgtagggaaaatatagagtactatagctggaaaggggccatagtgtaatcatctggattgactcaccattttacaagccacagaatgccacacttgataagagtttgtctgtggtgacactgttggtttgtggcagaatctcaggtcctttaacctggctactccagggcttctgtgaactcacatttaaagccaaagttctgaaatgctaaattttaatttgaaaaataacctttttcctatttaaacaacagtcaattctctgctgtgggttgggtggtagaatacaaagccacaaggacaccaccatctgcctacacagagcttgaagtccagttgtgaggcatgatgttggcatgtggtatcgtaagggttca

SEQ ID NO: 119108 - DNA, 2262 bp, Homo sapiens
attacaggcatgagccactacacctggcttaatttttgtattttttggtagagacagggtgtcgtcatattggtcaggccggtcttgaactcctgtcctcaggtgatccacccgccttggcctcccaaagtgctgggattacaggtgtgagccaccgcacctggccttgtgtatttttttttttttactagagactgggtttcaccttgttgcccaggctggtgtggcctcaagtgatcctcctgccttggcctcccaaagtgctgagattacaggcatgagccactctgtctagctatagatatatattttcatttctcttgggtatatatacctaaaagtggaattgctgggtcatgtggtaactaactttttgagaaactgccaaactgttttccaaatgagcagtaccattttactttcccaccagcagtgtatgagggtttcagtttctctgcgttctttccagcatttgtttttatgagtcttttttattagagccaacttggtactaagtggtatcgttttgatttgccatttccctgatggctaatgatgttaagcatcttttcgtgtgcttattgtatgttcatattgtatatttttacattcgtatgtcttctttggagaaatgtctattaaaatcatttgcccatttttaaattgggttgtctttatattattgagttgtaaagagttattttactaggcccttagcagatatatgatttacaagtattttctaagaggaattattttaaattttgagattaaaaacaaatttttttagaatactctgttctgatccacaaagtggtactatactgtgaccagtgttgtcataactggctttttcttttgtatttaagggatgaagatgcccctgctaagattccagatgaagaggccacaaaacccgaaggctggttagatgatgagcctgagtacgtacctgatccagacgcagagaaacctgaggattggtaagaacttcagttaactttttttaattacctggtttttttgtttgtttttttttttgagatggagtctcactctgtctcccaggctggagttcagtggcgcagtttcggctcactgcaactttcacctcctgggttcaagtgattctcctccatcagccttgcgagtagctgggattacaggtgtgtgccaccacacccggcaaatttttgtattttttgtatttttagtagagacggactttcaccgtgttggccaggctggtctcaaagtcctgacctcaagtgatctgtctgccttggcctcccaaagtgctgggattacaggcgtgagccaccacacccagcataagttacctgtttttattgaagtcaatcttaatacttaaatatagccaagttccctaatttcagggtagaatttgacaattttaattatattttcttcttttttaaaaaataaatttttcctgaaaaactgttattactggaaatacaggagaagctggtctgggatactgtgaaaacatttcagcaggatcttggcagccctgggccagccagctgttcatagtcctgcatcacagaacctgtttataatttgttgtttgtacctccgtagggatgaagacatggatggagaatgggaggctcctcagattgccaaccctagatgtgagtcagctcctggatgtggtgtctggcagcgacctgtgattgacaaccccaattataaaggcaaatggaagcctcctatgattgacaatcccagttaccaggtttgtgcctcttgatggttgagttgctttcattaatctgtttgtattcagatagaagttttatctagagtaaggctgccaggttggtcattatattcaagctgttgaattaaaagcagaaagtagacttcctaagttgaaagagagcttaatgggttaggtattgcaaagataaacctagaaactggagtgaataactttctttaactttatttatttatttatttatttatttatttttgagatggagtttcgctcttctacccaggctggagggcagtggtgtgatgtcgcctcactgcaacctctgccttccggtttcaagcgattctcttgcctcagactcccgagtagctgggattacaggtgcctgccaccacgcctggctaatttttatatttttagcagagatggtgtttcaccatgttggccaggctggtctcgaactcctgacctcgcgatccgcccacctcaacctcctaaagtgctgggattacagg

SEQ ID NO: 119109 - DNA, 2978 bp, Homo sapiens
ctcctgttggtggccatttaggtggattgtcacttttgctttcagagtcactgctgctgtaataatccttgtacatgtctgggtgtatgttgtgagtatttctctaggtagttatctagaagtgaattgctggttgatgatcatgtgcgttttattttaaatcaccactgaagaagtacgtactgacttatgctcccactctcattagcagttgctaagagtggaggctgttgaatgggccaggaacttgaggggttggtttggaccaaggtcatgggtgacagtagaaattggaagtagttggaatcctgcagtcttagaggcagagtgcgtaaaataatctgtagcatttgttatttattttcctgttgcttatttcaagtttcatgaagttggcatttctctccattgttcatgcaaaatttctcttacggtagattcaccataaacttttgttgatcattatctgaaatgattttctgaaacatttttttttctagggaatctggaaacccaggaaaataccaaatccagatttctttgaagatctggaacctttcagaatgactccttttagtgctattggtttggagctgtggtccatgacctctgacattttttttgacaactttatcatttgtgctgatcgaagaatagttgatgattgggccaatgatggatggggcctgaagaaagctgctgatggggctgctgaggttcgtgtttgctgcttgtgcatttgtgtctgttattgtaaggagctgttattttgtgaaagtctgtgttaaggttttttttcttcatttggcaatattggcataaaaagtataaccatatgcctgcaaaagacacaatattgggttttggggcatgatttcattagtctaatgtagtggctttagagtctgtttgtgttcagggttttttttttattatttgtctgggtatatatttcgaaatttgtcatttaggctatattttaatacactcttatatgttgaatctcggtttacactacatacagaattttcaaacaactggtcatgtggccgatttaagaattggagagccagggatactgagataagaaattcactggatcctgaggttaagggagccttttgcaggtgatgtagaagccagcttttgcacctatgagagtgaaatcatcttgattataaggagagcaagaggatggaggctttctctaatttcttttttacattttatgagcattttctctgaaaaagaaggtcctgcgtagtgccatgccataactgaactgcagaaaaacagcacggcctatgtttggtgtcaaaagctggaactttcaatcagccctgtcttgtttttcagccaggcgttgtggggcagatgatcgaggcagctgaagagcgcccgtggctgtgggtagtctatattctaactgtagcccttcctgtgttcctggttatcctcttctgctgttctggaaaggtaggaagtttttttttttagaatcaattttagagacatcactctagtgattattaaaaataactaagatatgttgcctgaggttttctttgtagtggctcagtaatgaccaagccatgtttggtgttgacttcagaaaccttacttactgttcctcagtggccgtttattgtgcccagatgggagcaggatttatagccccttggttgctattattatttatcctaatctgttactctccatagtgttcggcagcaactttctaaaaaaaaacaataaacttagataccaaactagccacttgggcaataatcagctttgcctgctggcatagctatttctattctttgtaattcagtctttgattcctcattatccattctgccttcaccttccccactctcaaaacagtatgttggggtaccacagccttattgttagtttttcttgtttagcctttttttttttgcatgctatcataaaaaaagaaagtcttattttggactctacttctgctaaatgaggattatgcttcatctggcattcatagcactttgtaactggatcccaagttccttttccagcctcagcctctgccactattctgtgtatcggtgcctcagtcaccttgacttttttgacctttattttcctgcctggcccttttgtttttattgttctaccttgaaacacacaagcacatgtgcatacacacacgtacatacacgctcttcagggtaggaattacatcctattcgtttctgtatatctatccctgtatacagcctggaacagaactttgcctgtaggcattcaggaattatataacataatacatgaacatgtaaacaaaattgtactttggggaacatttcagaaacagaccagtggtatggagtataagaaaactgatgcacctcaaccggatgtgaaggaagaggaagaagagaaggaagaggaaaaggacaagggagatgaggaggaggaaggagaagagaaacttggtaagaaacagagtccagaaaatctgctttaagccaagaccctacgatgttgttaaacctttacagtcaagttaaggattgtttttagccaggcgtggtggctcaagcctgtaatcctagcactttgggaggttgaagcaggaaaatcacttgagcccaggagtttaaggctgtagtcagccaggatagtgccactgcactccagctgagcaacagagtgagaccctgtctctctctctctctcttttttattttttaagacaaggtcccactctgtcactcaggttggagtacagtggcacagtcacagttcactgcagccttgaccttataggttcaagtgatcctcctacctcagcacccctccaagtagctgggaccacaggcatgcgctaccatgctcagctgtttgtttgtttgtttgtttattgatttatttatttgatatggtctggccctgttgcccaggctggagtgcagtggtgtgatctcggttca

SEQ ID NO: 119110 - DNA, 1081 bp, Homo sapiens
tccggaggctgaggtaggagatccacttgaacctggaggcagaggttgcagtgagccgagatcatgccattgcactccaacctgggtgacaagcaaagtcgatctcaaaaaaaatagtggccgggcgcgatggctcacgcctgtaatcccagcactttgggaggccaccgaggagatcatgaggtcaggagatcgagaccatcctggctaacacggtgaaaccccgtctctactaaaaataaaaaaagttagccgggcatggtggcaggcgcctgtagtcccagctattcagaacactgaggcaggagaatggcgtgaacccgggaggcggagtttgcagtgagccgagatcgcgccactgcactccagcctgggcgacagagcaagactctgtctccaaaaaaaaaaaaaaaaattgtagatctagagatgtgttctaatgctaatatataatcaccaaaaataataaggttttgctcagttgtttaacttctgtcttagaagagaaacagaaaagtgatgctgaagaagatggtggcactgtcagtcaagaggaggaagacagaaaacctaaagcagaggtaaaggaaaggggtcacacattttgttttaccaagctgaaggtacatttatgtaaagggaatattttaatagggtagtttacagtggcttatggcagtaaaaattctgttaaagccaattttgttgaagtgggattctttgtgatacaggtcagtgttttgtttgataattttaagctacatattaatctcagaagtatctttttagctgaaaatcattttctgaaataagcagaaggttatagggggaaaataaaatgcttgctaagaaggaaacttcgggtcattaacagtctatttgcctctcctcactgtgccctgaaaagtatttcttatacaaatcactgtgttctaaactttttgtccccgttgtccatagatgggttcattcattcatttaactgacatttgttgagtgcccattttgtgccaggcattgtcagtgagtaagacagacaaagatactctgcctttagggagcttaaattctacttggggga

SEQ ID NO: 119111 - DNA, 2858 bp, Homo sapiens
aactccctcacacgttaaaaagttgctggtgcatttaaaaaaagggaatattttcatagggtaatttacaatcttagcaacttgtgatagagtacagagcagcagccttggagtcagtctacttggatagccttccatcttcatgaatccttggtttcttatcctcagaatggggctagtgtgccataggccagtagattgtttgggattaagcaagattaagaaatcacagtgtctgatccttttttaagaaaatgtttatgggttagattgagaaaagtgtatgtttatagaaaacaataaagactaaactgaattagagtaggcataattccaccacctctgagacaaccattcttcttggtgcattttcttctcatcattttcctcatttttttcctcaaataagttaccctcagtctggctgatcttgaaaatatggtgaacttttattattttttaaatgtgctaattataatgaatttcttttcaatcaataggaggatgaaattttgaacagatcaccaagaaacagaaagccacgaagagagtgaaacaatcttaagagcttgatctgtgatttcttctccctcctcccctgcaagagtggtcctaggagaggacctggcacaccttaggttgacattcagaaaacttcaagacatcaccatcagcaggctccagttgaacactagtctgtgtaactttaaacatctagcagtaaatacttgcagttgtgatataaaggaccctgtttctgtagaaaagaaaacatttaacataatggttgtgaaatgtaacatgaagcaaactaacttttttttttttaacatctttgtttttaaaatagaatgatagaactttgccagtctttaagatcttggcttaatttaatgtattaatctgtttgtgcaaacataataccaccatttaaaaatgttagggagatgagttgcagtttttataatagattttttttaaagtttggtattgtaaaacattcacacctctgtccctcaaaattgataattacgtttaaagtgcagtcatttgtggttagaatcttgttttgtttgcttccattattgagttcctcctaaggaaattgaggagagggactgaatagaagcccaaattcatataaaagttgcgtttaagttgtattaaaaatagatatataagaaaaaattctttcacttgatgtttgttagaccagaaagtgtgtgtgttctgtagctcagttcccagacagctttttaggtagtggaggaggtggcttcatgtggcacttgggcatttatattccacttgggagggtcaggctgtggccttctggagcaggtggcttgttaaggaatgctagcagggcatggcacgtgagctccggaatagatgtcttcatcacttcttccactgtgtgttgacactgttttccttacctatttcctcagatccccagctttctcctctgctatgcattttcttcacagtgcagcttgcagtccgttgctgaaaatgattataagccctgcataatgttaagctttattgtgattacgtgtatgtttcttctttcttttaagcagacccatacctttccagggtcaaagtacagaatagaatacattgatacaaagtacagaaaaatactttgatttttatccatttcttttactctgtgtaaagacttgagaagtctaattcacaggcaaaccaatacagaattgactgcagttgaacagactagaagtatttgtgggaggagtgacatgaagcatgagttatctgattttttttgtagctgctatatattttaagccttcatttgcaattcatgtaacagttgtgtcataaattacacaataaagcagtcctgttcaaatttttttttaacgtggcttgtagaatttttaaaaaagtgatcttaggtttgttttttcatgcgggatgcagatgggtgctatcagagcctctcccacaccactatagtgtaataatgttattattactctacactgaaacgtattcagagttagatattattttagcttcagttgttctttagaggctttcaaatgtaccgatgatactgtttcttgcactgaatatataaacactccacagtgtttatattgggaagatattgggaaggaaatatatttgtaaaagatgaaggctgtatctatttttttttctttttaaagtttgttcacttaaattcttttgaggatgggatgtatttttcttgctgttcagtgctttttccttttcatctgttgttctgtggtcacagtgaccttagctacatagcagactttcccaaatgtattgattacaaataaacagttgttacttagcaagacctgaaaatatgtctgcaggtttctccttgaagcaaatgtgtgggatcattgcatttccagaaatctgcctccttcaccctccgttgacagtatatgtcatgcctcactttcttctagctgagctttaaatcattagagcttaaattgtcagatcgttcattgcctttccagggttatttagtaaagtttgttgaaaacaaaaacgccttttcttggttcttttttcagttattttgaaggtccagcatcctgattaaatgtctgacacattaatgaatgaccagcagcagctttcagctcttaaaaagacacttatattttgattttacatgctggttacctgttccattgttgtcaaatgcccactctccatcagatgtgttcctccattttcttatccacaaagtactcctcacttttcaatttgtcatgttactaaatggtgttacattaaagccctgtgttaagtgtctgcttttgactgaatttcttcat

SEQ ID NO: 119112 - DNA, 1068 bp, Homo sapiens
ctagttttagtactaacactgtttgattgctccagtccctctactcccctttgcctattagttttaataatggggcataatttgtcttggtttggttttgttgagtaactcagttttacctaaaggactgtttttggtccggcgcggcggctcacgcctgtaatcgcggtactttggcaggccgaggtgggcggatcacctgaggtcaggagtgggagaccagcctgaccgacatggagacaccccgtctctactaaaaatacaaaattagccgcgcgtggtggcgcatgcctgtaatcccagctactggagaggctgaggcaggagaatcgcttgagcctggaaggcggtggttgtggtgaaacgtcgtcctttgcatttccagttccctctaatggagctgcactcttgcatgcttttgctcacatcttctggactttttttttaagtagtgagtaatactgcacttttgaaacttgctcgggcttttacaaataggtggaaactaccagtgattcggaatgttgcaagaggaaactaccagctcactagacgattctgaccaattatggggctggatacaaggaataaggtcaaagtaaaacggctgacattaaaatagcgtggctacttagagtttatcaaagtcgaaatttaaaaaataatttaaaaaaaaggtctctgtactgccaggcgggcgacagggactggccagctgcgccgcactcgcctgccagattccccttttctcggggtagccggaagggcctgccttcagcgggtgctgtgcaggaaaccaatagccgcctcttggacgggctcctgtcagtcacgcttagctccgcccccaggattaaggcccgcccaggggcttccctccgcccttcgcttgagaattccttttaaataccgctctggcgcccgagcgcgcctcttgcgtgctcgtccccacgccctcgggcggccggttcttccttctctgattggccagggcccctgctcatcagtcgtgatgcacaaggtctcttaccgaggccccgccttcttccgagaggcccgaaaacaatt

SEQ ID NO: 119113 - DNA, 1925 bp, Homo sapiens
gtgctgcccacctgccccatggcggagttcgcgctgccgcggcacagcgcggtcatggagcgccttcgccggcgcatcgagctgtgccggcgccaccacagcacctgcgaggcccgctacgaggccgtgtcgcccgagcgcctggagctggagcgccaacacaccttcgccctgcaccagcgctgcatccaggccaaggccaagcgcgccgggaagcacaggcagccgcccgccgccacggccccggcgcccgccgccccggccccgcgcctggacgccgctgacggccccgagcacggccgcccggccacggtgagtagggcgcgggaaggcgcttgtcgtggcggcagccccctctcccgaaaacgcttcctctgacgcggatcgggccgctgggagacttccccaggcgtccgcgactcctggatctggctggagagagggtaacatggcagggagctgagaggttgtcatctttgggaagtggcacggtggcgttactttgggaaaacagcgccttgagggccttgcaggaggcccgacctgggaaggctggcgaacgctaaccggagggtttttcttccagacttgattccgggatgttgagatctttattcgaaatagactagcattcgagtcgcctgtgatggagggagttcctgcaccgtaggcctggcctcatttattctgcaaatgtttattgggtccttgccctttacaagatcctgtgctgtgagcaggatcagggctttcatgtggaaataagtcggcctttggttgaccaactgaaactcctctgaatggaaaatcaagaaatttttggaaaacttagtaaaatgttcaatgagttgcatataagtattccttgtttaggtagcctgaactttgtgaacttgagattcctgcaatattgttgacaattctagttttaatttatcaggcctgtttaaaatctctgatgatgttagattgttggtcaattattactccctttgggctctcagtaaatgttcctgaaatttgttggttagaggtttttcttcctgaaacagatttacaaaagagacaaggtttttcagtggttttcttggggattttagtttaaaaccaatgttaaaatctaatttgttatgtgtatttttaaattcatacctttattatctctcacctgggctattgcagtgcctgtccctagctaactaaccagtctgtaggcatttagtttctttctcccttattctcgaaatgctggaaatccttctcttgcttgaaaggatgaagttcaaagtctttagtttggcatttgggaccagtctgacctaacctatcttttaatgtccctcacaggtcctctgctctggttgaattatttttctcattctcttccacactagcctcgattgctgggttagaagaaaaaaaaccactcagatttcattgcttattgtatcaactggtcaagccttctcatcttcacttttctcatctgtaaactaggggcatgttgggcttattatcgccccgtgttctttccctgccctcccctcactctgtcgcccaggctggagtgcagaggcacagtcatgtctcactgcagcctcaaccttcctggctcaagactcctcaatcctcccgcctcagcctcctcagtcctcccgcctcagcctcctgagtaactgggatcaaccacagctgcacatcaccatgcctggctaaataaaaaaagttttttttctgttagagatggggtctcactatattgcctaggctggtcttgaactcctgggctcaagtgatcctttcttccaacttgatctctgaaagtgctgagattataggcatgagccaccgcaccgtgccgcccccaggattcttttaagaataaaaagaaatgagtgtggacatgaaaatacagtatttcgggg

SEQ ID NO: 119114 - DNA, 1054 bp, Homo sapiens
acaggtgctggccaccatgcccagctaataatttttgtatttttagtagagatggggtttcaccatgttgaccaggctggtctcgaactcctgacctcagataatccacccacctcggcctcccaaagtgctgggattacaggtgtgagccactgcacctagcctatttatttttttttgagacagcgtctcgccctgtcacccaggctggagtgtagtgacatgatttctgctcactgcaacctctgcctccccggttcaagcgattctcctgcctcagcttcctgagtagctgggattacaggcgcacactaccacgcttggcttattttggtatttttagtagagacagggtttctccttgttgggcaggctggtctcgaacccctgacctcgtgatccacccacctcggcctcccaaagtgctgggattacaggcgtgagccaccgcgcccggcctatgctatttatttttagcacatggtcacttgttactttaggtcgcatcttttcaactagactgtcagctcttggaggcagggagggctcacacttgggtagtacacatctgaggtgcatcttaagtgcctgtttgttgaattattgatagaaacttggtagtgctttactcagtaatctctcctcctatacactaacttcaaaaagcaagttgatgtaacttcatgagccacctttcatggctcatagtaacaactcttgtaaggagggacttttgttatttttttttagggagtttcgctttgtcgccaggctggagtgcaatggtgccatcttggctcactgcaacctccgcctcccaggttcaagcaattcccctgcctcagccccccaagtagctgggactacaggcttgtgccaccacgctcccctaattttttgtattttagtagagacggggtttcaccatgttggccaggatggtctcgatctcctgaccttgtgatcctcccgcactggcctcccaaagtgctgggattacaggcatgagccgccacgcttggcctgtgtaaggaaggacttttaagagtagttc

SEQ ID NO: 119115 - DNA, 1056 bp, Homo sapiens
ctcccactctctgcctctttctctctctctcagacttttattctctgaaccacctgagagtatgctgcacacctcatagctctctgctgccaaaccaccccatgtgtaccttttaagagttaagaaagctgttaattttgtagaccaaactcttgtaagaattatgaaataacaaattatttccaggaagtagatatttctgaatataaaacagatactgtactgtaatcatgtggggcattagtttttttaaaaagatgatcagtgtggctttaggatctcatttcttcctgtaatgcctgagaccttgtctagaaccctctttccttttttgtcttcagtatctcccttcccaactgagtctttcccttcagcttgaaattatgaacaaatattctccacactgacaagtcctgtgttttctcactgtcaaaatagtattccatattcttctttccctttgcccttcccacttgaacttctcatttactcattagcctatggtaatatgccttctacctcttctattactctgaagttgcctccgtaaaggacaccaaggatggacttgccaaatttattggcatcttttttttttttttggagacagggtctcactgtgttgcctaggctggagtgcagtggcaccattatggctcactacagcctcaacctcccaggctcaagtgatcctcccaccacagcctcctcagtagctgggactacaggcgtgagccaccacacccagcctcattggcatcttagtcatcattcttcgtgacttcttccttttcttagcttctcctctcttctgatttccttttcagctttctgactttttttctcagtctccttactattttcccttattaattcatgcagcaaatatttgagcacctgctgtgggccagagtacaatcagccctccgtatctgcgcattctgcatctgcggattcaaccaactgtagatagaaaatattttttggaaaaaaaagtaaaaaaataacagtacaacaattaacacaaattataatatgcagctcagcatggtggct

SEQ ID NO: 119116 - DNA, 1062 bp, Homo sapiens
aacacatggttaaaataattcaagtgagagatatgtgtgttaatgaatggagagaagtgggtgggttcaagaaatattaaggaggtagactctacaggacttgggtaccagttgtatgtagggactaaggaggagcgggagggaggctggtttctggtttatgtgacagggcggctggtagtgacagtcttatgtgggaacagaggaaaggaaacaggactggggagaggctggcctcagctttggacagatgtcatctgagtcatcactcaagtggacaggggctcagtaggtcttcggatagacagaagtaagagctctgcagaggtggggcatcagatggcacatttattcacagacacttatcaagtgctgggcactgtcgaaggcactggggtctctgcttggcattctagtgtcgggttaggccctgacactagatgagtgcctctggtgaggggatcagcaagaaagtactatggtgtgggtggtaggtgatgtggatgatggaggagataagccacctgaattagaagctgagtcatccccagaaaagttagagggaagaggtgctctgggcaaagagaagagcaggtgcagaggccccaggcagcactgagcaggcacatttgagaagctataagctgtaagccagccgcatgaccccagcatgctgcacagcagggagggctatgagggaagttggaagggacaagggctgagtggatcagcgtttggttcccagacagttgggtttatttgagtgtgatgttcagtcatgggaatttgaaggcatgggaatgtgtgaaatctctcaggtagactatgtagagtaaaagggggagaggactgtactatttgatagaagggcaggagaaggggagacttctcaaaggatactagaaacaaccaaccataaaagcagaagaggatacaagaaaagtggtaaagaaaaagggaactttaaagatggaagcaggccgggcgcagtggctcatgcctgtaatcccagcactttgggaggccgaggtgggcagatcacaaggtcaggagatcgagacc

SEQ ID NO: 119117 - DNA, 1102 bp, Homo sapiens
tcaaactcctgggccgaagcgaccctcctgcctcagcctcctaaagtgctgggattacaggtgtgagccattgcacctggcctccttccatcttttttttgagacggagactcgctctgtcacccaggctggagtgcagtggcgcgatctcggctcactgcaagctccacctcccgggttcatgccattctcctgcctcagcctcccaagtagctggactacaggcgcctgccaccacgcccggctaactttgtttttgtatttttagtagagacggggtttcactgtgttagccaggatggtctcgatctcctgaccttgtgatctgcccacctcggcctcccaaagtgctgggattacaggcatgagccactgcgcccggcctgcttccatctttaaagttccctttttctttaccacttttcttgtatcctcttctgcttttatggttggttgtttctagtatcctttgagaagtctccccttctcctgcccttctatcaaatagtacagtcctctcccccttttactctacatagtctacctgagagatttcacacattcccatgccttcaaattcccatgactgaacatcacactcaaataaacccaactgtctgggaaccaaacgctgatccactcagcccttgtcccttccaacttccctcatagccctccctgctgtgcagcatgctggggtcatgcggctggcttacagcttatagcttctcaaatgtgcctgctcagtgctgcctggggcctctgcacctgctcttctctttgcccagagcacctcttccctctaacttttctggggatgactcagcttctaattcaggtggcttatctcctccatcatccacatcacctaccacccacaccatagtactttcttgctgatcccctcaccagaggcactcatctagtgtcagggcctaacccgacactagaatgccaagcagagaccccagtgccttcgacagtgcccagcacttgataagtgtctgtgaataaatgtgccatctgatgccccacctctgcagagctcttacttctgtctatccgaagacctactgagcccctgtccacttgagtgatgact

SEQ ID NO: 119118 - DNA, 1048 bp, Homo sapiens
gggcgcgcgccgccacgcctggctaatttttgtatttttagtagagacagggtttcactatgttggccaggatggtcttgatctcctgacctcgtgattcgcccgcctcggtctcccaaagtgctgggattacaggcgtgaaccaccgcgcccggccacaaccccgttcttcacacgccatccacagctcttccctatctggccggaactagctcttccattttatctctaaccagctggccactgtctgcatatcccggccacggccagtctctgaaagttccccacacagatgcctttttctgactctgcctttgcacacacttgcctggaatgctctttttccccaaactgttaaattgctaaacttctgtgcttttaaacctagtggattcatcactgtctctctcaagccttgcccaaggcttcccagatgccagggcttccagcctgcaccctgcagcctgctggccaggcgcgccccatcgcgccccattgcgccccatcgtgccatgtgctaactttgcctcccagaggcggatcttgcgttgggtccacctcagagtccccggtgcccaccacagggtccccacagagcagaaatttggtgggtgcttgaaagttagatgaagtaggtcactggttttctctcccctggggctttgcccttcctctgtgcctttctgaaccccatcattgtttcagagaccaggcctccattccacctgtggaaggctttctgccccatggcccccggggccctcttcccagtgtgccgtgaacgtgagacttctggtgctgcggctcgagtctcagagggacccagtggtggtcgactcctgactgccagactcttctctgtcttgtagggtcctctgctgccgtgcccggcatgaacaccttgggtccatccaactccagctgtcctcgagtgttccctcaggctgggaatctgatgccaatgggccctggacatgcttcagtttcctctctccccacaaactcaggccaacaggaccggggtgtggctcagttccctggctcccaa

SEQ ID NO: 119119 - DNA, 1004 bp, Homo sapiens
gtctgccgtggaatgtgggcatgtccattggtggcctgtggcgggggctgggcaactatctgggttatgccagaagccatgccatagaggctgctctgaggcatgttttgggagccagggaactgagccacaccccggtcctgttggcctgagtttgtggggagagaggaaactgaagcatgtccagggcccattggcatcagattcccagcctgagggaacactcgaggacagctggagttggatggacccaaggtgttcatgccgggcacggcagcagaggaccctacaagacagagaagagtctggcagtcaggagtcgaccaccactgggtccctctgagactcgagccgcagcaccagaagtctcacgttcacggcacactgggaagagggccccgggggccatggggcagaaagccttccacaggtggaatggaggcctggtctctgaaacaatgatggggttcagaaaggcacagaggaagggcaaagccccaggggagagaaaaccagtgacctacttcatctaactttcaagcacccaccaaatttctgctctgtggggaccctgtggtgggcaccggggactctgaggtggacccaacgcaagatccgcctctgggaggcaaagttagcacatggcacgatggggcgcaatggggcgcgatggggcgcgcctggccagcaggctgcagggtgcaggctggaagccctggcatctgggaagccttgggcaaggcttgagagagacagtgatgaatccactaggtttaaaagcacagaagtttagcaatttaacagtttggggaaaaagagcattccaggcaagtgtgtgcaaaggcagagtcagaaaaaggcatctgtgtggggaactttcagagactggccgtggccgggatatgcagacagtggccagctggttagagataaaatggaagagctagttccggccagatagggaagagctgtggatggcgtgtgaagaacggggttgtggccgg

SEQ ID NO: 119120 - DNA, 1077 bp, Homo sapiens
tagctgggtgtggtggtgggcacctgtaatcccagctactggggaggctgaggcaggagaatcacttgaacctgggaggcggaggttgcagtgagccgagatcgcgccattgcactccaatgtgggggacagagcaagactccatctcaaaaaagaaaataaaaaaaaagtttttttggtcaaaagttacacatgcaaacactacgtggcacatttgtagttaagagaaatgtaaaggtgcagtataaatatagccgcagcctgaaagacgaggccaaatgactgcaggtcctgaagcccagcttgcagcaggtcagcagctacagctgcctccatggctagttatgaatttttttcagggcaaatgatgggagggttggcacataagtgggggaggaaaaatatggaaacaaatactatgaagacaacaagcaacgtttggctaccactgatgggtcacatatactgaaatgagtgacaaaaacattctgggatgtggctggaagcatggtgcctcccaagtggcatcctctgcttcactcagactcatgatcctccaacaacaaaaccacctcctgctcgcagattctttggacaaaccataagttaagcgtgagtggcaccccagaacaatatgtgccattttctaccactagaaagaagacaggagcgggtcccatcttcaaaacctgacaagcaaagacaatgaaaaacagtttaaacacgcaaaatacagggcttttcatggcattgcactttgcttaccattaactggattaaaattgtttgacaaaaaacttataactgcatacagttgaccgtagcacatactgtactgccctgctgatctcacagccatctcctgtagttactgcagtggacttgagagtggcgatgatctgcttaaagcgccatgcgtctcatcagctccaagggagcagtttgtccctccagtaaattgtagatcacagtaaaaagggatctctcggctgggcgcagtagctcatgcttgtaatcccagcacttggggtggccgaggtcaggagatcaagaccagcctagccaatatggtgaaac

SEQ ID NO: 119121 - DNA, 1096 bp, Homo sapiens
cctagatcccggacacagatgtagtgccagggagcgatggtggccgcgtcctcagactctgcccactcagcctccttcctccctgaaacctgccccacagggcctgcctgaagggtgggatgcagcccaccacgcaggggttgacgctggtgccagtgggctgtgcccagggtgtctgtgtgcaccacgcatacatacctgcatgccccttggtcagttgtcacacacccatgtctctgtgcttgtgggtgtccaagtgtcttcgtgagtccaggccctcctgtcagccaagctctcatttcctccaaggcctgaatgtcctcccgtcggagttcatcccctcagtccacagcaggaagccaaagcctaacatcagcagcttctgaggaagtcccttggcagatgtgcagggcagggacctgggtcttggccccgggagccctccccgggtctcttggttcccacctccctccctctgagcctgcccaggctgtcagggccctgcctgggctcaagccagctcaagctgacaggagggccagccaagcccccacccctgctcgggccacccagcttccatcttcctgtctagctctggaggcaccagcatcaggagggaagcgaaagctcctccctgagcctccacagagccctaaggagtctctgatgcccactcaccaggacctctgggcggcagaaaggccggcagaaccattgcacagagaagaaatcagaacttctgtggagtggatcataggcagtgcacaactcagaccctgagcttgaacaagaaagtttatttagaaattattttatatttgagacaggatcgtgctctgttgcccaggctggagtgcagtggctcaacatgcctcactgcatcctcaaactcccgggctcaagcaatcctcccacctcaagcctctcaagtagctgggaccacaggctctaattttttttttttttttccagagatggagtcttgctatgttgcaggctggtctcaaactcctgggctgaagtgatcctctgcctcagcctcccaaagtgctgggattacaggcatgagccaccatgcttggctgaaattatttta

SEQ ID NO: 119122 - DNA, 1572 bp, Homo sapiens
tcctagataggaaccagcccaccttgcagcaggactcccaggagggtgacagcagccagtagagctacctcgtccttcatggtaccgtcggtgtggtggcacgggctgtgtgtgaaggcgagctggggaacgcttagccccgtctgctgctcagaggacggcccaggagaggaagagcagcctcggtgctctccccgccccatctcagtggagggggtgcacgggggtgtgaccataccacacagagccagggagccaggccaagccagcagggaggaaaccaaagtctgggcaggggagagcagctagctggagaccgcctcaccacttcctgcttgttcgtgccccttccttgcctagtcccgcgtggcagagcccaagctgtccatctgggtcagctccagctgtgggtgtgccccctgctgcaccaccccactttctccagggccttgcagacccccacatcatgctggagccagccccaggctcccggctaactcctccacccaccttatctgttccctgtccccatccaggctgttcctggcaacccctgccaaaccctcctctgcggaagcccttcccagtgcctttggcttcagaatggagtcccagcgcccccccagccacactgggccccacaagctctttctccttcaggaaacctcatgcctgccagccttagtcgttgtaggggttccatgcacaagggccaccctgccaggaggaaacctgtccaaggccccctgggtggcgggagggtcagcccttgtgggccatccctctcccaggcctctcttgggcctcccacaacagtcacctgctgtgtctttctgccccgcagccctcttgcctcaaggtaacaaccctccaccaccttcctagacggctgccctccccacactcaggccctgtggtctggacagtgctgactcctgccccttccaggcctgtgagatggacactgagccaaggctgactcaagatggtgagatgtagttctggaaacttccttaggactttgggacaggaaactcagagtggggagggggactacggcgggccaccctgaggacagagcccacgcagggccaggtggagaggaaaggtggcacccgaggactcctgcctggagttctgggtgtctccctcgccccgcctggagcgcccccggccgcccccctcgccctgcctggagtgcccctggccgccagccttcccagttgggcctaacggtcacttcctcttttggcttgagtgggtttgcggtggcttttggtcagaagtggcaaagtccagactgacccagaagcacgggcaggagctgggggaggccacaggccgtgctgcaggggtcgggccgcatggttctgccctcgcacctggtccttccttgctgccccaagctcagctccagcctgaggctcggagcctgttgggctctctcagaatcccttcttcctcctctgggtatcgcccctgcccccggaaaccagatatgccccagctgggggctctgtgagctcctccagggcaggggccagggctcaggcccggcccctgctttagacc

SEQ ID NO: 119123 - DNA, 1044 bp, Homo sapiens
gcggccgggaggaagtgggcgagcaggccgagcgcagccagcgccaccagcagccagagggcgcgcgcgctcgcgtacagcggtgccagcctgcgggcggcggtcagcggggaggtggcgcgaggaggcccgcttcttccccgccgcaaccctggccccacggggacttcctctggccgccgccagggctcgcccaccgaatccccaaaggcgctgggctccggcccgtcgcccgcccccagcttcggtcccgctccccaggagccccgcccgcccgcgatctttccccggccccgccccgctccccgcccggccctcacctgagctgcgcggagcgcgcgtagccctggaagtagcggaggcgcgcgaacaggtagaccaggccgcacagggccgccgcccctgcgagaggtacgcacgggcctggtgagcgccctgcgcgggtcccgggggtccagcgcgtgcgcccctgccccacaccccgaccttcatgaaagaagatgccggcgacccagagcgtggcgaggaacagcgggaagtactcgctgcagttcaccctgcggtgggcgggtgggatgagcgcgccggccgggatggtcctgcgacccggacccgcctggggctcgctccccgccccgcgccctcccgccgcgcctcactgggctcggtagacgcgctcgaactcgggtgggccggtggtgagcggcggcgacacgcggaaggccctgcgcgccgagatcacctgcagggagaagtaggctgggggaggagggggagcgggagtcaggtctggacacccgaagccccagagatgggagtgggagggatcctgcaatctggcccttcacttggccgtgtcctctcctccctaaggcggaaccccgccccctccccgcccgaggagacctctcgtctcacccatccctggcctgccctgtgtccctgacattcagcgaggagggcagggctgaagcctggggcgcagagaggccctgtcccaacctgtgagtgtatgggggagggtgagtgattcaggcacaggga

SEQ ID NO: 119124 - DNA, 1051 bp, Homo sapiens
gcttcaccggcaagttatcctcacgttcttcagtttccgcatctgaagtgggcctcgtaatggtagctaccttgtgaggactaagtcaggcagcccctaggagctcagggatgtttcctgtcaccatcctcccagaggaaggccctggtctctttgcacagcctgacagctgcctggggggccctcctggcgcaggcctggcctttctctgctgggccctgggtgctgtgctggaacgctgcccctgcagcagctcacaggcctgcctggctgcaggttcttcttccgcagtgggaacatcgagcacccggaggacaagctcttcaacacgtctgtggaggtgctgcccttcgacgtaagttcggtgggtgtggtgtgcactgaagccgggcctcctgtgaccacctgcctcagcccttgattctgcccccagaaccctcagtcagacaaggaggccctgcaggagggccgcaccgccaccctccggtaccctcggagccccgacggctacctccagatcggtgggtagggtttgggggagagcgtgggctggggttcagggacaccctctcaccactgccctcccacaggctccttctacaagggagtggcagagggagaggtggacccagccttcggccctctggaagcactgcgcctctcgatccagacggactcccctgtgtgggtgattctgagcgaggtgaggctgggcagggccaggccaggcacggggagcagccagggagaccctggcggagctcagaggccctgctgaccctgggtccggctcttccagatcttcctgaaaaaggccgactaagctgcgggcttctgagggtaccctgtggccagccctgaagcccacatttctgggggtgtcgtcactgccgtccccggagggccagatacggccccgcccaaagggttctgcctggcgtcgggcttgggccggcctggggtccgccgctggcccggaggccctaggagctggtgctgcccccgcccgccgggccgcggaggaggcaggcggcccccacactgtgcctga

SEQ ID NO: 119125 - DNA, 3254 bp, Homo sapiens
tggctgctccctggatggcggtggcctgcatgggtccccagttcggccatgggagccggcctggtgactggagtggtgaccaaggccgggacccgctgctcagcgtcggccccctggggcggtggagccctgccggccgggggctcgagcctgggggcgtcagacgccccgctccaccccccgcgctgttggggattttggcaaggacgcgccggggcgaacgctctggctctccgcgggcactgggtggtcaggcgggcactcgggttacactgacaccttgctgcgccaggtggtgggttcagataatgccctggaggagccgggcgagcgccggcgaggggagggagtgacgcgggtaaacaagcgcgggggtgcgggggactcgcgagcgccgcgacagcgcctgggagaagggcacggatcgccggcggaacgctccgagccaggtcgagtacagatgttttcccattggcaagtggacgagaacgttcttcagaagtgttggtgttggcacagaagccctgtttcctgctgcgctggtgtgaccagtggctgctgggggtggggttagggaggtggttgtggccaggagggcgggaggtggccaaggccggcccctgggagggtgcagtgctaggacctccctctggagcgctgccagcataccaggccctctcctattcttaaaaaaaaaaaaattgtgatgttattgagctgtaactgaaataagggttcacccatttagtgtacaagtcagtggttttcactattttcataggtttgtggaccatattcagtgtgagagcttttcatcaccttataaacgccatacataccttttatcaccctcttatccacatgcccccagcaacctcctttctgtatctattcatcttgcaatcctggacatttcatgtaaatagaatcagacaatgtagtcttgcaagtggtttctttcacttagtgtaatgtgttcagtgttgtggcacatatcagaactagttttttttggaggaataatattctgttgtgtggacaggccatgttttgtttacctgttcattagttgacagacatttgggttgtttgcatctttgggtgcctcacctgtgccctcggtggatggcgtggtttggtctgcacagctgtgctttaaagccatttcagctcatatgtatctgtcacaaatggagactacatacaaatacgtgtctttcagctttgttagggaaggaagcaggcagatgcccttgtcttctcctttactcccaagccactagaagtctaaggcctttgtggggctgggcccctcaggagcaggtcacaggcagggatctcccacagttgaagacggacatgggcctggtcggatggggaatgaggtggcacgtttctgaaaaggcagctggcccaaggctaaataagtgcagcagccaaagctgctgcccctgtgcacaggccctccgccccctgcatgtggctgtggtccagggcccaggtcggagcactcaccttccaggaggtgccagagcaagggggtagtcttgcctctcactcctgccctctgtggctcaagtaggtgtgtttgtttatagccctgtgagtgtccctttcatacttgcctcagcccattccagcagcttatgtccagctgagaacccctgggtgctcacgtgctgtcttttaaacaatctagatgaggacggggacttggttgccttttccagtgacgaggaattgacaatggccatgtcctacgtgaaggatgacatcttccgaatctacattaaaggtaaggggctgctctgggggctgcctgaagccagctcagcttgtactcagttccctgctgagtaaaaaacagggctcgatgttccaccaatgaaggggtcagcaatttgagggctgtttaagacagagacataggccaggtgtggctcacgcctgtaattccagcactttgggaggccgaggcgggcaggtcacctgaggtcaggagtttaagaacagcctggccaacatggtgaaaccttgtcgctactaaaaatacaaaaattagccgggtgtggtggtacatgcttctagtcccagctactcaggaggctgagacgagaatcacttaaacctggagagcggaggttgccatgagccgaaatcacatgactgtactccagcctaggcgacaaaaaaaaaaaaaaaaaaaaaaaaaaaaaaaaaaagacattttaagtgctgtgcctgacctgagaaagaggagtccatgttcactctagggatggggtctggtgccgtggtgcttgggttagggatggggtctggtgccgtggcgcttgggtgaagggcaaggccaaagctgtgcagacagggctccttgctgctgctctgctgcctgggccaaacagacacagggactgggaacctcctagcaggttcttggtggctctgctgccctcacctaagtggctgaattttgtgtggattccatgctggagagcagggccgggggccttgctggcagtgacagccccacagtgacgacagagggggaggactttagggggtcccaccctagcggctctctttacccttcctgtagagaaaaaagagtgccggcgggaccaccgcccaccgtgtgctcaggaggcgccccgcaacatggtgcaccccaatgtgatctgcgatggctgcaatgggcctgtggtaggaacccgctacaagtgcagcgtctgcccagactacgacttgtgtagcgtctgcgagggaaagggcttgcaccgggggcacaccaagctcgcattccccagccccttcgggcacctgtctgaggtgagcaggccctctgtgcaggcctggggtgggctcagggtggcaggaaccttgacccgctcactgcctgccgctctgctaattcctcccccagggcttctcgcacagccgctggctccggaaggtgaaacacggacacttcgggtggccaggatgggaaatgggtccaccaggaaactggagcccacgtcctcctcgtgcaggggaggcccgccctggccccacggcagaatcaggtgaggcttgtgttggaacctgcttctgattggtgacagtagtcaggcagcctgtgtgcagggcccttgtgcaaagcgtgtgtgcaaggcaagaattcaggataccccccaccttcctggtgccctacaatcacacaagaaccctgcaaagtggggtgtattctctccatttcccaaatggggaaactg

SEQ ID NO: 119126 - DNA, 1877 bp, Homo sapiens
gttccctgtggggccagcgttgggccctacgcagcgcctgcacggcccatccacctcccagagcagagctccggcgttgaggtgtgcgtgtgtgtcgtcgcacaaagcctctgtgtgcaggtgtcaggaggcacatggccttccatcactgtggctggaagcgcctgccacatgtggtattggctctccctgtacttagggcctggccccacctgccgtgtggcccgtgtcctgcatggttaggaaaaaggtctctttcgactttctggctcagaagctgactttagatgctagctgaggttaatgttttactgaattggagaaagagaaaggtccagtatcatgggcccaccaagaatgtttccagaagccacagagatttgtagctgggatatggggagaagcctctgactcatgggtttgtatcgtctggtcccatactggctgtgtgattgcggggtcgagctgggtagaacctagcacctgcatccacacgctgagtgccaccatccagacacttagctgcttgtggggactgaacgttgagatcttcgtgagtctgtagtctccacaggccaagctcctgcttgcaggtgcatccttgggggaacttcacggcttgctctttcctcctccgcctctaggcattgaagttgatatcgatgtggagcacggagggaaaagaagccgcctgacccccgtctctccagagagttccagcacagaggagaagagcagctcacagccaagcagctgctgctctgaccccagcaagccgggtgggaatgttgagggcgccacgcagtctctggcggagcagatgaggaagatcgccttggagtccgaggggcgccctgaggcaagcctgtgcccctcccgccacctgggaccacggccagcctagtgatctgtggcctgcacctccgcctcatcctcagcacctctgcagccccacttacaaacccgagggagctgctgctgctgcagtgatgtctgtgccattaaagtcacgctgggaacctgctagaactttgtagttacttggtctttgtgagtggccactgttccccctagacccctgcagccttaactgcacgtgtgcatgcgtgctccccgactgtctgccaggagccagggccatggtcaggcttggcctgttgcgcgtgtctcctgtgtgctcatggtgagttttgttccaggaacagatggagtcggataactgttcaggaggagatgatgactggacccatctgtcttcaaaagaagtggacccgtctacaggtgaactccagtccctacagatgccagaatccgaagggccaagctctctggacccctcccaggagggacccacagggctgaaggaagctgccttgtacccacatctcccgccaggcaagtgaaccaagaggttttgtacatattcctacctttccctttagagcatcctgccctcctctgatttcagcgacacaaacagaaggatgagatgttctccactgcagggctgtctgtaggtgtgggaggttaggagttggttttgtcctattatgtgtaccctgagcaatagcgagtaagctctgctaatgcagttctgaaaatgtttttctttaggcaaactccagagccaggaatattaattgtaggagtttctaaaacttaacatgcagaccaggaattaaggcaggtgtgacacagagagggggcagcactgggtgtgtccctactactcacactcaagtgccgcctcagggagtgctggtctgagaggggggggggtcatagccaagatccctgtaggagccaggcagaagccaccgttgaagtggatggtgtggcaggcagcagtgggggggtggggggtggggacagctgac

SEQ ID NO: 119127 - DNA, 1443 bp, Homo sapiens
accacctggctgcctggtgtcgcagtggcagagttgagcagtgtgaaaaagactgcttggccctttacagggaaagcaggtccactgtggcctgtgaggacgagagctctgggcaggctcggacactggcagaccctggtcctggctggccaaggcagcagggtatgtgtttcgggtcactcacagggctcagcaccactcctcatggcttccttactgtttcggcagaggctgacccgcggctgattgagtccctctcccagatgctgtccatgggcttctctgatgaaggcggctggctcaccaggctcctgcagaccaagaactatgacatcggagcggctctggacaccatccagtattcaaagcatcccccgccgttgtgaccacttttgcccacctcttctgcgtgcccctcttctgtctcatagttgtgttaagcttgcgtagaattgcaggtctctgtacgggccagtttctctgccttcttccaggatcaggggttagggtgcaagaagccatttagggcagcaaaacaagtgacatgaagggagggtccctgtgtgtgtgtgtgctgatgtttcctgggtgccctggctccttgcagcagggctgggcctgcgagacccaaggctcactgcagcgcgctcctgacccctccctgcaggggctacgttagcagcccagcacatagcttgcctaatggctttcactttctcttttgttttaaatgactcataggtccctgacatttagttgattattttctgctacagacctggtacactctgattttagataaagtaagcctaggtgttgtcagcaggcaggctggggaggccagtgttgtgggcttcctgctgggactgagaaggctcacgaagggcatccgcaatgttggtttcactgagagctgcctcctggtctcttcaccactgtagttctctcatttccaaaccatcagctgcttttaaaataagatctctttgtagccatcctgttaaatttgtaaacaatctaattaaatggcatcagcactttaaccaatgacgtttgcatagagagaaatgattgacagtaagtttattgttaatggttcttacagagtatctttaaaagtgccttaggggaaccctgtccctcctaacaagtgtatctcgattaataacctgccagtcccagatcacacatcatcatcgaagtcttccccagttataaagaggtcacatagtcgtgtgggtcgaggattctgtgcctccaggaccaggggcccaccctctgcccagggagtccttgcgtcccatgaggtcttcccgcaaggcctctcagacccagatgtgacggggtgtgtggcccgaggaagctggacagcggcagtgggcctgctgaggccttctcttgaggcctgtgctctgggggtcccttgcttagcctgtgctggac

SEQ ID NO: 119128 - DNA, 1049 bp, Homo sapiens
tgggaggctcaaggtcagtccctggaaggcaggggcgccccctgtacctcctaacactcttcctgcactatcaggaagcctggaagctctttgtcccagggacctctctgggacttcatcctctggggcataagttctgagaaggacccagaagcaagccactcctctgcaccgcctccgtgtctgctgtaggtgggcggtaaataaggcccccacactaggcgccaagcaggcccagggcaaggcctccacagccacatgttagagacattctgtcttcctgtgagtaggaaacaaatacaaaatgctgtcattggagcgtgtgaaagacacagtgtggctgagtgggggctggaaagaatagtggatgctttcctaggaaaaatcttcatgttccacgtcacgttttttgttaaggaaaaacacgcatgttgagtgcctgttagaactcatccctgtgctatgtttaaagcctgttgggagcatctgatcccaggtgatgggagcatgctaggccctgggctttcgcagtcgagctggtgacatgcagcacacttgcaaaaccgaccataatgccacctggtggtttcacatgggggataatgcacaccaaggaaccgactcaaaagagaaccaaaaatagtgtgtaccaagatgcccatggcagtcctggtgacagtggcagaggctgacttgagcttgaggaccttgatttcaaggacagaaactacagaagcaggtacaccttctgttgtacatggaaccagcaggccactctaggcttgtcccgcatgcttctgggagcggcatgttggtgcagagccctggcctcagaccgcatgtggcccccaggaagcagggcctccattccagggtgagttgcctgagcccagagaggtgtgcccttcactgccaccagacagccagcgagagcagctcagaactggggtgctgccgacctgcctgaggtgcccccaccagccacactgcctttggggaacagctccaggagagctggtcggctgcttctctccccaggtgcatgttcc

SEQ ID NO: 119129 - DNA, 1018 bp, Homo sapiens
aggaggcggctcctttctagtgggagatgaagcagcgctcagtgataggtgccaggaggagtaaagcaggcactgcgggcagagcatgctggctggagggccaccgctcagatgtagggttggagatgcttcccctgagggcaaaccagagccaagatccagtgaccacaattccagttggtggcacagctgggcatttcatgtccaccaggtggtcccggtcatacctctccaagctcagctgcattgcagcccccatgccctggagggagcaggcctgccctgggcccgctggaacagctggatgagctgatgtcccactagtcacgccaaatgtccagggtcatcccagcccctccaccccctccttagtccccacatcccatctcttgcagattctgtctgggatccagccccttcccttcagcctgctgcctcagcccaggcccaccatgccctttccctggggttcccctctcagtctttgacctgcctgcatcccatgactctgatcagacctggccctgccccttccctgggtcctctgtacaaaggcactgtctgagcctccagcctggccttcaagccccggcccctcctggctacactctgccctgccctgagctctgtgcagtcccaccctcctacatagcgtatttgtccggactggaatgcccccagcccccaggaacagcctgggactctgccacttgcccatggccaggccaggtgctgcctgggactctctagatccagcagggttgtcacctccctactgtgggcctaagtagcttttggtccacactgatgttaagatactcagcctgtggccggagtctgtggctggttttcctgccgcttcctacaataggcggatagggcctcctccagagcaggggtctgactggggatatgaccagggctatgggcatggggagtcagctacctcctcccacctgagtgtcaggctcagcccagggacccagagaggccatgaactctggcggggctaggtcag

SEQ ID NO: 119130 - DNA, 1038 bp, Homo sapiens
caggacagggtgcagtggccagcatcccaggcatcagggacatgtgggatcttcccacacacctgggatgacatcgaattaacatgatgagaaaattgcatcttactgctaatcccagtacagaaccactatgggcaaatttataaaactaatctgcacaccctctttgcaaaaggacacacctgagttgagtctgcctctcattggcatgagctttgtgggggcgtgaggcgcacagacccttgctgtgagaacaggaaccccagtctccacatgcccagggtcagatccgacagcaaacgaagcagatgcgtgaatcccctgccctgttctcactgactgtggaatatacgtttgaagtgaacacttgccatttttccacgtgcagcttctcctaaagtgtcttttctcctaacgcgtcaataacgcctcagacacaggtgtgcctgaaggaaacctgcagagccccggatggggacaggcttcaggagcattgtcagagagcgggcagcggcatttcgttttcgctcatttgaggctagaatggtgcagattttaaaggtcttagcagcttttgtgttttaccttttaccaagggctttgggggtttttttgttttgtttttctttatgatagtcttcgtactataaaaatattttcaatgagcagcttcaatatagcatcgttcagaaaagcaggtttccccattgggctctcagagagagggtgagtctgcaggaagctggagcccatttgctggaggttccagacacgcgtctgcatttgtatgtgtttgacccacctgaaaggtaggagagctcagttcggatcattgccgtgttgtctataccacctccttgttttcccaaaccaaaacgcagatcctgatgtagcattttctcctgatttgaggtcttaccaatgtgtatacgttaaattccactcaagacagtttctttactgaaaaggtatgaaattacgtgagaagaagtacaaatttcaggcccctagaatctgtctattaatataacatttgaa

SEQ ID NO: 119131 - DNA, 1032 bp, Homo sapiens
atacaaaaagaatgatgtttctattttactctcagtatttctgaattattttgctcagtactctttttttttttttgagacggagtctcgctctgttacccagactggagtacagtggcgccatctcagctcaccacaacctccacctcccgggttcaagaaattatctgcctcagtcttctgagtagctgggattacaggcacccgccaccacgcccagctaatttttttgtatttttagtagagatggggtttcactgtcttggccaggctggtcttgaactcctgaccttgtgatccacctgtctcggcctcccaaagtgctgggattacaggcttgagtgctcagtactctttttaagaggaatattgagaaactagcacactcagcataaaagggtctgaaaatttaattatttgatgtcttggggatgcttggtttggaagagaggggaccgggtaagatgagagctgtttccaggtgtttgaaggactcttaaagatgagaataacaaagatgagaataactactgtttattgaatgcctaccaagatcttagtcctgcactggtctcttttacccgtattgcctggtttaatactcaaaagagcctcatgttgactaaccagtgcatacagagtgatgcttactctgtatttctggagctctggcgatatctacagggaggcagatttccacttgatataagaaagaactttgtggcctggcgtggtagctaacacctataatcccagcgctttgggaggctgaggtgggcagatcacctgaggtcaggagttcaagacaagcctagccaacacggtgaagccccatctctactaaaaatatgaaaattagctgggtgtggtggcaggtacctgtaatcccagctaaggctgagacaggagaatcacttgaacctgggaggcgaaggttgcagtgagccgagatcgccccattgcactccagcctgggtgaccagagtgaaactctgtctcaaaaaaaaagaaagaaacaactttgtagtagtt

SEQ ID NO: 119132 - DNA, 1045 bp, Homo sapiens
aatagtttcagcttccctgtagcttttataaacattcaacataagttgcttagaagtttttaaaaatgatgttttaaatgacattcaatcagggtgccaaaaaactaatcactatacagagaactcttcacttagccatgatttagtatctttttgaaactccatttttctatgttagctattgtagaaagcataactggtttataaggtgtgattattttcattcttaataaattttctaagtttccattagtcctttttggaatttggtaaaataaaaggcccaaacaaccaaatcctacttagcagttcttacacggtgttgtacatatgaggttgggctcaggagattttctgcaagttatattttaataaattcccaatatttgtctcttggggcttaaaatatgtcctgaaagggggaaaagaaaacttaactaaaaattccctttctttccattttggcctaataagtttcttggtatgtaacttgtgacataattctccattattttataggcatgttttccacaaatcctgcgtggatccctggcttagtgaacattgtacctgtcctatgtgcaaacttaatatattgaaggccctgggaattgtggtacgtttcctattttatttgttaccacttttgtatattattatatgtatgtgtaatacaatataacataattggcataataggaggcatgactaagacacagaagaaaacactggctatatttgccatgtaaccatgtaagcccaacaggacctttttaccagattactaagaagtctaatccatctcagagaactcctggaagagaaggtaaataactctactaggcctttttttttctttttttaaatttaagagacaaggattcactctgtggcccaagctggagtgtagtggtgcaatcatagcttactgtaacctcgaactcctgggttcaagcagtcctcccacctcgccttctgagtagctgggactacaggcatacaccgccatgcctggctaacttttttgtttttttgagagggagtt

SEQ ID NO: 119133 - DNA, 1056 bp, Homo sapiens
agcaggtcttagaaaccgaggaactgtcacctggtcttattagacctcttaaaggtcggccatcggagtgtgtagtcgttagaagtacgttttcagaagtggagttgccgcgtggatgaacgtatgtttccatgccacttcaggagctaaagcggggggccggccgctgcagatgtctgaggctccactgcagccgagggtccatagagacagagactgctgccagccccagctagcagaagagagttcttgtctgggacctttaataatcctgcatccttttatatttgccaggttcttacatggcaccaagaggctgcagagctgtgagagcaactcaccttcaatatagaggcctcccctcccgcagcactcttctgctcactctagttcatggcatgtgtgggacataggaaaggggagggcgctgaatttcatgattgctgggtttgttcctttcatgttctatttgtttctcgttctgtatccccaagtatttctcataggaataaaggactttgttggcgctcagtatgcttgtgcttttcaggtttcactgtccacgttacctgctttccgtcccgatgcaccacccaccctgtgtgtggcgggcctgttttttatttatgtgtgtttttatcacgtgagtggggaacttcttttcaaggccctacttgccccaggtgcctctttctgaggcctcctgggtgtccatggagcaccttccataatgagagcccagagccatagtgagggtgagcgcggtcaggcgtgcgggaatggccaggtggcggggccgctctgcccgtgtgatggccctgcaggtgctcagccttggcccacatgctgtgttgcattgactgctccagacacttcccaaggtagattaaacgcccctggcccagtccttagctgagacctctgcacagcagaaaggtggtttgccgagcaccagactgttgtagcagaactttgcctagaagggaagaaaaggccacagtgagttcagtgaaagttgcactgaagagactagcaggagggttagacaatgggtga

SEQ ID NO: 119134 - DNA, 1132 bp, Homo sapiens
catgaggaaaggactcgcctgtgcctggttgccctggaaacagcatgttggtttctcctgtggctcctctcaagctggggagcatgaaactaagatacacagttctgagtatcaattggataaataggaaatcacctgccaagaagcctaaaaccaaagagtttgcctcttcctcctcccttccctttaaaagacatccacacaactccagccttataatatggagcatgtgaattaataaaataattgtgagttgttatctccatgaggctactggtcttattttacttacaaagtaatctattttgagtctaggaagatctgtttttaaaaaaaaaaaaaaaatcaaactgaagaagaattacatgtactgaaacagaaatccaagattctggaagtccagtcattctagtttacatataaaggaaaatctataaaactaaatgtaagctgtcctctagaaaattaaactgtggaacagccagtcttccttcacatgcagtcattgacggtctaaacgtgaggctaaaggaaatgcacacgccagtgcaaatcaggagaagggccagcgggacacagggaggcgtcatccacacttgcctgcttcaacactggaatgaccaggagaagccaaggctctccaaattctgtcttgctgtttcagcccaggatcctccagaaccatatggcacctaaaactacgggcctccaaaaccattcatgggtatattactagaatgaggggatcttccctcaggggaggctcggcctaaagtagtttattctgggaacttaatcccattatcttcatcccttcagtgttgacttttccagtttcattcggagttatctttttccttttgtataatttttattttttgtagagttggggtctcactatgttgcccaggccgctctgaactcctggcctcaagtatcctcccaccctagcatcctgaagtgctgggatcacaggcatgagcctgacgtctggccctctttttaaaatttagttcattgctttccagacctgactgcatcagagtcagtgggaggctttcagaagcatcccgggtggaggccgggcatatgcgctttaattataagttcccgcccgattctcgtgctgcaa

SEQ ID NO: 119135 - DNA, 1049 bp, Homo sapiens
aagcacagacttgtgcctggaaggataatttcatatgattctctgtcttcctaagttttaccaatttcttggactttacccattttattcccattgccttgataccaccgtatctagttgcctttgaaacagcttcagagggtggagacattcttagtgaactttattgtacaccaaagaaacagaaaagggggaaatcacttaagaaaatagaagcagcatcaaaacggcttgcatttcaatggcagaggagtggtgaccacggtgacagtgtagatgccttcttggcctggtagcctcagctgccacaatagtatgaaattccctggagcggatttaacctacccatctgactttgtatcccgggccagcacagttatttcctttaattattaaagccaattcatcttagtttgtacctcctagacctggcaagagttgtccactgagtttcagtccaagtgacagtgacacagcaaatagtctgttttcttggcttaggttcctggcatgttttgttttatgacaacttttgcaaaaccccttctcagtcctaggaggaaggaaatcaattaatctggtgtctgaatacctggctgactctttctcactcttaatgaagaccgagtattgaattgagccaatgacccttctccatcccaaatctgtgaccagattcacagctcccattcttggggtgggtttctagacagcagtctgctgggactcaactcaccatctttcctgtctgtacttaggtgtgtgtttaagtgaacatcctggtgagcttccaggctgtgtcaaacatagcagtgaaacctcttcagaccaataagtaatgcagggggaatgagggatggggagatcatgatggtccaagctgattctaacctggaaaaaattagaattccgacttaatttttgtaagacatatcataacaaaattaatatagattgttataatttttaaaacaaaatagattgacttagacataatttgggccaatatagttaggcaaataaaaacaaaataattttaatcatttttc

SEQ ID NO: 119136 - DNA, 1094 bp, Homo sapiens
ttcttaaggtgtccgttgttttggtccccgccttgctccgtcaggagcggcatctgccttttcccacagtgtaaggcctggatgtgtctagagtgacgtctccctgatgtgcctgggacagtcgcggtttttgccccttgtcccagtgtgagtgttcctagggccctctgatgcacaaagctttctaatttgaacaggaaagcagatgctcaccttagttttcttcacatacctgttctttacacctatttatctttactagattattactttgcctggaacccactcctacccctacacccggaaccccctcctaaccctacgcctttcccatctaaccccttcccagtcttagtccaggcctcgactcctcaagaccttccctgacgttcctcccctgcctcgccccacccctcctagtcgcctcctctgtgctgccacctggccctgggcatgcttgagtatacaccattaacgcagctgtcccagttcagtgagcttttccagggtagggatcaccatctcttcatctgtgggttgttggtgccaagcagtgctagcagtgtctgggagaatgttgcataaatccagccttggagtttctctgccctcacccttacagataatgaaaacagctcaaccctggaaggtaagtacaccttcccaggatcccagaggatgatagtatagcgagccagaagtggagctgtgacgcattccttctcttcacacttgatgatgcgataagcaatttcaaggagcggtcaaggtttcccttaataagacggcatttacacacctaatggtgatcattcgttgagcagaatccaaaagccattggagcagcaggagtggctctggagtgtgcaagaagtaggtttgatagtgctgtgatgtttcaaatgtttattcgacacaaaatgcagcaattatgacacctaacttttttactgctggagaattgaagacctatagttctatatttctgtttgacctaacagggtgttctaacactttttacttttcaaccagaatgctgaatcttgatacagccaccattttttctattttatcattctcttatatgtaggaca

SEQ ID NO: 119137 - DNA, 1575 bp, Homo sapiens
gcacctcagcctcccaaagtgctgggattacagacatgagccactgtgtcctgccaagattttactattatcttagtgttactgatttctggtttgattccattatgctcagagaaatactctatgatttcagttctcttctgtttcttgaagtttgttttatgatgtaggatgtagtttgtcttagtcagtgtttcattggtgcttagaaaaaatattctgctgttgggtggcatgttctctgggtgttaattagaccagtgggcacagcttttcttcctgaggagccgggctgggagagcctattcccactgggctctgtgagaccagggtgggaggaggattgtgattttgcccttggcgcctggctggagtagaatgaatattactgcaagtgttttctgatgttaggccatccttctcttggtactttggctagcggagttgggcttttctcggctttttctggggtcgggtggtgggctgctctggtcctgttggctgttccaggttggaggcttctgcagcacattgtcaggaatctatgggggaagtaaggaagcttggaagccaccacccgtttctcatgtcttgagggccccaggcagcccacctccttttccctcctataacatgtaatatacctgttaaaaaaaaaaaaaaaaaaaactaaaagatttgtttttaaaatatgttgacatacgaaacactgaaagtaaaatgagaaggagctgctctggagtggtgttgttgacaggcaagcctgtgttagtggactgggtgtagctcaccctgaggacgttggaacaaaggctcacggttgtcccaggagcctgctattggaagatagtgctttaattagcacccagtgtggggccggggctgatgaaggaggaaacataatcaccatctggtgcaggccacaaactgcgagcttgtttcctagcatttattttgcggctgactgcatgcaggatccttccaaagcgtctctccagatgctactgtggtggaaagtgatgttctgaccttttttcctccttccgttttccccaaggttgacaaatgcttgatgaaatttttatgtggcttaaaaagcttagcttattaaagtttaataagaaggtggcagcagctagactggttgaaacctttggctattttaaaagagaagccataatattagcaaaggaaaaccagtgagtttaaggacagactctgattttctctcacaaactgtttttgtttttgttttttgagactgggtctcactctgtcacccaggctggagtgcagtggcgcgatcttggctcactgcaacctctgcctcctcggcttaagcaattctcctgcctcagcctcacacgtagctgggactaaagatgtgtgtcaccatgcctggctaatttttgtatttttagtagagatgggatttcaccatgttggccaggctggtctcaaactccttacctcatgtgatcctcctgcctcagcctcccaaagtgctggaatgacaggcatgaacctccacacctggcccccacaaactgttatcatgaagcagttcttcctgta

SEQ ID NO: 119138 - DNA, 1050 bp, Homo sapiens
agactttctgaagatcattttaaaatagaaaaggttttacagtgtaaatctaccatgatgttgatacacttctcttgctgtataatgttatgttgctgtctgttgtcacatttggctggtttaataatctttttttaaaaatgtagttgtcagacaagttaatatggttcttaacactgcagtcgttctatgccttatgtctgtttaagtcttaagtaccacacaacaaattacatgttcctacttggtgccagcatacccagctgcatctacatttcagttgagaagtggagtttgcataccctttccattaccagacattatagtagttacctaagtagcgtgttgatacatttgatgtttccataagttttaaatgtcacttgagttatatatttattttatattgcaggcactggagatattattgctgtcatgataacagaattgaggggtaaggatattttgagttatctggagaaaaacatctctgtacaaatgacaatagctgttggaactcgaatgccaccgaagaacttcagccgtggctctctagtcttcgtgtcaatatcctttattgttttgatgattatttcttcagcatggctcatattctacttcattcagaagatcaggtacacaaatgcacgcgacaggaaccaggtgagctcagtactcaacagtgattggttcgtaacagccagagttcacagtcatctgtcgtgaccatgcatcttactaacatgttttttcttttaaaaaatgttgttaccctcactcagtcattttaatatgttggaaacgtctacatgagtatttaagggatatttaaaataacctaaaaggtactaaatttattgtgatcacctagaatattctagtcaggtagatagcttgatatcatagtattatctagataattctgttaatttggagaaatagcacaaagttgcatttttaaaccagtaactttggatgtttctgcaaatgggaacttggaggggggttagggagacttcactcttccccttcctatgtgaaattctttcc

SEQ ID NO: 119139 - DNA, 1050 bp, Homo sapiens
taaaaaaagaagccgggcctcgtggctcatgctgtaattacagcactttgggaggctaaagtggtagaatcacttgagcccaggaggttgaggctgcagtgagccatgatggcaccactgcactctaaggtgagccacagagcaagattgtttcaaggaagaaggaaagaagggagggagggaggaagggatttagactatataaaaatgacttcacttggatattagacaaaatgtaagaggtaaaactgtaaacttttagaagatagtctgtgattttgaacaagaagttcttgcctataactccaaaaacactgtttataaaaaaaattagattttatcaaaattaaaaacctttgtcattgaaaagaaaccattgaaaaacaatgaaaagataagctacaaacaaaatatttttcaatcatacatctgatataggacttgcatccagaatatataaagaactcttataaatcaacaagataaacaacctagttttacaacgggcaaaaggtttaataattagacattttattgatcattagacaaatgcaatcaaaacaacagtgcaaccaaaacaatactatttcacatcctctagaatgatcataattaaaaagtcatacagtaccaagttttgttgaggatgtggataaactagaatccttatgtattgcgagtagaaatgtgaaatggtacaaccagtttggaaaatagtttggcaatttatttaaacattgaacataaaaataccatatgacccagcagtcccactcccagatatctaagagaaatgaaaacaatgaaatgtccacacaaagacttacacacaaatgctcatagcagcattgtttattatggccagaaaagtagagacaacgcagttgttcatcaactggtgaataaacaaacaagttatatgtccataaaattgaatatagtttagcaattacagttggcccttgaacagtgagaaggttagggagggacactgacccccacacagtcaaaaagctacgtataacttttgcctccccccaaatttaactt

SEQ ID NO: 119140 - DNA, 1043 bp, Homo sapiens
tacatttattctacttagatgttattttaactacttcaactttcaaatataagccaaaaccaaacttttaaattttccttagacatttatgaagaaatttgctctaacatggttgaatttcaacaggatcacttagtaactgaaccgaggattattttggcctcctcactggcccccagtccaggctcctgttttctcactgtggggatagcggtggtggcggtgtgtggagaggctagtacatgaacaggaatgagtaagagtcagggtgtcagggttacatcagtcacctgggtttctcgtctgtgttggccttttcttcctcctccctttaccaccctgtactggatattatcagtccttttttattttttatcagtctgtaaagttaagaaattttcattgttttaatttgcattataggtaaccgtcccatggagcatctctccctataggtactgattcagcttcattgtattgtttgtggatgtattcatagctctgctggcagcgagctgcttcacgtgctttagctctgtgtggtattcagaaagcagttgacactttgataaagacttggtcagttttatttatctttaatgtgtgtatttctttttcttttcagttgctgatcatctgggctgtgatccacaaacccggttctttgtccctcctaatatcaaacagtggattgccttgctgcagaggggaaactgcacgtttaaagagaaaatatcacgggccgctttccacaatgcagttgctgtagtcatctacaataataaatccaaagaggagccagttaccatgactcatccaggtaaacaaaaatgagggttgttgattttgtttttcttcttagaaatcattgctttataggtaagcattctgcctctgctgaagccatgtaatttccaacataatcctattagtattgccatttgtttgttgggatgcatgttttttccccatagttgaatttcttcttttttgtaagtaatggtgatagcagtctgtaaagcttggacttattaaataactgg

SEQ ID NO: 119141 - DNA, 1036 bp, Homo sapiens
ccgttattctgaattttaacagaattgctattgacaaattttaaaggctcataattatatagatattttacaccataatatgtcttcacttaataaattgctcaagtgtaaacaactggtattaaattttggagtaatactacttaattatagtcatcagtcatgaaaagttgttatagaaccgttgttttcattatttatattttcttaattacaggagggaataactaggtagaatgagtatactacagtattaagttcctgtttatgaaaacctcttattttcttctgaataataaataccacttttttgaacagaagcttcctatccttgcttattttgtattgtactaccaatatgaatgttttcagagaccttttatggatgatgattagatgaattttgggaaacaggaacattcttttgcttatacaggccgttgttggatttgttttgatcatgctgttgttcatagaatctgttctcagtgggcgggattcctttagcagagttttaaagtcctcctgcagtatgtttgataacttttgctctgtggttgcaccccttgctgtgtcttttcattcttagaatattatgaatattactgaactgctgtcttctgagtggactgtgacactgtcgaaagaggtaaaaaagatgaggcttgggatctgtgagtggtggttactaagagcagaggagtgtggggtgctgctgagcgtggggtagctcacatattttggcacagaaactcccaaggggaccaaactggatcaccaagacaacataggatgaatgtcagtgaaacaaacaaagggaaagagtgttttttaagcattgaagaatgaaggaattattactgttttttagagatagagtcttgctctgtcacccaggctggagtgcagcgacatgatcatagttcactgtaatcttgaactcctgggctcaagcgatcctcccatctcagcttcctgagtagctgggactacaggtgcgtgccaccatgcctagctaatttttttgttttttatt

SEQ ID NO: 119142 - DNA, 1048 bp, Homo sapiens
ccttttctgccatgtgaggacacaaagaagtctccattgatgaagcagacagcgggctctgacaccacatctgctggtgccttgaacttggacttcccagcctacagaactatgtgaaacaaatttgtgctgtttataaattacccagtctaaggtattttgttacagcagcccgaaaggactaagagatgagttaaatagtgtccacaaaaattcatgtccccctagaacctcagaatgtgcccttatttggaaataggatctctgcagatgtaattagttgaggatcaggataaaatcatttcagtttactgtgggccctaaatccaacgactaatgtccttataagaagaggaaaagatacaggaagacacacagagaaggcggccataggaagaaggaggttacagagatggcatcattctgccacaaaccggcgggtgcaaaggatggctagcagccatcagacgctgggagaggggctggaggtggtttttcccttgagcctccagtaggaatcagccctgctcacaccagactttggggccccagaactgtgagacaatgagactatgttgttttaagccaccaagtttgtgatgtcttgcggccgccactggaaactaatacaaagagaatcccagcgttgaacacaggcatgcagggttagctttgccagcacaggagagagtcgagctatactttcttcatccttctggatgtgcctgaagtcacgtcagttgttgtggttttttccaaaagaccatcctgagcccactgttgattaaacttccagtgttttccaccgaggctgctcctaagccatcagccatttcattcagcctttcaggatacttgctgaatcctgatgcgtcacccacagtctttactctttctagcagcttgtgtcactagtgaatgcatgaacatagctttttttttttttttttttttttttgagacggagtctcgctgtcgcccaggctggagtgcagtgggacaatcttggctcactgcaggctccgcccccccggggttcacgccattc

SEQ ID NO: 119143 - DNA, 2590 bp, Homo sapiens
gttttaggtgtttctgtagaagggtattggaaactaactcatgtgtattgaggtatggatgaagattagtcctgttcccctctcagtggggaggcagcattgtaggattaaaggttctgagtcaggcctgtgctttacgtccattgtgtgacactgtaaaagtaactctgccatttagcctgtttgctcatctgtaaaatggaatgatgaaatgtacatctcttaaggttgttgacaggtttaaacggttccttaattctgaaaagaggagatttgttaacctagaggaatctctcagttggtgagatttcagacactgcaacaaaatgaacacatttgggcagtgtgtgaagactgggtgtgaagtcagtccccttgagttttagcctccctttccttgattccctaggggtcattctgtgtccgtcccacaggggcttgctccaggttttctcggggtgggggtgagggtgggggatcctacaggtggtttaagtctggctttgtaccaagggtcttcacacatacgcagtttttcagtccagcaaatattaattgaaatcctgtgtgcccagtctcagtcaaggcattggtgaaggagaggcaacagcagtgaacaaaacagatttaaaaaaatccgtctctatgaagcatagcttctgctgggatctttgtaagttagcctacctgtcagtagtttctaaacctatgggtttatatgaaatctaaatcttctgctgttgcagtaggaacttaggaatttattttagaaacagaaatggtgatataaatctgttaaaattattcgtgttaagaaaatgatttaaaattggaatacttgggtattttacattataatcttgatttaatgagtttaacaattttttagttttagaaaaaatagtgcatctttatgaccttgatgctcttataattttgaattgaggagaattcttgacatgtttattgaggacttactgcacgttgacactaagcaaagtaatgctcagattacacacaaagttatcagacaggtcctggtggaaaaacagctgtggccaatacgtgaaattcatgaaaatttgttttgagggtgtttgatagaaatgaacataaagacaaaagaactttatagttttcctagagttgaacctgatggctcattttgaagctgtggattgatttatgaaactagaaaccttcctgttcgctttgcagtgctactatcagtttggcacgtgtgaatttctgaataacatttatttgtcctatccctttaaagagcaaatagtcaatttttttcttaggcactttggtattttaaaagtatattttggcaagtgctatactttacgtagtatactttatgagatatcttataaacaagtgtactttaaaaatatgtctttgtcattaagtcgaatgcattggtgggtgtagaatcatttgcctggggctaacacattttatattttaactggtaaagaattcgtgtttagaaacggagttttgaaggaacatgtcttgtatttatgcacagatcacggttgctttcttattacttactcaaatggtgagcttagaactaggagcaaaatatttagtacctttgcggagcagcctagctagggtctgctgtggagcagacattgtaaatgtgctttatgtgtgtgcacactaactttttgtttggccccagagtgggggttgggagaggagaaagccctgtgttgatgatgtgattatgtatgcagatgtgctggtggggaagagtttagtatcggccacttcttgctttgcatagaaattttcaggattggatgttacagccttagagaataattttaccaaataataaatcttgttttgctaacttgcttagggatacaataaaactcaaaaaagtgaatcttaggttttcatgtttaaaaatgtaatcctattagacgaagcctttaatggttcctttaatgaatctgaaatcggtttttagaaattctcatgaacagtggaggagattgatgcgaaaacaggatttgggtgaaaggggtcatgtaatgtttgaattcataacagcaaaggcaggggctattggacacagatttcaaaatattcagagaaaaaggatatatgatcatgggagcagggtctctgaacattcagaaagagctggaggctctaaaaatcaaattttaacataaataggctggcaagagaaaaggggatgtatataataaattatatttatgttgaactttacagcttatgacatgtttttacataccgtgtttttccttcacatttgaatgatgatttccattagcctataaatatttgaatttttttaaaaaccacttgatctctccaccaaatccctgtcctgctaccaccccatttctctcttacagcgaacctctaaacgttatctacatttactgcctctgatttttcctcctgctgctcttctctttgtgaaggtcttctattgccgtgccagtgattttgatgaagacgtggcatatgtaacatatatttgatagcagggtcagaattgcaaagatcttaatgtgtacaatgatgggctatatag

SEQ ID NO: 119144 - DNA, 1515 bp, Homo sapiens
cccaaagaaagactcaaggaaaagttcagaaagtccagctgactgacttcttgtctatactcatagttaggattgggaaactgcaaaaggacagagccgagaaatggcctgcagtctcgctgcctggatttgcagcaatgtcgtgcctcagattttattatatttggttttcttagcacagatgcagcagtaagtagcaacgccactccttctcagtcttcatcgatcaatgacatttcatccatgtccactgagcagacgctggcctcagacacagacagcagtcttgatgcctcgacgggaccccttgaaggctgtcgatgataggttagaaatagcaaacctgtcagcattgaaggaactctcacctccgtgggcctgaaatgcttgggagttgatggaaccaaatagaaaaactccatgttctgcatgtaagaaacacaatgccttgccctactcagacctgataggattgcctgcttagatgataaaatgaggcagaatatgtctgaagaaaaaaattgcaagccacacttctagagattttgttcaagatcatttcaggtgagcagttagagtaggtgaatttgtttcaaattgtactagtgacagtttctcatcatctgtaactgttgagatgtatgtgcatgtgaccacaaatgcttgcttggacttgcccatctagcactttggaaatcagtatttaaatgccaaataatcttccaggtagtgctgcttctgaagttatctcttaatcctcttaagtaatttggtgtctgtccagaaaaagtcgatttatgtgtattaattggccatcatgatgttatcatatcttattcccttttatgctatgatttattctatcttttgtatttcagaagacatataattaaatctatttaataaataaaaatatatagcttttcttagatttgtgatgtttggggctgagaattatcacggctaaaaccaagacacttatgtggacatcttgttttctttaaactgtcttgtctgggatgattgtacattcagctttactgcacgatacaattttaagttttgcttagtgctgcttgaaatcctagctaccttatctcttttcttcttggtcttctagacttcttatgaatttaaaatgctacctagaacttcaccttctttattaggtgcgtaacactccatcttaattaaatatgatggcagataggttcctgcatccatggcctaacgttggagtggaattttacaaaatgctcactagagatcactgcagtcatttcctaagtgcttcctttgccacagactggcctgggtcctttatttaccttccctcattcactttccctcggccaataccacgttcttgattttctttcttcactggaagaaagcagataaactcctctttggtctgttttcagaggccaggctgattcagatgcctgttgctattgttgctctccattgttgggaggcattccttttcacaagaatgttctgggaaactcttca

SEQ ID NO: 119145 - DNA, 1055 bp, Homo sapiens
ttggctaaataggtaaataaaatgtgggcataattctgatttgacaatatgtatgaaccaggagtaggaaggagaatttgctagtgaattgaatgccagaaacacatttcctgagcgggtcttttggaagtataacattttggaagaactgagttcatgtaccagttccctaggttatttcatggtgatgtaagttcatttttctaagacatgcctcagtgagcacttttttaagctgctgttgatgctatttttttctcacttgcattctcttgtatagcgagtacagtttcagtgtcactttcccacatgtaatcctaattatcccaagcctaacaagcaccctgtggaataggcaaagctggtaatgtctgcattgaacaaataaggaaacagaccccaaggaagcctgactttcctgacacactgagtgtttaatgcagagttgagtctgaaacccaggtcacgcactttgaaaggaaataaaatgcattacctagggatcgcagtgatggttgggaagagtcagttccaagtaaaatagagcatcatttgaaagctgtcgctgggctcagtctaagcccagttgcttggttcccagctgtaaactgaggaggtcagataggtctctccacaggtcccttgagatcctctgttctttagagagctgtgaatgaatctaaggtagcattagtatgaaaactgatttcaatttgcttatgtaatgtttatctaatttcgtgtttaatcatttttgctataggtattcttagttataagataaactttattttgaactagagtgggaaggtgtgtagacttcattgtgttgatttaataaactgtgatcatagtttatgaagatgcagagtgtgagagttttaaaaaatagtgtaacttggaaacccaaaccttatttgaatattatttcaaaattccgctgctgatccagtggggtggcctagtcgataggtttaaatattattcaagtgatgctgccgcatgtactgtgaatacaaggtacttcagttgtattttcctcaagaaactcctta

SEQ ID NO: 119146 - DNA, 1071 bp, Homo sapiens
ccggtacttggccatggaggctggggtgggcgtgtggccctgaaaagctttgtgttcacaggcacttcttgtttctggttttttgtttgtttgtttgtttgttttaagctataaagtattggactctttggcactaaaaccccagattgctacaaaccgaaggctaaaatagaggtcagcaatcattcatattgtgtaaaatgtcacccttagctagcaatttatttttccatatttgtgtgtttagtgcactgttagaattccttttcctcacttttgttttgttcatggcacttcataattttatcatttcattttattttcagttgatatctggtcagtgggttgcatcatgggagagctggtgaaaggttgtgtgatattccaaggcactgaccgtatccttccccgcgaccttggccccgccatgctttcttaatgcctcaggcagcatgaccacctgcttacacgagcgctcacgaggacaaagtcgtaaaatccactccagactgtgttctaaggggggctttactgtatttgttaattagtgtcacaagccaagtggttcaatttcattctttatttttaacttgactacctgtgatgactttgagacttagagttcagttaaaccgattatattagctcttaattttgccaaaaatagctggacacatagaagaaattatttactctttgataagtatattctgatatttaaatgaaaatactgtattatttagtttattccgttaatttaactaggaaagatgctatctaaatttaataggctagtgtgcttgtgtgctttaattaagtactattttgttagttactggtatgcattgaaatattttcccccaaagtaagaactgaagcacattacaaaggacctaagtgaaagagattaaaatgaaaattttgtgaggaacaatatgttaaactttcttgtttgttactgtgctgacattttgtagaattttttttaaaaatctgtctagtgggttattttgtgacacactggggaagtcaaaataaatgtaaaatgaaagagataaactcatactgtag

SEQ ID NO: 119147 - DNA, 1746 bp, Homo sapiens
gctgttgagcatggctagtagaaaatgtaaattatacacatcgttcgcattatatgacattgtctgtgggacagcactgccctggactgacagacagcatgaggaccttagcaagagagagtcagagtattggggaactcaagtccaggcgtggagagcaggagggggccgtgtgtgctggactgacagcatgaggaccttagcaagagagagtcagagtattggggaactcaagtccaggcgtggagagcgggaggggggcatgtgtgctggacgtgtagatgcatggatggagggtagataggacagcctgagggcctgcgagaccacagaaagggcaaatgggggccatgaaggtttccactgggggtaaggggcaccatctgacggctttaggctgatttgttttagtttcaatttgagagtaagattttccaaagttgttcccaaatctcagagttcagttcactccctacactctcacactggcttcacgaccctcacggatgtgaagtagtttatttagcatgcttcattcattttactaatttaagccatttctttcctaggatttgaagcctagcaacattgttgtgaaatcagactgcaccctgaagatccttgactttggcctggcccggacagcgtgcactaacttcatgatgaccccttacgtggtgacacggtactaccgggcgcccgaagtcatcctgggtatgggctacaaagagaacggtgagtatagccggggctggaagaggctgggatgtttagaaattgctctagcggtggtctcgagttttttctctttcctttgaaccatatgatatatactgtggggactgttacacccagaatatagcatgatccagagataagaaataattaattgtgtttttccattggttaaaatcattctcttttaaaaattcacttttaaaattgttatttttgaactttttaatcagagttaagctgtctatagccaagtgtgcaaatcctgagtgtgcagctcagctgaggtgagcacacccacagcagcagcagctctggcctccccatggcccctcctcgcagcccacgaggctggccaatctcctgatctccagtaccatggatcagctttatttgttggtctgcatattgtttttttgaatttgatgtaaatagaataacacatgttttcatgtaaaattggtgtctttttacatcaaaacttagcttattctagcaatatcagagctctttgaaacttggcttttagcaaatttgttgaaaataacgaaatcacgcttacttatttttaaaaagactgaaagtttgcccgggtcatctgaaatgagttttgctacaggttcatcttgctgcgttgtagcttgtgttcccaccctgaggggcacagcttcatgtgcttcctgtggaggggagagaaaacttgatcccctgttcacttctcccctcggcccgccagcagggcacttagaggcctctgctgtctgtctgaggccccacagatgagggtgggcaccgtggaagtctgggcccctctagcagggcctcacctgcagtcctgcaagccagccagcctgtgccgccagtgagtgctgctgcctttctgacggggcagtctagaaaatgatcgctcaggaggtgtggtatcaacaacgcacagaggctcccgccggcaagctagtgacgtgtaccgggtttgtcctgggagggggtttgaagaaaaaagatggggga

SEQ ID NO: 119148 - DNA, 1051 bp, Homo sapiens
agatctcctgatgtaccattctatttctgttcctgaagtttccacagaccttcatataatttaaggtactcttgatatctcttaaatacattttatttatgctttagaataatttcccagattattagtcttactacattaggccttattcattttataaggggaaatggtttgtctgacttgttcccccttgggccccaaggtaagtgggaaacaatggcctcctgtcactgggggctttgtgagagctgcagcgtcggcaggccttttttatggaatagccggtgcctgcagcctgagtcagatggggcccaaaggagtgtttggtttgcccagcacgaggtatagaaacctaagaagccttcagaaaatggccctgttgccatccctgcctcctgctcaccatccccacccacctggcatcttgctgtgtcctctcctccctgtcaccttgttccctgctgcttcccacatccatggccttgccaggctctccccacatctgtgtccatgtgggagagtgatgcatgctcactgtggggaagttccaaacattgcacaggtgtataaagcaaagggggaaactccctcttgccccctgcccccctgccccacccctgcccacatcccaggaagggaggagccctaagttaactgttctgtgtggactgcaccatcctttgttccatctacagtaccatgcacagagatagacacacttttaattttgcctattaaaatggtttaatacaaaacataaattttaagtatttgaaagataaagttttgcccatgatatcccaccgaagtatatactttatataattcaaaaaatgaaatgcaagtaacccagccctctgttagcacctggagatggccagtgagagcacgctggtgcatgtcctgcctcactctgcatggcacctctctgttgactgatgttaacaccagcatatctgtacttatgtccttttgaacttacatccttcaaagacaggatcaccttgcatataactgcgtagcaacttcctaaacaggtagcttggtttgt

SEQ ID NO: 119149 - DNA, 1050 bp, Homo sapiens
tgtagagcaatttagagccacagcaaaattgagcgggaggtactgagttcctgtctgtctccagccccttacgtgcagagcctcccccgttctcagcatctcccaccagagggtacatgtgttgtgattgatgagcctgtaacagcatggtctttaggctggtacggagaatttcagccaaaaatgtaagaagtaggaaaatttgtgtttgagattctatttaccatgctataaaaggttgttgtttttttttttaatttttaacttgtaagacgttaagtttgttatttatatattctttggaaaatttttagaaagttccattataccaagttatctttttactttagccagtgcagtgattggaagtaagttacagtttcatgaaatttagtcataaaggaactttggataattttcaaataaataactgaccttttctccctcaggtatttggttatggaattaatggatgctaacttatgtcaggttattcacatggagctggatcatgaaagaatgtcctaccttctttaccagatgctttgtggtattaaacatctgcattcagctggtataattcatagagtaagtggtgatgtattaattttatttttaaaaacaatcatttggttgtcataatcctttacatacaaaataacatttaaaaaaaattgttaggcttgaaaatccaaatagatgatggaatcatatggtgttttaagagagtcattctaggaggcatctgtggagccgcctggcctgccaggctagaccagctgctgtggacacagccaggtactgcgctctcagtcagatactgcgcaagaatacattgttttaaacttttcattttaaagtaacttaaaacttagagaaaaatttcaagaataggacagagaacttccaactaccatttatctacattcacctgtttttaatatatttgccatatgtgaaatcccatttttaatgagcaaggaacttaaaggccaagtagtcagtgagacagctgcttgagaactctctttcttaaataatgacccacat

SEQ ID NO: 119150 - DNA, 1053 bp, Homo sapiens
tgctgtggacaaagggtggagctgggtcaggggatcaaaagtgctgagggttggacttgaggctgcagttttaaataaggtggctggggaaagacctccatgagttggtgacattcgaagaaagccttgaaggggataaagaagttggtctggccgggtgcggtggctcacgcctataatcccagcactttgggaggccgaggcgggcggatcacgaggtcaggagatcgagaccatcctggctaacacggtgaaaccccgtctctactaaaaatacaaaaaatcagccgggcgtggtggcgggggcctgtagtcccagctactcaggaggctgaggcaggagaatggtgtgaacccgggaggtggagcttgcagtgagccaagatcgcaccactgcactccagccagggcgacagagcaagactctgtctcaaaaaaaaaaaaaaaaagaatttggtgccgcagatactttgggggcaagtagaatggagatagaaggaacagacagcgctcaggacagcagtggatgcccgcctggtgttttccaagaccatcaagaggtggcgtggctagagatgagggagcaggggaagagaagagggtgaacaccacaagcctctaggccgttgtaaggatgtcttttgctctaaggcaagtcagagtaagagtcttagcagagcagtgagctcacctgccttctgtttgaaaagcgtaactctggcatctgggttggtaacccactataaggggtgggggcatggaacatcagttactgctgttgcagcagttctgttaagggatgacggagggtccatttggcccagaggggtaataggaagggtgagaggggaagagactggatgctgaaatggttctaaagatagagccatggtattagctgatagatgagatgtgtggtatgagagagaggaattgagaatgacacctagatttttggcctgagcacctgaaggatgagggagctctcaactgagatgatgaaggctgtgagaagagcagactgggctagggatggaatcaggagttcagttc

SEQ ID NO: 119151 - DNA, 1681 bp, Homo sapiens
catataaatggtgcaatttgcatatgaacctgtggatttacatatgtatatagacagacacataatatgaactgaattaaagtaaggtagcttcttaaccaaatgctacaacagatagccttcaactttaaaacagattgaattaggttcgagtttggcaaaagcattaatagaagagaataaatgtaaacaatgttataaactcaatggaataaagaaatagaaacagtatttaaatcagtgcttaggttctcaggtggcctttagtagctgttagccctcatgagtagcccagaggtgataatacaaatgatactatttagtaccagtttgaaacctaaaaatgtgtaatcaggctacttgattcttcatgtctattttctggaggaaaatgaacagaatttcaacaggaaacgagatgctggaaacacagcctgtagattttattcttactatagtagtaggaggagatagttctaaaagaactttatatagcagttgcttacgttagagattttgtatcttgaacatttaccatgagctgaaattttggcttcttttctttttagatactgttatttgtgaaaaaaacacagtgattcaaaatttagatttattctcctcatgaattcagccatttcctctactgtgatattccaaaatatacacattttaagacaggaaacagtgactttgtttccaacttcttgtcatgtttaaactgaagatttcatttcttgactggttttatgcactctatattaaattacctggttttgaatgtaatctaaactatgaaaccttggtgtgtgaaggattgctgaaccccatcttaactgtggctgaaatgtgcctctgcaaaggagttagtacatgctgtagtcttagacaactcactctgctcttcatatgtgcaagtaccttgaatgaaataagcagatttttccttgttacttattaaaaagatgatatattcaatgtatattctggcattgctgtattttccaaaaccgttctaatggattgtgcattatatttcctaattctagtgctgcatttgatacagttcttgggataaatgttgcagtcaagaaactaagccgtccttttcagaaccaaactcatgcaaagagagcttatcgtgaacttgtcctcttaaaatgtgtcaatcataaaaatgtaagttatgtatgtattttgtctgtgtgcttccatattgtcaataatgtggtaatcttcagggttttctggagatacattgagttcagacctaggataagctaaggataaaaatggctattaacattggttttttgttttttgtttttttgtttttttgtcgcccaggctggaatgcagtggcgcagtctcggctctctgcaagctccacctcccgggttcatgccattctcttacctcagcctcccaagtagctgggactacaggcgcctgccaccacgcccggctaattttttgtatttttagtagagatggggtttcaccatgttagtcaggatggtcttgatctcctggccccatgatccacctgccttggccttccaaagtgctgggattacaggcgtgagccaccatgcccggcctattttttattgataacattctttttttttggagacggagtctcgctctgtcgcccaggctggagtgcagtggtgggatc

SEQ ID NO: 119152 - DNA, 1124 bp, Homo sapiens
aaatagtcaataggttgtcacaggaggatacccaaataacctataaacaggaaaagtgctcaatgccgttattcatcaagatagtgcaatttaaaactgcgacgaaataccattccacactcagcagaatggttagaaactaagctgttggtgataccaagtgctggtgaggatgtggaaccacccagaggcagctctcagatgtgacccctcgtgtactggaaccacgcagaggcagctctcagatgtgacccctcgtgcactgctggcagctgtacaaatttgtagaaacgctctggcaaagagtttgacattatctactgaaatacaatggatacgttcccactcttagttgtctactcatcagaaacacatgcataggggatccggagctgcgtacaggaatggtgatgactgtgtgttctgtaatagattgaaaactaaaaacaactgaaatatctatcaacgtaatgtgatatagttatacaaaggaatcttatagcaatgatggaaggagttatagctacatacagcaacaatggatgagtcccataatattgagccacagaagtcagacacagaagatttcaaaaaacaggcaaaaataaactgggagctccagggtgcatgctttagctggtaaagcaagaaagtgattattgtacatgtcaaagcagttatcactggtggacaggagggacactaattagttgggggtgtgagaagcttttgggatacagagagaacatgactgataaatcattgagctgggaaacaaaaaaagaagcaaaggaatcagtacagtatcgggcataagcctcctcactgtcagcactcagtgtggaaatcagtggaaaagtgccttcaaagttctcacagaaaattgattttaaactcagaaaacttattatcaatcaagggtgggggcagagcaataccatctatcttccatgcaccttttctgaggaaattccttgaggatgtactccagcaagagaggcaacacaagagcgtaatgcaagaagcagtggggactgtgaaaagaaatcccaggatggtggctgcatggcaggtcttaaggaagctgcaagaagagtgtctgcaaatcatgtggaggagatgcc

SEQ ID NO: 119153 - DNA, 1712 bp, Homo sapiens
tcatgatccacccaccttggcctcccaaagtgctgggattacaggcatgagccactgcgcccggcctacaggtagctgttttaaatacgtgcttcatttatcccagctggcatgtcattcacttgcttttgaaggttggtagtaatgtgaatagtgtatattgtagaatcaccatgagctctgccataaccctcactggtggtgaatcgaaggactaggaaggctcacttgcttctcccgtctcacggggtgttagtggtaggcctgggaccaaaacaagctgtgggcctttgggaccttattgcctgtaccacggagagacttgttgaagactttgaaccactgatactttgataggtcaaggcctctgacccaccttctgtttagaatcttagtaataatgaacaaatattcactaaacacctattaaacaattttcatttaattgtatttatctctataagacaattgttacattcaagaacagtttcaatttttatagctataactgactttcagttttatggtatccttctatcttatgttctaatagggaaagtaaacactttataagtgattttcgcttccttttcacctttctcttttctctgtatccttcaccaggctatgaggcaccaagtagaattgggaaataatctagttacggcacattcccgtttcaaaaaagaaaaaaaagcttgcttttccaaaaataagctcaacagtagattagctaacactgacaagaggaattggattttctatcatatttcgtattaaaatattggcattatgtagttaattgatgatctgaaacttcctttcatcactattgtacttgaaaatcatctgtcagtgattctttggggagtgtagcatgcagaataatggtcccgcctgagatgtccacgtcctaatccctggaatttgtatatttctttacatggcaaaaggaatttagccggtgtgattacattaatggtcttgagatgggagggttatcccaggtttagttgggtgggtccttcttacaaaagggagacaggaaggtcatagtcagagatgtgatggcagagcgaagtttggagtgatgtggggccacagccaagcaatacaggaagcctccaaccagctgagagaggcagggagcagactccccccagagcctgcagaaggagccacgcagccctgcttacctcttgaggcataagatgcattttggacttctcacctccagaactgtaagatagtaagtttgtgtggctttaaagcagtaaattggtggttacttgttacaatagcaataggaaactaattcacaagcatgtgtatttctacatttttgagaaatataacagcaacagtgtatggtttatgcaactagttaatcttctatttaaattagagctttatgaagggcaggtgtgcagataaaccaacgtgcaggtagggcctgtgacctgtacaggattaaatggaagagctggagccagaagaaaatattctggttcctaattttgaattgtttttatagttgtctttgatttgtttatttgtttttgttcctttaaatatgttagtaaaatttattaggaaataagtttttaaattttaaaatattttattttatttttgagacggagtcttgctctgtcaccaggtggagtgcagtggcgtgatcttggctcaccgcaacctccgcctcgcgggtt

SEQ ID NO: 119154 - DNA, 1856 bp, Homo sapiens
actggtccgtttgcttctctttaggcattctagaagtgatcatttttgaaacaatgcctccgtctctagacagctaggtgtaaatgaaccatttacacctagcttgcccacagggggcaagctgatgagacgcacagagtgatgtagtcttttcatagccagtagtaatgcatacattcttttctccaaaggtggttattttctagtccagccccttaaagtgtggtcttgctgggcctcaaaattccttcctttcataatggtctggtaccactgaaatgtctgcatttttttgtgtcttgcttaagttcagaacttggtcagattgactttatcaacttacagccacattgtcttacataccaataagttcagaactctcttacgtgagctgcgtatgtacttccggtaagaatgcacgttcattctgtttttctttgaagggatctgaaacttgcccacccttcgggatattgcaggacgctgcatcatgagcgacagtaaatgtgacagtcagttttatagtgtgcaagtggcagactcaaccttcactgtcctaaaacgttaccagcagctgaaaccaattggctctggggcccaagggattgtttggtaagtatggtctgttttaatagcgtggattgagtttttgctgtaataaaaagtaaaactaaagtgtcaggatttagaaacattgatgattaaaaaaaaaactctgttataggtttatgagctaaattgaatcaactgcttgctctagttctgtgtagtcaggctgtagggtacaaacccatattcttagaatgctgcaggaatttaaataggtagcaagttttcttttttgtttgtttctttttcctttcattttttttttcatttctcctgtcattatgatatcagagtagtaggtatgacagtgagttgtaacagaaatttggagttttattcatttcttcatcatggccaccttttcccccctccccttttattcccgatcactcctgttcatttccaggcgccatcattgcagtgccttgccattcattggcaggatgaggccagtcagtgtcattgtcactccatggattaaccaggaagggatgctgtgtgaggggttgggctggccatctcttccttggtgtctcacttcaactgtgtgtccagcccagaacgtcagaatcgttagtctgaccctgaacgttagtctcttgcatggtaagacggtcagccgccgcagcatcacgggccagctcaaggtaaagctcttcacatgtttcctagactgcagctatcagcacttcccacactttttaccccttatttttctgggcagaacttttttttttctttttctttttctttttttttggtcaatgaaaacaggattacctttgcgcctaaagaaaccgtggtgcagttaaacatcgcgtgtttacagctggtaggcagagggggttgagggagaagaaagctcttttcgatgctctagtagggtagtttacatttccttgtagagatgttgggtttggagaatctttaacgatgatttttaactgatcctttgttgcggagacctatgatcagggaaacagttgtttttttcagccctggcggctgaaggccctgggagctaagaggaaattgcagtccagagcttctttgagaagctaaggcgggaaagggactgtttggaaggaatgcccagcttgcatctaaagtaatggtgatcttaacttcctgatgacacatgctgtatcggcacttaaatccagtgtgccagaagaagtgttaaaggtggccgggcacggtggctcacgcctgtaatcccagcactttgggaggccaagctgggcaga

SEQ ID NO: 119155 - DNA, 1023 bp, Homo sapiens
gtgcatctgtggaagactgggcagggtgctggcccgtgctggtgtgagtggtgtaggaaccccctccccacccgcccagcctcccgcctccccgcgcactcctctcttgccttgtcattgcacactcggtgtccagcagtgccagaggggacccagcccgaatcccttaccaccgcgcccctcccccagaagactgctgccccgtcccactcatctcgcccgccttgaacatgccagcccgcatttgccccaggacctttgcatttgctgtttccccgtctttggagttgtctccgtgatcttggcacaagtagctctttctgctccttcctctggtcagatgtctcgttttgggtgaggccctcctcgaccaccctctttcttcccttagtcatgctatttcattatttaaaaaatttccttcctagctctcatctggtttgaaactattctatttatttgcctgcttattttctgtctccccgactaggatgtaactttgtgaaaacaggtagctgtctgatttgtccactgctttatccccagtgcttagaaagcacacaggaagtattcagtagtatcagctcaatgaatgaatgaatgatcaaagaaatggcccagcctgcctgttgtctctgctttatctgttcatttagtgacttctgattagcgtgtgaaacttgtaagcagatggaagcttgttctattttgtgaaacattttggtgtccttgacccctttaattgctaactgttggaacaagctgtgatataaaatctcacatttttataatagtttagctgtagctttcttccacacatacaagagacatttactgaattctgcattatctaggtcatgctttctgctagaccctacggacacaaggcagatagcaacggggtccctttcccgagagagcccaggagcccagtagagaaggcaggcatgcagacacttagttccaggactgtacaacccttgctataggggaggggctatgccatggaaatgtggaggaggt

SEQ ID NO: 119156 - DNA, 1093 bp, Homo sapiens
acatcccacatgttctgcgtgctcctgtagagcttgacagcttccacgtgccttctacccaagtgcttttgcttacagcagatactgtttctctgtgtcctgaagtcgccagaggagaagggaatcattgtttacacatggggatcagagcagacttctccactactgtgcaatagagatacagctctcttcagagtaactgtgaaccttttataaccaacactagagttagttttaaaagacaagatatttataatgacgactgtatagcttttaagttatttttctagtatgtggctttctgtagccgtggtaacggccaaactgttcatcctagctacccatgctctgtgtccaggcttgctcctggcaggtggcattcatctcagatgtgagcacaaggcattggccctctggactcctttctccttttctttcctctctaggctgctcctgaatcctgttctctgacatccgtggagcccctcctgcatccacctatgcctcctataagtccagttgaaatctcagcctccttcaacattttcttctcgtgtgtggcccacatccctccacttctccaacttctgtttaatctgatcacggctctttttaagccctggcagcattttggtccctgctccttgcccatagtaaaacagcttgaaatatcccatgcaagagagtagtttcaagtgggcaactctgctctctatttaaaagcgtgcacaatcaaaagtactatgcaattttaggacaataaagaacatacagtttttttgtgtgtgtttgcattttgttaacctcattctttttgtgtactttgaattttgaggactgtgcaggagctcggcagtgtttggaggggcagccctgtttgttagtaacattggcctcgtccacacctgagacctatgggtttctagtaggaaaaggagggctgttgtccaggatacaacaaatccaagagatttgggactcagcagaggggccactgaacctggaaggggttgggcagaacctgtagacagcatagaggggtgaaactctcaaatttgtatttttttcccaataaggctattatagtccctgg

SEQ ID NO: 119157 - DNA, 1025 bp, Homo sapiens
tctggctgatctgctccagccccatctgcccagtgtgactctgatctcacctcctgtttccagaaaattaaagagataacctacatgcactcagaaggcatcctggctggggagctgaagcacgggcccctggcactgattgacaagcagatgcccgtcatcatggtcattatgaaggatccttgcttcgccaaatgccagaacgccctgcagcaagtcacggcccgccaggtgagggctctccactggactgggccagctctctcctgcttttccccatgcatgcccacctcaccactgtctgccagtaccagtgatggatggtctggccagtgagtggctgtgaccacacaccctcccccgggccgcctgtggggagtgcacacacttggaaaggagctggtcagcccgcagctgtcccacacagctctttggtggggcccagggacccacactgctgtgagcagcaccagatcctagcctggagctcaggggaggtactcctggtggacatccctggggcagggtttccccaggttctgcggccaagcagctccgatgggaactacctggagttaggtcaggtctcatagggcaggggcacagctttccataagactgccctcgattcaggcacctgttgcaagccaggggtccacccacacatctgagcaactgactatgaatccaaggattcccactctcccctgaagttcagtaattttctagaacgacccatagaactcaggagatgactatatgattacagttttattataaaagatataaatcacagccaacccaaaagaagagacccctagtttgagggccccagatgtgaagcttgtgtcctcaggatgtgtcaccctcccagcacgtcactgtgtgtcgcccgggagctcccctgagctgctagctccagtgtccagagtttgtattgtggttttattaagtaggcaggatggagtgaaccattggccatgtgatcaaactcagtcgccagccccacttttgtccttggaggt

SEQ ID NO: 119158 - DNA, 1028 bp, Homo sapiens
cccgactcatgaggatttcaacagttttgattttatagtctggcttatgctgaatttaatttgagtgctttaggactcacaaacatagggagcttgtgctggtttatgcatgaagctgtttagctttattctaaaaacaatttgagtccacactgagaggcttgcaagaagtgtcctttcaaacaggatctagctgagaaacaccacttggggacattcctgcttgtcagatgttaaatctgttccatctcagcacgttctgaataaggcagcttattcagttgcagagagggcgctgggagccaagcccacctgtcaccagctgtatggctttgatcagagcaccggtttcctcctgtctctgagccctcatcctcaagaggaaaatggggacgatggtcctcacggggttgtcacgagatttaaatgaaaagatgcttgccacaaatagtaacacaccttgaatgtaagaatcaaccgaaaaggctgttgagcgagcgttttcctttctgaacacccgctggctgtgtctcgggcgccgatttccctgtaagagccggcggtgaaggaggaaggggtttggggtggggccgaggctggcggagcgcggcactgagagggcccctgggcggcaggcgagaccgcggacaccctcctggcgctgcgctactgtaaggaccgcggcgctctcaccgtgggcgtcaccaacaccgtgggcagctccatctctcgcgagaccgactgcggcgtccacatcaacgcagggccggagatcggcgtggccagcaccaaggtaggaggagccacgggcgcccgtcccagggagagcctggcggaggcaggtgcaccagaggccgccctcctccggcctgctctgcccgcgccaccgcctttctttccccttcccgcctcaccccttctctccgctcctttcctttcccctcccctcttggattcccgtatcttcattttttttatttttatttttattttatttatttattttttttgagacggagtctcactct

SEQ ID NO: 119159 - DNA, 1035 bp, Homo sapiens
gaggagaaagggggagcccgatggttttaaatccttgtcgactcttaataggaagcacgtccgatagacgacgggaggaacactaacgcagtggagataccaacgaaatatcacaatgcgaggagcccttgggataaatgccctgcctgggcccattgccatcagccgagggcctgggagcgcctgcagcggggaagtgtcccgaggggctcaccctagctaggcaggagcagggctgggggcagctgcggcctggaggaggcaggggcttcctcacttgctgttaagcctggccgcagtcacagcctctttcagagcagatttcctgaaaactgtacagctctccaacctgccataaacggacagcccggggcatgcagccctgaccctgcggagcacctgtgccaagtgtgtgagaaaaagctttggttgcaatataacaaatgctgtctacatcacaggtgtggcgatcgatgggaataatcacgaagtcaaagaaagacacattcagctggtcaagaaaagggggaaagtcaaggctctcgatgaagaactttacagtaagtggaggacctctgagtgggaggagccgctgcagcgccggccgctttctaggaccgtattccaacagcgccggagaatggagattctcctttgtcccagctcagataaacagagggagggctaagcccgtgctgtaaaaccgggcttcgcagggtatgggatggtttattttaggtggtggcggcgcatggataatttttttaagtgtgaagggttacatacagtagttattttaattattccagcaaatgatactgcttctctgtttatggtagggatatatcattttctttttaaagcaagtttatttctgtgaagaagtgagctaagctacagacaagtagtaaataaccttcagcacgggtggtttgtgggcctgcgcggactcccagggtgggagctggtggggaggtgccatcggtgtgggtgacgtgacttgggtaacgacaccaggttgcactcacagtcctg

SEQ ID NO: 119160 - DNA, 1040 bp, Homo sapiens
agaggggtcagcgtggccagggtcccagtcctttggcccttgaacttggcctttcccagacagcccttcttggcatcccagcctggaatccctttccttatctttctttggcaagccccttcaagacacagtggacaaattttccccttccagaagcttcccttgacccacaggcagaataattccctttcttctgagtgccctgtgcctggacgttccctgctatgctgctggctggctgctctgtattgtgctaaaatattcacgaccgtgtccccaccagggatcccggaggcaagggccaccctccgtgtccccagcacttacgcctaggcctggcacacacaaacgtcgagtacttctcatccgtggctcgcggggcagggccggcatgtcctccttgagccgcccatgtccctgtgctccttgcgcaagctgcaggcccacccccaggagcgaggccctgtggcgtcagcgcccatgtgcagcaggtccaggggacaggaggggtctgcctgatctcagaggggtgtgtgcgggacgagcgtgaggtcatgcttgtttacgaggctctgacacagaaccatcgtttcctccctcctgggctgcacagccgtcctcccggctcagacagcctctgacttactcaccggcttcccgcaccgtcgctctggacgcccatttcaactgcgacaagggggtcagagctgtttgtaatttgcaatcaggaacgtcagggaagcactttggcctgaggctgagagaccctcccagcagctgtcctacagccccactgcagctcagcatctctgcgggatagggacagacttgtggagagcccgcccgagggcgctcccagaaggaaatagccagagagaccgagtggggatggccagccctggtagccctatcccgcccttactgctcatgggcctctcagagaagggcccatggtgcccagggaagggggtcacaaggaatgagtgccagaggggcctcagagagagggtgggagggccgtgaacctagacgcagggcag

SEQ ID NO: 119161 - DNA, 1010 bp, Homo sapiens
ttttctcctctccttagcgctcctccatttttcatctacttctttttccgccccaggttgtccactttttttttgttttttgagacggtgtcttgctctttcacccaggccagagtgcagtggggcgatcttggctcactgcaagctccgcctcccgggttcacaccattctcctgcctcagcctcccgagtagctgggactacaggcgcccgccaccgcgcccggctcattttttgtatttttagtagagacggggtttcaccgtgttagccaggatggtctccatctcctgacctcgtgatccgcccacctccgcctcccaaagtgctgggatggcaggcgtgagccaccgcgcccggctgggttgtccacttttatctcctcttttccttgatcgtcctcccctttttttctcctcttccttttccttaagccttcgcctgtcaatcacgtcgaaacacagtatttgaccggagccagtatcttgatctgcctaaagacaagacattcaatcgtgaacagtcgaatattattccttcctcaattatacaaagaagagtaagttaacataccacttcagcctattaatggtaattcattccattacattaatggacagttttggtgctggggtcctagcctgggtaacggacagcagctgctgtgctccaagatcaaaaggtgttcagggcaaactctggtgtttgaaggtcagcagagaaatgactgggctgattcatgatgcttacatcaagaaatattagttgactgatggtcagggcacagagatgaatcagaccccacccagccctgagtaagctcacagtctaggggcaagaataacacccaacagacttaatattggaggtatattggtcgggcgcggtggctcacgcctgtaatcccagcactttgggaggccgaggggggcagatcacctgaggtccggagttggaaaacagcctgaccaacatggcgaaacttcgtccctactaaaagtacaaaaaat

SEQ ID NO: 119162 - DNA, 1036 bp, Homo sapiens
ggcgccgctcctctctccggccgcgcacggaccgccccccgtcggccgggctcggtcgcgggcaactttcgtttcgtgggcggcggtcccgctgctccgcaagctggcggctgttgggggccccttcgacgcgccgcgatcgcgccccgccccgggccgcgcccccgggccgagtccctgggaggggggcgttgattgacggcggcggcggcggcgcgcagaggggagagggtcggcgctgggctcccggatcccggccggtcccggctgccgtcgtcggaggaggcgagtccgtgtcccgggactcgtggccaagatgggtggcaacttttgagaagcgcctctgtgggtggcgcgctgtgtggagtgtggagcttcgcgctccgtggccacaattactgtcaagcgggaaaccaactgcttaccccctcccctaaaatgtttttaaaattcagtttaacgcagattttgagggagaggacggggtggattacaggttaaagaagcacttggcatgcaatgaggatgcttattttatagtattgcgaaggattcggagattgtactggtttctacaagcagttttctctggtaacccaaattgcatccctcctttttgtttttcagcactaatcgctattttctttggaaacttcctttgattctttacctccttcaccttccccgaagagcctgctaaccaacacctgtggccttctgtttttaactgttgttgccattgacagcgttgtgaatggtcatctcgctcgagctctttggatttgttgttactgtgtaagctgatgtgttttagataatctgcttcaatttgagttcccatacttacctgttttccaggtggattgtctcattgttagtgctgaatcttcttgcctacttgtatctgggaatttaactttgaagaggaagagagtgaatatgaataactgaaaaataaaatggtgtgtagtagcactttgtattttttacaatatactagaatttactactctagaacagattagtaggctgtagg

SEQ ID NO: 119163 - DNA, 2081 bp, Homo sapiens
aaaaaaaaaaaaatgctgagtaaactgtaaacatatactgtatgcatagctggggtacattagagtataatggaatgtactgtattttggtacttgaataagtaattagcgaggtggggggttatttgatccaagatgaggactcatttaggctgtctccacttcgctcttctctgtccttcacctctccttcatccatttatattttcttggtaacttcagttacacgttaaggtatgtactggccatagtgttttaacactgagaattcaaagacaaataatactccgattttgccttctcatagtgtataggcttcataggtgcacagagtgctgtgggagaacacaatagagaatgattaaacttgtggagggtgtgggggcagtttacggaaaataacactgaataggaatttgccaaactggggagagggagtcatgtcaaacagaaggaagtgtgggtgcactgaggtgtcaagtgttagggtaaggctagtgataaggtgttactggaacagtgggaatgactcgagatgagcctgcaaaggtgtgtctggtctagattttgaaggaccagccttgctaagctaaaagggaagtgtatagccttatctgacagcagaagagagagccaaaatattgttagcagaggagcaaggcgatttggaggtcactttggcatccctgtggagaatagagtggaggccctacaagtgtatatttgagatagtatggagttagtgactttgaatctgttttcttctttttttctgagatgaaggctcacttggagtgcggtggcgcgatctcggcccactgcaacctccgcctcctgggttccagccattctcctgcttcagcctcccgagtagctgggattacgggctcctgccaccacgccgactaatttttttgtatttttagtagaggcagggtttcaccatgttggccaggctggctttaaactcctgacctcaagtgatctgcccaccttggcctcccaaagtgctgggattacaggcgtgagccaccatgcctggcctggatctatttttaacttggatatggtgtcttctgagtctgtggtcccttaagggactttagggctatgcccagttgctctataatacagggtcatttaaaatcaaagtgtcagtatgttttggaagaagttaaaagcagtcaaaacaatgaaagttataaaatgttactcatgaaagttcaggtgttgagaatacttgtcttctgagttaggcttaggcaggctatagaccttaagctggaaaattcaaccctatgtccacttgaaatcaaagccaccaagcttaaaaagttaccagtatcctgatggtttgctaggatatgggttgtaaacattttgtgaaattttggggggaaggcagttttctctctagtaaattattggaattggaatagtgagactagcttaaggtctaagaagttctcatacaactgttaatttatacagtcagttctgctgtaaagcaacatacaggttcctaaaaatcactgctttgcagaatcgtgcagtagaaatgacttacaaatggggttggggtacagcactctaaagctttatcagtgacacatttaaaaaaggaacctggtaaaaatgatagaacagttttacacgttgaatggttaagaaatatatagatactgtaataaatgtggcattttctttgaaaaagccctggtttgcttgtggaaagggatgtcagaaaggttgctgctggtgagttactgtgaagtggtagaagaattacttataatcagatggaaggttgtaacacgagaagcaaataggtgtggctcttaacccataataaactgacttagctggtgggtgtttgaagtgtgtttcatgtatttctacacagttcagttcggctgggtgcaagctttctcccttcatctagtgtttatgtgacagaatagcacataaataaacaggaaatatggattgtgctcaaattgttctctaatttgtgtatcaatcacagtggaacaaattcaccttttcttttctttttttttcccccctttttctttcttttg

SEQ ID NO: 119164 - DNA, 1047 bp, Homo sapiens
ggctagagtgcagtggcgctatctaggctcactgcaggctccgcctcccgggttcacgccattctccttcagcctcctgagtagctgggactacaggcacctgccatcatgcctggctaattcaaatgcacgttttcaaaacaagttttatagttgattatacttgtttaatactagttttaaatagtactataactcagtttcaaaaatacttgttgaacaatctatgtgtcaggtaacatgctacctttgtggggcttagagtcttttgtcccaagtaggtttatagtgttgtggagaaggacaaatgaaccaatagagtactcatcgggttatacagtaattaagaaagcacaaagcattttgggcatgctaaggaaggagaaagtcattctgcttggaaaacccagggagtcatctcagaggtctttaagctggattttaaaggatggatagggatttgttaggttgagtaggacagggagaaggaacagcatattgggaacaacatgggctgtggagcataagacacagggatgagagggacaggaagagtggtcagaaacagcttgtgaatagttgtagggtttttcttaaagtgttgagatttcctgtatatgatagaaatccagtgagagtttaggtggatatgggtgagcaagtggttcatgtaacatactttttcaggaggcacataatgaaaatgtagaagctggattaaaggagttagagttcatttacgtcctgtgagagctcaagtacatcagcataggggatagaaaagcacaggataccagaattagggacagactagccatgagctataaaaataggaaagagttgagtatgattcagaacttgtttagcttagagaactgttggtatgatttaacttgggaaacagaagaacagatttggacgaggaaagtagaatagtttgatttttgatcctgttaagtttgacatacctcctggatacttaggtggatatgtctaacagatatctggaccagagagcggtttggggtttgatagatttggtcattg

SEQ ID NO: 119165 - DNA, 1603 bp, Homo sapiens
ttgtgaggggtaagtgggaattagggagatccaagatgatactaaggaggtatacagagatcaagtcaaactcaacttacttgttttgtaaatgagcctgggtttcctgtttccaagggtattgagatgaacaagatatagttttaggggcccggtgtggtggctcacgcctgtaatcccaacacattgggaggcccaggcgggcagatcacctaaggtcaggagttcgagactagcctggccaacctggtgaaaccccgtctctactaaaaatacaaaaaaattagccaggcgtggtggtgggtgcctgtaatcccagctactctggaggctgagttaggagaatcacttgaactcgggaggcagaggttgcagtgaaccgtggtcacgccattgcactccagcctgggggacaagagcgagactccgttttaaaaacaaaaaaagatacagttttaggaacatgatgtacttgtatttctaggactgtcactttggacggtatatttagtacattcttgcactgctataaagaaatgtgtgagattaggtaatttatgaagaaaaggggtttaattggctcttggttccacaggctgtgcaggaaacgtggctggggaggcctcaggaaacttaaaaccatggaggaaggtgaaggggaagcaggtagtcttcacgtggccagagctggaagaagttggggtggagatgctacacacttttaaacaaccagatcttgcgataactcactttctgagacagcaccgaaggggaaaagccacccctgtaatccagtcacctcccactaggccccacctccagcactggggatacaatttgacatgacatttgggtgggaacacagacccagaccatatcagaccgtatctaggatggattagagatggggagagtggtggaggaaagactatgggtgtgagactgttggaatagctcaggtaagagctgagggaattaaggcagagtgggtgagagatttaggaagtaaaatgggctagagttggagactggatatgaagactgtgactaggtaaggaagggtcaaggatatgctcatatttttggtttggaaatctgggtgtaagcataggagaaagggcaggattgaagaccaagatgataatttgtttttttagtatgagacggagtctcgctctctcacccaggctggagtgcagtgacgcaatcttggctcactgcaacttctgctacctgggctcaagcgattcacctgcctcagcctcctgggtggctgggactacaggcgcacgccaccatgcccagctaatttttgtatttttattagagacggggtttcaccgtgttggccaggatggtctcgatctcctgaccttgtaatccacctgcctcagcctcccaaagtgctgggattacaggtgtgagctaccacgcccagcctagtaaagttttttattttatgtttttattttttcaaggcaaggtctcacggtcacccaggctagagcacaggtgccatcatggctcactgcaacctcaatctctagagctcaagcaatccttccacctcattctcccaggtagctgggactgcaggtgtgtg

SEQ ID NO: 119166 - DNA, 1070 bp, Homo sapiens
aaataaaaaatttttttgagcgacaggttctctctctgttgcccaggctggccttgaactcctgggctcaagcaatcctcccacctcagcctgctgagtaactaggattaccggcatatgccactgctcctggctccatttttaacatatcactgttttccttcttccctttccatcaaaagcatggcttggaactcatttctcttaatctgttttgaaatttgtagtttcattcagctgtcttctcttgtaatgtgtgaaaattatgaactgcaataaagacaggatctttggaaagatgagttgtattgtattttagtctacttgtgaaagctgtggatttcagaatggtctttgaagaatactcagcaaaacttcattattgttttgtttagtcttgctttgtgtaaggcattcatggttctggttttgtgagaaaacagcttgtgagcagacccactgtggaggctaggtgggaaggaggtgggtaacatttaacttaaccttgaattatagatagaatttcagtgtgaaaatggtatcactaaatgcttggagatagggaagagtggagcgtatctgaaggatggcagtttgtctgccagttgcatcaaaagatatagaaggaaatattgggacagaagtctggaaaggtggaatattttgaattctcaactgcggagtttgaattcttctcagcagtagagatcttaaaggggaagagaagggatgatatagaatcatcattttaagtgggtataggaccagaaatcattacagctaaacattcaaattttattactatttttattcttatttatttatttttgagacagagtcttgctctgttgccaggctggagcgcagtggcgcaatgtctgctcactgcagcctccacctcccaggttcaagcaattctcctgcctcagcctcccgagtagctgggattacaggcatgcaccaccatgcccggctaatttttgtattttttagtagagacagggtttctccatattggtcaggctagtcttgaactcctgacctcaggtgacccgcctgccttggcctcc

SEQ ID NO: 119167 - DNA, 1100 bp, Homo sapiens
ccctatgttgcccaggctggtttcgaaatcaaatggtcctcctgcctcggcctccaaatgtgctgggattacaggtttgagccacaccatatggctgaaacttctcgattttatagtcagaagtcagcttcaccgtaatcccagcactttgggaggccgaggcgggtggatcatgaggtcaggagttcgagatcagcctggccaacatggtgaaaccccgtctctactaaaaatacaaaaatcagccacatgtgttggggggcgcctgtaatcccatctactcgggaggctgaggcaggagaattgcttgaagctggaaggcagaggttgcggtgagccgagatagcgccactgcactccagcctaggcgaaagagcgaaactccatcttcttcaagtctgcttcacaaagagcttgttttactgaattttgcagtgtaattaggacttggctttaggaagaataatctaagtggtatttaggttagttgtaatcctaaaagcataagtaccaattagaagaggccattgtaatggctgaggaaatgagaattaaagtcctaaattagagtggtggtagcaaaaataagagagttgtagtgtgagtgcatggttttgaggtttttgtttgctttccagttgcttaagctgtaagatcatgcatttcttatttattctttattcatcgtgcctggcagagtgcttgtcacattgaaggtactcagtaaatatttgttgaataaatgattctgtaaagaaaacttccttaagaaagcatgattccactgtactgaattgcttttggattttttttctatgaaaacctgattttggttgtgaagaaaaaaatagaccagttcattagcgtaatttgctaggcattacacaagacattgggagatacaaactgtttagaggtgatatatgctgtggtaaacgtatggtgtgcatgcagagtggggagtactgaacttgtttccgtgttgaggagggcttacagaggctgtaacatgtcgtctgagttcctgtgaagagaaagtaggagtttaggatgaaggttgtctttgataaagagattagcatgtattgaaagacttatat

SEQ ID NO: 119168 - DNA, 1049 bp, Homo sapiens
gttggccaggctggtcttgaactcctgacttcaggtgatctgcccgcctcagcttcccaaagtgctgggattacaggcatgagccaccgcatcctgccctcattaagctttttgtatctgtgagtttagagttttcatcaaacatagacattttctgctgttttttcttgtgtaataccttgagatacaattcacacactgtacagctcacccatttaaagtgccagtttagtgggttttgtatattcacagagttgtgccacatttgccacaatcagaacattttcatcatcccaaaaacgaacgctgtacccatttagcagtccttcctctgacatttaggaacgaagtctagcctcagttctgtgtgaacttgggggttgctgcctccaccatcctttcaggtgtttttttccctctggctcaggtagtttctcacatgcatgtgtcgatcaataccctgttgacaacttgagccagggagtggggggccccatcagatctccagacttctctctgttctcttctcttctctctgatgttctgcctcttgatttctaatcaccttggcttccctggactttctgtctctggaactcagggaggatcactgtcctctacctgggattcccctccttgggctgcctcctgtaagtgctgtccaaggagtaagctgagacagttatagggtctaccctgtttgtttcccacccttcaggaatgactctcctgcattggttggtgtctcatcttagaaatttgctgattcatgtatattatctgatacgatggttgtcacaggtggcatggtaaatttagttcctgttactcttatcttggttggaagtctcaaggtcgcgttttcttcagccaatagaaaattaatcagttctgaaagactggtatgtttttattacatttgtttcattctctctcagattagatcctgaaccagtaaggagattatggggaacattcttagattgtagaaaccattgacaatttatcaagaagtgtcaaagtgcagatttactgttgcattgaaaggt

SEQ ID NO: 119169 - DNA, 2444 bp, Homo sapiens
ttaaaaaatctaagtgcaagtgtatatttgtcattagggtgttttgttgttagctttgtgacattgtagagttttgattctctgatgcattacgctggctttcatccttcccttcactgtttcctctgcccacccactctcccagtcacctgcctgccccgttcgtgttttgctcactcttgtttgttataaccatctgtattattgaaagtgttggcaaggcagggtcagatatagagcactgctagtgcatttctgattgacatcagcccattaacattatgttttgaatgtgtatatagaacatggtatgaatcatttttacttatatcagaaactgaaaaaacaatattttctatagtctgacatcttactagtaactataacatagttatggatgatctgataattttgatacattttaaaattttgaaacattttattacttagtttcattttacttatttcaaaaatatttccaggaaatccccttacccaggatatattgaacctttatcaggaaccagatggaacaagacggctgctgaactatttgcttgataatttgtcaggtactgcaaaaagaagtaagtggttatttgtttaaacctttttattaggaagacgtgtaagaatattgcttaattctgtattttctattcaactagttacaacagaacaaccacctccaaggtcttggattatgttacaagaaccagataggacaaggccaactggttggtagtcttttattttttaactgttatttttgctcagtctctataagcctaacagtattgtcagcatgcttagattacaggtagcattaagacaaaatgtttaaggttggtttggtttgggaggtaataaaaaagaattcttgctcacatgacctctatgtatactacattgtgctatatagaaagtgtgctataaagcagtgcttctcaaacgggcagtttatcccccagaggacatttggcaatgtctggagacaattttgatggtcgtaactggggagaagtgctgctggcgtctggtggatggaggccagggttgctgctcagcattctatagtacacggcacaggcccccacaacagacttcacctgaaatgtcagtagtgcgactctggttgagaaacccttctgtagtgtactgatgaaattcacttaaaatgaatacacccaaatttttctctatgagaagtttccaaatcctagcatgttccaaatggatttgacactaccgagttataagagagccaaacccttacttagaggaaagtggaactaatgactgctcatctccttttaacctaaattctatgtaaatagtttgggagctttcatggtgcgtgtaacaaaatttggtctgtgataccgttttcattttgcatgaattaacaatagttgtgctgtagaagaaaatgaggcatgcctattaaggatactacctatccagtttccacatcttacattaacagttggtagcatggtagaaggagtatagaaatgaggaatgttaggctcagagactgaagggctcacgagcttagacttttcacttccagaccttctgtgcctacctctgtagcaggtagtacattgtattctaacttgttcacttatctatcctgcttgcattatccgtcttttatttatcccccatatgtggcgtacagtagcttttcagtgactatagattgaatgaatacggtcaaacttaacatttaagtgaaaaccattactgaaattaattatatatttttttctgccacatgtgtgaataagtaaagttatctttcctacagccttgttttctgtcatgtgctataatgttctttgtgataaatatgcgacccggcagttatacggctactgtccatcatgggcgctaaactgggactacaggaaaaaggccattattcaagaaatcttgagctgcaatgctgatatcgtaagtcttcaggtaagtcagacagaagacagtcaacctagcattgataaaggaaggagcaactaggaatacattacgctgacacatttgaagttttagcttcagtagttcttaaagtactgcttttttctgttattagtgaatcctgggagtactgcctgctttgctttgcagtgctatgttgcaaaataggcaaatgtgttaagctgggatttatgcgtttgccatgaccgctaaatactcaccttcctcctccctccagcgtccctgcactatttttgaattgggtggcaaagttactgaaattctagcgtggtcaagctataacttgcattgccgaccatgttgctagaacaattaaggcaccgtgtaaaaaggactgacttggtacacgaacattttgggttctcagtgcaactctcatagtcactcatatgatcttgaacatgttactttctgcccaagggtctgaagttatgatttgt

SEQ ID NO: 119170 - DNA, 1097 bp, Homo sapiens
ttttttttttttttttttttgggtggtggggagacaggctctttctctgtcccccaggctggaatgcagtggcatgatctcagctcactgcaacctccgcctcctgggttcaagtgattctcagcctccgtagtagctgggattacaggcatgcaccaccatgcctggctaatttttgtatttttagtagagatggggtttcgccatgttggccaggcttggtctggaactcctgggctctagtgatccgcccgcctcggcctctcaaagtgctggggttacagacatgagccaccatgcccggcccggaaagatgttacattctttaatctgcagaccagtcctttgaaattatttcaagctctcaaactatacatagaagttaatatgcagactaatttttgtcttatgaaataactgtgctgtttacaacttttcaggaggttgaaacggaacagtattacagtttttttctggtagagctgaaagaacgtggctataatggattcttcagtcctaagtctagagctaggacaatgtcagaacaagaaaggaaacatgttgatggctgtgcaatattcttcaagacagaaaagtaagtcatcttattttttaaaaagaacgttttctcagtatttgcagggtgggggccaagggtgtggaaactaattggcaaatgagagaatgaggcactatattattactgaagcaaagaatactgtttgacctagggggtttttgtttgtttttaatcatcagaaataaccttgttttggagacatgcttaaagtactgctgtttcttcaggtgtttactagggtttaactcccaattgttaattgaaataccatgtagttaaaattccctctatgacggtacagggattcttaaacccatactttagaaaagaattgtttaaaaattacaaggtagaatattccaacataaaacttaaacagaagatgactacattttcttcagttgtaaaaatatttcaagttgttatttgtatcaataacagactgagagcaactttaaatggatgtgggaagcttgatgctgaacgtggaggattttccgtaatgtgatttaagtgc

SEQ ID NO: 119171 - DNA, 1050 bp, Homo sapiens
ttggcctgtaactagctggtggtattctcttccatagttggcagcattataaaatggcacattcagtcctaatcttgggattttataccaagtaaataattgagcgtaagccagaagtctgcatactaagatgctgatcgtggtgttatctttaattctttgtaaaaagtggaaacaacctgcattttacaaaataagtaaccagtaaatattatccaccagcccaattgcattgtgcagccattaaagaacgataattgggaagacacatgttcataaagcaaattataaactattcaatactctgtgatgacaactgtgtaaaaatagatttgggcaagtcctggcaaatgtaaaaggaaacattttggaacgtgggaatatgtatagtttaaaacttcttactattgcatgatcttttaaaattactttttgtatatatttgacaataaaaaaatttgtcttcattgtaggtgttgtagaatatttgagcacaggtggagtagaaacaaatcacaaagactttaaggagttgaggtataatgaaagtctcacaaacttcagctgtcatgggaagaatggaaccaccaatggaaggatcactcatggtttcaagttacagagtgcctatgagagtggcctgatgccttacacgaattacacatttgatttcaaggtgtgtcttgagactgataagcttttcaaacctgtcttttactggcaggtgttctgatacatcattatgtctttaaaactgtggctgtgtgttcaggctggaatgaagcagtcttgaattcattgacagcaatgttctttgttttttgtttgagacaaggtctcactctgttacccaggctggagtgcagtggcacagtgatggctcactgcagcttcaaccatgccggctcaaacgatcctctcacctcggcctccctagtagctgggactacaggcgcctactaccacgcctggctaattcttgtattttttgtagagatggggtctcgctatgcccaggctgatcttgaactcctggcctcaaatgattct

SEQ ID NO: 119172 - DNA, 5803 bp, Homo sapiens
cctggcctcaagcaatcctcctgccttagcctcccaaagtgctgggattatagacgggagctaccacatctggctcagctgcccttttaaactactttttgcatttctgctttcttaaaaatttcttaactcccagctttctatttctaagctgctggaaaagtaatcatttagattagactgtcagagtgtaaataagagtttagatagtatctcaggagcctttgcaccttagagcatagaaagtaaacccctgtttatcctcaggtgccccttcctttcaggttcttcaggagacattgaagagaaagcatgggtagcagccacagagtgggaatgcttagcgttttctttctctttctgttgctgatgcagtggcaggaagaagacacttgaatgtgcttcagtacatttggccaagagcatgtagaggggaggaccagaaccatcagatgggaacagtttagtagatgccatggcggggtgctgctgagagaaaagggggtcaggtagagacagtcctgccctcatggagctgaggtgtgatgagagagacaagtctcaaccacacaaatgagtagataattacaccttgagatggccattagcaagggaagtgaatctgtggtgagaggtagggtagtaagtaggtaggagcaggattcaggaaggtctttggaaagcagttgaacctgacattgaaagattaagaaggaattgacctcataacaagtagaagaaagtgttccaggcagaatggtggaggggggcagtgtgtgtgtgtgtgtgtgtgtgtgtgtgtgtgtgtgtgtgtgtgtgtgtccgtccgtccgtccgtcctggggcaggaaagaacttggtacctataggtcccctcacatcctcacccctttctcattccaaaggctagtgtggaagcagggaaagtggcacaaattaggctaggaaagagaagcagaggctgcatcctgaaaggccttttaggtcttgttaaagatccagataagaagaatgcttcattctgctagatttgacattttgcacggggaccatttggtgtatgtagtacagacctcatcctacaagctagtaagtttcacttgttctgttctgttcaccaaacatgacataaaggcatgtcttgaaagcactgaggattttagtgttgtcttatacggtgcttatctttttttctgttgtttttcagggtataatagactacattttctattctaaacctcagctgaacaccttaggcatcctgggccctctggaccaccactggctggttgagaataacatcagtggctgcccgcaccccctcatcccctctgaccacttctcactttttgcacaactggagctcttactgcctttcctgccccaagtcaacggcatccaccttcctggcaggaggtagtcaagcaccttcagaggacagccttgattcacttgtaaacttgtgaaaatctgaacataggggagtgaggtatggccactgaggatttttgcttgcttaagaatgatttggactttcaatctgattatttgataaggatatagtatgaaagccaggtgctagcaacagacaaattctgagcccaatatgctttatactgctagacagggattggtgtgtttgcacctgtctttcatttgtcataagagattttcctatttcttctacccaatagaatattttcatgcctggaaataggaaaatgtgtgaacagcgtattctcttcacacagaaatctgtagcactgcttttttgaggccagtagcaacatccagagatcattcttccatactttactccctcctttttcagacttgtttgtaaagtacagaatctgaatttagcctttatgattgtatatgatccacagaagacctgatttatgaaattttgtactaaaatcatttggaaatgattgtattgtaaactgaggctaaatttttttttaaacctgtttcatgtgttataaaggccagcttgtaaaagaagctgcaacagactttctctgctcatgatttgcactcttagggttttgttagcccttttgtactactttctttttaaattgagaacatggttctttacatataaatctgcttcaaccttaggatgttttcagaccagaggcaacttattcatgaatttttatgaaaactatctactaggacagataagctgaacagtgatgatctgtagacatttatggactgaatgtaatggttgatatatgtacattctgatatttttaaatctttaactttttaaagttaaaaacctacagctgcttaggtccagcttcttaactctttttgagacacttcctgtcctatctccactgtgcctgcctaaatttgttctcaccaagcactgcctgtgcatgcagagaaaatctgtgcatcctcttttatatttttaaaatactgtttaacatttgtgagaattttatgaaaatgcttttgtatgagctgtggctttttcccattgtgaagcattgaatatcacattttggaacatgttatagggtgagtccctggatctttgctcaccagatccaagcactgcttctcggtgtcattgcagtgtgctgcttgtcacccagaatactactatcatgtgaattctttttgtcgtcagtgtcttttccttagtctttttgttgttgttgttgttgttgttttaatcattccttttttaagaagaagtaattttccatttatgaagcagtatgaattagatgtattttcaaaacaggtccctaagacaattcttcagatcatttttaaaatgactaagtcattttagtatgtcaagcaagataaaaattacatcataccgtctattttgcccatagtgccatttagagatgaaaaccagctttaactttgcaaagtgaacatgtacatggtctgctctcatttattcattcttctctcaaaagtcaaatgaatgcagagggagcttggtcaaactgcttttgtttcaactgcaggcaggggagcaaaaggacgccatgtgagcattaggaaaaaaaatactcactcttactaacaatttttatacagaaaatgagtcattttggaaatgattcttatgttttttttttttctccttttagaaaattctccaaaaggttttgatgttgaatcttggtcttggacctgttttttcctttgagggttttttgttttttgttttttctaggatttcattgtgatgttttggttttgttttttgctttttgtttaagttgtgctgacaccaaacacatccagtttataatcagtacattggaaagctggtattgatgtagaaccagtgcataactttttatggggttttgttattggtttttttttgtaaagtgtgaataaaaggtatgtttactcatttttcctgaacactgtgttggtaatgtgcatcatgacaatttccagtgaaggtgagctggagctggttggactaatgagactgaggaagcagcttttcctacgatctgcattatgtaatcacaggtccagagagctttatggaagcgggagaggaggagcacttactcatgttgtatttgttaatggaggatgtcatcttttcatagatgctggaactagagtgcacttgttagatgctaaaggtttgagctttacacaaaatgtcttcatctgtatttgttattgtctacaatatatttgaatttggggcagcatattaagatgtaatggcctgttatgtcttgaaaatacttgttttgcctcttccaggcatactgcattctgtggatcagtttgaacagcttctccaccttatttggacagtgataaattgaaccaagagtgtagatttacaagtgtaaccttcaaaagaggaagaactatttggggtctgtaggtaatgaacagtcacaccaaaatagactatgatgcttttgttaagaaaggtttcatgttttagatattttccgtgtcctaaataattttcaataatctataatccctaaaatgcaataaaaactagtatgttttcacggtgtatattttttttcaaaaattctgtaacaaatatatttaatgtgttgccataatgtcatttcagtatttttgctggataaatccattttagaaatgtcttacaaaaagtttagggcatgttttctgttttaaagaccagaagtttgaaggcacccaaatccttgtcgccaatctcctgaagtacagctttaccatattagtggtcattatttatgctttgagagtttcaatattgttcgtcaagttaacttatggcataatttaagctaaagttgtagaaatgaattgttgagtgcaactttcatagtcccaaagataggcagagaacatctccagaaatgtgtgtgtgtgtgtgtgtgtgtgtgtgtgtgtttaatatgatttagtgacaaccaggaaaacttacttgggattattagcactttcaaacttagggacattattaaattggatggaatgcacttctaaatgtttaaattaaaatttcaaagctctttcgagattcaggttctcaataataatattcaagttttagagtttcactttgtactatttaaatttatggaactagtttccatactgacttgtaaggttttggggtcatatataaggactaaagccaagctaggcaaaacaatgacagcaccgttttttcagtgaagctctcagaatgtccagtacagatgttgcagataattccaagaactccttcagcaggtgttcttcaccattcgtaaacagtattttaagatgttcactttgctcttctttttggttacatacattttaataactggtatgttgaagtagtgtctaaaagtatctagtctttattcacagtacattatattgtgtgatgcactggactaactcttgtttaccattcatgtaacaaaacccagcacattatctgcactataagctcaaagaatgtcacatccgcccagacagctctttgatgagggtgatgggaactgaataaaccatacggactggcagtaacaagggcttttactgttctgttcagtggaaccttcttggtcaaattgtaattagctagcattatatttatatacagggtcttttttctttaccgatgtattttcctactcatagccaaccaataaattcagtatctgtttcaaatattttagaagtgtagtttgtatagctgtagtactgaggtttgaggaaaaataaatgttgatcagcagaccacgtatttaaaattctgaatcttctgggacagggttgtaactcagccttccaaagggaagagtgcagggggacggggccatgatatggggaaatggtgtaaactaatgtatttctttattggctgttattctgtataacactcatatctttgccaaagttcaattttatatttaggcaactgatggtccttttgcatttaggattttcgttgttgttaccttatacctcatgatataaggaatgggctcatgtgtcttccgtcttttggaaggaggttgacatattttaaataaatgcttttaaatacagtagcaaacattgtgttggggttataataattcattaaatgtcttgttgcctgtattttgttgtatgtgtaaactctaaaaacgtgtgacttcctaagtcttccgatgtcaccttacaattgagaaaacaacatgagttcctttgcttttagaacgacttccatagcagacgtacatttttatgtacatgtgggaaaaaccatgcaaaatctggacagtttagataatatttc

SEQ ID NO: 119173 - DNA, 1221 bp, Homo sapiens
atgcagtccagcagcccacgtgatcctgcagacgccgcatcatgctgaactgctggtccggagaccccaaggcgagacctgcattctcggagctggtggagatcctgggggacctgctccagggcaggggcctgcaagtgagccccttccccaccctgttctactatggcctttggcccctgccctgggtccctggcccgagctgcccctccaagcccatctaggctctgcccacctctcagctgctaggctagggtggtggggtcctgggcccctatccacacctcgtccccacacccttgcatctttctgttgagtacacacccgctgcacagctccactgcctgctccaggtgctgtgtggatagtcagagcctgtccctgcgcgaggggaatcctaggctggtcccccccggcctgtgaggcagccccatctccctggcatcgtcatgatgtattccttcacctggtgccagttctgtcccccactccactgaacacacggacccttgacctgtgtgtgctgacatctctccctccccacgtggtgctcctccagggtgggggatggagccggcttgtgacccagctcaaggtggggcctggagcaagaagcagggggtggcctgttgcccaggccttagggactgggatgggtgctgcgggtctagttccatccaaagaagaaggtagggagtgctggccccagttcctgaggctgccagctcagctagggactggaggagggatgatccggctgagccccagcctgccccacctgcctcatccataaatgtacctggaagggctgttgggagaacttagcgaggctggcacagccagcattctgctaccttgaccccttatctgtcttgatggctgagatgtgctggtttctggcatgagctcgtttcctctgtggagcactcacgtgcccgcatggtctgttagggccctatctcaggggtcaggagcccaagcagtcccgagggcagagcgagggctgagggcagggcgagggcgggggcgagagctgagtgcgggggcgagggctgagggcgggggtgagggctgagggcgggggtgagggctgagggtgggggcgagggctgagggcagtggctggtggtttctggcctggctgcctctcctgttcccgccaggaggaagaggaggtctgcatggccccgcgcagctctcagagctcagaagagggcagct

SEQ ID NO: 119174 - DNA, 1183 bp, Homo sapiens
ggaggagagaacggggccctacctgctccagcgggtggctggttcaggaccagcaccacccagccccgtggagccctcccccagcctggccgccacgtcccttccccaacagcttgctccctctccatagactttgagcagccattcatcaacaagcctgacacgctcttggtcaacaggaaggacgccatgtgggtgccctgtctggtgtccatccccggcctcaatgtcacgctgcgctcggtacggccccaccccaaccccagcatccgaccctcccatcccacccctgggaaaggcggccgcctgtctggccaggagcaaggggcagctgggcaatgatggtggccttgtccctccagcaaagctcggtgctgtggccagacgggcaggaggtggtgtgggatgaccggcggggcatgctcgtgtccacgccactgctgcacgatgccctgtacctgcagtgcgagaccacctggggagaccaggacttcctttccaaccccttcctggtgcacatcacaggtaacagggctgtgccccgttcccagtaacggggctgtcactgcctcactggcctcagtgggtgtcgtcctgtgagggcgtgggagtcactgtgtgcgtgtcaacaggcaacgagctctatgacatccagctgttgcccaggaagtcgctggagctgctggtaggggagaagctggtcctgaactgcaccgtgtgggctgagtttaactcaggtgtcacctttgactgggactacccagggaagcaggtgaggtcagcagcgctgccaggctgtcctgtccccaggagtccctgtgactgtacagcacacactgggcctccgcgtggaggatgtgtgggcccaggcctgccccaggggccccggtctgagtggcaagtgttccacccaaagaaaactcagggcctgggtccagggcttccggagccaccgctggctgggctgggaggtgtgccttcggtggggtagctgtgcaggagcccgcctgctgacgcggggcttccctgggtgcgggcaggcagagcggggtaagtgggtgcccgagcgacgctcccagcagacccacacagaactctccagcatcctgaccatccacaacgtcagccagcacgacctgggctcgtatgtgtgcaaggccaacaacggcatccagcgatttcg

SEQ ID NO: 119175 - DNA, 1067 bp, Homo sapiens
caggcacacccccggccctgtctgaggcccgcaccaccctagcccacggccaggcctgggtagatccaggtggtgagtaggggaggcccgccacgtggccggcgaggtcagcaggggttcatgggaaaggacttgtcggccacaggagaggacatcctgcctgcatttccctcttcctgcggcaggagctggtggccccgatttagcagcactggggggccacctctgcgccagctgggttgtctgataacgccgctcgtcctgccggccagcaagcagagccttgaccccacggaagccggggaaactgcctggcatagctggctgccccacggcggccgtgtgctgggagcttagcatctgctcaggccccctcctcctggtctccacccccacggggcactcaggcagcccacgctccccgcaggtccagcccttctcaacctcatcaccactccctgtttccagcatcttccagaaatttgtctccattctgccccaaagggactgctgtaaatgagccttcagggccccccccaactcacccacaagataagcaccagcttcttgggctcgtggtaccggcccttcctgctggagtcccaggccatccctagccccgcgtccacccagcctccacccactgcacacaccagccccagcaccatggcctttcgcccaccctggacgtgccctttgggagactgctgggaactccgggcagacggtgctgctccaagcggaaggggccttccggggcaggtgatggcttcgttcccgctcacagtgtgcctcagactttcaggtgggtttaggggaagcccccatcatcacccaactcaacacactgtcctcgaagctactctaaattctaccaaatggagattgatttgttttaagcagcaagcgtgcaccggcacatgcacacagatgtggcgtgtccggcagtgggccacacctccgtgtgaaatggtttctcagattgcttcacagcagggcacgtacaggttttaacctcgtcacgcagaccttattatgcttattttggagattaggaaattcaggcc

SEQ ID NO: 119176 - DNA, 1078 bp, Homo sapiens
ctcctgaaattggcccccctggggataggagcccatcctcaaccatccagggctctgtgggaaacaaggtttgagtccttcttcctggctctggggacagagtcagataccatgcgccaaaggttcaagatggttccattttatttgaagcaatgtgtttctgaagaacctacacaattctatatgtacatttatcaaaactaacctttcacttaggggggtgtgtgtgtgcgtgtatgtgtgtgtgtatgtgtattgtatgtgtgtgtatgtgtgtgtctatgtgtatgtgtgtgtatgtgtgtatgtgtctatgtgtatgtgtgtgtatgtgtatgtgtgtgtatgtgtatgtgtgtatgtgtatgtgtgtatgtgtatgtgtgtatgtgtgtgtatgtgtgtatgtgtatgtgtgtatgtgtatgtgtgtgtgtgtatgtatgtgtgtgtgtatgtatatgtgtgtatgtgtatgtgtgtgtgtatgtgtgtgtgtgtgtgtgtgtcatacctttccacttgaagaccgtctttcattttctccacgaccttgtgtcttctacctcacagattctcagacattgacttgtttgagtttctcagctctggcactggcgctgctacttaaagcatgcccatctctcactgtgataagcgccaaaaagcagtgtgcccacggaaagcacttgcagaagtgaggtgctgggacacagctgccaggattgaagatactgaggaaggaacggtgccaacaatttgctgactgcttccatggcgacaccgtgtggccatgttgtgccatgtgtccacacgtctgagacctgtcatctttaagatcactcctagtaatttaaaaaaaaaatttgaagtgagacacattatcttcaaaaattgtgcacaaagtgaggccttatgagcggtttttagcatgcaattttaaattcacgtgtctatacgcctaagacctgtcatctttaagatcactcctccaaataatttttttaaaaaaatttgaagtgagacatattatcttcaaaaattgtgcacaaagtgaggccttatgagcggctttagc

SEQ ID NO: 119177 - DNA, 1028 bp, Homo sapiens
tacatctgagtcttttaaaagcagcttccacattattgcatttgaccttaatctcattgctgtgatacatcatctctacttttaggcaaggaaatgttggatctaaaggactgactgacctgggtgaagtcctggaacaaacaggcagcaggactaggattcaaacaaaggccatatgattcccaagccagtgatttccactctgaataagagaagggaaagaacaccagacacaacaaactgcagagcaaaataggtaataaaatgcatgatttagtattcagggaatcctgcgaaataatgttgtagcttgtgctcagtataggaggcattgcacttccttctgctgttcagacaggcaaaaggccatgggaagtttcaacaccagttttgaagatggcttcattttggtgggattctcagattggccgcaactggagcccatcctgtttgtctttatttttattttctactccctaactctctttggcaacaccatcatcatcgctctctcctggctagaccttcggctgcacacacctatgtacttctttctctctcatctgtccctcctggacctctgcttcaccaccagcaccgtgccccagctcctgatcaacctttgcggggtggaccgcaccatcacccgtggagggtgtgtggctcagctcttcatctacctagccctgggctccacagagtgtgtgctcctggtggtgatggcctttgaccgctatgctgctgtctgtcgtccactccactacatggccatcatgcacccccatctctgccagaccctggctatcgcctcctggggtgcgggtttcgtgaactctctgatccagacaggtctcgcaatggccatgcctctctgtggccatcgactgaatcacttcttctgtgagatgcctgtatttctgaagttggcttgtgcggacacagaaggaacagaggccaagatgtttgtggcccgagtcatagtcgtggctgttcctgcagcacttattctaggctcctatgtgcacatt

SEQ ID NO: 119178 - DNA, 1024 bp, Homo sapiens
tgactcattttcacctcagccttccctaggtggtcacagatgttccctgcacaacctcacatttaaaaaatatatacattgcccacactctgcactggtcagacagaattttgagtatttggcatgttcttggcattagactgggattaaaactttgacaaaaatcataggatcaaaggacaataaaaccaataagtcatctggaaacaccctgcatgagaaataggtgttttatattttattttaattggcacgtaataattgtacatatatatgaggtacagagacatatttagatgtatacaatacataatgctcaattcagggtaattgtgaatagcatatttatcaaattaggcattttaattgagtttttagatcagaaaatagaagtctccaaggcaagcctgatggcttgtacgcaggttgaaagatctcatgtggagaatgtcgtgaacttgcattgctcttctacaaaggtcaaaactaggaccaacaggcgaaacttacaagagaacagattgtggctcaatattaaaaaaaaaaaaagtgaataaaatgaagcagtctaaaactaggctgcctggaaatgtgatattcccatcactcgaaagcttcctgctcattcagagggtgaaagttgacttttcaggatgatgtgaaaatgttcctgcattaactgaaacatttgttaggtggttttgagcactgcatccaaccctgatagttttctaatcttaacttatctttttaaaatttaacccctattcttatccctttggcacacataaagcattcctgcatttcatgtgcatatttgatattgttaaatttctgcattacaaagaccaatggttgtgctcatctctctgggttttgtttttttgcatttttttttgagacgggggtctcactccatcatccaggctggactgcagtggcactagtgatcctccccaccaagcctcctgagtaagctgggtctacaggcatacaccaccaggcctgggtaattttttgtatt

SEQ ID NO: 119179 - DNA, 1021 bp, Homo sapiens
ctcctgcccttctctcctgtctgacccccacttagcccttctctccttgcagcctagcagtttatagttctgagatggaaagttgaagggggcaagcaagacctctcctcagcccatgcccagctgtcaggagagaggtgcagggaggaaggccttgtgctgggacaacctctctcttgccttacctcagagagggactatgccctgacccctcctttctgaaaatcagtgccctccctgttgctctaggaggctcctgctggcttggtagaagacagaattcgatctgcctgtccctttttcccctggggtttgacacacaggctcctctcagcatgaggtggagcagtgaccaggtggagcagtgaccaggacgcctctggcccagtgctgcccagcctccccgcccgctcccaggcgccccatgtcctcacaggccaggacgccatggcaggatggagaggacttggtggatttttgtttcttgcctgacctcagtttcatgaaagaaagtggaagctacagaattattttctaaaataaaggctgaattgtctgaaaaatatttatgtgtgtgtgtcctggaaaaggaggtggcaggcagggaaagaaaggaaaagggagaatgaagagttaaggagagggctagacgggtgggaggaagcaaagttgaggaaagaaagcagatgagtgggagggaagagccagggacagcccaggggatgggggccaggtgggaaaggaagtccaggccacaaggtggagaggagccccggactgtgctcctgctgatcgtcctgtagagccaggaggccgcagcaggaaagctggtgagtgtctcctgcttctgcctcctgctggctgggcaggcctggtctggggaagaaccaggtcctctgatcagggtggtccctgagtggtgctttgtgcccggtgccctctgctggcccaggcagtgcttattgagtgccctttatgacgtgccggggagcctcagggtacacagctgataccagggttg

SEQ ID NO: 119180 - DNA, 1054 bp, Homo sapiens
ggtccatggggttagtggttggaggtaaggttgaaaagggatgtttcagacagtctgtctgaagggctttggatgtcatcataatgagtttgagtttgagtttgtgggcagtgcagcctctgatggtttttaaagcaagttaatgtcgtgaccaggtgtacttgtcaggaaggatgcgctgttgctgttgggaaggtttgtgagagggaagcaagattagtgacaggtggaccagctgggaaactacatcaagagtccagacttaaaacagtgtttcctacgaaggaatgagttcaggttaaagggctggagggcttgacatgggatgctagcagtcaatgagtaactttgtacttccattttcatagttttgaagttcttggtcctagatgtatttcagaattgagaattttttggattttgaaaagatgatctggtgaatttactctgtagtggaagatcagaagcagcatggcataagccaccatgtttatttctgtagcaaaatgtatgaatagccacagcaggagagagaaaagactataaatagccccatattagatcagatcagattttaccaaatgaggctggatgaggttttactgccaattgagtttagaaaacttctgtgttttagtgcttcttggatttggcagttacagttgaggaactgtggatgtttttagatcccaggcacatctgctgaatgttgagagccctagcacagcggcttggcagtgctggtggagccaatccctgtcttcatgtagcttgcagctgagggggcctgagagaagttgagcaagtggttgcgcttgttgctgttggtgaagggtaggtggaccttacatggtcccaggcgtcaaggaaggcatcttggcagagacacgaatcagagtgtgccaggtgaagaagatagggaagagcagagctggcacatgggcacatgcaaagaccccgacggtaggcttggctgttggggtaccagacgggagtgtggtagagtggagcaaagaaaatggggagaaaggagtgaaataacggccgatattta

SEQ ID NO: 119181 - DNA, 1742 bp, Homo sapiens
catcttggggagaaacccttcaagtgtgttgagtgtgggaaatctttcagttacagctctctcctttctcagcacaagaggatccacacaggggagaaaccctatgtgtgtgataggtgtgggaaggccttcaggaacagctcaggcctcacagtgcataaaaggatccacacaggtgagaaaccctatgaatgtgatgagtgtgggaaggcatacatctcacactcaagtcttatcaatcataaaagtgtccaccaggggaagcagccctataattgtgagtgtgggaaatccttcaattatagatcagtccttgaccagcacaaaaggatccacactggaaagaagccataccgatgtaatgagtgtggtaaggcttttaatatcagatcaaatctcaccaagcataaaagaacccatactggagaggaatctttaaatgtgatatatgtgggaagttatagtggcacatcccagaagagaacctatgagggagggaatgccctggatgggggcaggatgaggatgcctctgtagcaggcagagcttaccaagtctctccgaactcaaatggaagaaataccttatgaatgtaagaatgtagggggtcatggcttgtaatttacacagtgtaaatgaaaccatcctagaggattatgaggaatcctttctatgtgattttcaatcatagcaagcaagaaaggctccagtgtcaaggtagttcagctcttacaggatataaaacagtccatacttgagagaaaaacttagatctgagtgatggaatgtgaagcaaatcttcaaaatcagtagacatttctggacataaaacacagatgaggaaagggcttcaattagaagttacgtaatcaccatcagaaagttcatgtttggtaaattctgttactagaaatgtaggaaattcaggtatagctttgaatcccaattacacattggtcagtgggaaaactaagggcctccaacaggcaaattcagggaggataggtttcagggaatataaatttatttaatattagtggtctttaagtataaacttgatgtaattggtttgggagggggcagtgatgatgacttctgaaacaaaatttggatttccttttaggaaaagtagaaagcatagacttacaagtctaacaggagataggagagagtcactcataaaaaatgcaaattgatgaacgtactattgtgatacattagttgaatggatgaaacttttttaaagtttcagatgaactcccataatgaatgatgaatttgtgatgagggataacctggaagtggtattcacacattatgctacaataaaaggttctaccgtggagaggattttgacacattcagtaactaatggaacacaccgtcaacatgaattcgcaccttacatgacagaagtgattcagggattcctatgaatagaaatgctgagaaggaacgcattttattgcagaagctaaaaagctaaagtaccagtcatctagagagaaggaaattaatgtttcttaataatcctgttaaatgtttgattgtttttggaatgtgttattgtaaagatgtcatgcaggacatgtatatgttgtctgttgtaaaatgttaacgaatactttgttcagggctcactctctctttgtcatgaaagccagctccttgtggcgaggtaaagtggaattccaataaagaaattccttaaatcaaaacgggctgtgagtttagatggagga

SEQ ID NO: 119182 - DNA, 2114 bp, Homo sapiens
tccagggttctagcattttaacattagttccacaggggcagaaattttgtcatattcattgttgtatccctagtacttaaaaaccggtacatggcacatggtacctgtcacacagtatgttgtcagtaaatgtttgtcaagtgaatgttgttcattgttattccagtttgtttttgtttttttttaagagagtgaataggtgtccttttcattttcttggtttagtgtcacatttgaagacgagcactgaggatgaggaaccaactgaagaatatgaaaatgttggaaatgcagcatctaagtggccaaaagtggaggatcctatgcctgaatctaaggttggtgacacatgtgtttgggatagcaaggtagagaatcaacagaaaaagcctgtggaaaacaggatgaaggaggacaaaagcagcatcagggaagcaatcagcaaagccaagagtacagcaaatataaagacagaacaggaaggtgaggcatctgagaagagcttgcatctgagcccacagcatatcacacaccagactatgcctataggacagagaggcagtgagcaaggcaaacgtgtggagaacattaatggaacctcctaccctagtctacagcagaaaaccaatgctgttaagaaattacataaatgtgatgaatgtgggaaatccttcaaatataattcccgccttgttcaacataaaattatgcacactggggaaaagcgctatgaatgtgatgactgtggagggactttccggagcagctcgagccttcgggtccacaaacggatccacactggggagaagccgtacaagtgtgaggaatgtgggaaagcctacatgtcctactccagccttataaaccacaaaagcacccattctggggagaagaactgtaaatgtgatgaatgtggaaaatccttcaattatagctctgttctggaccagcataaaaggatccacactggggagaagccctatgaatgtggtgagtgtgggaaggccttcaggaacagctctgggctcagagtccacaaaaggatccacacgggggagaagccctatgaatgcgacatctgtgggaaaaccttcagtaacagctctggccttagggtccataaaaggatccacacaggtgagaaaccttacgaatgtgatgagtgtgggaaggccttcattacttgtagaacacttctcaaccataaaagcatccactttggagataaaccctataaatgtgatgagtgtgagaaatcttttaattatagctctcttctcattcagcataaagtcatccacactggagagaaaccttatgaatgtgatgaatgtgggaaggctttcaggaacagctcaggcctcatagtgcataaaaggatccacacaggagagaaaccttacaagtgtgatgtctgtggcaaagcattcagctatagctcaggcctcgcagtccataaaagcattcaccctgggaagaaagcccatgaatgtaaggagtgtgggaaatcctttagttataactcactacttcttcaacacagaactattcataccggagagagaccttatgtatgtgatgtgtgtgggaaaacgttcagaaacaatgcaggcctcaaagtccacaggaggctccatactggggaaaaaccatataagtgtgatgtgtgtgggaaagcctatatctcacgctctagccttaaaaatcacaaaggaatccaccttggggagaagccctataaatgtagctattgtgagaaatccttcaactacagctctgcccttgaacagcataaaaggattcataccagggaaaaaccctttgggtgtgatgagtgtggtaaagctttcagaaataattctggccttaaagtacataaacgaatccacactggggaacgaccttacaaatgtgaagaatgtgggaaagcatacatctctctctcgagccttataaatcataaaagtgtacaccctggggagaagccctttaagtgtgacgagtgtgagaaggccttcatcacataccgaacccttacaaaccacaaaaaagttcatcttggggagaagccctacaaatgtgatgtgtgtgagaaatcttttaattacacatcg

SEQ ID NO: 119183 - DNA, 1702 bp, Homo sapiens
agtacctggaggggaaggtgtagaagaggaaacaaatttgctttctgatactttaaaaactttttgtttggtaataacttcaaatgcacagaaaaaattcaagaatacgaacagtaaaaagattcccatcactcagatttacctgcagttaacatttgacttcattttgtcctcttgctctctctttcatacatgcaagtatttttctaaaccatttgtaggtaattatatacatcatggccctttatccctaaatacttcagcgtatatttcctaaggattgggatagtctcatagataactacagtaagttttcaaattgagtaaattggaagttgatactgcttttacctagtctaccatccattttccaactttttcagctgatgtaattgttttctataacaattttcccctccgctacagatccagtcaaggtcaggaatgtaatatagtggtcaagtctctttagccttctttaatctggaacatttgtacagctcttctttgtcttttatgaaaatgatgtatttgaaaaatacagtcccccctcttctctccaccctctgttttagtagaaaacattgttcgttttgggtttacctggtgattcagttcatgtaatgcattctcataggtgatgtgtccttctccctactaaaagcatattatgtctatctgcccctctggaggtgttaaattagaacacctggccaaggcattgtctctccactcttgtatttttcccccttgtaaataatttaagcattataaatatttaagaccatgcggatatcctgctccttgtcagaatttcctcctagacgtagaattcactgatgattctctcctgatccagtctttactctgatagttgcagagtgctgacttttccaattctggtattccttctacatttatcaaccagcactcacattctgctgtaagcaagaggcctccctttctcccctgtttgtacctgtgtagactcatgaaatcctatcttcagtggtttataatgtatcactatacttagttattacggtgcttgaacactggatgttcaagctgggtcttgcagcgtgtccctaccctttttttgagcctctctttacttgctggtatagcatgatgctcatcttgtatgtttcctgctttcagcctgcaatcagccatttctttgaggagctctggttccttttagtaaataatggtaatagtagacccagaatggggtactagatgtgctcattaccactggagtgttttgttttttgggctttcagcaaacagaactaggaaatcaggaaatatatgcaaatatatgcatacagccatacaggcttgaatatacatgcatgcacatatatgtgatttagaaatcataagttcacaccagtactgcaaattcatcccaaggttcattttcgccttcttctcttgcttatttttatgtccctttctctaggagagccctgagcccaacaaaatcaacacatttactcaggttcttaatacatctaaagttgtttcagaatcgctttgttcatacctctacagaaaacctgctaacagttgaattatttgtacctcttcccactgccccgcctccagctttccccagactgaatgtacttacgtagtcaaatacgtttctaagttgcctggattacttctgtatttcttttttgttctcttcctg

SEQ ID NO: 119184 - DNA, 1129 bp, Homo sapiens
tatttttttacattaactcaaccagttattggcagattgttacatatgacaagtcgttatcaaaatcactgatgtagagtgtttaaagaacaaataagacgtaagtagttcttcccttctgagacttgtccctatatttagtgttacactagcctaatagactaattgtgtcaatgactccaagccagtccctgccgggtttgattcagaaaatcagcctcccttttagtatcgcctttgctcacctcctcccctacgacaactagaaatctcttctccactacttggcatgagaatgttctatttcagttttttactttaaggaaaaatcacctttcattcttatttctatatttaagcaatagaaccaactcacgttaatcatatacattcctaatattcataagacaaatgcaacagtagctagaacacaaaccatattctcttctcatctgcatatcacttctctgttccttagtcccatctttcctttgtacattttgcccctcctaggtactctttgttctgggttggtaagcattttgtcactttctcttgtcttgtttcctttctttgctcatctccaaatcaaagacagtatccaaggatttaaggtgtagaatccacgcgtgaaccttgaggtggtagattgtcttgtggaatatggttggactctgcaaattgaaagtcgttccgggctagttgcagtctgttaataggaaggggttttcggccagagcaggccacggctcctctctaacgagttgtctcggctcttgaaaagtggctcctgagtctcggaggcagagacagcaagaatgtagggccggttcttaactgtttgcattcacttttctaggccttggcgataaagcatgaacaagaagctcggaagagtgcccagaggttgttggtcgtatgtagtttggaaggagtgggtggcgttctatgtctgacgcttttggctgatgtaaccaggctattagactcatgctgcgtgttgaaaactggttagaaagggcttgtccattcagcctttagaacttttaagaaattcaggagtttctgggtctttatatggaagagttgtgttttgggggtaattccttacttgtgtcatcagggacac

SEQ ID NO: 119185 - DNA, 1232 bp, Homo sapiens
gaaagcacgtgaagagttgtggcaaagggtgagaggtccactgcgtgggtgagacaccctgcagccagcagccactggaagctgctgcccctgaggcccacgcaggcagtgaggcgtggcacacttgcttatgcttacatctgggaggcacagcaaggggcaagctttgtttctcagaggtgaatggaggttacctgatgctgatttggtttcctctatctttccttccaggaattcaaaagcacgctgagcaggtgagtgacctcacagctcctggggcctctctaagttgcttcttcccttttcactgagccttgtctttattccctgtcccctgacctctcacctcctgatcccccgacttgcttgcctggggaccttccgagacaaacgcccacctgcctggccatgggtttttctgcatgaggtctggctctcccttttctacctctttctgccaagaggacctcgccatcctaattgtcacagcctgtgggagcaaaatggtgcacacaggcccttctcagagcccttgtcctgcaggtgtagcaatgtgcctggccccaagccaaccacagtctcttctgagatgaagaataaagtctggaatgtttctctcaagacctttgtcttaaaagggatgctgaagaagttcaaaggtaggggcctgggcgccaagctgggccacatagtgcggtggtggtggagggttcctggtagctcaggggtccctgggtgtgctttccagaagctgtgtgtgaaaataggagctggctgtgccatggccagattggtgtaggggctgtggtggcaaatctagtcaggcccccgcagggcatgccgcttctcatgggcacagatggggtagaggggtactgctgggggactggggttaggaagagagctgtgcaggggagctcagctcagagccacttgggtagagctagaatgcttgggtatgggccccctgccccccgctccccatgcttggccctgtgcctgcacgttcactcttggccttaggagtctctggggaatgaatgagtcagttgggatataaagagctggtgaccttgccatataatctcccgtgtcgctcatgcacgccttgctttgtttctcctcctcagaggaccttcggggagagctggagaaagaggagaaaggtagggatggtgctgtgatggcgagtatggactgtctgccacacagagatcctactccctgctcgt

SEQ ID NO: 119186 - DNA, 2497 bp, Homo sapiens
ggtggcgcccagcactgtcccctcccctcgtagagacacggttgtcgtttgggagtagggaacactgtgttggggtgggttgtcggcaggacatctctctggctgctcttggggcgaggtgtggaggggcagggctgggggtggagccgggtcgccagggcgtcggtagggaagacccccgcccctcgcccccccaccgaacctctacactggctggctggacactaagatggctgccgttgccatgacacccaaccctgtgcagacccttcaggaggaggcggtgtgcgccatctgcctcgattacttcacggaccccgtgtccatcggctgcgggcacaacttctgccgagtttgtgtaacccagttgtggggtggggaggatgaggaggacagagatgagttagatcgggaggaggaggaggaggacggagaggaggaggaagtggaggctgtgggggctggcgcggggtgggacacccccatgcgggatgaagactacgagggtgacatggaggaggaggtcgaggaggaagaagagggtgtgttctggaccagtggcatgagcaggtccagctgggacaacatggactatgtgtgggaggaggaggacgaggaggaagacctggactactacttgggggacatggaggaggaggacctgaggggggaggatgaggaggacgaggaggaagtgctggaggaggttgaggaagaggatctagaccccgtcaccccactgcccccgcctccagcccctcggaggtgcttcacatgccctcagtgccgaaagagctttcctcggcggagcttccgccccaacctgcagctggccaatatggtccaggtgattcggcagatgcacccaacccctggtcgagggagccgcgtgaccgatcagggcatctgtcccaaacaccaagaagccctgaagctcttctgcgaggtagacgaagaggccatctgtgtggtgtgccgagaatccaggagccacaaacagcacagcgtggtgccattggaggaggtggtgcaggagtacaaggtgagagaagtacagagagaagatgggagtttagtggggggatggagaggaagtaaggggacctgggaaaaggaaacatctcttcacccaccaaagaacctcatggtattggtgagccaagtttgcttatctaagcacttactgccaccaaggtggattagaatgagaaggattctgtacacagagcagatgcagtgaagacgaccagggaaggatggcttcctcaaagcaaatagagcaaagccggtgatgccagatcaggtctctagggctttaccagaagtctcgttttctttcgggtgagtcttaagtctgtccttgacggagacacctagagatggaaagaactgggggcttcaaaggacaagaaaaggctcagaagcaggaacacagagataactgctagtgtcagtgtcagacccaaatgctctgcacttgcctcccagtgggttccccacctaccacgatatggcttggttctgtcttcaaggactttggttggctctgtgtcattcttatgcactgactagaaagcaggagcttttcagtcagaagacctggctctgcaagttgcattgtcaaatcttgattaagtctgtgagtgtctttggactttaatttgtccaggattgatagttaatattcactggacatttatatgtataccaggcactgtactaggcacttttcatggactgtctcgttaaaacccagacaacactgagtttgatatgttttccattcccattttatagattgggaaacaaagtcagagaggctttaagtaccatacagagggccacagagcttcagtaataattgacttagttatttactgtcccttcccctggtgtatactaacaacgccaccaccatttggatgtctgttgtttgacttttctgatgtgactttcttggagtctgattctagtttgacaaataccttgcccctacttctcattttgactcttctttggacataggtaaaggagatttgtttgcaaggcagccagcacaaatagcactacttagtgaaggcctggatgggtttgaagcagtgggaccaggaggaggagggggtagcctctgtgtggtctgcacagagctttttttgttttataactcatgttttcagaccttctcctgattcctgctataacttcatttaggtattattttcgttaccccaattttagagtaatgtgtctagggtttctcagctctgagtggtacagctagacatacctacattacctcatcacaagtaacaatttcttttacagagtggccttttttttttttaattttttgagacggagtctcactctattgcccaggctgaagtgcagtagcatgatctcggctcactgcagccttcacctcccgggttcaagtgattctcctgcttcagcctcctgagtatctgggattacaggcactcgccaccacagctgg

SEQ ID NO: 119187 - DNA, 3044 bp, Homo sapiens
agccccacagtttccctggggcccaacttccctcaggacccagtctcaggtctgtgaagggaaaggcaaaggaaggtcgtggaggtgacctccctacctctcgcagcctgacagaacatccggctcattttcctcacgatggcatctgtcaggaagtcatggctatggggttggcacgggtcaggggaccagacctctgggggctgcagctgtacctcttcacacctggaggaaggggaccgggcagggggtgggaccacgatattcccagagggaaaagcaaaagctgaggggaaggagaggagggtccaggagatggaaactcaggtcctggggaaggaaggagaggagagggataccgaagagaagcagggacagggaaccagatgccactgggtcacgaagggcaaagactgggaacacacctattgaaagtctccttgatgtcctgggaataagagaaacaaaaagagggagagggagaaagagataaagagagtgtcagctgcacagggacagcgttccccgatctccagtcagagactgaacctgagcaggaagggagaagcagcaccctcacggccctcaatgaacacacatccatttcaaccaccccatgcctcgccatacctaactcgcctcatcctgctgtgagcccagggatactgtcatttccacaatacgacttgctcacctttttcaggatgtcactgtcaaaaagactttcctcaactgtcatttaaacctctcctacaaccgaatcttcatgcttttcactgggtataatcgccacacataccacattcgacattaactctgtttccagctttaaaacatgtttttggtcttcaggttcaatcactgtgggttcctcccagggagaaaagaggcagctctggacaggcgtttggtaagcactgcctgacagccaacacagaatgctgggggaacagggaggggacattgctcacctggagcagccggagacccccctgctggctccgctcctgggcctctgccagcaggcggctgagctgggcggcctgttctgcaaggcgactagccgcggctcccgcacgccccagctgggcttcatgcatctctctgagacgccgttccagccctgcctgctcttcagccagaaaccgtgtcagtcgcccaaactccgaggccaccgctgccagctctgacttcatctggctctggaatggtgcaaaggggatggcagacaccacctcaacacgtacgaagataacctccagttttgcaactactacttctcaatgcaaggcaaaggagccctacactccccaggtccaagatagtcccggaaagaggctcatcccctaccagccttaccagataccacccccttgctcccagcacagtggtctcaaactcactaacctctgcctggaacactcctctccacctgactctacctaagttgactcatccttcaggtccaaccttaaatattccaagacaagccttccctcctctccagatctaaatcgggaccatccccacaaatatcactgtatctctctgtggcacatataatattgaaacgttgtgtttaaatgacgtaactgttaacatcctttcccccactgtaccatgagctcccactgacagggactaggaatgtctttgtttgccagggtcctcggaccctgacatagtaccaatcagagtaggcacctggtaaaaatttttgaaatgaataaataaaagaattcaggaatcaaaacatgaagttagggtcccgacgccattaaacacagtgaccttaagaaagtcacccaaaagccccagatcagaactcggaaaaactttttctgtgaaggtccagatagtaagtatttttatgctttgtgggctaagaggcaaaaatcaaggatattatgtagggacttaatatcctgtaacagaaaaaactcctgcccagtcccaccctatttgccagggatggcccttcctgggtggtaggcacacttttcacacagctaccatcggctgcagacgctgtgagcagcaggccagaggagggtcccaactgaccagacgcgtgagggaacagccgccacagtcagcttcactctatgccaggggcacacagctcctgttacctctatacccaggagagcccaaaagtatcaacttgggcagctggccagaagcacgatgacttcctactcccagacagatcctaccattcagtgcctagcagtcgccagcagcagagtccctaacgttcaggtggcagtgagcatgggccctgggtagtggcaaggcccaggcactggctgggaagggaggagggaagagggacagaaggggaggtcctggcttggtctatgaagctcacagtgccagcccatcccagcaggacctgctggggttatgaaaacaggcgggaggtggggatggaaaatgtatcttaaaagactccttggagaagggcgagcaataatggaaaaaaacaacaaaaaaagcgggggggtcggggtgtgctgagaaaacactagactaggaaatattaggtctctgcagtgctaacatacactaaatcctgccccagcttaaacacactggccccctctcaggacacagcaagtgtcccaggacagtgtccgcctcatgcttagggctgctctgcccagtgcctgcatggatcctggggccggcagcttctctgatggctgctatgtgggttttgctttgcccccttcaggctctggtgtcgggtagaaagcctgttctgcagccttgggccaggcacctaggccctccaatccaggcctcagtttccactccattttggaaccaggaatgaacatgcctcctgattctctaaggccccgctctcctcagcacctagggaaagcatctacccctctcccaggccttagctgtcccctcctcaggggaccaagtcactccctgtgagagtgggaagccctaccttccttgcctcgactgtactgcccatcagccccgtcgagaacattcacccaccttcagttctgtcactcgcctct

SEQ ID NO: 119188 - DNA, 1014 bp, Homo sapiens
gctgcgagaggtagggaggtcacctccacgaccttcctttgcctttcccttcacagacctgagactgggtcctgagggaagttgggccccagggaaactgtggggcttgagatggagcaggatccaggcagccactctgaggttgaggtttcaagccatgagcaggtagacctagtgcaggcaggcctggagggtggggtggggtggagtggcaggaagagccaggctgggggaagacctgtcaggtatcctaggaacaagagtgaggagcaagatgagcctgcaggaatctgaggctggcctctgggatggtgtggggagctggattcagggagaaagggggcccaatctgtggagttggctgctgacaggggaacagccgttccagccctggcgtatttgtcctccctccctcccaagtggacctgacgctggaccctgacacggctcacccggccctgatgctgtcccctgaccgccggggggtccgcctggcagagcggcggcaggaggttgctgaccatcccaagcgcttctcggccgactgctgcgtactgggggcccagggcttccgctccggccggcactactgggaggtagaggtgggcgggcggcggggctgggcggtgggtgctgcccgtgaatcaacccatcataaggaaaaggtgggccctgggggttcctccgtgggcagcggggatgccagctcctcgcgccatcaccatcgccgccgccggctccacctgccccagcagcccctgctccagcgggaagtgtggtgcgtgggcaccaacggcaaacgctatcaggcccagagctccacagaacagacgctgctgagccccagtgagaaaccaaggcgctttggtgtgtacctggactatgaagctgggcgcctgggcttctacaacgcagagactctagcccacgtgcacaccttctcggctgccttcctgggcgagcgtgtctttcctttcttccgggtgctctccaagggcacccgcatcaagctct

SEQ ID NO: 119189 - DNA, 1542 bp, Homo sapiens
tactcccctcaatttataatggtgatgaggcatttctggcttcagtttcaactacgtgtggcaaacatctctaagtagactgaacagttagtaagttaggttaagatattaaaatggggagcagggtccacatccctgttgaaataggagcctgcctggtaacaggtgcaaagcatgcctttaactgcaactaaccagttcagttgtgtggcttctcactgcaggggcggcaaaggaagaaatcctgagttacaccctcacctgaaggaacagacctcacaagagaagcaaataaacattttatttccacagcacgccttcccttttcccaaagaacatgagttcacctcagccatcaaagcagagggcgaaagctgcaagtgacaaggcaagaggctcctagaaaaatagattatacccaaggctctcctcctggggacccaaacccgtccccaggctccccctcagagcttgccaaatggagtgaaaggcatggaaaggggctgggagaaaagccagctccactgaacaaaggggagaggagcctggcagtgagcagacctgggaggggtgtggggtgggatgagctttgctccttggttgagtgctggaaaagggaagggggaagaaataatttatgttgatgtaattaatgtaatgatgatgtaatggtgcgtggtttcaatcatggcgaccattccagatctctctcaagtgaagctaaattctggccggtctatggaggtagaaattgaggacggaaggaaagtttagaatccctcctccccaggagaatagacatttattacccagctctaccctttggcccagcctgcctccccaaatggcttccaaatccctcagctaaaatctgcatcagaaaatggaattggaatggggatgttgccttgcccaaaccctccagcctcagaactgataaagaggttgaagagcaggggtggggaaaaggaagttaaggaatgaaattacaatttcccctcatcccctactcaaattccagtcccagggctgggctaggcagactgggagagaagaccaggcagctgttctcattatcagggacccatgcagacctgttggacagacatagtaggtgagagaaggctgagctggaggccaggagggttctttaggctcctagagggagaagcaggggcctggggtcaagggggagtgggaagcaacacagtaacaagcagtgggaagagcctttgagccctcaaacttacgggccaccctccaccacccaccccccaagtgctgacagaggggcccctgcgggtggcaggataatcaagggcagagcttgatgcgggtgcccttggagagcacccggaagaaaggaaagacacgctcgcccaggaaggcagccgagaaggtgtgcacgtgggctagagtctctgcgttgtagaagcccaggcgcccagcttcatagtccaggtacacaccaaagcgccttggtttctcactggggctcagcagcgtctgttctgtggagctctgggcctgatagcgtttgcc

SEQ ID NO: 119190 - DNA, 2946 bp, Homo sapiens
gccaccacaccaggccctattattattattatattttttttggagatgaagtttcacttgttcgttgcccaggctggagtgcaatggcacaatcttggctcattgcacccttcgcttcctgggtttaagcagtgttcctgcctgagcctccccagtagctgggattacaggcacccgccgccacacctggttaatttttgtatttttggtagagacagggtttcaccattttggccaggctggtctcaaactcctgacctcaggtgatccacttacctcgccctccctgggattagaggcgtgagcttctgcgtccagccaccatctctaaatttttaaaaaattttcttgtctggaatctaaagggattctattgagcttaacggtttgggttcttggtttttgaaaggtgctgccagccatcatcctactgaggggtagggctgggaggtctagcatttcatgggataggactgtttgccctaatttcctttccatcttctgtaggatgagagccactcagagtgggtgtcttgtgtccgcttctcgcccaacagcagcaaccctatcatcgtctcctgtggctgggacaagctggtcaaggtgagcgtcaagccaaggcaggggctttaccagtcagggtgtgctcccaggtggtcatacactccaagtcctgtggaaagctttgcagatgccctcagttgactctttctcttgtcacatggtctgatgtcccttgtaagtcagcacactgcattggatatgtgttataatctaacgtgaagtggccaggacatgttactgaatgagaaatggctaccgtatccagaagtgccaagcccttttttgttgggcctgaccctagctcatcaagagctaggatgttcacctgtcaaccgcacgtctatgcaggtatggaacctggctaactgcaagctgaagaccaaccacattggccacacaggctatctgaacacggtgactgtctctccagatggatccctctgtgcttctggaggcaaggtatttggggacaaggcgtctcctactcagtggaagacagcgtcatggaaggagcacttagccagcgtctctaacgtaaaatggcaaacattagccaagatggttttaggaggataatgagataatggcaatctgagaatatgtttccaaagattactttcagcaaatgacagttaaggcatactatctggaagaaaaagatgattttctataagcctgtgggttttttttgttgtttttttgtttgtttgttttttgttttttttttgagacggagtctcactcggctgccaaggctggagtgcagtggcgcgatctcggctcactgcaaccatctcccgggttcaagcaattctcccatctcagcctcccgagtagctaggattacaggcacccgccatcactcctgggtaatttttgtatgttagtagagaggattttaccatgttggccaggctggtcttgaactcctgacctcaggtgatccgcccacctcggcttcccaaagtgctgggattacaggcatgagccaccgcacccagcctaaagttggtttcttgaagcagttgatgagattgggatcctggttttcagaaatgattggagtgatttatgtaagttgggaggggttttttgatggggttggtaaggtcttacgttaaaggaaaggtatacagagataaatattggtacttgagtcattagctttcaaagaagcctggggtaatggaggaaaggtaagaattgattctgacagaatcttgagatgggcagaattaacatctggaagaggtcacagtgtcctgatttaccttacctgtgtccaggatggccaggccatgttatgggatctcaacgaaggcaaacacctttacacgctagatggtggggacatcatcaacgccctgtgcttcagccctaaccgctactggctgtgtgctgccacaggccccagcatcaagatctgggtgagtgtgggttacaattgactgggtacctggctgcactctgagccctggcaatgttttggttattatatatgccatctgactcccacctgggagctaagctttctcagcctccacgtaatgacattttggtctgagtaactctgttgtggtgtgcagtcctgtacattccaggatgtttagcagcatttccagcttctactagatgtcagtagcaaaccatccttccactagtggcaactgaaaatgcatgtaggcattgatacatggaccccagggagcaaaatcatccctttttaacttgagaatcttgaggggcttttaagaggagactctcttgattggtaagtcttaaggttgcttttgccctgttccccaggatttagagggaaagatcattgtagatgaactgaagcaagaagttatcagtaccagcagcaaggcagaaccaccccagtgcacctccctggcctggtctgctgatggccaggtaagtgggtctgtcctctcaggtgattctgcttccagttaattttctccctctcattctgttagtatatctagtctgtcagacacaagagcagtgtccttggcataaagtgaaatgacaagccaggttgatgaggatgccctcgtttgccatgccagtgaatgtgtttctgcatcagagggaagactgatgtggaacgcagtggctgtcagccttcaattaataccttaattaatctgaccagttttcaaatgtctggagccttatcaccagctgtttcttcctcaaggaatacataaccaccacttacaagctggctgttgaaatgagagcggtttcttacagtctacccggcgttgtggcacatgcctactggaggctgaggtgggaggatctcttgaactgcaggggcttaaggctgtagtgagccaggatcgcacccctgcactccagcctagacaatgg

SEQ ID NO: 119191 - DNA, 3400 bp, Homo sapiens
gaacaaaaacctcgtgaggggagaacaccctccggaagcacagttttaaagtttatttttaacattttaatactctactttttaaattgcccatcgttacccacgatagtgaaatgaaaattaagctcccctggggttgccccgtcaaccctccccgcaccaagtggaacaggcggagctcgagctatgccacataggggcggggaagcagcccggcggtcctcatgggaatgtgccgtacacttcacctctttcgcttctcgctctacatcatccctgagaagcctttttaaacacttgaatgtgcttgtttcagagtgtatttgtaaagtgcagtcagattttgttgtacggaagacgggactgtgatgccttgcaatttccctctgccttttgcattacatggcgccgccatcttgagcagaaatgtatcatggggctcgccattttgcatggtcgagcgggtatttccggttccggcggggggcttttctctctctctttcactgcaaggcggcggcaggagaggttgtggtgctagtttctctaagccatccagtgccatcctcgtcgctgcagcgacacacgctctcgccgccgccatgactgagcagatgacccttcgtggcaccctcaagggccacaacggctgggtaacccagatcgctactaccccgcagttcccggacatgatcctctccgcctctcgaggtacggactaaggtagatttcaggacccgagattgcagggctgggggattccgcgtgtcgtgtagggaattccgcgtgtggtgtggcaggccggtggcgcgcgagttggcggggactgacagacttctctgccccattgtgaattggggcgtgcggacccgagcctaggcctcaacccgggcgaaccacattgcagatgagaacctacgtgtacatcagctcgcagctgctaggagggttggagagttggaaacttttaaaatatcttttgccttctccttcgtagtgtggccgggggcctacgggccgggcggggcggtgatgaccccaacatgccatctgagtgtcggtgctgaaatccagaggctgtttctgagctgccgcccggcccaaggctcgtggggaggcaggtggactccagaggacctcgtggctcaagtgtcggcctactttttctgcccctggttctccccgtccctatccctgtgttcctgactgcgtttagacgcttcttgtgcttccgctttgctgctacactgttaagaattgtctgacttttgaatcatgtctggctgttaatcgtaaaatttgttgagtgggacaggtttcagtaaaagcatccaatcctgtagcgcctgaagtggcttttccagcattcattactacatttctgtcggccctcagaggtaggcataggaggccccagctactctacagccacaaactgctgtgcatttggttgcagagaagacacaaagtggctgttgagttcgtctgagtttcaggaaagggtgtctgtatttctggcacctaaattaagttctcaggatacaggctgggcgcggtggctcacgcctataatcccagcactttggaaggcagaggcgagtggatcacttgagatcaggagttagagactagcctggccaatggtgaaaccgcatctctagttaaaaaattagccagacgtgctggcaggtgccagctggccaagtaatcccagctacttgggaggctgaggcgggagaattgcttgaacacgggaggtggagtttggagtgagccgagatcatgccactgcactccagcctgggcgacagagcgagactccatctcaagaaaaaaaaaagttatcagggtacagtttacctctacgtgcgtttttagtctggaatagagccactcagtcctggtctgtaactgctcttgtctgttgtttccatccctccttaagcgtccttagttgttgttaacccactcatgaccttgacacttagtgaattatccagtgtgttaaacgggctgcgggttcctcactgatttttcttctgttttacctcctttagataagaccatcatcatgtggaaactgaccagggatgagaccaactatggaattccacagcgtgctctgcggggtcactcccactttgttagtgatgtggttatctcctcagatggccagtttgccctctcaggctcctgggatggaaccctgcgcctctgggatctcacaacgcaagtagctgctcacttagctctggggccttgggaagaatctgggcagaagtgaggtggatgcaattggctggtttcccaggggagatccagtccatttgggaactggaaagcagagcacacctacagaagatgtttggcctccctcactttaaataagttactcagcattgctgaggagtgtggctgaacatttttgccaggtgcaaaagttctgagtgggcagcagtttgaacatgttttaccttgaaagctcaggtaattggcaggtggaattagagggtcctggtgatgacagatggcattgtcagccaatccccaagtgggagtgaggacatgtcctgcaattctgaagggattctctgtcacttggctcttctctttcatatactcagtcacttgactctgtgatcagagccaaatccagggttgtatgagtgatgcaatgagacagagacaaagcccaggaaatgagtctgaccgttgaatgagagtgtttgctaagtctgagaatgacaaactcctccctctcaggggcaccaccacgaggcgatttgtgggccataccaaggatgtgctgagtgtggccttctcctctgacaaccggcagattgtctctggatctcgagataaaaccatcaagctatggaataccctgggtgtgtgcaaatacactgtccaggtaaagtgagccatctccaaggatctcttccaccctcttaaactttgctttttttttttttttttggcgacagtctcactcttgcccaagctggagtgcagtggcgcagtctcggctcactgcaacctctgcctcccgggctcaagggattctggtgcctcagtctcccgagtagctggtactacaggtgcgcagccaccacgcctagctaattttttgtgttttagtagagacagggtttcaccatgttgcccagggtggtctcaaactcctgggctcaggcgatttgcctgcctcgccctcccaaagtgttgggattacaggcgtgagcccccacctgcctatctttgcctttttttttttttttctcggagacagtttcgcttgttccccaggctgaagtacaatggcgtgatctcggctgaccacaacctccgcctcctgggttcaagcagttctcctgcctcagcctcccaagtagctgggatt

SEQ ID NO: 119192 - DNA, 1077 bp, Homo sapiens
acgcaattcagtggtctagtcctttataccgactcagattccttaagcatgcagagtcactcgaatgaaaaaacatactcgacctctccctaaaaagatgttgcaacccagtttctctgaattccaccacaaaaagagaccctgaataagaagagcagttttcctgtgcatatagagggtgtgtcaaaggtgagctttttggggaccgggaaaaacaaagttgcctgattccgcgcaggtgcacaggccccggatgtacacccggaaaggggagtgtggctgtagaatcatccatccgtctacagctaaaacaatttgccaataaagtacatgtttttcctaagccaaaaataaatacgttaacagaaaaatgatttaggatatagcttgaatgcttaaatatgtgcacctttacaaacctctcagtgtattcttggagttcttgaaatgttgttttaatatttgttgccagtaatgttctttcttcacagccgctccgggaattctgaagttctgggcctttctcagaagactgtaatgtacctgaagtttctgaaatattgcaaacccacagagtttaggctggtgctgccaaaaagaaaagcaacatagagtttaagtatccagtagtgatttgtaaacttgtttttcatttgaagctgaatatatacgtagtcatgtttatgttgagaactaaggatattctttagcaagagaaaatattttccccttatccccactgctgtggaggtttctgtacctcgcttggatgcctgtaaggatcccgggagccttgccgcactgccttgtgggtggcttggcgctcgtgattgcttcctgtgaacgcctcccaaggacgagcccagtgtagttgtgtggcgtgaactctgcccgtgtgttctcaaattccccagcttgggaaatagcccttggtgtgggttttatctctggtttgtgttctccgtggtggaattgaccgaaagctctatgttttcgttaataaagggcaacttagccaagtttaaggtcgcgtgcgatgcattcttccctagccaaggggcagtcaccacgcgccct

SEQ ID NO: 119193 - DNA, 1029 bp, Homo sapiens
aagttgtaatttacttgacatttttccctaagtgtctttatttcaacattttcatatttctactgttaacacccaaaatacttacattctggttaaccctgtattggtaaacacattgtcagaaaccatctgtcaggtcctgctaattctgtttgctggggacttaccatgtgcgaggcacaccatgaagtgcctcgttgaatcctcacaacagccttatgatacatgtgggctagcttaccgccacgtccatttagcagaggaaggaatcagggcttagagagaggttggtgacttccgtaagactgcaaggcagtaagtagcaggactcatgttcacactctggctctgtatgtccttgacttcactactgctcagctcttccttccagcggaatatgctttctgacatccatccacctgggtcacagctcagagaaagttcatcaattccagaggctaataaacagtagcaacacggaaaccggtagtgcttttatggctcagagtggaaggtaaaggcctaaaaaccccatacccaagtgagggagttcaaggactactattccaacaagtcaggggggacttcttggaagaaagggggatttcaagagctacttgagttacagaaccctggtttagtgggtaagaggagatgaatatgaaataagttagatgaaagccgagagagaaaccaggacctggagcaagttaacgaggcagctgagaaaacaaattagggaggttcaaggtacttcagtgctccagtggcatttcatttccagcacacccatgttctttgtgggtcacagcatggcttcatgtgagttagctgagctggcctcacttgaatgggaaagagctattagaaatcacttggttttttactaagactttctttatcagtgtaccatgaaagagcatattctagaaatgatttgggcattgcaaaacaagcatcattgccttaggctgagcacactgactcattctcctgtctcttgtcatctttgcatgtagatttttttaa

SEQ ID NO: 119194 - DNA, 1087 bp, Homo sapiens
ttcttttgctgagttaaggatccataggtagaacttttcagctgccttctccacacagcaagcccaggcagagccgggcactggctcccctggtgttttcttgcgttgctaggccgccccatctgtcgggctgtaaaacaagtgtctccgtcctgcaggttactggaagagctcctgaacaagttcaagagtagcatgcacttgcagctcacctgtttccaagcagcttcttcaaccatgatgaaaacataaatatctgccacataaaagaagtccaggaaaataacacgtaataagactgttcactctctaagtaccctaaaggtatttggtgtattaaacattgggtttgccatttttctcttttttcttcctctgacttcgaaaattgttggtatacatttcaaccaaaatgacctcatttgaaatgcccaggaagtatttgttttgccattcttactagatcagatcctgtatgactttaaaatacattttaaaatatattttgcatctcagcagaaggttgagtgctgcaggaagagctgcttctgcagggagttttctggaatggcgtggcacatattgaagcatttctcagtgtcccgttcacggaagcgcaggcagctcccacgacacacggagagactgactgatacgagatttggaaagctatgtagacatctttggagctcttactgtcctaaactgtacagctgtgcttaaaaccctcatttcatataaatggccttaagttttctaattcaagcgggtttttggaaaaatttatggtctccattaaaatacatattacaactggggtagattatttgtggtccaggtgtctgtgatttaactttgcgttttgctatctgatttttatttttcacagggctaagcatgagctttcattctcactcactcttaatttgtcgtgcgtcactacacatgcacgtgttgcagtccctgaggccctgtgtgttatctgtgatggagtgtgaatgtgtaacgggcactgtgttacactctgaggtgttggcggggcggtcgcagacttcagggtcccctaacggaaaggccaggctccgcg

SEQ ID NO: 119195 - DNA, 1041 bp, Homo sapiens
atcctccatgtagtaggatctcaatgaatttatgttagttgaatgaatgagaacttttagccattcccttagaatgaacaatttcagcccaatcggtaataaaaaaaaaaaaaagtacttgctcctgtatttaattcagcgattagctttttggagagagaccatcaatgatttatttttatattaaagtttttgttaccaaaaattataataccagcacaggcactgcactgggaggttatgatggcagctcgcagagctccgcctcactccggccctttccgatgcatccagttgaatgctgcctctttgaacctcactggcctgatgtgtggtttgactagcggtaccacttcctgtccacacaggaccacacatttttcccttctctttttccaacattaccagttatttgtatgaagcagttatttcgtttttttgtgtgaggggaaagaaggcaattatttcctttttttcattcaaaaagataaaatctagaaatacaaaagttctttcttgtccaaggttacgtctttgagctccttatattatccatgtgaaacctgtgctcgacccaaaataggaagcttgattttttttttccaaattttctgcccacaaaaatatggttcttttggttcaaagggtcctgtgcctttattcttcccattcatagctttgtcttcagaattgcattgagcagtttacacttcacctcttttacggggtgtcttattagtaatgcttaggcgggtgggttcttgccaggaagtgtttatgatgtcggggtccgagtgggagttgagttcacagcaggctgtcactgagcatgtgacaccgcctggcttcactctaagtataattttctgctttttagtcagcactctgcccccactcttttcttttacattgaggaatttcaaaagttaaaaactgccttcgcatttccagtcatccttgcaccgtagcacatcgttagagccccaaatcctgacacttgttcttgcaggagtgttgacaggaccccggttctcactgagg

SEQ ID NO: 119196 - DNA, 1038 bp, Homo sapiens
tgtgtgtagtcactgctgtgtgtgtgtgtgtatgtagtcactgctgtgtgtgtgtgtgtgggatcactgctctgtgtgtgtgtgtgtgtggtcactgctgtgtgtgtgtgtgtagtccctgctatatccccagcccctggaaaagtgtcctgcatgtaataataatggacactcaggaagtatttttaatagtgtgccagtttgcctgttccaaaatcaagtgaccttcctatatgattaaaagaggaaactgacaaatataccaagaaagaaggctgctctactattttgatgcatgaaaacaagatcttcgttgctggagaatatgctgggttacaccggctggcttacaggaaacagcctacaagttcttgctcagtagagatgagccttgttttctccatggggaatttccacacggggctactagattaattgctaagtggtagtagtctaggttgatactgtgtgggtggggacactttttgtcaaatatcatgacacattctaatttcatattcagacagtggaggagatacatgttgtaaatgcttagaaactgtttctcattccctcgcttgaacaacatggaaagttgtgggggtttattgaaggggaacctttttaaaaacagtacttattactgcagcataataatgtagcctttaactccaaggagcaaatccgtttgccttgtatttttcttggcacactgtccacactgatgatccctccctaatactgtgtgcaccatacatttggcattgtatggcccactgttgttggagcacaaactgaaacttaggtttccctgcacacttacgtgttcactccatcctgatatacctggacatcttcctaatatccagcacgtgcggagcattcagcaaatacctaatgacattatttcagtatattgctggaaaaataaagcatattttggaaagcaaatagattaagcctcagcaatattctatactactgtacttactttattcaaactatatttttcaaatggatcctgatgctcaaaaggac

SEQ ID NO: 119197 - DNA, 1010 bp, Homo sapiens
gctgatcaataagagatcctactgatgaaagcaatgaaaaaaaaaatcctgggatggaaaacagaaagcaggagagggcgaaggtacccattcatgtgctacataggaagggtgtcctttcctcaaatagtcattgaaaaaatccactttagggcaaaagacatttatcaatttgggaatgagggcactaaaacctgacgaaggggaacttaaaactctttagttagtccaacaagagctgattttgctgcagaatggttaggactttctctctgttctactaatagtgatacagtttctggttatctttttcttttttttaattaggcagtaatttcgataatgtgtgttcagagtgtaattgaatagataattcacttgaaaaaaatacaccaaagttttttcagtagtgtttcagtttgacaataaaaaaaagtacattgtgggatatttatagtatttttgaatctatttttaccagtagactgggagtgataactgatttggggcataggggttaaaaacaggaaatgtggtttatacagtaggtagtatctccagagtttccagggttgatttcttatagtattgtctgaagagtgttatgcgtcaaaacaacattaggccgagtaccttgaaatccgcctgtgtttaaaggagccgtctttccaattacaacaggaaatgcttcatggaaaagtttgcattcttggtataggttaagatggcatagcagttgtttattgtaattacaacacgttcttcctctccagcacttttcagacactttttatacagtcagagtaaatcttgtgtcacttctagtaaatttccttcaattttcgtattaaaattttattttattttcatgaaaagttttgtcaaatagctgttaagaatgttttaaaatagactatcatagctgaggaggagcatatattagggatactgttaattacagtaatcagagaatccaagttaagaggataaaaaggcatgaagaaatagga

SEQ ID NO: 119198 - DNA, 1036 bp, Homo sapiens
gaaactgaagtccagacgaaacactgtctacagccgtcaaggagcatttggttgacaaactgggacttctgcctctgcctcctaacacttttcaaaagtatatcatttttcagcaagctaatcaatgtgcttaaactctacattgtatcaagagtctaaaaatagtacaattagcataaaaagctcagtttgtggctagatttttaagtgtgtggagcaagagacatcaacaaagcagtttgtgtctatgggagcaaattaaaggcaatgttattaaaatccttatattgcagaggatatttacttgagacttagattctttttgtatcaatttacttcagttttctcataatatcacatactaataatcaaaatgtttgagtgacaaccagagtaaattcataaatgtaatatatctgaaaacccatttttcttttttgaaattgctgtcatttctggttgcaaatggtgtgacagcctatgattacagtaatagggactttaaggattatacatagaatgcatgtgacttttagcaagtttgtgtattgaaggaatttaataagaggttttatggaatcacaaaagctaccttcatggactttaaatatgatggatatgaaagaaactaatattcttgtactctacggtcgggttgtattaatgaaaagaaaaattggtgtgtgtgcttggactttcgtttcttctcattttcctccttggtttgtgctggggcttcctttttcatattctgctaaggaaaacaggttcggcagatcatttagcctcactggggctgtgctgctcgtggacacgtgggccgtgtgcagccgcactgcacgtaaaccgtgggtgaccacgccgtgctcttggtacggcacgtggtctggctcttccccacggggactggagcacactgaagataacacacatgcagtgacccagttccattccagcctgtgacccaagagaatgagtgtttatgcccgccaaaagacaccaccagctgcattcataacggctctgctggaaatac

SEQ ID NO: 119199 - DNA, 2079 bp, Homo sapiens
ccaagtcatttaaaaacttttggttatggaaattttgagacatatctccaaaccgaacagtctgacaaatccagttgacctgttggccgacttaagcagcgatcatctcacagccagtcttgtctgatctgtgcccctgggctccccactgcctctgagatctgttattttgaagtaaatcccagatattcgatcatttcatccatacacagataagataaggactgattttttttaaagaaacgtaatcataataccattatgagatctggagaaagttaacagtaattccttaattttatcagctatttagtcaatgttcaaattctcgtagaagctttttagacagtttgttcgtatcaggattcagtcaaggtccacacattacttttggttgatatgtctcttaattaagaaaaataaacctctcttgagtcacttttggtgctcagtgaagtggttgtttgcctgttacccacccatctttaaatgaataaatcgggttttttgttctgtagattttctcatattctatatttttcagatagcttcctcatggtgtcatttaacctgttcctttgtcccttatgtttcctataaatttgtggttaataatgaagctatcagtttgaggtttgattttatattgtttacttccatcaggagataccttatgtttggttgtctctgcttttgatgataagattgaaaattgaattcaagtgttatcagcttggtataccctttaaaagttcaccataaacttttcatctaatggttttagcaccattggtaattgttttcataatctatttcttattagaaattgaaaataataattgttagctggaacactaagtttttttcattaagctctgaagtacagttcatacaggaggggcaggatagatgcctgattagttagcagttttcagaatgagttggtttgctagtatttctcaaaggtcattactaaggtatttttttattttttgattacctttatgaagtcatgatgtaaacataatttgatgagcttcaattcattgtagttgatttttttttaatttagttgtgccctctttgtgggagtctcttcaggtgggccctgggtcctgacagtacagcctcgccatagggtgccatgttccacactcatgctggtttccttgcttcgtagaatcagccgttgggaggaattgatggaatatgaaatatgaacatcttccttcttctcttttatttctttccacactgtgtctctgtccaccctgtctacccccaactggctttttctaaccccatagctctcgttcagtctcaccccaaagtcagttctacagctgggcgggctgtggcagcatcagtcatggtcccttctcatattccagcagcaccaccacttccattcaggtcattgccagctggacctgctcccaccaggcaggtgagaaaggctgcctgcgttccctctaccgtggtctctccgtcagtgaggcgctggggaaggtgtgtgtgtttcttctgtcatattctatatctgtactaggaactctgagaatttaggcttctgaggtgctatggaaagcattagggattttttgtcacttgacctggttttgtttatctaattatggagggactctctccaaaactcatttacatgcttcacagctgtgtgccctgtggtacacagatagtgacagatacttgcgtagatgctaccgtcttggcatcctcttcccccagcccagctattatttcctcctggtcttggctacatttggtgtgaatgttagccctgaatttgttgctgttcttaaacagtttagtcagaagacttcgtggggcattggaaaacctgcctttcttttgatcccttggcttcaggcctgccctgcagagccagggaagcctctggtgtctgcacatatgatgacagctcagccagctgtgccacacagctctgttgggccggggctaggggtgcagtgatggagctagacgagctagctctgtgcgtgggaacattgaaagctgacaacgagcgctgcagtttggatcatcttcatgtacgcg

SEQ ID NO: 119200 - DNA, 1049 bp, Homo sapiens
ttgctctgttacctagattggagtacggtagttgaatcataccacgctgcagcctcgatctcctgggctaaagtcattctctcaccatagcccccaagtagctgggaccacagatgcgcaccaccatgcctggctaatcatttttattattatttccaaagatcctacttttggcattggtggttttctttaatatttacctttttaagatattgatttctgttctttatcttttccttctattttctttgggtttaattttctctttttctagatacttggggcagaaaattagagcagtgatttaagtttttctccttttaaacttttcttttaaaacattttcagctataaatttctagccactggttctctcttgcagattttgatatgttatctcttcattgtgtgttattagtatttcccttttggatgcctccttcctttgaagaaatcttacttcacacttgtatttcacatgtccagggagtctctaatcatctatttcggtttgtgtttatagatactagagaaagagagagataaagaagggcgagagggaactcagagttattgcctgtcactgttttcctcagtagttcatcttcttcgttctgatgtgtttgattttaggttagagccctttctcattacatgggtgaaatactccttgaacccttgcatatccaaaaatatctttctcggactctgttaagagaatgacacgctggctaaatacaggattcttgggttctgttctttcattcctgtagattttaatccagtgatttcagctcccagtactgcatgtgagaaatctgacgtcagaccagttctttcttctttgtaagtaaattattgttttgatctagaagcttgaaagtcagtctgtctctgtctctctctctctctctctctctgtctctctctcatttagagtaaatgtattagaaactagaaactttaacagtagttgcctagatatgtgggctgtcttaccagtctagcctggcactctgcaagcctactcaagttgcaaacttgggtct

SEQ ID NO: 119201 - DNA, 1044 bp, Homo sapiens
tcttggattcattcatgggaattgtacgtaaaggttttagaaagataaataacttctcattgggataagaaaggttttctaatgaatcattctttaatcagaaacatagattatgtcttaagcatttcttttaatcaagttataaccatatttaatgttctcttgatgtacaagtgctaaagcatttcttatttttaaattatttctaatatgttttattttgtttttttaatttttaagactgctgagaagtcaggccagattgaaagatcaaagaatgtaaggcaaagacaaaatgattttaaggtgagtaagggtgataagtatgtagaccttttcacagggtagggtttttcctttctcactttgtattcaagacatccattactgcccaggcagcatcttttagttaatgtaacccgattaatcacatttgaacacggttatgcttgttcctggttttctagaaaatgattcaggaagtaatgcactccctggtgaagcttacccgcggagccctgcttcccctcagcatccgggatggggaagccaagcagtacggaggctgggaggtgaagtgcgagctctccggacagtggctcgctcacgccatccagactgtaaggtgagtatggacacattctcagagaaaggcgtacttctgttttttttaactttttggaaagaattaatacattcagtgaagaagaaattcttctttttcttctttttgtccttttgcctccactgtttcctgttcatcatctgacagctaagctcctcactgttcctggtttttgtgttggactagaatgttcttgagtttacgcatcttctccgttgtttcactcagtattactctgacagtacagtcccagttgtggtctgtttctgttttcagcctaatgctgtagctcgtaagctccgtgaggaatgattatacagtgaaagagatgctagggattgctttgcgatcccactctgctcacttctgtttggatgtgtttgttcgcagacttactcatgaatcgttgactgcccttg

SEQ ID NO: 119202 - DNA, 1165 bp, Homo sapiens
aacccaccttggtggtgtgttcagaatcaattggtggggacaaatgtgggggaaaccatggaggtcctccaggcaggaaacagtggtggtttggataaggtttcgtcagtggagttggagagcagttggtaggtttggttgtattttggacgtggtgttcaggtgagggagaggaaagcaagaattctgacgttgctcgcagtgggctcctgagcaggagtgccgtatgccaagccagaaagacctaagaaagagcatgcttggaggaagcttcagatttccattgataatgtggtagattgagattcctgggagttattcaatattcacatatgggtcacagaggagatatttgggctggagatagactttggaaggcattagatagaaatgatatttgaagccacgggaacaaactagacggtatagacagcaaagaaaaaaagtacccaagcctaagacctaacaaactgcaacatgtagaaaagagctatttgtcacctcagtgagcagggcattcatttgctcgatgcccataccccataccaccaaccacgttctgattctggtcttcacactgggcagacagaaagcagctgaacagacactcagagccgctggtgttagccgagcgggcgtgcgttaggtgggggtccctctgcgcatgcctccttcctcactgcagcaccagggcagtaggttctccttcaggcggcctgtctcagccacctgggctcacctgctgctgtctcagtgtggctgtgttcacctgggccactgcaacatcctgctggctggtcatactcgcacactggcccctcattccttcttcttaatgtaggcctcacagcactcacctgcttaaaacacttcagttccttctcatttgtcttaaaaataaaggaaaaatcaacctatgagttaaaccctggggtacaaagaattttaagtgtcattgaccagtgaactcaggagctagctttttgaatgattattgagatggattgcaggtttagtttttatacatacctttaattctttcaagacaaaaacatatttctacaaagaaaaaaatgataaaagctgcgtagtttaatataaaatttaaaaatgaatggaaactacagtttgaaggatgttggtctgtgtatgtgctgcccgtttt

SEQ ID NO: 119203 - DNA, 1052 bp, Homo sapiens
ccctgtggtattcagagaaaatgttatgagcaaagatggtgacagattttcagagacagcagtcctacatacaaagctacctttttccgagaaagctccttttgtagatgaagcatttggcagcagagtttgccgtacagttgataattctatgagtcctgcattagatccttgtctggactcgtttttgtagtaataatatacactggtgctagcagatggtgcccttcggagtataacacgaggccaggacaggagctcacccttgcacctcacacacctggtcctttacccccaaacgctccacatgcctcttgcatcctctaactctgtagcccaaatgtgatcatttaggtttttctaagggtggaaaaagatgggaaaaacaagagcaaaactaaggttaatattttaaaaactcatcttgaaaccttctaaatactgatggaagagtttatggtgtttgtccagcctgaacaggttaaccattttgcttctcttcccctatgttcaaagcagccttgtgttctgaattgttatacatgttaaacttttactaccttattaagaagtgtcacccgtctcttaaaattcctgtgaaataggtccaaaattagactgcgtcttcagaggtttcctgccaggaaaagcctttggttaaccccctactgacattcacaaacaggatttttaaaggtggtcttcaaaggtgtttttttctttgttctgaatgtgagttaaaatatatgctggctatgtctgataacttaagggagaaggcatcaggctactcatagagaaagtgttaccttctttcagagatgcacttaattagaacttctaaaaggacatcattagaattagggttcagtaggcaacatttagaacatggccacactgttaagtaagcagtaagttctcgagaatagccgcagagcagaagaaaagacatttatacctggctcaggttctctttgaaaacttagagatggtatgttccatctgagtggtttatttcgagtcttcacagtggtggagctattatagaaaga

SEQ ID NO: 119204 - DNA, 1003 bp, Homo sapiens
acttgcctttttctaaaaaagaatttaaggcagctggctatttaagaaggtgtctaaatctgagatattttgtaaaaattataggcccagggaaaatggctatgtgcaaagttttgagttctgtccacgtcccttgtctgtcctttttctgatgtcctaggtcccagctacttatcctgctgatttagaagaaagtgatcagatgaattaatccttactatgatgttagtggcttaaaaataagtcatttaaaataaatcttttcacaactatagtttacatttgataggaatgcccatgggcatctccttaggtttaaatataatgtacaatctcatcaggaagtagagttaagaatcattggaagaatgaaaaaacctcacaccagatctttaaaaattctgtgaatttaaggctgtgatgtgaagctagttttgcccttccggcttaagtgagtcccgtgggtggaacgttctgagcctgtatgtgaatatcttttcacaaacctgagtgatccctaaaagaaagcattttctagaaagaagtgttctcttggtagtagcatttgaggacttggatttcattctaaatttaggaatttaacagcacttaattttttcctctgattattattacttaattgccctgagatcttcccttgtttttatctttgagaaccaagtcaccaatgttgttaaaatgaagatattctgaatttaactcaaacacttattgaagctgtttctatattagcatagtcagacattttaagatcttggaaggatattttctactcaaggatgttatttgccctggagaagttatcaaactatgatatctgtataaaaaacatgtttacttcagtaattttaaaaaggtggcttataggaacagttgacatagtaagtatatgatggtatcagagaaggagatccttgttccggtttgggaaattctagggtctgtttcatgtgttaggcttaccatagtgtggtaatgtgat

SEQ ID NO: 119205 - DNA, 1084 bp, Homo sapiens
aggcattcataataaataaaaggtttagatctacgcaacaatttgaaagctttttgatttcatctggcttcgtatgatattaatctgtgtgctacttagcatcggttttagcatatttagtgttctccactgaaggaattattttttctttcttgcatgttagaagtgtcaaactttggtttctttatttcatttcagttttgagcagctcaaaatggcagtcaccaacctaaagagacaggctaacaagaagagtgagggcagcctggcctatgtgaaaggcggtctcagtacattcttcgaagcacaggatgccctctcaggtaaggcgatcctcagagccatctgctggcagcttccgccatggaaacccggcactgcctgcagggtgtttacagggtgtgacactcggtctgtttttatcaaagtagagatctcaaatgtgctataaatatttgttgcagagtaggctggcatctctttgaagacttggtactttaaaaatttatctctgaggcttttgttaacccatcttacatgtgtgaaatgggagactactttaactctctgtgatgtccacactccagggctgatacgaaattaaatcccaatgcacaaccaccaatatcttacatatgtgactaattctataaatgcaacccattgtgtgttcactttggaaaggctgatgataggataccagtctcttcagcccttatcgcacaggcgcccacgtatgcacgcaggtagctgtcactgtgccatctgtgtatgggagggacgttgtatggagtacagatgtcatagctttagacattttaatgcaagatgttggtagagttttttttttataaaactgcttttaattaatgaaagtttaattattgctatttagtaaaaagtaatctatatcaataaaagttaactcaattctttttaatagctaagatacttaaaactaaatacccatatagcttaagtatccataactctaaccatgcattgaggccacatcttcttcaattcaggaaggtaaattttaaaaattatttttattcctaaagtatagacattcttttattat

SEQ ID NO: 119206 - DNA, 1024 bp, Homo sapiens
tgctttgtgattagatgtggttttattagtactttgatgatttcttagtatgtcttaaaacaactttcatctaggttttaacaaaaatcattttaacaaagtgatttaatattttagaatttcactgtattcaaattttgatttttatacattgaatggggattgatgtcatattttgataggtttaataaaactgtcaactcagccagatgtcttaatcctctttaaaccttatattcttttattgatgtaatttctgtatttcaactagtttcctatcttttctatataaaatcaaagtttaagtgatagaaaaatcagccatgatgtgggaaatatattttgtacatatatacaaacatgttctgggtaatgtatgattaatatgtattgttgtaatggttagtattcatatgtgttatactggatacttagtgataccttttccatttttgtcataataaccattgaaatatattttaaacgttttttcccctcagaagtaaattttcgcagaaggacttagaaatgctattccatggaatgagtgctgattttacaagtgagaatttctcagcagcctggtatcttatagagaatcactcaaacaccaggttagtggatatgggactgtcaactgtgaagggtttcactcagatgctaaagatggaattacacggtaactcgagttttaggtctggctctgcatacagttacatggttttaggtctgcgagctctttgactttgcgtttacccgtgaacatctcagggtgtctgtttccctgtttgtgcaatgggatgattctttagaggtctctcatttcctactgtcattttatgttcaatatatttcattattgatgcaggttattaaaaatttatggagccttagctggggacttaaactgacatgtatgaatgtgatctctccctactcaaataacataaaaattttaagttctggggtaaaacatggaacacactgccttctctgaccatagggcaaaggaagatgagttggt

SEQ ID NO: 119207 - DNA, 1084 bp, Homo sapiens
cagacattttccaagagtttacatgatttcagaatattctcttgaataaacagatattataggtcatattatttcatcttactgactttctgaattttttgtgcagatttaatcagctacatttaacaatgtttaattgtagtgtttattatttgtaaaatatgtttgttattgcaaaactttgtctaagcagcttaatttgtcttctctgttgagtaatgtacaatgaaaccataagctgagaggtgtaatttttgcctttttataaatttttttagtgcttataattaaactactagtcattttttaaaaatttagctgttatgtcctcaaatctcttaaagattatccaacaggcattttgtattaggtctttaagaagtcagacaataggccagacgtagaaggtgcctggggtaggcttcatcttattaagcatatgctcctcatttctgtaggcattttggatcagtctgctgtgtgggttgatgaaatgaattattatgatatgcgcactgacaggaacaaaggaattccgcccttgtccttacgtcctgctaacccgcttggcattgagattgaaaagtgagtaccatcttgctttcagtcttctttatttttcagttcctgaaaagttttatatacttacaggaaagggactcaaactccagaaacatcccaggaaacacagttgaagacacctcagttgtttggagatgggtgttatttatgaagccttgttagctatgctgcaagtaaactttgcagttagttaaaacttgtggctaaaactacttttacctcttcagttttttgattttgcattttgtgaaaaagaaaagtctttagtatgttgtctagagatggttaagtttaaataggtagatggcacctgaagtcaaaatagcatacataatctgtttttttgatttttctagaagtattttagaatagccaggtctaatctggtctttaattttgtctataatgtctactcattcttgcttaatccagacttatttaactttaatcatcagaattctgccaggtaaatgatatctttcaagatgccttataactgaat

SEQ ID NO: 119208 - DNA, 1082 bp, Homo sapiens
tcctgattctaacacatcaactgcaaaataacttttagaccatatgaaaaaattgacctggggctgggtgcaatgtcatttgtagaggtacaaactaagtcatttatggatgaaatgatacaatgctttaaagagctccctcaacaaacaacatgaaagtatgttgaaggggagaggcagctaaaacaagacacagaatgttgaagctgggtgatgggaacttggaggttccttatgctagtctctcttatgtatgtttaagatttccataataaataaaaaaaaaaatagtcatccggagtatagcatagagcaagggtctggttttgaatcccacctctttcacttaatagctgtgatttttgacaagctattgaatctctgataatcctacccttgttaataaaccatttggcattttagaatacttccttctaggaactttttctgtacatctgtctgttcatacctatctgcctatttatttattcgtatgtctttctatttcgctaatttgttgtaagtattctcttggtttcgcatgtttttcataatgtttcactggctgcatagtttccttgactgaacctttacattttactggatgttttggtggatgtttccgttttttccccgtcttgctgtaatacatttttgcagttatgggaatcttcatgcctaatagcaatccccatggtttgaattattttagtcattgttcacttttcaagaatacattttgagtcaaactgtggaagcatgtctaaggctttgacacgtggccgaattatttttcagagtattggaacagttgtgctgctgccagcgatccgtgggagctgtgtacagattcagccgacaactatgagccttcgagatcatcttaaatatcttgtgttgttaataggccagcggtggaacctcttttagttgatgtttctctgaggttgggttttgtctttatgttcgttggttggttgcatctcctctcttgtgaactgtaagcttataccttctcaatttttttttgaagctcttggtgttttctggattgatttttgtgagctgtttatataataaag

SEQ ID NO: 119209 - DNA, 1046 bp, Homo sapiens
ttccatcactgcgagggtaaagctttctcctaccctcctggtaccttttcactcctcgccctggtgtacctttgcctcaactgatctggaatcagacttcaggaatttagtcatgttgggcactttttaaaaaatgataccatcctgtatttctttttgtgttcagttttttggggttctgtgtttatggtgctaatgatgttaaactaatgctcagaggaattctgaagcacagttattcacaaagttgtacaaccatcaccattatctaagtccagaacagtttcatcacacccggagaaaaccctgaatccattatcaatcctttcccactttctgcatccatggatttacttattctgaactttcatataagtggaatcatatatgtggccttttatgtcaattatgacataatatatgcataatattgttagtcattactgtatgacttttacctaggaagtgaaaattctttggagagagagagagaggaaaaaatactgataaatgatggttatagttaagtaatcatgtgtggaaatgaacttgtattttagaaactcggggccgggcgcggtggctcacacctgtaatcccagcactttgagaggccaaggcgggcagatcacgaggtcaggagatctagaccatcctggctaacacagagaaaccctgtctctactaaaaatacaaaaaaattagccgggcgtggtagtggttgcctgtagtcccagctattcgggaggctgaggcaggagaatggcatgaacccggaaggcagagcttgcagtgaccccagatcctgccactgcactccagcatgggtgacagagcgagactccgtctcaaaaaaaaaaaaaaaaaagaaactgggaaatatttaataggaactgcggaatggtcaaggcttgtgttggatagaagtgccctatgtgtgactggctgttagtcaccagcacttttctgcagtgctgtgtcatgcaggttcctgttcccagcccttctggagtttcaccaatgccggtgctaattggttgtttaaa

SEQ ID NO: 119210 - DNA, 1034 bp, Homo sapiens
aatcttccagaattttcctcatcagtacccgcttcttatctctgcagaatgtacttttcagcattttcacgcttttcgaacctttcatcctttcacatcatttacacacactcttagcaagcggtcttgccacctacatcataaatgaaagagatgtaagtggagaatcgcaggggcttcctgccaaaaactgttcctcctccccagtcacagtggaagaggttgtatttatgctaagaccaatctcctacctgggctgtggatcccatctaccccgcctttgtgaggacttcactcaggtgttcatgtcttactaaagccttccttctgttggcctttatacatgcttagagacagacaagaataaagtaaaacagaaaaaactagaatcctcccttgatttcacattgcccttttaaaattcctctctttttcactttcctgccacatttcttaaaatagttgtttgtagccaacttctcacccatcccagtgctgtctggtttcagctacgatcactctcctgaaggccaaagtcattcttgagcttctggtcacaaaatcttgttcctgtcatttcttcagggtaatgcctgggacatagcaagtgtataataaacatttatttgactgaataaatccaaggatgtttccttttcacagccctagtttttctgtttttctggggtataggagtccaatactgtcatcttttgaggatctgggtgactagtcattgtatcgcaaatcatcttgacggactaggtaaagatacaaataaatattatttgaggataagttcagtggctcagtgcctgtaatcccagcactttgagaggccgaggtggaaggatagcttgagcccaggagtttgagaccagcctgggcaacataatgaggccccttttctacaaaaattagaaaaaagttagccgagtgtggtggtacatgtctgtggtcccagttactcaggaggctgaagtgggaggatcacttgagcctggatcacctgaggctgcagtgagctatgattg

SEQ ID NO: 119211 - DNA, 1021 bp, Homo sapiens
gcgccggctccaggtccgcacaccagcagcctggaagcctggtgatgcgtaaccctgtatcccaagattgttaagaaaacactttagtaattccgagaaatagttcttgaaagaactcgtctttgaatggaagtaagttatttttaatctgccaaaggtcaacatactaataagtctgagaaattttaagtctgatgcctttatgaatctgtgagtaaacttacaaggaacacttaaaaaatattttttctaagttagccacactttaattaaatctttttgtgtgcactatgcaatattgaaaagttacttctgagcttatgtggatctgtcttctaatgcataataatgttttgtttatgaatgttagtatgtactggcccatgctttgtgtaactgactcctttaatgacaaatcaactgaaagccagaatcttctcaaagatgatttttttgtgctaaaagttggcgattcccagagtagtaatagaaagagggtgatgtgtgcttagtacttacatgttcacttgtttgtctaagtagaaacttaataaattaaagcagagaagcagagttcccccagtgtgacttggaccaactcttggaagttttagaaagtgatctttttttcttgtcaagtatttaatttcctgtattgaatgccattttgaactacagttgacccttgaacaacactggggttaggggtgcccacgcagtcaaaaatttccatgtaacttttgactttcccaggactttactaatagcctactgttgaccagaagccttactgatacataaacagttgacttacatgtattttgtatgttatacgtattatatactgtattcttaaagtaagctgagagaggaaaatgttaaaatcacaacaaatgtatttactcttctttaaatgaaagtggagaatcatgaaggttattatccccatagtctgcatgagtagattgtggaggaggaagaagaggagggattttctcaggaatggcagagatggaagaga

SEQ ID NO: 119212 - DNA, 1338 bp, Homo sapiens
ggatgggcacatcagggtgcaaatgagatgagaggcctggaaagattccggctctgctcactggtgcgcgtccacacgggcagcctggaccgggctcactgctgctgtttgctcctccagagactggaacagatgcagagtgctgtcttccttctcttccctttgtctcttgacctctttccttcctcccttcttccttccacaagtgtctatgtatcaggggctgggatagagtgggtgctgggatagagtgggtgctgggatagagtgggtgctgggatagagcaggtgctgggatagagcgggtgctgggatagagcgggtgctgggatagagtgggtgctgggatagagtgggtgctgggatacagtgggtgctgggatagagcgggtgctgggatagagtgggtgctgggatagagtgggtgctgggatagagcgggtgctgggatacagtgggtgctgggatagagcgggtgctgggatgaagtgggtgctgggatagagcgggtgctgggatgaagtgggtgctgggatagagcgggtgctgggatgaagtgggtgctgggatacagtgggtgctgggatagagcgggtgctgggatacagtgggtgctgggatacagtgggtgctgggatagagcgggtgctgggatagagcgggtgctgggatacagtgggtgctgggatacagtgggtgctgggatagagcgggtgctgggatagagcgggtgctgggatagagtgggtgctgggatacagtgggtgctgggatagagcgggtgctgggatgaagtgggtgctgggatagagcgggtgctgggatagagtgggtgctgggatgaagtgggtgctgggatagagtgggtgctgggatagagtgggtgctgggatgaagtgggtgctgggatacagtgggtgctgggatagagcgggtgctgggatagagtgggtgctgggatacagtggatgccaacggacagggctgttgttttccagctcccacagcctggcgaggggagagggggcagagaataaacacacggctaattaattaccaaatggctcgatcttctcttgaaaaagttcggtgggctgtgggatggtgtagctgacagatccctaacctggtggaggtggctgtaacctgattggagttaaagggacaggagccatccggggaagccttaatttcccagttgccgagatctgcggaaacagtgcagcggctgtgaaaccagccaagtgcagactagccgggactttacatcactcctgcctttctggcagcccagcctggctgaccctcactccccttggagaccctgggcagggcctt

SEQ ID NO: 119213 - DNA, 1118 bp, Homo sapiens
accacaaaatagcaggctcgggaggagagagggcgagcgctcacacctgcccacgaaggcggccgtcggcgctttgatgtgctgagcgggatgacagaagcccgagctccttcctgaagtgctcgcagggcttaatggagaactccagggcagcccctgcgccggcaggggcacatggaccatggccaccaggcccaggagcggagggcgcggcccttggggtgtgctgggggagggagggtcgtgctgggtgtgtgcgcgtagacatgtgctgatctgtgtgccggggagactgccttggccacccccgcgcctcgccgggcccccaggcctcagtgggcggcgcgctcccaactaggccccgcggggtcccggtgcatccggccggctcctccgaagcctccaccgctggcgctccagggagatggcaacagggccgggtgggtatcctatagggacgggagcaagacagcgaggaaggaagggcagagggtccctgtcgggcgtcaggcccgagctattgtctcccccgggcgttcccagactcggtcgggggttctgcgaggctcccagggaaggccggccgcgggaggccgctgggtaggggcacagaggccggcttgctttgctgggcagttttcaccccctccaagacagtaatgtatccagattccgaagttttgggagcttgtgcctgcgcccagtgttatgaggtggggcgagagcagccttgaggaagggtcaggagtctctttcctgtgtgcttttttttcttcctagagtacggtttctccaaggctgctaagcctcagagtccgggttcaagttgagtggatctgccgggagaggagaagaaggggagcagggagggcagctggcaggctgggagaggagcaggcaggcggggaagggaaggggccagtgcaccgaggggtgtgtgtgtgtgtgtgtgtgtgtgtgtgtgtgtgtgtgtgtgattgacagccggtccaagggaatacaaaaataagaggggaaggccgcctgtattggttacttgttgaaattcccataaaattgaacaagactctgttctcagtgggttaagtcaggctaaaatcctctccggtgtggtcctg

SEQ ID NO: 119214 - DNA, 1040 bp, Homo sapiens
tctttctcagttctttctctgctcccctgtttgggcactgaaggaagtttgcaaagcgtgtctggccgaacgttctcattgcttgacggacttcatcccaatagaaggacctcttccaagctgatggcttattcaaagcaaaactctagttttcccaatgagatttttacggtcgggtgtaaggctgatcttatcaaaaggctctgtcagcacacagtctctggatttacataggggcctctcgagaaagccacatggcgtcaagacaaggctggactgtagcctctcttttggtaaccagattgacatataatacccttcccagtcttgtttttcaacttaaattatatattccccaagtccctggctgaataaataaactgaatcaggggtggggtgtccaactttgaataacaccactctggtctgtgaaactctagatgcctttgtctgggacctagacccattgttcttgcttggcaataatggtttgattctcacattaaatgcattagtttgataaagggccaagaagtgcacactcatgaatctgaaatgacccctttccttaccaaggccctggcatggacagctatctgcaggagatgaaaggggcccagcttctatttttgtggtctccccaaggagcaaactttttatgtctactttgatgtagacataaaaaggcatttctataccagcaatcctttagcatgagcatttagcatgaacattttgtatctgcccaggaatttccaaactttgatgccattacagtctgagagagcatgactgacgcaagtgagccgggagcacaggcaggagcacagagcccagctgcctcccgcaccccctccacccaccccatctacagctcattgcattagcagccgcctctcgcccctctacccacgccatctagagcccactgcgtcagcccagaggatatgtcatttggcagcaaagcctcatcacagatagaaccagctcctcaggcaccctcattcctggagaggcacttgacggggcagagcctgaag

SEQ ID NO: 119215 - DNA, 1029 bp, Homo sapiens
aagcaagggaagtattgaccagctgaccactcttactgaaattaatgtttgaggaggcctccccacaaaaatggccatgcccttttgagagggcaccacacctttctggctcagaccacgtgaaacaggtgttgtctgggcccagggtggggcagcccagaagcctggcttggcagtcttggctccagcaccccttccccacgtgccatctgtaaattgttcagccctgtgaatttgtgttcttccatttatgcactgcagatgatggtacttgcctgcctcttggcatatgaattcagcaagtgacattcataagggccccacgatagagaaatcacagaatagatgtaggcgttaatcttaagaagtgccttctacatgaacagctgtataatggatttaaatttcacattttttgtggtagatggttattccttaactacaacataacacctgggctgagtactgccagaagccccttacttagaataattatcataaataagatggaagaattctaggcatggatggaggctaaccagcctccatttcagtagcaatgcaagaggccatacacagctaaggttctcatagatccagggttcaccgtttacactagcgctgtattttaaatgttagagtgctctgtgattaaagcagtgcttcccaagcataaaaacggcacccgccctcctttcccctgtcccactagcaggtcgccccgatgccccttggaagagtgcctcctcctggcctatggcctcagcccttctgcctgctcaagaggctcaggctgccgctcagcctccccactcagccctggccctctttttttttttttaagacaagagtctcactctgtcgccctggctggagtgcagtagcacgatctcggctcaccgcaacctctgccccccaggttcaagcaatcctcccacctctgcctcacaagtacttgggacaatgggtgcacaccaccaccaggcccagctgggacaataggtgcacaccaccaggcccagctaattt

SEQ ID NO: 119216 - DNA, 1032 bp, Homo sapiens
ccaccagtcagtatcttggacatgcagtggcatttttgcccaccagactcctggctcctactgagaaagtgaacctgtatagacatccattttttttttttttttttgagatggagtctggttctgtcgtccaggctggagtgcagtggcgcgatctcggctccctgcaagctccgcctcccgggttcacgccattctcctgcctcagcctcccgagtagctgggactacaggcgccccccaccacgcccggctaattttttttgtatttttagtagagacggggtttccccgtggtctcgatctcctgacctcgtgatccacccgcctcggcctcccaaagtgctgggacgacaggcgtgagccaccgcgccctgctagacatccattttgatgtggaagttgagcccctggccttgaaatgctgccttatgaacccattaactctgggataaatgttttcattgcctctcagacagcttttttataatagtagtactctccattacgtggttgtttttccattaatgattcgcacttactttgttttttgactagtaccttctcaactttattgttcaaaaattaagttctacttttgaggacaaatacctgtctttaaatggtttttttccttgactactatctatgatatgaagaaaaattaaacagtgcttttagaactgctctttttgtaaataataccataaaaaggttatttgccatagacactgcttcacatcacattcctctacgttgtggtctgaggacctgcactatgagaatcacctgggatgttaaggataaatattctgagagagaatctccaggcctctgagcccacccctctacggctgcagccctggcatccacaccaagaagttcctcatgttattcggatactcagtaaaagttgggagccattgctgttgtgcttagaatatgctatgaaattcatgctcatgttccagctgtcgatgtccatatctgattatgtgcactggaaaacaatgtgtggccactgagtgtgact

SEQ ID NO: 119217 - DNA, 1026 bp, Homo sapiens
ttcctttgtttccttttttagagacagggtctcactatgttgcccaggctggactcaaactccttggctcacaagatcttcctgcctcagcctcctgagtagctgggactactgtctcataccagcaagcccagaacccacatatatttttatatacttaccacaattacatatatctacattttcatataaattgaagtttcataatgaaggagcataaaattggaaacaacctaaataccttataccagagtttctccaactgtttttgtctcagaactcctcttgacagtcttaaaaatgctgagggtccaaaagcacttttgcttatgtgggttatatctatcaaccatagtaggagataaaactgcaacatttaaaggatatttattcatttaaaaataacgtgataaatatttttatgaaaaataactgtattttcccagacaaaaatattagtaaagtggcattgtttcaaaatttaaaaaaatctcattaatgtctgcattaacagaagacagttgagttctcttaactgcttcagtatctcctgtatatcggtgaaagaatgtggatgccaaagaagtatggttctagtattatcataaaaatggttttgcccttgaagaccaaacgaaagcatcttagagacctccagaggtgcctggaccatactttgggaactgctgccctgtactgttagaatgcttatggtaaacatgttagagcagtacagcagaataccatataactctgtacagtggcatgtatgtgggggactgtcaatacatcaaaatacactttttagtaagatatgttcctcctggtcagaaaagaaacagtgtatcttgtaatactgtagtgcatatataactaccaggaaaaataaagcataaatgtcagaccccttcttatattaatatttaataaaaatccaacaacttagcattgaaccatctcaaagaactaaactaataatttaccttatagaaatctaacaatataaagacagagatatgagttctg

SEQ ID NO: 119218 - DNA, 1025 bp, Homo sapiens
gatttttatcttggtaaaaaaaaaaaaaaaaaaaaaaaaaaacaaataaattgttagcagctgcgctattcatgagtgatggttacacagtttatatattaaaacgtttggaatgtgcacaattacctcttttactttctcaccaggtctcctacagtttatataaactgcatttttattaccaaagaactgtccgtctttccctccttatcctcgcccatcccagcttggcagagtttgctccctaaagcccacgacagcgagctgccccccgtccccacccaccagccgcggctcccctggcagtgttgaattcagcctctccgctcaaaaggagctgggagggtttgctcagtttaggattacttagcatagacccttctcagaacctccgggagacccactcacttccgaaatgcaagagagtttttccatttttgccgagagacaagaaacaaatatctgtgtttcttgagcaatggaaaaggatgtttcctgtctcatttgctgtaataattgcttctctcaaaatatcctttcactctgggatagctataattggttgcagtatatgcatccatatatagagtccatgtatacaagacacaatgaggtggcattttgtaagcatgttccataacttaaaaatatacatgtgtttagaaaacattggccctgtgacttctctgaggccatagagaagttagtgacaggcaggcctgggctagagccccatgcccatgcgtgcaggaccacccagtggccaggagcagagatttctatgttgtaggcagagaaatctcaactgataattcatatttttaaaatatgaatttaggggaatgcatcattgtttaaaaagcagcaggcttgcagttataaagcactatgtaaactatagtgcttattagaattttggaaattcagtgaacttactcagttcaaaagtgagttgttagctctctacaatattcttgtctctaaagaaataatgagtgctgcttattcctgtaggtgaagtgttt

SEQ ID NO: 119219 - DNA, 1039 bp, Homo sapiens
ctttgagaaaagaggtcagattttaaactgaagaagagctggttgtgagaaattagagataatacggaatcttattaatttggtgtcacgatatatagtaatttttcactaatttctgacccaagaaaataagcaattagtagtaactaccatgctgtgtttggctctagagggcatttaaatataaaaattgggtaattttatgtatgttgtacaaataagtttcattttacaaatgagttttgccaaatattttacacacttctagtatccataccaaatctttttaatgagctctaaattataaaagtacaaaaagccactggaattgagaggatgtttgcaaagaaggaaatcctgtggtataaatgacccaaatttatagtattttcaccatactgtaactagattgaaggatttttctattgcattttgtaatttggggaaaacctgtttatttcttctgtcagacttctcttaatcggaaatatttatagtaaaatgtacacaaaaagtactttttacattataggtcattttaaagttaacagtattgaaatatttaaaatataggcgaggcatttcactgaagtttttacttctatattattgtaacctgacttagcatctcatataagaaaaagcaagtctccaagtatgtaaataaatttcaaacatgcttctacttttggtttatttgtatattcatcacaaagccttaaacattaacagataattctatttctccttttttcatctttgtcatctattggaatattaactgttaagtaattttctaattttgctaatctagaaaaatatcaatatttttcttgaactatctcatgactatgtattgtttccacgattcctttctactcttggaattcgtcagattattaccggagtttgtatatgtatttttttccctctttttcatcctaacaaactcacttcctgtgaaaataatcagagcactgtcaatactaccagggatatgtgacctaaatcttaccccaatacttctcagaatgatgag

SEQ ID NO: 119220 - DNA, 1050 bp, Homo sapiens
ggtaactttggaaatccagttctttcccttccctagcatttcctgtgggttttctaactgttgtagggtgtgtctgtgccagggatcatcccaaattgaaatcttaagatcttgtgaggtcttttctgagtctgcatttcaccctggctatgcatggtggcttcctaaatcccctcatctatgcagctgttttgaatagccaaaaaaaatatgtgcaattcttttgaatcccttggaagctgcttcagccagtggaagttgaaataatgatatcaaagccttatcttttactaaagcttatgtaaaacgttaaagctaaggaatctaccttaggacttttccaaaacgtgtgtatatacaggttttccaaaacgtgtgtatatacaggttttccaaaacgtgtgtatatacaggttttccaaaacgtgtgtatatacaggttttccaaaacgtgtgtatatacaggttttccaaaacgtgtgtatatacaggttttccaaaacgtgtgtatatacaggttttctaaaacgtgtgtatatacaggttttccaaaacatgtgtgtatatacatgttttccaaaacatgtatttatacatatatatatattccaaaacattgtattcaatcccttgaagcgagtgtgtatccaggatacatatatgtatatatatcctggatatgtgtgtgtgtgtgtgtgcatatatatatatatatatcctggatacacatacacacacacacacacacacacacacacacacacacacacacatatatatttttttaagagacagcgtagctcttctgcttaggctggaatgcgggccacaatcatagctcactgtaaccttgaactcctacgctcaggtgatctttctgcctcagcctcccaagtagctaggactacaggtacatgccactgtgcctggctaattaaagaaacctttttttttagagagtgtcactatgctgcacagactactctcaaactcctggcctcaagtgatcctcccacctcagcctctctaaacactggtattacaggcatg

SEQ ID NO: 119221 - DNA, 1039 bp, Homo sapiens
atcatggtgcctctgacatttggtaacctccaggccctcagagcaattgctcagggaaatgcaacattgtaggtctggatctgttctaccagatggaaattagtgccttaaaatagcccagcatttttcccccaccactgagaacattttaaatggaatctcttttagatttaaatatttttaaatcttcaatggacatttaatgaatccttatagaatagcttttattttcttgataattgatgaaattaatatcatctgttttaatttcaaagcatgccaagcattttaacctgcaaatccgtaacctaccaggattgaactttaactactagattttaaggtgctaattcttaataatttctatttaatttttttgtaaattttaaccagaacctaagctctgactttgtgattcagttatgtttgtatatacatgtcttcatttttgagtgagtaagaatattagagttgttctatggatttgatgcgatatatgcattgtgattttaaggagagcatgtttctcatttagatattgactagaaatagagaaaacctaaccaacaacttcttaatttactttgtttgtttaatgagcagtttgggtttggtattaatttctgccttcataaatttcccttctcttgaataatgaggatctttcaacccactgcccttccatgtgaaaatggttttttaaacaaccttggttatagttttaaacttcgctggaagaattaggtcatccaaaatatgtgtggggtgtgaagttttgttttctgcacaaagacttgtcatgagtctaaacatttctctctcaagtaatttacaatttaattaccttgtgttatgttccctcaggaaggggaggagaagggaaaggaagaaaaggcaaaaaaaaaaagttttaaaaatgtgtgctgcattcaggatttagatttcaccttataaagtttttattacagcgtcctcctcccctcattgtgccatgaaatagtgaatcactctgcttggtctctgaggacagatgctgttc

SEQ ID NO: 119222 - DNA, 1062 bp, Homo sapiens
ctaggcaagcgtttattaaaatgtgttcctgtccacagaaaattcaggattcgggacgggggtacaccacacttaccaacactttgagtcgtgccattaagcatcgtgtatgcaagtaacagattaggaagcaaaaaggccacattgtcatggaatctaaatcctgagtaaaatgtaagttgtttagggtttcccattctgcaaagaccacatttctgtaattttatgttaacttactatatgttttgaagaaccggctatgtcccttccattggcaaagaactttccctccacccacccctgcccttttgtaaatacagaaaaatcaccacaatgatgacatacaattataataaacatttaagaatcttgtactttcccaggtttatcttatcatctgaacatgtggtgagcccaaattggttgtcttttccctaaggtacaatatttctacacattttaatgcaatttacattttatttttaaagacttacagtgacatatttgaacattctgaaaattaaactttgtatgaacgtaattgcaagagttagcggaaactgaaatgaaatataaagacttccacttcctgtatatgaatttttagccttttcccaaactttctctattgtaaacttaaaacaaagtcttatcagcaagtaccaaagaatagcagctggatatcattaaatccctctgtctaagctattcttcttcattacctttttcctgacagctcttgctctgcacagaaattgtaactttgtgatagagatttatgtaattcaggtgtcctctatcctgaatgagagcttggctgcaaaagaatgaagggtttgccagagtccatagagttttataagaagaagaggggaaaccatacgaaattcagtgaagaaacacatgttaatgtaaccagttcatcagccgcttctacccaatctcccttttatggactattttcgtaagaatatttttctgcaaactgatgtagttagtagatgtcattatactaatgaaaggacattagctattttatcataaagtatgcaccagcacttt

SEQ ID NO: 119223 - DNA, 1031 bp, Homo sapiens
agcctggggaagagtccatgtgtgtcacgtagaagtctgaatgccattccgaattgtgagagcatccagagaagatatgaggaaggtcctggttaagacaatggtgggaaaaacggagaggaagtggcatttagggaaataggcattgcaggacgttctggccagtgggatagaagtgagtgagaagaaagcagtcaagtggtggatatgaacaagtcacgtgtcctccagccactggaaccacctgtgtcagcgtccttcctcatggttcttcctcccttcctatctgtgtctctacatcacaaacatacacatgaacaccacctacctgtacctgtacagagagacaatttctatagcagtgacactacagcaaaaatagggatatatgtgcaaaatattgttaatttgttgtgttacccattctgatattaatagcgtcccctttcctaatctttggaaatcttttaaataaacaattatgcttatttgaggaaaaaaatgagttggtaatttctaattagcagtgacatggatctttagtaggaagcaatcatttcaaaaacgttagcatttggttatcagcttgtgagtttgttaggttcgatagaagtttcactttgcagtgagagtttgggaggaaacactattttccaggatcatgtttcttacaaaggactaaaatatgcttaagccaacctcctccctgcataaagttcacctctgaactaagaccaaactgaaaacaaggaacgccttgaaatattttgggatgttctgagagcaagggattctaggagagagagttcatttgatttttagcacttccagcactttagcactccttaaaggtaaatgcccatgacttaccacccttattcttttactacataggatctttttatatcactataaaacattagtcaacaaagcttaaaaaaatcccgagaattaaaaatgtctagctagttcagtctctgatacctacattctgtttatgcagtgtgtccacctggcagaaacatgaaaaa

SEQ ID NO: 119224 - DNA, 1019 bp, Homo sapiens
ttgtggtagatttttggagacaaactaacagcagtgcctgccttctacctcacatccttcaagtctcatttcgatgtcacttccttggagaggcttctccagcacccatggtttggcttaatgccttggccgtacactcccagggtgtcttatacttctctttcatatatctcgtctcactctttccttctcctaaagtgctgatcttcccgttagacagtacaccctcaccaagtctatttcagtgtactcgaacacccagaccgcacaaaccaaaatatcagcctggttgacagagatgttgcctgggtagacactgtgtagaacttaccaactgattagtattggggcaaagtgaaaaatgaattaagaatgactccaaggttgtaaaccttcctaataggggcatgtggtacattcggattactaatattaatatttctatctatgaaacataggttgacacattctgcagaaagtagctgagttctgtattggacacactgagattgaagtgttggttggtattggtgtggagagattagtaagcatgggacatgtgcaagggaacttagggaatggaattagagatgaatgtccactgaggtgatggtatttaaaaccgctccaagacagactgaataggcttctgttacttggatcttctgaaaattgccatgaatgactatttcattgttgttcccccatgatttttctcaccatcttctagatttcttaaagaatatttaccctagggcaggtgccgtggctcatacctgtaatcttcaggaggccaaggcaagaggatcacttgagcccaggagtttcagaccagcttgagcaacacaggaagaccctgtctctacaaaatataagaaaattagccaggcgtggtggcttgtacctgtagtcccagctactagggaggtttaggcaggaggatacttgagcccaggagtggtagactgcagtgagctatgattgcaccactgcacaccagcctaggtggcagagcaaga

SEQ ID NO: 119225 - DNA, 1050 bp, Homo sapiens
atctttgttctctgcagcattgcagattcatatatgtatatacacacatgcactgtctaatatttatctggtctggaataagcattaatctttaattactatataaacattttaaacaggtgtggaataactgcactctcaaaaatgcagtgtttatctccttgctgcctgatggcatcagccccactgcctgacagctttcacctccctgtgcttgaggtggaaacggagaggtggtgggtaaagggcaaagaaatgccccaaatcccacatgaatcagaaatttccagttgtaaattatgcaccaccataacatcctttaccacagtttgccagccaggaattgagtttggggtagtgtttttctgtgttggtagggtgtggggctgggggctgtatatatagccatgcatttttttttcttcctgtggattgtacgccctcagccgccttttcttggggctgtgcacggagcctgtggtgtgaggagatataaagcagcatttttctaactgcctttggaaacaatgagggctctgttaacaggagcccaagcctctgcagaccgcttcgctgggtggaatgactggtggagcccaggttcaaagccattggcctccaagtgctttaattcagcgttatttttgcttctctaacatcttttttcctttcgttctttttttcttttttaacctaagcattctgaggtctccttgtttggtagggaagtgagcagcaactttttataattagattaaagttaatcaaatgaaggcttggatatttttaaatgtcatttaatctgcttctcttcttccttcatggattttatcactctagcttaatttgttataaaatttcacctcatttttgcctagtaccaggttttccagtttaaaataaagtagaaatagaagacaacagatattttcagcagtctctgttcttccttgaaatacacaaactcaattctgtactagacttgacaccaagtagttgtaatattcctagtagtaatttttctgctattacaaatctgctaggttggag

SEQ ID NO: 119226 - DNA, 1037 bp, Homo sapiens
accatggatgagggaaagattaatttgaaagaggggatctgagaaagtaattgtccagtaatagggaaaggaggatgctttgctagccagaagttagaattaagtgcttctcttgcctaataaataatctgttgactgtaggtgctcacagcgtctcacagaaagaggatagtgccagcacatctgggctggctggctttgatagcagtatcttcgtcctcattcacaaaagagaaaagaaaagaaggcaagtaacttgccgtgctgttaatgtgaactatgctcttgtagaaagtattattatgtgagtaacaggaaaataattgagccgtttgtaactgtttttaaaaaatccttacaagaatacatcataattggctttccttactattcacaacagcagcttaggacagaattttgtcgtatttagcatggaacaagtatcaagtatgtttaaaacaaggatcattacgtttttctattataaaattggtagatgaacccttttattatttcatgaaaaaaagtaatttctgtaacaaagaaggatagaaaaattccagtttaccaaaggttgctttcaactcctcatgtcagggaacatcatttattgttatttatttgattgtgttccctgaagtactcaattgaaataataatggccttaactcatatttttacagcaatttttaaaattaaaatattacattctctgtagacgtcatttcaaaattaatgttctttcactatttaatgacctactctttttctttccttaaacgtatttacgtaggtttttaatatatctctatgcttgcacattatcactgagacaacaggcaataaaaatgccagaacgtctcaaacagtgaggccgagaagtcacaaacaggtcccagctggagggtcccccagcttgttctcccctcccctttctggccagccccttttaacccttggtactcgttaactctccttgtggatgttcagagtaattagacagtggtttaagtgtgtgtgtgtgtgtgtgtgtgtgt

SEQ ID NO: 119227 - DNA, 1031 bp, Homo sapiens
cctagaaaggctgtactatctctgaggtctcatacacgatatcgagatcagatctcactatatgtgaggaaagtttttagagatgctttagaaatacaacagatgtctgagttggttaatctgaaaagagtcagtggattattctgttagcatgattaccacccagtactacagatttcaatactgctttaacacagaggagtaaaaatcagaaaatctatagtgaaaggcacttctctctatctcaatattctttaaaaaaaaaaaaacctttggtaacataataagaaataagaataggtttctgtcttcaagaaatatttagtttttagcttaacataaaaatgcctatattggcttataattctgttttatttagtataaaagtgcccatattggctcattggcccataggggctctgaagtcacttgaagtttactcacccagcaagcttgactccttagcaggtgaatattcaccctatgcgaggggtgcatttatttcaaaggtttctgagaatgctgataaattccaccacctttcttagtagcgtatttaatgttttttcttcttgtgctcaagtcctcctcacttgtatgtaaatattttgctgtattttatacccaattttaatttttacttaattttaattttgtttaaatagaaaataaccagataattactttattttccatgtctgtaatgaaatttgggaaataattcttgaattcttctttttaatctttatcgcaactttgtataatcatttatttagcaactatttgaaaaataccagccattaggtgaaactgttttttcactctggggatggacaacaggatgaatacagcagagcctctgccttcactgggcccactgtgtaacaaagaaacatgcttgcagaaaccaagtataatcaccagtggtgaggctgatgatagctcagggcccaggtatatttagaaaaggctggggctctttcaaaccctgctttctgtcatttgcttttttcagtatgtatctgctggga

SEQ ID NO: 119228 - DNA, 1368 bp, Homo sapiens
aaaaaagaaaacaaaaaaccagagatgagaaactgttgttctctgctcatgctccttccttcttcccagctgggcccccatttccactctcttaaattgaggtcaggtgggaaggaggtggatggggaagctgcagccgaaagccagttctttgccttgcactttcgttgccctctttgggacttctcttcctggccctggcttaattacgggactgatataaacaaggagctagtgtggaactctgcacaggccgctggagaggaccaggcagcagttgccaggactgggttctgtgcagcggtcttatctgggagcagccataagaagggaaactgcagctgcaagtcagaatgcgtgtccagtcacagtaggccaaggcattggctgttccattgacacagctaggggtaaaaagtggtaacaccttcttttttgcaaacactgtgaacctaaagccaccctgataaatttgtgtctgtctgttagatccaatagttaatttttaagtaattcatatagggagttaaaagcttaattaaggctgggtgtggtggctcatgcctgtaatctcagcactttgggagccaaggcaagtagatcacctgaggtcaggagtttgagaccagcctgaccaatgtggtgaaaccccatttctactaaaaatacaaaaattagccaggcatggtggtgtgcacctgtaatcctgctactcaggatgctgaggtgggagaatcacttgaacctgggtagtggaggttgcagtgagccaagatcataccactgcactccaccctgggcaacagagcgagattccatctaaaaagaaaaaagcttaattaaaagtggatttatggtagtgggttttggtaacagatttgttactgaaatgcattacagacaggcagattccagattcccaaggctgatggatttcaagtctagggaagacatatttctaggtaaaagctgtatgtgtattgtggctttctctttggatatatatttcagtctcccccgagagaaaagaaatgtcatatttaagtaggaacatactttaataataggtgctacttacatctctactatgttgtttctgttatgtgggatttgtggtataaaaataagcaagtatattatttatagtttttttcttaagagaacactaaattttgaataatttcaaaagcctatgctaccttcagaagttaagcatggatcctaacaatttatatggcgtaactactgaatgtttacagtcgatgggatttgtggagttctgtggcctccttggcaatttcagcatgtggaagaggtgttgatattgtcatatgacctcagccctggatcctcatctgtcttctagct

SEQ ID NO: 119229 - DNA, 1018 bp, Homo sapiens
tcctttgcccatttgtccactctagttcccgccagactttgaggtccttcgtgtgaggactttgtccttccctcttgttattctcaccacttgtttgcagtaagttcctcaagaatgttatggagtaaataaacaaacatgtcccaaaggccttagctcagtgcttctctaaaggcagcaatcttgcccccagggaacgtttccaatgtctggcgacagtttttagggggagtgcacatatctaatgggttgaggccgaggatgctgctgaacatcctccgatacacagggcaacaatgaatggtccaagctaaaaggccagtagtgccaagtttgagaaactctgccttagctccagcccttacataatcatcctcaagccaagctctctgctcccccaatctgcttgtgcctttattggagcccttaggaaattcctctttttccttttccatattcttcattagattgtgctcctggaggtcaggaacgatgaatcactcagctttgtagcttcagtgcctgcactgtggctcggtaagtaatagttgagtagaagaatggatagggaaagaaaggagtaggagaagaagctgatggcatatttcaccgctttatgttttaaacttaggtcagctctggatctgtctctgtatctggtggttctggttagaaacaaagagaggggccaagtggtgagtaaactgagaactatgtacaaaacctattgggcaggatactagtttcaaactgacagggcataactggcgtgcatgttcattttgttacacatttctatttgataatgaccagagtttacatagaaggtgggaagaataatcatgtaaagcacgtctgttcaataaaagattctttagtgatagaaatgttctttatcagtgctgttcaatacagtatccctggccacacatgtgtattgagcacttgagtgtggcctatgcacatgaagagctcagtttttaattgtatcattttaattgatattatcttaaatggt

SEQ ID NO: 119230 - DNA, 1023 bp, Homo sapiens
tctttattcttctccttagtttgaaaaagtcttcaaatgtagcctcagacctattattttttatgaagagtttagagacattgaaaaaaactctgtactagaggatttggtttttggaggtgttttttccctacagagtagttcgtggtccctcaaagaccttgcttagtcagaatgttgcttgaaggtgtgcaaagttgaagggaatgctcatttttaattttaagaggaaggaaaaaagttaaaaattgaggctaataaaagttaatgaggaacatttaaatccttcaatggttcaatttatgttgcaagtcagaatggttcatgccgttattatatgtgtgtggcaacatcctctctctgctgtaattcttttcccttgaaaactagcccatgcagcgtggaaggcatatcatactctcatgattgctgttcattcttttgacaaattccacggctttttttttttttaataggggaaagaacaggcacaaggaaattaaaatataaacgtctgttttttctgccatttttttcctgtttgacagattactgaataaagcatggttatcagcagagtgaccatttctaactgtctctttgtgcttaaaaatttattttgggatgggaaacattccccaaacccagagggtacacttaatatgccagttttcatttgagaagaattacttttcagttgtaggtgttttgggatgtagcctgactcaacatccagtattaatggtccaaagatagaacagctgaactttctgactgcccttctttgggagacattagcatgtccctggagacagtttccccagctctggttacgcggatcagtatgtagggaaagcttattacttttagaaacgttcctcttggagggccctgtctattacccacatcaaatatatggtacacgttgctgttttctttgctttcgaaatgcttcagaactagcccctccatctttccctgactgtagggtccaggctgtgggaacagattttccatcagacc

SEQ ID NO: 119231 - DNA, 1052 bp, Homo sapiens
ctcagcctcccgagtagctgggactacaggcgcccgccaccacgcctggctaatatatatatatttttttagacgcaatctggctctgtcgcccaggctagcgtgcagtggcgccatctcggctcactgcaagctctgcctcccagattcacgccattctcctgcctcagcctcccgagcagctgggactacaggcgcccgccaccacgcctgtctaatttttgtatttttagtagagacggggtttcactgtgttagccaggatggtctcgaactcctgatctcgtgatccgtccgcctcggcctcccaaggtgctgggattacaggcatgagccccaacgcccagctgagtgtgaaattttaggaagtggctctgccttacttcttaaatgtcactacacttccgagtcgagatgggagctaaagagaaattgtaatccaagaggtttcagtatgagtgtcctcaaacagaagtatgaacattatccttctgtgaaatagctctatcaattctgaagtaaagcccaaacatgatgtggaacgatgtgggataagtcatttttaatgcaaataagtcatttctgcaaaaaggagttgatttcagaagatgatatacatatctctatattgttccagtgtttttcattcttacatagactgaatatattgaatttgatactctctctgtcacaacagaaagtttttatccttctcacatccctcctctatttgctacagctctgattatagaggtaaaagtgtatacagaggtccctacaaacatgaaggcagagaagaaccctaatacgtgtcagaagagagacaagctgcctagtgtgaccagataatttctttgttctgaactggcatctgtggtattacctttattcttattagtatgcaagtccttgaaaaataaatgtatcagtggaagcatttaatcattcctgagactctggaattatggcagaagcaataagagaatcaggttcattatgtcctacatgtgtaaatgtaaagataccttcctgtttaaactgtggaatagccc

SEQ ID NO: 119232 - DNA, 1264 bp, Homo sapiens
ataaaatggtaggtgactgtgaggaaatcagtctgacaaaatgagttctgtaggggacagagacagacattgggaacaccaagtgtcaagggtgtcgagtgaaaagagcctggttaggagtgattagaaaagtagcaggagaattaggaggtggtgatatataaagaccaagggaagggaacatatttcaagaagcatggcacagcctccttgagtcaaatgttgtcacctgtcccaggtggtctggagggtctagctgagtctggaagttggatatctgaggtgtgtgccagttggcagacctctgtggttttctctttgaggtcgaacacactgggtgtagaagtggagaagacaaatgggtaggttgtactggattaatggaagatcaagaaggtaagatattggtcctgatagagtgagtcgagtgacagactatggggtctagacttttttctgctgtaccaagatttctgatggaaaatgagccagcagaaacgaaaactgttaaagtagattttacatgtcaaaatgccagttgatttaggatgcaactccaggctctgtccattccaagacacataaatttgtctctgctttcccctgaaagagttgaaatcataaagcggcaattgtttcctgaggggtaaatggccattatgcactggcttcgactaggattttcttacctctagcttggaccatacagttgaattccctgaatcctagtgatacttaacatattgcacgaggccttgtattttgaggtaatttaaaacgttattaatccaggccccattgagtaaggacttgagctattccagacacaagccttattaaaactcacagtaacagtctctgaaaaaagttccactaagcaaactaatagtgcaaacaagattttagcaagaatgtttgaactacttacaacaggactttgtttataagcacccttaagtacttcttaagtacttgagaagctctgacttacctataaactgtctatatactcattgcaaatcacccttatctggttattaaatctgtggattgatactgtgtaagattttattagtttaattccagttgctgtattttatagatttcagccgctaatgtcaaacattcgctcaaataattttctaacgagcattattaaatccaaacatcagaaacccactgaaagctttcttaaaattagggtctgtctttgtactccttgctcctgtatcccacaatccttattttgatcacttctgctgtc

SEQ ID NO: 119233 - DNA, 1083 bp, Homo sapiens
agctttttctggctcgttctcactccacatttgacatgcaacaaaagtgacttttgtcttgttatggaagtgggccaaattgtttgacataatgacaggtgggatattatttagggctgccgagaccttgggctccacgaatgctttgttccctctagattgtgttttgacttgcatgtttctgacagccattgtggcattcacctcttttattgagtttggaacatgcctgtgagagctagcctcataaaggttttaactgtagtgttagcagtttcttaaacattttacatattaacatttattatagtttcattttggtgttaatattatacttaccatttattatggtttggtttggtttgtttttacatagtttcccattatgaggaatacagccactgtgtttatggctgtgaatatttgtgctttgtgatttcttggccttttggacacacacagaatgtcttgacatgtatttacttacaaattgaaaaaatacaacagatcttaccgtttcaggtaaatgaattccttaagaaattaaaacttttgctgattagatatcttcagtaccagaagtaccagagtatactattacaacaggaagtgataggccaatcccaaatttgagatttattataatactccacaggggtagtgatttatctttttttcttacttttcaataaaaatatctttatttgatacctttaaagtttcaggcactgtgccatgcatgggggaggtagcaatgaagcagacaaacagaaaccttgtcctgggcttgtgtgccacaatttgtatctctggctcatcatagcaaatgccctgtctataggatctcaccaaaagcaaattctaacacagattggtagcagtaatgctgtagctactgttcactgagagctagatgctttgtgtatgatattgccaacccttacaagtgagaaagagctgttactagcttcattttataggtaaatgaactgaggctcagaaacattaattaatttgtcccaaatcacaggtagtcatgagaattttaaaactccagtctttttgttgccagttgttcctttc

SEQ ID NO: 119234 - DNA, 1048 bp, Homo sapiens
ttgaggacatttgcccatttggcaaactggaacttcattttgacagtcctatgtgatcaaaggcacagaaatcaaagggtcacattcttagatttatggtgaattatgcctaaaccctctctccacatggccccagcgtgttccacaggaaaagtacttttgtgctacgcagagcaggagtggagggggattcctaagaaggtgtaaccacaagtagaccctcaagcatactgtaatccaaagacgtactgcttgggtagtccagaacattttaaactcaggatttagttttaggagtttgggaacttgtgtaagtcctaggttcctgacacaagccaacagaatttctctctggaggaagttaccacaaataagacccaagaataagttttcaaaagcagtgaacaacacatagtaaaaaataaccaggcactcaaggaaaaagtctgatgagacctctcctcttacatctccttttctcttttactttgggtgctgcttctctttttccttctgcttctcttttctttcttattatctattctcccttcttcaacttttgtagctgttttatttgcattgaaaatcatcctctactttgtggcctcttgaagcatttattttattttgttctcggttctgttgctctggttaagtccttccttgtcatctcacaaatagtctattgttagaaccttttagttgactttaattttattttttcttcctaaattcaatagtaaatcaggttcaggctaattaagtctcttctcacaatccttcagtagtttctctgtgaaaattcctgagcatgacttttgatttccttgtaatctggccccagataaaagaactaaaaagtattggaagctgggggaatgattgagcaccatttattcatgacattcatttccatactggataacagtattttaaatgaatctatacgctgtttgagaaattagttttttttgttttgttttagtattaccattggcttttcgtgtagtgatttacacataatagctgcccaataaatgttcactgg

SEQ ID NO: 119235 - DNA, 1032 bp, Homo sapiens
aaatacatttttgtccatatattagtatacacaaactgtaacttcatattgggtctctgaagataacttattttgcttagtatatttatgaatcgatatagtttattatgatgttatatgagttttaaaactcattgttttcttgtcttatgtaatttttagatgtgctcagagcaacataaatcactctagtttgttagcaaattatgaatgttcaaataataaagattccttatgagcagaatgctttacttgttaaagagcagtgagtactttgaaagcctgaggattaataaggtatgtttgcatttagacctaatatccctgcatactatagtgccttttgtgtctagaagaattagctctcttacaggtacagtgagtaggtgcttggagcaaagactggatacttttaatctctgtgaataggtgatgtggatggaacaaacctctacggtcaagtaatgttacggttttgtttgtttttgttctacaagctcccatttctttctgatcagtcctgttgtcccttcacctgtgtggacacagcccccgtgataacttaatacagtttgtaaccacttttatttgttacagcgcaaaattgcaatacgaaacctttttcattttataatttcatgtttaggtttataatgaataaacaccacgattgtaaatatgactagtttattcccatggttcttaggaagaagttgagcatgtttgactttgtattcatcagggtaggcaggagtgtatgctgttggtgggtgcctgtgtgtcatctggctcagattcttcttggaagcctgttgtagatttgagcaattgaattcaaatctaaaaccacttaaaaagtcctttatagtccattaagaatttatatgagagagaacactctatgaaagttctcctctccctgttcaaacagattgttatgttttattagagctaggtggtattgtaattttgataacagctaataatgtttggaattttgctcataattaattagtggaccacacaaagcta

SEQ ID NO: 119236 - DNA, 1035 bp, Homo sapiens
agtacatatgtatacgtatgtccatatgcataagctgctgtaataatcgagaaagaaatgcatattctacggagcagagagttttagagtaggttatgtatagtacaaagtgttggttttagagaaagacctatatttattcaggctagattaacctaacgccttaatatctgttaaaaggaatagcttggcagagagatgcccatactgtgtttcagatatttgggatgagctgagagatgtttggtggctagagaggaattagtgatgttgttgtgtatcgagtgaacctagaaaatgagctagctgagcagaaatcgctgcacttgtgaagagtgaggtggcgtgtcaggcatgtcagaagtgatgctcaaaaccacgcaagtgttgcgatccactcttagggggacaaggtgggctgagactggaggtgagggtggtgttaacaggcagcatctgtgtctagtccagaggaggagggagcacggctatgcgctgcagtgatggtggacccagtgacagtgacagggcgagtttggatgtgtagatggcaaccattctcaagcacctggtactgttagtgttactggaaaaggcagagaagcagatctccatttaggtgtcccttgttaaggaactagcagacttcagaagacaagaaggatgagagatttgcaaatcgatgcaacaagaacctaggactgccagataagctgcagatgtttttgtggtatttgaaattgtaagagcagattttattatgacacaaaaagacaatagaaggcccacttggcaaatcatagttaatgggaggaatttatcattgaaacaatgtttgagagagaaaacaggtttaggagagagatccgtgaactgatagaaggaaacatggttgacactatagcgggaaagtacacagccacaaagcataatcagaaattagttctcttcctagtccaggggaaatgtgagctctctgcatattgtgggactgtaagtgtgtttatccttactgtattcaactttaataggctg

SEQ ID NO: 119237 - DNA, 1019 bp, Homo sapiens
gaactcccaggttcaagtgatcctcccacctcagcttcccaagtagctggtaccataggcacgagccaccaagactggctaatttttaaagatgttttgggctgggcatggtggctcacacctgtaatacaacagtttgggaggccacggtgggaagatcacttgtgtccaggagtttgacaccagcctgggcaacatagtgagaccccatctccaccaattttttgttttgttttgttttgttttgttttaacagtgctaaggtctcactgtgttgctcaggctattctccaactcttggatgcaagtaatcctcctgccttgacctcccaaagtaccaggattataggtgtgagcaactgtgcctgacccccagtgatcttgtttaatgaccccccagaattactaagatttctgctttatgttgctatgacaccaaggcattctgcccccatattctgcatgtttcacacaactggtaagtggcaaaacctaaacccaaatccatctgattctggaacttcatgctgtctgttgatgcatatcactttcctggatttcattttcatcctctgtcttctgtggagctcaaatgaatactgtttgtgaaaatgctttgtgtatagtggaacaccatgtggtatttattgacattattggtgttatttttattttaggttgccattgtccttaagttaggtagccttttaaatgcttttctcaaaactcttcatctagaccacctttctataccactatgagactgacgttttgcaattttttctttctccccaggatggttcctacctggctgagttcctgctggagaaaggctatgaggtgggtgactcaatgggaagcgggcgcaggctggtggggttgctcgcatgcagcggccacatgcttcctctgctgccgtcctcctgagtgtgttttccactgaaacgcagataacaaatcagaatccggggaagaatgtgtctttgggcttgtgagcctgccaacccattgtgctgttt

SEQ ID NO: 119238 - DNA, 1048 bp, Homo sapiens
aaagtggccagcagatagccaaagaggtttttactaaggagtgagcagttttgatttgtgattcttactgaggttggaagttcctattttgatgtcttctgaaacattatcacttccatttaactgatggggaatgccattttattttagcatctagattatttatttgaggttgattggaaattttgctttacaattctttttcatttttcagaaaaaccagttgtcacatatttatgctttacttttgtgttgtatttttaccaaactgtaggaagtacttttttcaattataaattaaggaatccctcccagagcagttacatgaatgtcaaattgagatagcctttgaattctgtttcccttatgcgtacatatgttttattttgctattgtttttaaactattatatatgtatgtatatatgtatatagcattactagaaactattttgctattgtttttaaactattatatatatagcattactagaaactatgaagggaaaataaaagctggaaccagcaaggtgatgaaaaggccactgtgggagttgaacatgaaagaatggtgctttcatgaggaaggaggtattgatgtggttttgggggctgaggtttgtttttgtttcagctaccatcttagagacaatagtgaatcagaactgtatcaggcaggcagattttaatgcccatttccaaacagagatgtctctcttagatactcagggaaagagtcacatagaccatctgtatttgttctgcttctcattttacccttgaggaatgaaggaattctgttgaacagtgccagcattagtttaggctgaaacatataattgtattgagtaataaaggaattttaaaattcctgttttttcctgtggctctctttcacaaaacaggctaatggtgaaatacttttgcaagtgttcccattcatctctggctgatgcaagatgcctagtgccttgtggtttcctaattactgaagccctaatttctttggcaaatctctcccctatagatttcgttttggtagtgaaaat

SEQ ID NO: 119239 - DNA, 1052 bp, Homo sapiens
accagtggagttttttgttctttgttggctgtaaggacttagaaatacatcaaaattgagagcagacttttttattctaaatattcagaagtggagttccttttaataattttgaccttgcttacaatacttgtattaaatttatgtttagaaacagagtccttatttggcatctactttgccccattttaagagtttcttttaaaagaagcagttgatgtgttctgactggtatttgaagaatttaactgattcatttaacttcagaaagtacagcaaagaaaagaaaaagcatagtagaaatctaaatttgtggtttatgaaatggaagcatagttagggtcttttctacagtgtatcctctctcaatgtataaatacactgtcttagttatttaatattgatttgtggtgatgtaggctaaaggctgccatctgacattcatatcatgtaagattttcttgcctcacattctgaggcccacattttgtttgtagggaagtgaccttttgctttgctccttgtttcttctactcatggatctcaggccttaaagtggtgcgcatgaagctgtccggtatcaaggtagttttggttttggatgctgttgttggtaaagaacaagcttcacgctcacccttccctgcagtttgcagaccctcagagagctaaggagggaaatggaaagaattggagcatgactgttgctaacacatctttccttctgaggaaggaagggaaagagcaggcaaatgtagaaacaataaagatggaaggggcacccttagagaagtttgtacctcctcagtgtaggggcatgaaatgacacccacaaagaagagccatggtattgtcttgctttctgcctcagtattggctaactttcactttaaaggaatttttaaaattggtaggacataataaatgcttcaatgaaggcaccttagtcatccagccatttgttcgcttatttaagcagtacttattgactgcctgctgtgtgaatccggttgtttcactaggcattgaaggtacaagaggaatgttgttcc

SEQ ID NO: 119240 - DNA, 1015 bp, Homo sapiens
gctaacttcatgtgtgtataattacctcagaaaggaaacaaagatttttattgatattatttaaaataatgttttctttttctttttagcaaagtacaggctgataattccaaaggctgtttaaggggtaattgtggctgacagagcagcattcacggaacatcactactgtgcttggctggaacagtgtcactgtgtctgaaagtcttgataatgttcagttgactgtactaattgtcctgttttatgcatggctagccaagtggtaaccaagagttttaaacaatggatctttattaaggtattaatttttgtcaaggaaactgacgtgatttgaaagaatgtttactgtgtgtgacacgtgtggaagaaattgtttgtgttttcccctcttccatgtttaggaaataaaataaccaaaaagtgtgtgcgtgtagcactttttaaccttaattgtcttttatttatattggtatcttgatataaaaattgaaatttgttataatgataaagaaattagagatgtgaaacatgattgataaagtaaggaagtaaaattggtaaaaatgcttaaagatataatttagtgttataatacttttagctgaaatgtttatttattgggtttaaacaactatatatgtatgtgtgtatgtttaaaatatattccatgaggaatcgacctttaagaatcatgaagcatattttccccaactttcttcactcttctttacaagtcttaattttttgtattgtgaatattataatgccatttctctctgctttaatgttcttttaaagaacattcaaagattacagtgatttaaaaaattaaccttgaactcaagaagaactcaatggagaatacagaagcaccttaatcaatagatgccttttcctcccctcacacacacacacagtccaaactgctgacagagctgagattaagccaggatttcctgaggcatgggaactacctaacttgacttacatcatgctgaattgagaaagacac

SEQ ID NO: 119241 - DNA, 1114 bp, Homo sapiens
cagaggggaaggggtgatctaaaatgagaatcacttttatttttacgtaacaataggcgaattgctcttaggggtagtattcattccttcaacaaatatttactgagcatctgctaggtgctaggaacaaaaccgtcctaggaacaatgcagacaagttaatgggcaatttgaatccaatacagattttgtaagtttgattacaattctaaactctaatgttataagctcagtagtttgttgtcattgtggcatggacaaccagttagtcttcacttcctccttaaaaatacaatccctatattatttggggtgaacactgagcttaattaaatgatgacattttccagcttccttagcagtaaatgtgactgtgattcaattctggccaatgaacataagtgacagtgctttgtggaacttctggaaagcctgcttaaaggaagttgagagttgggagacatgtcccctgtgcctttaccttctgcttttctgtttcttggtacatggatgtgatgtctggagctccagcagcagttttcattggtgacataaacttgagggtagaagccagatatagaaggaggctacctaggtcattgattattgttgaccccgtaatcagcagttcttgactggctaccatcagacttcttttacatgatgtgtgttggattctaacttatgtgcagcttcacctaatcctaatagagtaaagcttatgttttcatgaccttataagtaaaacttatgttttctctgacctcatggcatggctgtgaataccaccactaagacttctgggagtgtggttttcagtagttcacccctgtgcttattctcccttcatggctctgatggactgctggagtaatttcagataacaggtaaggacatcctcagactaaggaatatcatctgtactgttcctaaacaaatatacctggaaatactttaaagcagtggttcccatagtgtttcctcagatcagcaataccggcatcaatctgggaatttgtttggaatcttaggcccacattttgacctaccaagccagagctctgaggggtggggcccagcagtctgaatgagtgacttggatgcagcctaaagtt

SEQ ID NO: 119242 - DNA, 1051 bp, Homo sapiens
gtagttgttacctgtgctactgatgagaacattagattgcctaatagttttttttttttttttaatgtagcccactgtaccggccttagaattcagttagtgataatcgtttagcaaaatgtgtttaacttgaagaaaatagtaaaacatgctctttctaaaattatggcttctcaaattaccacatcttgggcaagctattttctaaagtgcttttactttccttcgggtatttcagctacattgagctcttccacagtttgggctgccataaatctatgggaaagtgttttgaataattatgcagacagtttcttagaagcatctaacatatgtgggcctccatcagtaccacctctttgtggccctgcaagctgtgggaaaattgtctgtacagcttgtatataatactctacaattttcctgtgactgtaaaaagtatggactggcgatcagaaatagtagcttctgtttttagctttgctatgatttgatatttatccttaggtgagttgcttagcctttctttgtgacaattgtgtcatctgtaaaacggaatattgaatgtagataagctaactgcactgttcagctgtgatgcagctggtaacagaacaagtctcctgaaaatgatggataaatcttttctaatctaaactgctccagcagcagttttgggtgatggcgtaaacttgagggtagaagccagatatagaaggaggctacctaggtcattgattatcgttgaccccgtaatcagcagttcttgactggctaccatcagacttctcttacatgatgtgtgttgggttctaacttatgcacagcttcacctaatcctaacagagtaaagcttatgttttcatgaccttataagtaaaacttttctaatctgggaagggaatacctgtctgccttttccacctcatctttcctgactgggtttttcatatgcctggaaaaagctactaacttggcaaacatatatatgcttaatttcttggttctcaagatcctgttttagagaaatcttctcaatattttcctgttg

SEQ ID NO: 119243 - DNA, 1058 bp, Homo sapiens
ttcatcagtcactccccatcccctcctttcccagcccctggcagcacaaatttacattctgtcttgtatgtttttccctttgccttagatctgggaaaggttttttttcgtcatggtggggaaatgggcttctgtgcagtcaggggagaagccgatggaggaaaggagtagtgtggttatggaagaggctgaaggggagaaggtcgcgggcatctggaggcctgagatgtgcatgagcatccagtcctgcaccggcgctggtgctgcagtggtgccgtctctgtcactgcagtgctgttctctgagagctgttccgcagcgtgattttgggtgctgttcctcattatgaagcctctcagtcatcttcttcagtctgcactgtacctttcatagatttctgattcaattagctgcagattggtttttgtggcttcctacctgaacgaagatagaaaatgatgatatatatgatggtggacggtaagatgacaaaccagttttgaagtcctctaagaaacatgaaagtggatgtgagtggtagatcacaccagtgaggttgtgattttgattagagtgttgtgagtaaatttcatgggccataagtgctgacaaacaaagattgttatggtttgatgtttcaaaaggggcatcaggaattgaggataaagtgtttgttgtacccccttttggggtctaggagaatgaatgagtaaaaatcctgaatgtcagtagctcatggagtgttagattttacatagactggtaaaaacctgagattgatatatggtggctaggttattttgaaagtaagaatcttaggagtaacaaattgctgtctgctatcacagtatttaaaaaaaaaaacccgttttacacaccaaaatgtaagaagaacatgctcccagaataaagaacactcaccaaattatatacttttgactatgtgaactactttttctcatttccatttttttcattttgctaaagaacgggttaaaaatgtgtcatggattggcattagtccatacagtacatttgggaaccacctattgaatact

SEQ ID NO: 119244 - DNA, 1005 bp, Homo sapiens
ttccttatgacattgatagtctagtggtatgatgatggtgatagttataattatggtagattaaaataattaacaagtactgagcatttagtttgtgccaggtaccgttcaaagtgcattacattttgttcaaagtatatttgttgaagcaacagagagcttctatgaggtggttttctttttcttttctttttttttttttttttttgagacagtcttattctgttgtccaggctggagtgcagtgacgtgacctcggtttactgcaacctctaccttccaggttcaaatgattctcgtgccttagctgcctgagtagctgggattacaggtgtttgaattactgcttagctctttctgaactgcactggctttgggtaagtcacttatcttttctgccaggttggaagaataattcttatcaaataggaaataaatctgcacatagtagtggcctttgcctcattactggaatggaccttccctccatagtgttaacagaataataaaagatttcttgacttttaggaaaggaagttgaatgtgggaggtattactatttagccttgctttgcatggggaatctattatctagaagcagaaagttctgtaatatttggaatcaaccacaaggctataaagtactgggaggccaacagatttaatgtccagtgagtctttcaagactgtgcaaagcagatctgggagctggtcttatcttctcatataagaggattgtaggcagtgacttccattctaaatcttccttgctgggatttgcagtcctgggataaaaggtttggcattattgggctgggcgtggtggctcacacctgtggtcccagcactttgggaggctgaggcgggcctcccaaatctctggatcacgaggtcaggagatcgataccatcctggctaacatagtgaaaccctgtctctactaaaaatacaaaaaaattagctgggcatgggggcaggtgcctgtagtcccagctgcttgggagg

SEQ ID NO: 119245 - DNA, 1102 bp, Homo sapiens
gtggtggttcccatgggtgctggtctctctgtgtcttaccagcttttcaaactccatgtatgtcatcttttctagaccactctggctcacatcatagccagcaacagcaagaaacatagcataaggtttgtgacattatctgcaacaaatgccaagacaaatgatgtgcgagatgtcataaaacaagctcaaaatgaaaagagctttttcaaaaggaaaaccatcctttttattgatgagattcatcggttcaataaatctcagcaggtatattaacttccttctaccttttggtcgttgtgaacatcaaacaatataaagtgtgtgagatcactatacaaacgctagagacttacgagctttgtttacaaagaagcgtaggcttgtgaacccatctccttcaagcctatttctccatacatttcttagtgttttttgataacaagaaaatgctttctctatctgataaatgaaatggttggcatatccctgagctatacgtatcagaaaagcacctttgaatcaaatttccagttttaggaatttttaatctaaatactaggagtcattgtgaacagtaaaataatgattttaaggtcattattttaatgggtttttaaaaattactttaacagtatttttattttgaaaattaaacaatcggtattttctgtaactccaggctctgtcttcaaggtgaatgttggaagagctaatgattactgtttatttaaatgggtttctgaaataaaaggacacaagctatttttataaacaaagccacttagggatttaaaaaaaaataaacattaaaattttattgggctgagatctgagagctatactctaaataaaaaaaaattaaatttttaggcataactttaaaaaatttttttttgtaactttttaatcatacatagaatatttcacaaaactctactgagccttttttgaacctttttgaataaaaagacccttttaaagttctgacgaggcgttagcattctaggtttcatattggaccactgactcatcttagtattttttccccataaaacagcataataggaataataataatatgattgagtgcttgctgtgg

SEQ ID NO: 119246 - DNA, 1083 bp, Homo sapiens
tatgttttgcattatccagcataagggataattacccaggtatcaagagcctttttctttaatactattgcccttttcatcagcagcaagcagagtaaaatgaaagaatgttaagcttaaaaccattaattggtcaacttgttagcaattctaacaagaagttaagttaggagatatcataggccacagaaagaactcttacaagtgatttccgaatacaagtacctgccaccccaactgtcagggataattaagagtggattgggatgtcttttagttgttttaggtaaaattttgctttccaatccctgttgacagctctatatacatccttgtgcatataaatcagatttggtgacactaatctagttgaaagaaaagacttccaaccccatatacttactttctctctccaggaagctattggtgtgcatttgtattcttgtgtcatgttttggtgccctagatagcaactagaacatttacagagaagtcccaggctgttgaactgcacgtgagaggaggtgagcagggcactggatttggaaactaatcaagctgccgcttagccgttcttgattgcacttgaggaattgtgagttgtcacacagtatactcatgtaagtgataaattcccattaaagtgaaataagtgttctttttttaaaaaaaaattccctcctgtagttattattcagtcaaaattgaagctcctgcatatgctaggcattggctgagggttgaaaagcttgttcctgtgccttcagagggagcgcagtatgatgaaggctaggggagcaggtccacttccagtgccacgcttatacgccaagtgcagtgggcgtagagaagcagcattcagaatatgtgaaatccagtatttcacctcctagatgaggggatgcggagttgagttttgaaggataagcagaatttaactgagtgaaatagaaagctcattgtctacgccatagttgctttggtttgtatggctaagcagtagtgttcaggtattttgctctcccaaaaatatttggatcacatgatacaaacagtgaagattctgtctgctctgggttaatt

SEQ ID NO: 119247 - DNA, 1786 bp, Homo sapiens
gggcttattatttactgtagatgttctcagctgaatgttgatgacatgggtgaactgtaactgaaaaattttatttttttgcttcacaaatgtgcagctagcagctcagccaggaataagaccccactaagttatgaaatgtgttagatgtcttgtttaactcaactagggatagaaaattttactgagtcagccttctgatcatagttagatcttatttatgagggtccaaatttagaaatgtgactgtaagttttagtcctgatgttcagagagaggttaggtggcttacccagggtctcatggctatgtaccagcagtcttctcgtcgcttcccaggctaatgacctctctgctaccctgtgcggattttgcatgattagtgtccactatgagatgacctactgcagcatcccaagattccccaggccaagagaatcctgagacctgcttctaggacctgctgtgctcagagtaactagggacccaatttgttgtttttaaaatgaaggaattgaactgcatgatctggagcccttcagagctaatattcagatataatgctgactctcccctgtgtggaaagtggtctaagcacatctgtctcatcggatgtaggctgcatttggaacatgttttccatacacggtaatgaggtgctagcatttctaataaagttttcactgttgtgcagggtagaaccagagagaccacctgtcaacagtgactttccaggccagtcagtgtctgtttcacacagacttagatgtatgaacctatgcagtgagataccctcgacactcataagatacagggcgataacctggtgacttaggagccccagtcagttcgtagtcttgatgatgcttaagcacattgacaaaggtgagaataagaggcaaaggccttgaactcttcagtgtccttgctgagaagtatgagtttctaagacatgtgcagaacaagaagtatgcagcctgagtgtgaccgtaactaaccctgcttgtgtttcaggcccgccatgttcatagaggataaagcagtagacaccctggcttacctcagtgacggtgacgcccgagctgggttgaacggactgcagctggcggtgctggctaggttaagctctaggaagatgttctgtaagaagagtgggcaatcctattctcccagtagagttctgatcacagagaatgacgtgaaggagggcctacagcgatcccacattttatatgaccgggcaggtaagtaattcacctgtggaaagagtgaaaccatacggaaagaagtgtgtgcacacattctcatttccggaagcctgactgggttccggaagcattccagctgggtccagagcattccagtgattctcaggtggatctgcatgttggtattaagccttctacacagggctgacctttccgaagagaggcatgaagcagaagctgccctgttgagaatctagaggagttttggggttggaaatggcaggctgcacattcaccttagaaggtagttggctattccccaccttgcagaatacaatcacctttgaaagcctgtgcattcacttgacaatgaatatgttttgtgatcatttacaacggcagtaaataaaaagaggacttttgtcataatgacttattagttttaattgagaattaaaatgctttatttctagagtctatactaaaaaatagtcatggatcttgaagtttttattttatgtagtagctttttcaaaaatttaattttgctgtgtgcacttatctgtttttgtagaact

SEQ ID NO: 119248 - DNA, 1061 bp, Homo sapiens
tgagagccctttcgtttccaatccttttctttactagcaatggtttgttgtctttaaaaagactatgtttgaaaaaaaaacacagtcgcctgggcattgacacttgtcacaatacaagatgtctctggagttgttggataaggagaggacagccacagccttcctgcctctgactgcttggtgtctctcccccttgtcaaggaagtggcacatgggacataggacaagtaagagtgctcacaagcttctggcagatgaaggggccactgatcctatgtgaacaaacaacacctacgtgcaaggggaggaagggaactgtgagtgcctgtgcgcttgtacatgtgcactgaagtcggaatcttaaagtctaattctggtctttcaggtggaaaaaagtctcacttttgagaaactcacagcctggaccaagccagactgtatgaagagtactgaggttgaagttctccttccaaaatttaaactacaagaggattatgacatggaatctgtgcttcggcatttgggaattgttgatgccttccaacagggcaaggctgacttgtcggcaatgtcagcggagagagacctgtgtctgtccaagttcgtgcacaagagttttgtggaggtgaatgaagaaggcaccgaggcagcggcagcgtcgagctgctttgtagttgcagagtgctgcatggaatctggccccaggttctgtgctgaccaccctttccttttcttcatcaggcacaacagagccaacagcattctgttctgtggcaggttctcatcgccataaagggtgcacttaccgtgcactcggccatttccctcttcctgtgtccccagatccccactacagctccaagaggatgggcctagaaagccaagtgcaaagatgagggcagattctttacctgtctgccctcatgatttgccagcatgaattcatgatgctccacactcgcttatgctacttaatcagaatcttgagaaaatagaccataatgattccctgttgtattaaaattgcagtccaaatcccataggatggcaagcaaagttct

SEQ ID NO: 119249 - DNA, 2888 bp, Homo sapiens
tatgcatttatcatttattcagcagagattgactgagtgcctttttttttttttttttgagatggagtctcggtctgtctcccaggctggagtgcagcggtgcaatcttgggtcactgcaacctctgcctcccgggttcaagtgattctcctacctcagcctcccgagtagctgggattacaggagcgcaccaccatgcccagctaatttttctatttttagtagaggtggggtttcaccatgttggccaggctggtctcgatttcctgacctcaggtgatccgtctgcctcagcctcccaaaatggtgggattacaggcatgagccaccatgcctaacctgactgagtgtcttctatgtatcaggcatggtgctaggtatttttcagccatgcacaaaacaagcaaagcatgcttgccctggtgaagcttatgttttcttgggggagagacagcaagcataaataagaaaataggagcatattagacagtggtaaatggtacagagacataccaagggaggggataggaatctgtgtttggggtgggagtgtagggtcaggtaagatctatcaaggacagcttctctgccaaggtggtttttgaacaaagaccgtaaagaggcagaagttcactctccaggttctggaggacaagcttactgcgtagagatgagatgaactgggtttgctggcagtgcagtgaggaggcctctgtgactgtagcagataagcaaagggagagggaactggggacgagctcttatcacaattccaggctttttagggactttcagctcctgctccgagtaaatggggagccagggaagggtgtccagccaaagaacaatgtgatctgccttaggttctaccgggcccctctggccactgtgctgggaacaatcacaatcatattatcacaatattccagggctaggctggtagcagcagaggcagaaggaacaggtcagattttgttatattctcgaggtagagccaatataatttgccagtgagtcagacacagggtgtgagagaaagacaggagtcaggggcactccagggcttttgaccactggacagtggcactgccctcagctgagatgggcagagttgcagtagacagagccgacttggaggatctacggagtgccgcattacaggtggcgctgggagtttcttttatgtccaaacataggtgcaggtgggcagtaaaatgcaggaggcccaaggacagggcagaggcccaggcgggaggtaaatttggtgtgatattgtgtttaaagccatgagactgaatgcgatcaatgagaggaaagacacgttgggtttgggccctgggcaccccagtttctggaggttgaggtaatgaagatggcagagcaggcgctgccgggtgttctggaagctggggagaaaccgagctgcgtttctccctgcagagagtggccagctccgacacatttgtcccatgtgtcagtggggtcttgtttcaacttgatgtttatctgttttctttgtagaatgaggagaaacctgtgcaaatgatgtttaagcaatctacttttaagaagacctatataggagaaatatttacccaaatcttggtgcttccatatgttggcaaggaactgaatatgatcatcatgcttccggacgagaccactgacttgagaacggtaacagctaagctgtgagcgaggcgtgctagcaaggagccactcgggggtgtctgctgtggctgctgtccctactttgcggtcagccgtttaacactggagcgctgctgaccatagccacgctgccactggtgtctggcatccacagcatagcacagggccctgctgggcagcagcaccctgggtcttaaagtcttcaactgtctccctctaggtggagaaagaactcacttacgagaagttcgtagaatggacgaggctggacatgatggatgaagaggaggtggaagtgtccctcccgcggtttaaactagaggaaagctacgacatggagagtgtcctgcgcaacctgggcatgactgatgccttcgagctgggcaaggcagacttctctggaatgtcccagacagacctgtctctgtccaaggtcgtgcacaagtcttttgtggaggtcaatgaggaaggcacggaggctgcagccgccacagctgccatcatgatgatgcggtgtgccagattcgtcccccgcttctgcgccgaccaccccttccttttcttcatccagcacagcaagaccaacgggattctcttctgcggccgcttttcctctccgtgaggacagggcagtcttggtgtgcagcccctctcctctctgtcccctgacactccacagtgtgcctgcaacccaagtggccttatccgtgcagtggtggcagttcagaaataaagggcccatttgtgggatgccgcattcactccgtgtgtttgtgtgtctgcacgggagatgtttcctaggatctgaaattgctgctctgggtctgggttatgttagtaggggcggcaatgaccacctagctcacccttgcttgggggaggtgttgcccaccccccacagccatggggaccccacgacttcattgtgggcagacagctgcccttgaggtcggtggtgtgactcttccttggcacaggaagatacatggtgcttctctgtctcctctactcagtagtggagtctcatcccacttctagggagagaatggggtgaaatggggtgctacagggaggtgcgggaagctcaattctaaaactaccgcaagctctccggaagcctgcatggaggtggggggagcaggtgaaccagatgagggtgacagcagtcccctgccctgtgggtgtttctgcttccctgaggactggtggatcacatg

SEQ ID NO: 119250 - DNA, 1877 bp, Homo sapiens
tctcagctcactgcaacctccgcctcccgggttcaagcgattctctttcctcagcttcccgagtagctgggttacaggtacgcaccaccaggcccagctcatttttgtgtgtttagtagagatggggttttgccatgttggccaggctgatctcgaactcctgacctcaggtgatcctcccgccttggcctcccaaagtgctgggattataggcgtgagctgctgcgcccagcctcggatagatcttttaagcagtaataagggtctggatggttgttaggctgagtttggggttgccccatttcctgaagtcagagcatacaggaatgatttgttttcattctgtttttgatttcagatactttctttcaataaaagtggcggtggtggagacatccaccagggcttccagtctcttctcaccgaagtgaacaagactggcacgcagtacttgcttaggatggccaacaggctctttggggaaaagtcttgtgatttcctctcagtaagtcatacttgctcttattcactaaagaaataaaggtggccaggtagtgggggctggggcccagcaggaagcgtgtggctctaaatgccattatgccatacataggcttttgtaatttcttttcacctgccaatatgttttaaattctctgcatttcaataaggtggatctacttcacgcttttgaagtgtcttgtcagcatcttgtcaggcagctccttgatgcatggctgctcccttaaaggatccagcagttggtgaagttcgtttgatattcagagactgattcaacttagtgttttttgcttttttttttttgtttttttttttttgagacagaatctcgctctgtcgcccaggctggagtgtggtggcctgatctcggcttactgcaacctccgccttctgggttcaagtgattctcctgcctcagcctcccaagtagctgggattacaggtgcatgccaccatacatggctaatttttgtatttttagtagagacgggctttcgccatgttggccaggctggtctcgaactcctgagctcacacgatccacccgcctcggccccccaaagtgctgggattacaagtgtaagccacagtacctgaccttgacttagtttttaagctaggattaaatatagctaaagctaggaagttgtagtttaggttaagtcctcatatttatttgtaaattatgtatgtcaatcataaaattatagattttctgacttggtgcaatgaagaagtaggccgttggtgttcatcatttttgtagccaggcagttatgtcactctgtctatcctagtcttttagagattcctgccaaaaattctaccaagcagagatggaggagcttgactttatcagcgccgtagagaagtccagaaaacacataaacacctgggtagctgaaaagacagaaggtgaaaatgtattgttattctacttttgtaataacctcttaatccattttattgtcagttccttcacaagactgtcaattgtaaacaggaatgatttttttttctctgaataactgcaaacttaaaaaatctgcttctgaaatcagttgccattatttgacattttggaaatgctcaatgtgttctgttctctctgatttctccctgtttccttggtgtacccgtgatgcctttcagtgtttggtatacctcttctggatcaatccacgttttaattttgaggagggggttagtgtgttaatgttaatatagtttttcctttcacaagtaacataaaaaattcgcagtgtggatctcaagctgcctccctcttgggtagcacagtctacagttgccatgcattgctgtgggacactgggtcacgccctggtctatctgtg

SEQ ID NO: 119251 - DNA, 1057 bp, Homo sapiens
ctgaatacactgtgagatgttgtctgttagaatgcccagcacggggactgtccacatggaaagaggcacaggaaaaaaagtgaaaacattataaaataacttcttaaaattaaataatgtacacgtcaaaaatatcagagcccacttgacctggtatatacagtttaataaccacatggctcttttttcctgtaggcctgggtaggtgcatagtttctaaaaagggagagaactgtcactgctgtggatggggtgccaagggaagtgcctggggtcaagtgaacagtgacacaactgcaagtcaagagcctgtgttggagtctttccccactatttcaaatagtatagaaaatagagctgagtcactcaaatagagctgagttagtcactcagctcttggacctcagattcttattcttaaccgctagggggatggagacagaagtcacaaactcacatgccaccagccatatgatgtaaacatgtaaactgggccaaggaatacaaaagggagtggtgagctggggacactgaagaatggatgccctgtctagaggagtgaaaatgaagcatttcatacaaacaacatgatttcgggcaatcactttgggaatcaggataaggtgttcccccagtctgcagaaacactggcaacatttacaaaggtaaatcatttcatatcactctattttctttttcttttttgagacagagtcttgctctgttgcccaggctggagtgcaatggcacaatcttgactcactgcaacctccacctcccaggttcaagtgattctcctgcctcagcctcccaagtagctgggactacaggcacatgccaccatacccggataatttttgtattttttagtagagatggtgttttgccacattgaccaggctggtttcaaactcctgacctcaggtgatccccccacctcggccccccaaaatgctgggattacaggtgtgagccaccacaactggcgatcattccatattactctccagcttaagaggctccaagggctttctgtcaggcttagaataaaatcctc

SEQ ID NO: 119252 - DNA, 1695 bp, Homo sapiens
tagtgtgaatgtaccataatttgcccaatcaagcagaactataatgtttggcatctgaatcagttgcaaagattgtaggttaattgcagttataaaaatagagcttggaaattgcaactgccccaagttcttcacggctcttatgcaaggctgtgtcctaaagccatagggaagtttagctttcagttgcctgtaacattaaggttgtttcatgattttttgaaggtttgtttcacaccatttccccccttaaatcatttaactgaatggtatgtaacaggtgtagtttctaatgagttcttttcttcccctgtggctttagcatggcacattacacttctgtggatttaaagtccttgcccctcagatcagctttgctcctgaaattgcatccgaagaagaaagaaaggggatggtggctgcgtggtcccagaggctgcagaccatctggaaggaagagcccatcccctgcacagcccactggcacttcgggcaataactctgtggcacgtgggcatcacgtaagcagcacactaggaggcccaggcgcaggcaaagagaagatggtgctgtcatgaaataaaattacaacatagctacctggggatacttttttctttctgttttttgtttgtttttaattttagctttaaggagcacatggccagtactgtttcaggggaatattgggtggcgctggggtttgggcttctattgatcccatcacccaaacagtgagcatagttcccaatagatagtttttcaacacttcctttcctcccttccttcccgcttttggattcccagcatctattgatcccgtcttttcacccctgtgtacccaatgtttagttcccacttataagttagaacatggggaatttggttttgtttctgtgttgattcacttaggataatgacctccagctgcatccacgttactgcaaaggacaggatttcatgtttttttatggctgcatagtattccatggcgtccgtgtaccacactttctttatccagtccactgttgatgggcacctgggttgattccatgtctttgctactgtaaatagttctgtgatgaacatacaagtgcaggcatcttttcatagaatgattttttttttccttttggtagatacccagtaatgggattgctgggttgaagggtaattctatttttagcaaactagaaatatttaatgaagtacatgaatgagtgtcttcagaattgtacacagtgagatcaaatattttaataatgagcttgttatgttgaattctattctgaccatcactcactgagattttcttttctttctttcttttcttttctttcttttttaaagagacagagtttcactatgttgcccgggctggtctcaaaccccttgcctcaagtaatcttcccaccttgggcctcccaaagtgctgggattgcaggtgtgagccaccacacctggcccagattttctttaatatttgtctaatatctttccatctccctatattcaagcttcatgtaattttattttctggtaattctctgagcatagagctggatttgctagtttttttattttatgactcaacatgacagtttctatttttcatagaaaagttgaatctgggcctgttgcttaattttcttctttgtctttttaaatttacattaggactatgaagttttaatt

SEQ ID NO: 119253 - DNA, 1112 bp, Homo sapiens
gcctatttctttctcaagacggaaaaaccgagccccagaaaatggcgataagatggggatgcaggaaaaagctagctaatgaacagttcagcagtgggcaccgtgtgggaacctctcctaagccgccctccctctgatggatgcatgctcaagtgatttcgttggcccttaaaggaaagtgttattccatcctgtaatcctagcactttaaaaggaggccgaggtgggaggatcacctgaggtcaggagttcacgaccagcctggccaacatggtgaaaccccgtctctactaaaaaatacaaaaattggccgggtgtggtggcatatgcctatagtcccagctacttgggaggctgaggcaggagaatcacttgaacccgggaggtggaggttgcagtgaggtgagatcgtgccattgcactccagcctggccacagagcgagactccatctcaaaaaaaaaaaaaaaaaaagacatctgcccaagggtcatagctgtagaggggcagatgtggtttgaacccagggcgtctggttcctctctggaagcaaccaaagtgcctgtgattggggtagtgacaaagcactctgagccgctgcatggcagatgctgtgaagagtcatctttgcctgtcccatatctattcccattttttctgattgtaacaccttgtttttttgtgtgtggtgggggaaccatgccctttcaaccaagctatgtggtgttcataagggtagcccctcctccgaccccaggagtggcagttcacagccctgactgatcacagtgttccgtggcctagctgtaaccaccccagggagtgagactgaactcaggggttcattggacctatcaggaaagagagacctttcttgtttctggacttggagctgtgatgaagtaagtgggtcaggggccaacacatagacagcgttggcctacaaatgcagcccaggcagaggacggtgcagccaagccacacagagagacaacttcctagtgacacgctgtgaactcctgcatccacccctgcctgaactggagcttttcctcttcagctcttcagttatgtgaggcaagatgttgccttttttgcttaatgctgtgagtt

SEQ ID NO: 119254 - DNA, 1001 bp, Homo sapiens
agcaacttgtttattgtggtggtggtggttgtggggtgaggggttggggatatgcttgggcattttccttcatttttatgatcttagtaacacatttaaaagtgcacttgctgtgatttacttggcatctagaagtgttgctgcaggagagcttttcagatgtcttgtctgccacagaacaggaagtgaaagtctctgcatggtttttgacctcacccagacacgacacaagaatctctgacccacaaaacatgagatccttgttgagccggggaccccgccttaggtttctggtgtcgcttcttaaaaatggcctttgttcagtgctgcttcaattccccgaagggttccttccagcagtggagcagagcacaagctttggaaaaggccgcctggtttttagtttgcgtgctgcctcttgtaggggtggagcctggtcaagtgacttgagctctgtaagtttcggttcaccatctgtaacatgaagataacaaaaccttcttacagattgtcagctcaggctgcgagacatcaacagaggacataccttccatccatgattcaagagttcagatgacacacacttggattctgggcagctttactctcaatacattctcatcaaacacatcactggctgcatcgacgttccagcgcatcagcccactttatgggaagaaagaaatggggagagatgagcagaaatcagacttcttagcagacacaacccgaggcagggtcagcacctgggccgtcaggatcccagacaggatttcaagctcctcctgggattctagtggggaaggtttctcctgacaggactgaggacacactggcaccttgcgtatcagctggggcagctatggaagctagactccctttctttcatagatggggaaagtgaggcccgaagaggtgggggagcttgttcaggggtactcagctgctggcagagctgggcctggatgcaggactgcatcagcctcttctgcctctgtcac

SEQ ID NO: 119255 - DNA, 1028 bp, Homo sapiens
atggagtttctgttttgccacgaagctttttgccagcccttttcccaaagtgtttgtaccattttatactcccaccagtgatgtttgagaggtctggttgcttcacatgtttgccagtgtttggtgtattagtctttttagttttggatatcctggtagttgtgtagtggtgtctccttgtggttctccatgggtttttattctatatttcagtttggggaaaatgaatgaatggaagaaaagaagggaggaaggatgaagcaaatagctgtgctttgagatctgacactgtatacttcacagccctgatggacattctccaaattctactcctttttcacattttcttcttagagtttgcattgttctttttatattcttcagattccttcttttgttcataattacttaaacctattcattttctaatgcctttcagttgttaatttactgaagttctttggtgcttactagtgctgcttgctgtagctgcagggtctgtctcacagtgaattttttcttttgtgttttataattttggaaagggagctcatgttaaatttgtatttgtaggaattctgtctggcctggcttgaggttgttgtttgctttagcctataacctcaggatggcatcagcctgtgaccacttcctgtgtaaaagttcatagtttaggcgatcctctcaattcaaagtctgtatctatttcaagacaggcccaaggttataaatttgcacaaactttttttttttttttttaataccttgtgcccagtccaagacaaatatgtttgtttgccatgggctgctttttttctagttcatcctttcatcaaagggttgcacattgagcagtgccgtgttaaggggggattcttcattctaccttcttttcttgtattccttgacctcagctgggctttaaaccttgacttctggatggcgaggttggcactcccctgtgtgagctactgcctgcctccggtgctctgtttctgtccctagagttcttttcctttccacggagt

SEQ ID NO: 119256 - DNA, 1067 bp, Homo sapiens
gcattgttcatgtccttaatgtaaacttagtatgatgtcgtgtgagtatcccacagaaactgcttgctcgtatatttattcatccattcattcaacaagcattccaggtacaatcctaggttctaaagatacagtcctaaataatatatatttttgttctcaaggagcttaattttatagtattttatgcattaccaaattattgtgggatttttgtttttacactaacaaaatacaacacgaataccctctgcccccccccgaatgaaatctttcttgtttcccagtgacagcagtactgtggtgcacctgctggaaggaaacctggtaaccttctcctcaggctcagatcccaccaccctttcatgaaacagttgctttggcctatttgataacctttccatttcatagacttaatatcacttgttttagatgagtactccgctttctgtaaaaggaaggataattttggaaatcattgaaggaatgtgctacttacatggaaaaggcgtgatacacaaggacctgaagcctgaaaatatccttgttgataatgacttccacattaaggtaaaccatcatcggtaggcttccagaaagttgggtgattttagttttaattctccaatgtaaatccattctcgtacattggagaagctaaaggaagacctagctcagcttataactgttgatgatggtgccgaaaggctctaccggtgattgagaggaaggctgcaggcttgatgggatcaggagataactgtcaggataactcatatcttttgggggaggagtggagttgaatggggtagatgagaagacctctttcctagactgtgttttttcctctgttagaaacatttagaaacattcaagggttgcccttttcatcctggaatgggccattggtgtcataatgttctccaggaaatctgtgtcaccaagactctcctcctctggaaatgcaggggaatgtgaaggtgtgtgcggaaaatccttagagttcagatatggcctaagagtgagatcagcggccgggtgcagtggcccacgcctgttatctcagc

SEQ ID NO: 119257 - DNA, 1138 bp, Homo sapiens
ttttatatttgtattcgattgtttacttctgtctgtattttaaaaatcagtttcctttgaacacattctttccattgtcgtaaagggaacaagggaaagggatttttcttttgttcattcaagggcaggatttagctagggggagtgtcatatctaattggcttctgcagcaggaatccaagcacaagaatccaaaaggggaagcggaaggggaagcagccctgggggaggcacccaggagctgctgacacaggggcctctcatcaccagcaggttctgcgtctagcgctttgtcctagtcttggacaaagggctgggaataaaaattccttattcataacctatcttcaaattcatgacttccctcttatgtcgtgggttagaatctgtgaattttaggtactcatgtgccacagttcatccccacatgcttgcttggattcctggaggcagaagtggaactggcacctatattctcttctgaactgtgctgccctgtcattttgccctgccagcactgttcttgttctgtgtctgaccttgctatttttctctctgcttttttgtctgtttttctcctcctttccaccctatctcctcttaggttcaggctacagctcaaaacaagcaacactgcagtccttatcctcagtgtgtctttgggatccttggacacttgcatccatgggcctctggacgccatttggggaaatagaaggtgtagtatttagccactgtctgctgcataaatgtgcagagaagaaaataaccattttccccccaagccctagaaatagttgaaaaacatacgcagagtcaatggggaatgagaataaatatgtttggttgttactgttcttgtcagaaacatcttccgcttttcccctcccccttactgcataaggaatacgataccagaatttcatgtgaacgtttcctgggcgacattttacaaatggctgaggagacacacagtttctatgagtctgttgagaagtcgctgttttgaacctgcccagtgcaaccatttctggaaaatttaccgtaccttatgtataatggataagcccaaaattgaaagtcagatctgatttgcttacggccttcaccaaacaatcccagtggctcaatgtctttc

SEQ ID NO: 119258 - DNA, 1033 bp, Homo sapiens
tgcactccagcctgggcaacagagtgagattgtgtctcgaaaaaaaaaaaaaaattccactggctgggcacagtggctcacgcctgtaattccagcactttgggaggccgaggtgggaagatcacgaggtcaggagattgagaccatcctggctaacacggtgaaaccccgtctctactaaaaatacaaaaaaaaaaaaaaaaaagctgggcatagtggcgtgcgcctgtaatcccagctacttgggagggtgaggcaggagaatcacttgaacccgggaggcagaggttgcagtaagccgagattgcaccactgcactccagcctgggtgacagagcgagactgtcgcaaaaaaaaaaaaaaaaaaaaaaaaattccaaaactcttcccactttgtgacgtgcagttctccaggcactggagctataactgaacaaacagcctgagtcccttccctcacacagtttaaatcctagtggacagaaggcagaccctaaaccaatatttaatgtgtcattttttatcttttttctacatgagcaacccaaatacacccgtttagtgccagaaatctctttgtgttttcacctcgttctggttcctggttctgccagtgacagatgtacagggatgcagcttcttcagggttctgagatgctttcagtgggaaaggggcgcttggatctacaatagataatagaattttctgtgtttctgctcccaaagatgatcctgccaggtactaagctagtaaatgaacacgctgagtttctccttgcaaatttaaataagtcttctgcttgcttttatcatcaaaaagtcctaactctataccaaaatatgagttttctaatttgccataccatagaagaagggtgtgtatgcagtaagtacaaaaggaaaataaatgtcttcctttcagtgaaagagctcttagacccactgctttttattcactgtgctgcttgaagtgaggttagaaaaggaaagctcactgggctaagagtcaggagacccaggtctagtcctgctt

SEQ ID NO: 119259 - DNA, 1027 bp, Homo sapiens
atatggtaattctatctttaatttttttgaagaatcacgatttttttttttttttttttttgagacagactctcactctatcaccaggctggagtgcagtggcacgatcttggctcactctgcaagctccgcctcctgggttcaagtgattctcctgcctcagcctcctgagtagctgggattacaggcacccaccaccacgcctggctaatttttgtatttttagtagagaaggggtttcaccatgttggccaggctggtcttgaactcctgacctcaggtgatcacctgcatcagcctcccaaagtgctgggattacaggtgtgagccaccgcacctggcccactatactctttataggagcagctgcaccatttcacattcccaccagcagtgcacaagggcttcattttttccacatctttgtcaatatgtgttatttctttttttttttttaatcataggcatcctaatgggtatgaggtggtttagccagatttgaaagaagaaaagtttaaagggtggcataggataattaacttaatgtttggcataaagccctgcttttttgccatgctgtatttttttctcttgcttttgatctagaattacttacctgtgtgtttctctctatgcagatgaatctataaaatataccatatacaatagtactggcattcagattggagcctacaattatatggagattggtgggacgagttcatcactactagacagcacaaatacgaacttcaaagaagagccagctgctaagtaccaagctatctttggtaagataccctggaaggactcaacgcctagcaaccttgaactttcttacttgtgagaaggacatagtggaatcttaaaatttctctgataattcttcttgaaagttttcttatgttacttctgcaaaatatctttgtaatttccatataattcctttgtcatttatttatttttaatatggagataatcacagtatttaatttatggatttgttgtgaaaattaaatgagttgat

SEQ ID NO: 119260 - DNA, 1074 bp, Homo sapiens
ctgggactacaggcgcacaccgccatgcccggctacattttttttttttttttttttttgtattttagtagagatggggtttcaccgtgttgcccaggccggtctcgaactcctgagctcaggcagtccgcccgcctcggcctcccaaagtgctaggattacaggcgcacccggtcagcctgcctcctttcttcgagtggatggattaagtcattgcaaggctgctttcctgattacattctgaccactttgagtagaaactactttgcttttaagattgttattgcttctgttttcactgtaatgtgtttgatagtgaaagcgatcacctgagggtaaccaagtggctgtttttaggaagtggagagactgattttggacctcagctcaagaacctcaataagaagctcttcacggtggtcgcctgggatcctcgaggctatggacattccaggcccccagatcgcgatttcccagcagacttttttgaaagggatgcaaaagatgctgttgatttgatgaaggtaggtctctgagggaagggccaggggaggaagggtggctgggcctgtcttcatttattttgtttaaattttgttgttatatttttctacaaaataataccatgtgattgctatagaaaaccccaagagttcaaataggtataaagaagaaagtagaaatagcccacagtccagctctctagagacactaccaaatcttggcggctctgctttctggccagtcttattacatcacaaacgcagtttcatattgatggcatcgtgctacacctaacgtttttctaacttactatttttgttgaacaatttttcaaggaaataactttcatgtcaataaatatgcatttatactagttgtatgataggcacatattattccattgtatggatgtactgtatcttatttcaccaattttctttttttttttttgagacagagtgttgctctgtcacccaggctggagtgcggtggcgcaatcttggctcactgcaacctctgcctcccgggttcaaacgattctcctgcctcagcctcctgagtagctgggat

SEQ ID NO: 119261 - DNA, 1273 bp, Homo sapiens
gatagtgccacagtagttacaccattttatggtccgggcagcaaatatcttggagtaatattaattctttacctttaattttccagtcattccattcttttttcttggcggcctctctaagatgtaatctttgtccattttccctgccaaacgcatgtccagaccctctctgattcacccgcggactcacacaacctccccatgacgctgttctctgacagcctggctcttgccagttcttcccacagttgctttaccagataccctgcttcactccatccagcagagctcagggtcccctctctgatctacagaactgttctcaaggtccttgctcaggcatgcatatgcacacacgtgcacacgcatacacacgtatgctgtatttgtcatatttaagtacttggtctccattgattctagttccttgagctttttatccaaccagaagatgtagttccctcctaattcaaacccataccgtatgctcaggtttttgtgacaatttccactaaaagtaattaagagaaaacatgatgtcatcaaatggtggactctagggtttttcttttctgactaattgatactccagcctcacacctgtattgattctgataattagtgattcagtttcttttaacagagaggagcaataacccgtgccgtgcattttgtcgtatgatcataggcgctgaagtttaagaaggtttctctgctggggtggagtgatgggggcataaccgcactcattgctgctgcaaaatatccatcttacatccacaagatggtgatctggggcgccaacgcctacgtcactgacgaagacagcatgatatatgagggtaggttctgcgaaggggagatgccgggacggcagatccttcccctctctccgcatctcatctcttattgtgggatatgttgacaagacacatctctcgtgcttctagttctcaactctcaggtaggaagaataacgagttctcagaaaagtaatgcagtttaaccagtctgagttttaaagctttctgtttccaggagtgaaacttccatggctcaggaaaaggctaagtaaaatcactatttctatttactactactgataatgaacttcagggaaggagggggtggtgtgaagtgttattaataatctcatttaaaatactgtgaggccaggcacagtggctcatgcctgtaatcccagcactttgggagctcaaggcagaaggatcgcttgagcccaggaggtcgaggctgcagtgagccatgattg

SEQ ID NO: 119262 - DNA, 1061 bp, Homo sapiens
ggggtttctccatgttggtcaggctggtttcgaattcccgacctcaggtgatccacctgccttggcctcccaaagtgctgggattaccagcgtgagcccccacgcccagcctgaggtctttacaggcactggaataggggccagtgaacttcagcctgtgcattacacctagcctgcctcccacttttgtgcagcccacgtaccaatcgaggtggctagtgctgtgagtcacagagaccaagctggggtgtccctttaccacccagcattgctgccccagacctgcactggtggtcactacacaggggtgactgttggcaatgagcaggcacccagccatggaatttcagtcagcaactcaggagttgcttagcctccagcaagctgccccattgagatgaccaggctcttgggaggaaagaagggtgcaccaggatctaggggttgctaggacaagaagtgaaactgacctgcgttaccctactacccccacctgccagcctggcccaccaggaccctcttcctcaggccactagctttttgtccaagtgtgagtctagtggatcccagatggcctgccccagacacttaggactaggtgggtcaggtgttttctctcctcatgtgtaagtatctacataatgtctttgattttgcttcttggccagcaaaacctaaaatatttatttactctctggccctttacataaaaggtgtacagatctcttcgctagaatatcacaagtctagtctttttcagctattcgacaattcacgtgacttttaagtacgctacttagtggcagcgttctgttgtagaattgtagttcttcacagtctttctgttttttaaatgaatatgaagctcttacggtgagtctgatgtggttgccagtcctgtctgtgctcctgcttgtccttattttgctcctgcctggtatccatcttgtgcacagtaggccattccgctctgtgaagggtctgtcccctcccgcggcctctaggacaggctgccttgagttcttcctccctctcctgtatccttaaattctctccactgg

SEQ ID NO: 119263 - DNA, 1066 bp, Homo sapiens
tccgggaagatttgcatttgttgctcttgggaaccacaggatcataccaggttggggccatttttagctcagcttgatccaggagtctcaggttgggccccggcctgcctgcgaacactgcgtctccacccagagcaggcctgcctttggagctggcttacttcctttgctgtattttcagggttctgtttctcatgtgcagacacactcatacacactcacaccccggtttccattaaccactgcaacttcagcaatgccacagaattctgttttgtgaaagatctagttattcccctgcaagaaggcctttcagagggtatggtctgccatacggccaaaagtagaagcatgtgcagggacgttttgctagccatcttcacactgtcttgcttgcttctctctcccttaccctccgcccccaaatgttttcttcttcctacatcttctccccacctcttcaggctgtctccacgtacctcattcaagtcttttcattcttgtgcagagcagttcatcctcttcagcctttatcttcagctcacacggggcctacctctgaatatttaagccagtcagcagaagcaaaggcaggcaccaggcactgtcctgtaatgggggatccgccctcctcagaaggcagttgtgattgtaaatagcagtttttcctccatttggtgatttgaattcactaagcacacagtgagtgcctgccaggtgcctgacgttgtccgggactctgtagagattgttgctcatgtgagttcatgccattagtgttatatttcttccatgtgtaacgtgtagctctcaggaagcaatatttaatatgctcaagagcattagaatctttacttatcacagtgtatttaaagaaatatagaaaacattggcctaaggaattgcatttgttgattcatgttaatggttgtttttagctattcttccctactagtgaatcatctataatacagtttgaagtttggtacttagccttttacacccatatttcttcggtagcagaaattagaatgaataatttgtgtgcatttttcaatgtccatac

SEQ ID NO: 119264 - DNA, 1096 bp, Homo sapiens
agaagtgatatgccatgttgctgcccagtttcacactggaagagatcctgtgcaaagatccagcggcctgctttgggttccagtaaacacaaaagtacgtactggcactctgcggattacagactcactgacaacttcatggattcatagatcaagttttgttacattgatccaaggtgaaggcacgccacagcaggttacttgtggccttgttactgtctgtaactccctgagttacagatgaaagttcagctaaagatgaaaagggctccaggcggggcaggaaaggtagcatcgtgaggccagcatctcacctatggcattttgacctaaaagagctgtatcaacagaggtaaagtgacccatacatttaccttggggttagacagcttctagttccttggactatctggaaccatgtctctttctgaaggtgccacatgcagtgaggaacctgccctggcagaggaactcgtgttcatcctctgaggccccttcgtttccaactgagccatgtgcttagcagttgggggtttcctactaatttttcggagaatgttattgtttgaaaagtgctctccacagagcatgtgattagatctttttgttacttgggtgagaatctagagctcctgtcttgccttgacagctaatattcatgcccatctattgtggtcctgtttccaaagaggaacacacaacagagtttctgtgcagtgaaacctgtgtcagacctaaaggaggcaagggctgctgaggagcttgaaatgacccttaaaagatatcaaggagaagagttgtcttcatactctcttctatctgtctgtccatctgtctattcatccattcatccatccagcattcagagcaggtctcccatattttaatgaagggaacctcatttttatttccccaagatctagagattaggaagagtgcagacagtgctgaacggctaaaaagaaacgattcacagcgaggttctccttccttccttatgggaaaccaacaaatcatagccagataggctggactgtctacagagaaagacttcacatgtggcaggctggggattccctgcctcccagtccagctt

SEQ ID NO: 119265 - DNA, 1050 bp, Homo sapiens
aaagtctctttcctctttctgtctttcaatttgatcatttatattttcatgtctttaacttcacttttctccagtgtccagtactctgttaggaccatctagcaaaattttcatttcagatattgtgttttcagctctagaattttttttttttttttttttttttttttaagatggagtctcactcactctgttgcccaggctggagtacagtagcataatctcggctcactgcaaccttcacctcctgagttcaagtgattcttctgcctcagcctcctgagtagctgggattacaggcgtgtgccaccacgcctggctaatttttgtatttttagtagagatggggtttccccatgttggccaggctggtcttgaactcctgacctcaagtgatccaccagcctgggcctcccaaagtgctataattacaggtgtgagccactgcgcccggtctcagctctagaattttcatcttttttatttttagttgagatataattaacataccataatattgattatttttatgtctaccatttatctcctcattgtgttcaagttttactttgaattctttagtatatttatgttagctgtttaaaaatttttgtctgataattacatttttcccccatcatttctggttgtttttctactgacttgatttttctcctgattatgggtcagattttcctactttttggcatgtctagcatctttggattgaatggtggacgttttgaatgtttcattgttgaacatctgaatgttgttgtcttcttttaacgagcattgaacttggttcttgcaggcagttaatttactgcacgcatagttttatcagtatgatccttctgtggctcatttttaagctctgctagagtggatctaccgtcatctctatgctagcactactttacttacattcttgagggctgatctctctgtggtttctaatgaatgtcctgggtgttcattaagatagccccacgtaactgccagagctcaaatgtctgcagcattgtgcaagctacaactacccaggag

SEQ ID NO: 119266 - DNA, 1048 bp, Homo sapiens
cagctgctcttcccctattctcacagtttcttatcttgcctctgcatatcagttgtcagctgaagacccaagaggacctctctgctgacctccaagctctctctgtgaagtttcttccacttctgtattctgctctgtgtttctagctaactcgagttctcagaattctaacttggactttgaattctgatttctgtattttcaactcaatgagaccaccaaactctgtctgggtttctccctccctgcactgcagcatggaaaatacctccagatagtaaactggggaaattatatggctacctcatttgtttcccttttctctggagtcactgtcattcattgcctgatgtccaatgtctgctgtcttccacctatcccgaaattgggtcatttctaaagtctcctgagtctcatagttcctactgtcatgtttctatctcatcatccttttgcttcaacaaatatctgctgagtacctactatgtgcctgacacagtgctaaggatacgaatgtggataaacacgctccagcctccaggggttccaagccagcgggggagagagacagaagctcaggtaagcacaggcagcctgcgcacgcactgtgcacagaaaactcactcatgttggctggaaatcagggtcactttcatacaggaagcaacatggacatcccctaaactagcaagtctaatggaattcacatattaataagaatccgggttcttgtaggtggatggactcaaaccatggttcttgaaacagccaagatgtgttattactgaaaatgcagctggataatgagggctgtctccttcatggagctcatgcttctctctgtcatcattagcctggcctcctttcttgtttgtttgttttcctcttcccctagcaatgttgacaggtctctctctgggaggaagacagtatggctgttgcctggtgttgatccctagctcttcctcccacaggagacaccagattagagctttccattcctctgctgaaagaggaggctgccaggagcctttctgcattcttgacc

SEQ ID NO: 119267 - DNA, 1036 bp, Homo sapiens
gctggagggaaagtcagcgccacagaacatgttagatgcccatgttcagaagtggctgaaaatctggaaggacagctgagagaggcgagccttgaggggttaagacgggaagatacaagcgttcagcaggtccgatcattcaaagataagtctctgaagagcaaactatacctaagggaggcagaatgtatagaagcatccttacgacttctgctttcgtgtgaacctctaggtagacaggcatgatttgaggatcttggtttgcaggaaaggggaaaggaatccacatttaccaagtgactgctatgtgctaggcatgttaccatcgtccatagcgtctggtggaaaaagagctcaactatgtcatttattaactttgggagcttttaacaagctacttcctctctctaaatccctctataaaatagagttctctgtatctgcttgtacaggggataaaatgatattaagatatgtagtgataagaaagtaataatagtcagtatatgttgaacacgtgccgtttgttgcatgtttatctaatttaatcctcacaagaatactgtgtagtttgggtgcttctgattgtgcctgaaatcaattcaaaacttgcttacaaaagcggtaagggtgggaaatcattggctcatgtaattgaaaagtccacgggtagttctttcaggttctgggagcctctaatgatgtcatcagaactttctctttcttcattactctcttggctttgtagtcctcagttttgtctttattctttggcaagatctccccagatggtggcaactttaggcctgtatcaccctattgctagagaaaaatccatagctgggcatggtggcatgtacctatagtcccagctgctcaggaggctgaggcaagaggatcacttgagcccaggagttcgaggccagcctgggcaacgtagcaagaccctatctcaaaaaaataaatataaaaagactggcaaggactgtgtcaggtacccatccctgaatcagtcctgtggtcaggggaagaggga

SEQ ID NO: 119268 - DNA, 1284 bp, Homo sapiens
tggattcggttaggtctggaccattcggccagatcttcagaccagacaatttcgtgtttggtgagtgcctggtgtggctgagagcatgagggattcattttacgctgggcagtggaggctgaagaggtgtgattgccagagggaaagcatgaagaacatccgcggtgtgccaacttagctttaatatagtgtaaaattgtttgcctttcagctgctaagagcttggtgtcctggccttccttatttataattatattcatgaacaaatattttaacgtttggccattttggtgataatctgaaatagtcttatctgagcattgactcactgatctatattgaggggtttgaggtaaggtatttagtacaatcaccggtgacttaagatttctctttccctctggcaggccagagtggagccgggaataactgggccaagggccactacacagagggagccgagctggtcgactcggtcctggatgtggtgaggaaggagtcagagagctgtgactgtctccagggcttccagctgacccactctctggggggcggcacggggtccgggatgggcaccctgctcatcagcaagatccgggaagagtacccagaccgcatcatgaacaccttcagcgtcatgccctcacccaaggtgtcagacacggtggtggagccctacaacgccaccctctcggtccaccagctggtggaaaacacagatgaaacctactgcattgacaacgaggccctgtatgacatctgcttccgcaccctgaagctgaccacccccacctacggggacctcaaccacctggtgtcggccaccatgagcggggtcaccacctgcctgcgcttcccgggccagctgaacgcagacctgcgcaagctggcggtgaacatggtgcccttccctcgcctgcacttcttcatgcccggcttcgcgcccctgaccagccggggcagccagcagtaccgggcgctcacggtgcccgagctcacccagcagatgttcgactccaagaacatgatggccgcctgcgacccgcgccacggccgctacctgacggtggctgccatcttccggggccgcatgtccatgaaggaggtggacgagcagatgctcaacgtgcagaacaagaacagcagctacttcgtggagtggatccccaacaacgtgaagacggccgtgtgcgacatcccgccccgcggcctgaagatgtcggccaccttcatcggcaacagcacggccatccaggagctgttcaagcgcatctccgagcagtt

SEQ ID NO: 119269 - DNA, 1528 bp, Homo sapiens
ccctcccacctgccggcactggagcacctgacggcttctccacatgctccagtcctccatcgttcccatccggtgccagctctgcccccaccccggtcaggacgcgctggtggccctcgcctcgccgccctctcaccctccttttcttcactgttcccccatatccccatacccagacccccaccacagccccagacaatgcgcacgcccccaccatactcccggtagcccccacccctctcccggtcggcacgcccgctctgattggccgcgggccggtggtccagccccccggacggtccctagggctcggagcattacgtcagccgggcctggagagcgccagcgcgaaggggactggggggctcgggctgggggcgcggcctgtgccggccgccccaccctccttgcataaaagccggagcccgcggggccggcgctctcagcccgtcggttcccgagcgccttcccggtgaccccgcagtgggtgtgtgaggggaggacggacagacccagacgccgccggaccaggaggacgctgacgaggcaccatgcgtgagatcgtgcacatccaggcgggccagtgcggcaaccagatcggcgccaaggtgggcgcgccgcagcggagggggtccaatgggggcgcgaacctgggccgagagcccctcggggtccccaggcgcggtcctgggaaggcctggggatcgccaaatgcagaccttcctggccgctttgtgccgccgagtgtggcctgggctaggaggtgactttcgcggacggagggggcacctctctttctttctgctgtaactcatttggagtccccgtcaccccctcggcctccctccgcgctggctgcttggcaggcacgcgtgcctggagaagacgagggtgtgtccgcgaggctgtgcgcggcgctccgcgcgaggggctgggacaccaggaggattaattgtactcgcttgaaccggagtcgagctgccgggggaggggaggagagcgattgtcttgcggtctcaggacgtgctttgaatctaaaaccgcggtcctttagctcctttgcgttcctctttccccgcccacccgctcctggcgggctgcagtccctgtgccctcgcctcctgccgcagcctggggctgcgaccagtgcgccaagctccgccactgcccggctttggctggtccttaccccctcgacccctacctccccccgcgagcggcagctgtttgcctgggaaacgcccagtttcaactttctgaacctgcaaaatacaagccccgcggctgtgcccgggtcacgacgccctttaaagcttcaagctcctgaaatgttgggttgtcggaactgagtcggggacatttcattgtgagccttggcgtttctgggggcatcgttcatggctaaatgcagcctttctgtctcagttttgggaggtcatcagtgatgagcatgggattgaccccactggcagttaccatggagacagtgatttgcagctggagagaatcaatgtttactacaatgaag

SEQ ID NO: 119270 - DNA, 1035 bp, Homo sapiens
actcgctgaccctgaggagcccacaggggctggagcagcatgctccctcacaggctgagatgaggagattaggcatcctgcctctgagccagctgctgtggggcacgaggcaccagtgcacaggtgccccgactgtgagtcactttcttcttgctgtagccttaatgatcttgtttgcttcccttttggttgtggtgttgcccttcagcatgctttggagtttgagacactaaaacgagcctttcgtgtgaaactggtcctagaacttagtagcactgtggttccagcttcatctttcccaactccgctgacctcatatgcgacatggggtccacctacttggttgttgacggacgccacccctctttccctcggcacctgtgcctgtcctctctgaacctgccactgccatcgtcgtgaagaatcagaagcccggaagccagaagtgtggctggcctgcggggggtggagaagctgcagtgtgccctttgcttttcttttaggactccatccccgtgtctacctccctccttggagacacttccgacacgacctctactggccttgcccagcgcctaggtatgtacccacagctggcgctgcatggccagccaggtggggcccactctttaatggaaccatgaagcaagtcccttcggaagtaaagcatctttatgctaagaaccatcacctcattgctgctgggaagcacagacctttgcacgttgggtcttatttaaggggcacattccatgctcgcctgtcatcaccaccgtcccagggctggcctgttcccaaaggactcccacctcgtccttgggtgtgtccttgagtccatgagctgatttagttgccttccgtaagtgcatcaccacctcctgggaggagagcatgagaagtgcccacagcccctgtgggtggtggctcaaggtagcctcccgggccttaggaggagtcagtgcagctggtggagcaggtgtcacctctgtgcaggaaggactgtcctcactcagtgtgataccgttcagggctcgg

SEQ ID NO: 119271 - DNA, 1108 bp, Homo sapiens
caaagtgctgggattatgggcgtgagccaccgctcccggccattttttgtgtttaaatttttttttttttttttaaatcaaaacaccagaaacccctctgtgtagggcagaggttcttaagcagtgcggggcacctgcaggatctgttccagcagacagctggccccaaatcctggctttctgggtcaggagggctgggtggggcccagcagctgcctctcgaacaagttccagggaggctgctgaggtggggcctgcccttcagaaccctgggtctggtggagagactgggagaggcctgagtgactcgtctgcatttgcagcacctgtctgaagagaggcatggagattagagctttcttttctccctacaaccccatcctctttctgagcatttcccagctgcacgtggctgtgaggaacacggggcctgcagtatttcaggagtggctgtatcaatgtgttttctctttttagccaggaagaccaacaaacaggtgtttgtcagctataaccttcagaacacagacagtaacttcgcattacttgtagaaaacaggatcaaggaagagatggaggctttccccgaaaagttctagctgagtggcagaagtgagaatttgtaaacttatgtacaatgtacgtgtaaataaatggattgaatttcagtttgtcatcaggccgcgctcccgttttgtttttaaggggttaatcttttgagcttccttctcagcagtgtgtgggccaaaaggctcatactgacccacctggtgaaggagaggcaaagtgggcagtatatacttcctcatttggctgtgagtgatagagggatgaaatgggatttttgttgggattgaagactgtaatctaagagtttcaatcagacatgactgtgacgtgcatcctcaattagaattaaagtgatgtataaatatgctttagatttgtgtgtgcattcctcagaattctgccttgtgaattgatgcatttatctcctcattgcagtgaaaccccagggcacgtctcttcttgctgtgttctccctaaacccctcctctgggcactccttttttgctgtgttctctcttgggcctacatttgagcacct

SEQ ID NO: 119272 - DNA, 1066 bp, Homo sapiens
caaatataggagggaaatgaatcagtgtaattaggatttgagaaaacaagctattcccagacaatattttaacgtgaaagaagcagagtgtgatgacttaattagggaaatgccacaaacaaattgtactgtaagcctaagagcattaacctgctaacgagtgaggtctggggaaatctgggaaagccatctggaccgtccaaaacgagcaagcatggccccgctggagaaacctggattgagtactcactactcagcgcagggaagtttgtatctatccagagctctccctcatgttagagcagcgtggcaaagccacccctgctggactttgcacccctgctggacaagtcctcgctcaacttcttagcagctgtgtgacctctggaagctgcttagcctctctgtgctcccgtttcctcatcggcaaacggggctaattatagtgcctctctcataggctgtcatggagaaataatacacgtgaagcacttgggggctaaatattaaatatgaattaatatttgcaaatcacttagaaaaggagctgaaatgtgagtgccatgtgagtgtcatcgtgtttctcgtcactgtccctggataaaaagggaccacagatgcaccagcactcagcacccttcatgtcaaccagacctggctcatgtccttcttctgtccagcgaagcaaaagcttcaggcgtccctgggtaggccccaccccacccagcacgtggtccagcctgggtgacctgactctcacggccctgcacaagttgaggcagagggtgacatcctggctgagctacggcagcaccaaggagcttctagtgacctagtgtccccgatcttctgaactgggagtctaacgagaggcctgtccaggtaccaagggcttctctgatttggggttcccgtgcatcccttcccatcgtaaatggatacctgcagggcacattctcccacctcactcaggcccctgcacctgtgcccctggagcaaagcttccgcagccactctgactgtagtccctccctgccaccctctatcccacagccctgctgtttca

SEQ ID NO: 119273 - DNA, 1050 bp, Homo sapiens
gatttatgctccagcaagtggagccaagataggcgagcgatgtcattgcacgagctgcctggggatgcttataatatgttgagccttctgggccatggcaggatcggctgggctttaggtgaaggaagagctgcggcagctggtggccagagaatgggagggtgcgctcgcctggtcctctcgtgtggtttgcagagtcaaacttgagcacttagttgtgaagcaggagcggcagaagaaagagcccttgtgagtgtttttcacctgaaagtagacgccgtcaaagcgctgggtgattgcactgatggacgcagatgcctgaagagaaatgcatctttagtcattttgctcaggcattgattgtcactcggtaaagagcagcagggatttagcgctcatctagaaggaagtcataccgactgatccttcttccagaagaaacatgaaatccttccagggtcacagccaacaacgaggggttggcggggaagatgcaagatccaaaccacaagaagaagggagtatctaggagcatctaggaggaattctgcttagatgcgctaggaagataggtggcaggaggtgccagaatggaagagggagctgggtgcaagagctgctgctctgaaattgtgcacactgcggaaaggtgccccttccaggtggccacagcctgcactgggcacatggcttaatgacagagctccttcctcagctgggagcccttgtgcaagacacagcctggtcttgtgtttggaggtccaggtctacgttacgttagaacatcctagaaaaccgcagcatggaagatcaggaaggtaatacgtgggacagggtgacatcaagtttcctgcgcgggaattcactattgaggaatgacaagggagggagaaggctgttggagaggctgccatgtggtgtttatctcaagtggcttggaagaagtcacagggagtaaggacttctggagatagtggagatgtgagcgccactctcccaaaacgttggtgcatgccatcaccattcctcatcaggtaaattaagggtact

SEQ ID NO: 119274 - DNA, 1039 bp, Homo sapiens
aattctggtgtgtcagcgggttcttccttgccatatagtcatttttataggtttaagtaaaaataggaactggtgcacagcctaaacaagctgcataacgaacccaccttcctggcaactcacatcttggaaagaggacgccgctgcctggcctgattggacttcctctcctgtttggcatctctactaatcttggctgtctttcctcactcatactgttcttgcccacccccatccctttcacagctaatgattccccattctattggatttgtgtgtgtgtgtgcataacttattgcattggaggatttgttttaatttccctgaaatcttacaaattaaattgcccatccttaactttttcagtttttcatcactctgacccactttatgttgaaatgtggccaatttgacagaagcgaaagccccttctaaggcagtacttctgaatcttatgaatatttttgggtcagagacccccttccagaatttgatggcagctacgggtccttcccctggaaaagcgcatatctcttacacacacatgcacacatgcatagagtttcacataaagttacagaggcctcccgtatccctgaacacattcatggatcccaggttgaaaattacatggccaaggagcagctcgggttgagcatggggtgcaagggcctcgcggggaagcctggcctacatccttgccagcactgggaccatgtggaagagcagggtgtgaggggctggagaggggaacgtatccccaagatgcagatgccatcaagccctttgtcatgtaggaccaaggattcaaataaaccttctgtttccagaaagcagcatttgtccaaaagggtgggaagtgagtggttgtgacttcccagcccaaggccaccctcctttgctctctgccttcagtcaccttgaccttgctcaagtccagtgatgggtgctgggtctctcggtccgctggtgaagacgcagagagatggacatttctgaatgaggctgagacagcagagaggactcagtgttcaggaaa

SEQ ID NO: 119275 - DNA, 1097 bp, Homo sapiens
tgatgtaaggattgatgctgggtggctgaaagtctttggaaatttaggagaagggaaagaacggcatgaactttgaaagataggaaagtctccctatggaaggaaggactcgagagggaggtatttagttgggcagaaggacaagaaggcacattctggggtgaaagaggcacagagctactgaaatgggagctacaggatgtcggtgggggcaggcagagggaaggtgcgaggtgaggggcggtagggactataacccagctcagaaaggtcaacttcagaggaggacagtgggaaggtttgctttgctccgtgatatagagttggtttcctttggctggggcacagcaatgggcagatgcgttgctcaaatcagacgttgaaatgaagaaggaggaggaggcagctgggtgtccagtcttcagtctggtttcccgctaatggacagagctctgcaatgactgcacaataaaccttttattctgaagccagcattggtatttactgatatgctcttactggcacaattgtttaataaaatctgcacgatctttattgcctgaaaagcaatgtgtttttccaaagaaatgtatatggccataaaatattcaaaaatgaaatatggaagaggcttcctaatgccttctagaaatagaattgaaatacacatggcaccaaatgaatttatttctactattaaaattcctaatttaccaactacttaaaaggcaacttcaagtaagcagaataggcgtgtgttttcctctgaggggaatattttaataagaatagagacagttgatagatagatatttgtacctggatcttttcattctgctccattaaaccagaaattggtctttgccagtagtgaccaagtatatgtgtccaaagcaagatgattaactggaagggggccaattgcagaagtgcttatcctgtcatatttaatacccaccttatatattcaacacagatatacacattagaggctttaaatcccctctgtggtgagagagactatacacaaagctgtaaattacatctgctgaaaataggttgagcagtttctccccagaactcatatccctgcccac

SEQ ID NO: 119276 - DNA, 1317 bp, Homo sapiens
agcagagcagcatccttgaagagctctaagtacaagtggaggatccacctccactgagttattccccttatgttaaagtggacccccttgtcatcgtgacatcagggtaagtgaggcggaacattgcagggaaagagcatgggcctggggcagacagatgggaatctgggtcactcatagtcttctcattctttaagcagggtgcatgcctgtctcacaaaatcattgtgaggggtgtgtcttgctcatggtggcagcaaatgagtctgaaaggagcgtggctgagggaggccaagaggatgctgataagaaaaggaactagggactttactgtgcactgccaggcattgttctagctcttttctcctgattccattctcaccataagcctgtaagaaataaattccactactgtccccctcgcacagatggtaaatggagcagagagaaggcagggcgctgggccaggcttgcttggctggaaggctgtagagctgggattgggagcacagcgtgtctggctggagagtccccactcttctctgcgacatggtttatcacagtggctgtgctgatattttaagcctggctgttgttaatttttattggggactggtcctgaaacgcctcaccactgaggctactcagtcagccccattctgctgtcctgtagttagttgatcctgcccaacctatggcagaatagacaaaaggtgtcctagggaaaggtccccaaaaagatcagagtataaagttgaagatggctgagcccccactgtactacagtgctgtggttaatgggcagatggacctcactaaggcaggcttctcttcctcacctccccacagagaggccccagcaggctggggagatgtggtgtccccatgcctggcagagagatagccacgggaagggacttcagttagtccttttgatggttctcgggctctgatgaaggagacacagaaagtggcctagagacatcagccattcccctaaggacacaaagcacccaggacgtggtgtcagtgccttcacatacgaggcatctctgaagcagtttcaaaaagttgaagagatttcaaaatgcccatgaggttaggcagattcctgtgactggtcctgaccaatgagctgcgagtggaagtgacctgtcacttctgggctggagcattcagttacctgtaagagacctgctaggcctcctggatgccggccagcagcattcacaatggtagctgctccgtcagcctgcatccccacgtgacaatgacaagcagagacccaccagccctcaataggcatgtattgtgaat

SEQ ID NO: 119277 - DNA, 1204 bp, Homo sapiens
taccttcatttatttgtgtatttgtatctccgcataccactcatccactctagaggaaacaccttgaaagcagggtccttattgttcttgctctccactccatttccagtgcttggatttgcacctggcacagaatgggtatctaaatactagtttgatgaatgaatgaattcatggaacatgatgaatgaatgaattcatggaacacgatgaagatctgtgccgcagtattgcagaatagatatacatatgtgattctaaattgttaaagctggaagggctagactttttagtccaattcccacatattagagatatatcacaagtgtttttgaatagtagagggaatttgctgagatttctcacaaagcctcatgacccagatggatttggcgtggatgcccgaacagttggtgggattcaaaacctgttgctcaacccacatcctacaggtattgattaatgaattgatatcagcaagaataaagtctccatgagctggtgaggacatttgtgtgcaaatcacatttccatgagcccaaaaggggaatggtgaataatgaatgataacctagagtcactctcttccttttccttaccattactggttgattcccccgagtcattgctgttattttcattgtagctccgtgagagaagggacagggctgatcttgtatcttcttgtcaggggcatttttggtaagtttgagaaatttttcatcactctaatgagtcagggtatgattctcttcattccattcaggcagttgaccaaattcacggaaaaagaggcgccaacatcaacagtaagtgtcatggttccctcagatctctgggtgcggcttctgggcagaactccagcttccgcattggaagccagtggtttggcagataggcagcatattattgaagcctgtagggcctgagactgatgtttagaatataaatgttcagtgatgatgtttagtacactccatagccccacttggggtccactgatacataccaggctcagagatgctgagtggcagccagcttttggtgcattgaactgatccatagtgaaatagaaccatagtggccccagtgtgtacatctctgcattaggttattcttaggtaacatttaaacctgcaagtgaacccgaagtgtacctcagaactctaggccccggggagcactagagttcactccaactgtg

SEQ ID NO: 119278 - DNA, 1051 bp, Homo sapiens
gaaagcatgtcttgcttgttatttgctttgtgtgagttctgggaaaaggctcagaactccctccaaaccaaagtcagattatcagggttgggggtagggttaggaattaagggctatttacttctagttcatttccccatccatatcagttttaaatagtaaatacattttgctaagttcctgtggggcttagagtttttcactatttcttccttggcatcagtttaatatgtcgaactggcattgctaagtgtgcaaggctcccagggtgaacaaggactctgagatggagaagaatgcaagggaaaatatgatttctcctctttggtaaatagtactggctgctttgtgttagggtggggtcatgtgactaccctcactacatgggaagtgtttgctgggaggccccagggccccccattcttggtcatttgctccccgttgggctgacctcagtgcttggagcgtgattgtgtctcatatctcattatgtcattcccttacctctttttagaaagaaccatatacagccccggagtgtaagagttagacatctagtagctacagtgaatcttggcttgagacctcccttttggcacacctcagcatgtgtgcatgtatatagcatggtgctgtatagctgagcactgttttgatattaaagagtaaaaagggattgaggctatcatgatagtgccttgacaacaatggatgataataagctatttattcagcattttctaagttcagaaactatgctgagttatacatatgtacatatacacaaatatatagaaagatatgtaaatttcatagtaaccatgtaaagtagctcccacaaatagccccattttacagttaaggaaactgagacctctaattcctggaccttgtctaatttgctagagatgcctttaagccagagataacacttactgagcttgtacactgcgtcttccctgagcccctctcgccagggagcctggccagccaggatgtgactctccataggtgacacggaattgtcatgtggggactgtgcaaaggtgaa

SEQ ID NO: 119279 - DNA, 1044 bp, Homo sapiens
gaagtgtgaatttaaattcaacgcaattctctagcttctagaatatagcaaaaccagcctgcagccccatctacttctaacctttgacgtttcattagaaagagcttgaagacttatgtgcagggctgcaggaggtggatgcactaaggggcagctgcagaagatgcattaaaaaataggggatggggaagctaaagacccttcccccatgcgagctgaatgagtcaggcaatgctgattagctcctctacatgtcacgtggattttggagaggggcagtccttggccaggagatgcctctgtggggtctgtagggagctgcaccttgagtgataaagagcatttcggtaatacagatgggcgctgtgggcaggggagggtggtggccagaggtgagaatgcatatgcaataatgataacattagcagctgaaagattaccgtgtagcaggcactgtgctaagtagttccatacattaacatctccttacaacaccccgaataggagatgctattattacctgtgttttacagttgaaaaagcagagaagtgtaagtaaaatctccaagttcactcagctttaagctggagagccagaacttgaaactcagccaccacgtggcctcagagcctgcccctccaccaggatgctgcagcgcttttatttaaggcattctgtggtcacaggggcagcagcggtgaggtgtctaagcagggaggcagttgcacaatgttgacaggtttttcaagtagcgagattgctcaggagagaggcgtagtgtaactgtctccccagcttacattcttttatctttaaaggatttttttttttttttttttttttggtgaatcgagacatcttggccttgaggaaataagggcccagagtgatatggaacaaattctataggttctgtgacctctgcacctcagttaactgagaatgctggccaaggcaagtgcctgggcggacagcagcagagggtcacattacacatgtggaaaatttcttccaaaacccagcgtgtatttgggagttccttg

SEQ ID NO: 119280 - DNA, 1077 bp, Homo sapiens
cccctggaacctaatttccaaggtagagatgacacctatagcataaagctttgtggggattacagaaaatgatggatgtgccgctccctttcagcagagtgtgtgctttgagatacgcatttaatctgagcccttttctgcaaagagctcccagtggagctcagaggacagtcatgtaaccaacaactacaatgcattatacaaccacctgcaatcccccaaccattaactctagacctctaaaacagaagtatggaagctcataggaaatgaccgaggtcagccctggcaaatggcggtctttgtggtccccagctggccacctgagctgtggacacgtttgtttgccttgtgccctcactttcagaacccctcctcctttggcctcatattgtccctagctatttgacatctcctcatttaggagtgcttctcaggtgctctcaaatgacctctttttcaaaatttcctctctattcctactttccaaaaccaaaatatctgggcagctaattttagctaagagatgaaagcagttcacactaaggtacgaaggactgataggattgaccctactctttctgagctcatccataacttcaacctgttaattgaggactggccaatagcccacaaacttcatgcccacccatagatggttttgaaaggctgaacctttaacagccctccctccctttctcccttccctgtcccctgcagagccaggcttaggaatttggtcctccttttctgtgatccttgatcaggatatttctaacaacagtagcatcaaccgaaagccccaaataaggtttgattgagttaacattttcattgcattttaagtctagtcctgattaacattccactctgtgacatgggtgcagggtgtgtcctcacaggacctgcccccacgcccatctcactcagtgtccagtccaggtgcaggtatccctcctggaagcctcccttgagcctgccccacatttttaaaccctcacacatgctgtgttttctttttctttctttctttttttttttttttttttgagacggagttttgctcttgttgcccag

SEQ ID NO: 119281 - DNA, 1023 bp, Homo sapiens
ctcaggtgccttccttcctccccttggtggggtgaggacgaccgggatgagtcgtctgagaagcactttgaggggggaggagctgaaggccacacctggaagggcgatttattccttgggcgctgccaggtgtctgccgccttcacccagaaaccgatgatgttcggagccaggtatgcccttcagacaggaagcctgcatccagggtgatgggaggagccccaccaaaaagcaccctctacagggtttatgtgtctaagttccaacctgaaaacaaaacaggtcaccgggccacagggctcagagagaggccgggatcagaaagccaggggaccttcctgggtagccaaggcctggttagccaaggccgggagagtggggctctgcctggcgcttcactgcctcctggagttctcaggccagaaatctgagtttatgccattgagtggaagatgagctgcatgtgtttgaaagcctggcttgggtgtgctgcgtgaacatatggctcagagagagtggaatttgagagacgagttgttggtgactttgagctcatagcagcagagctcagagagcaaacgtaggggcaagttgaaaactggagaaagggctggggccccttcccacttgcagctgagattttatgggatgccatggactttgacctcagtattgtagaaaccttaatcttctgcaggctggggtttagttgttttgttctttgtgtcactattgatgagcagatctccctccacacaagtgatttagagattgacagggacctatttgtctgggaaagggcaggggctgttgagtgcatgaagtggattcctctaaaataaaccattgctgtgagaggataccgccagcacgcgcccacccatggcatctgcatggtattgtatcctgtcagacctctcttcggtctcttttggctacaagtaactaaaacaaatttaaattacattaacaaaatataaaaggaatttcttggaaagatgcagggcagcaggtggaaggtgg

SEQ ID NO: 119282 - DNA, 1009 bp, Homo sapiens
gtcgatagaaaactcggggcctttggcgtgttctgccattttctctggccctcctactcaacaagggaggatgctaattaagtttccacacagctgaaagacccagatatgtgaaaccatggggctagaatttgccttcaaattcagctggctttgcctttgctaattgcttagtctaggtaaaagattgtcctgggcgtggccatgtttaatatgattatctagtccaagccttcagtttagatgagaaggctgagctggagggccattggcttgtccaaagccaccaacctattagggtttgaattcagttctccttatcctctgccccagagtggcccttaccatgggagaggggctgggaagggctggcaggggctcccaccctttgtgacttctccctggcgctggcctttcagaggtgaccctcccgttgtgcttgagaatggtggttgctgtatgtttgggtttctggacagttcagctgtggctttgcatgggtggacttccgcagaacacctctctgggcagatttctctactctctgtcttcttagtcccggctagccaggcccccatcttgtcttgctgcttttaacaccacaggcccgagagacagaaaataagatggaaacctgcccacatcacttccctgcttgaagccttccatggctccccatcactgcagcacccatcaagggtgccctcagccctgagccccacatgtctttcctctcctcccctgccacccctccttgttgtagggggcatcttgtatatattaatagttcccagcccggtctctctcactgccttgtgccttgctcatgctattccacttgctcgagccccttccctccttccttcagccccttggttcctgctcatccctcaggtcagctcagtctccatctgaaggacggcaaccagctgtccccttatccaagccctcactggaccctggttggaaggatgcccgtctctctcccctcctgaagctctttgacttt

SEQ ID NO: 119283 - DNA, 1011 bp, Homo sapiens
ttaggctttgctaccccagtgtctcctcccatgttttctcagcacttcagtaaacatcactacagtataggaaggacgcggagaatatgtcatttgggtgttccccggccgtcaccgctcttacacagcagctgctttgggctgaggcactgagaacgggggtgtgctttagctgaaacatgcaccttgtcctctgagtcctgtagctaaagctcccttgcagaggtattgcgtggtgtgaaatgtagcagaagggagttgtgagacaagtgtgaaggcctaaacacagagtgggcaatggtggacactcaatgcccctagacagctgtaattttattcttaacatataagagatatcaagacatttgtagttttgctccttgtgtctaaactaattaattcacattttaaagtaaatacagactctcctccaccccacccgctacccattctgggctgttctggcagagttttaaatgctttgtcgaaatgtatgaaattggacagttttaaatagtcaatgtgcatgtaacctcctccccccgtgtgcattggttaacagttgtagctcatggatgtgtaagataaactcttacatcatcataatcattgttttaatcttgtaccaacctggccagaaatgctctgtcctgtgggaactgtctgactgagctgcccctgctgccctgcaaggtaatggggaaggtccttctagctgggttcaccttgatcccacccacctcctaccccctgctttctaaaggtgtttctgtgactgttttcccttcacggagggcaatatttctttgttggtttagcagcaaagaaaaattaagaacaatgactatttaaatcactgtgtatgtctgacagactgaggatttggcaacattgttaagtatttcaagtgtctttctagagcagagggagaataatggatcaaagtgagtatgtgtgaagagcgctgtgtcctggggtcaaagtagaggtgaacttgaaagtgatgagatg

SEQ ID NO: 119284 - DNA, 1053 bp, Homo sapiens
aagactacttactgggtatagtgtaccctgcttgggtgatggatccaccaaaatctcagaaatcaccgctaaagaacttatccgtgtaaccaagacccacctgtaaccccaaaactattgaaataagaataaaatgcacactgatttcattcagtcagaacaacaacccagggcagtcaatattgttactcatgtctcagccacagtgagagctcagcaaggagaggtaccctgggcagagccacatgtcactgtgccatagctctgctctcacacgcagactcacagatttgagcccagtactccttctttgtactccagcttgaagcccacagcgaagggcatatggagagcgtactcaggcagcagagcatctttgtcttgggagagacacacagcaggcctggctcctgcggggattgacctcttccctgactttgtgcggcagagctctgaatgggtctcgggtgcacggcattctcttacggtgtggaagagaggcacgggcaacaggtggaggagaaagcagggagatgggagtaagttccaaactccaaaacctcaagctccgacccctcctgaggactcaccttgttgctttggttttcagaaatcatgaggtccaatggattttgtttagcaaataccgaaacaatagttattgaccacagtataccaaatggaagagaccagcagctgggcgtggacccaacagagcatttgtaagtatgctgatttgaatatcgtttcatagactgtcctgagccatttgccttgtgggatgggggctcactgttcttatggaaggaagtgggtgcccagagccacccagcagttcctacctgcatttggacactgattttagaagtttgcctttcctagagtctggtgagatcttgatgagtgaatctgtggaagatggagttgctggctctgaggggcatttaggagacgttgcagggctaggggcctggttcgtgtggggccctgaggggtgtgatgctgtctccagggccaggagggccacatgcctcacactcaatggtcctgatt

SEQ ID NO: 119285 - DNA, 1020 bp, Homo sapiens
cttttcccctgcaaaacaaaatcagaccagaacttctgaaaaagttagtctccgtgaccaataatactaggttggtgcaaaagtaatcgcagtaatcacggtttttgccattaatagttctggcacttaagcctttgtggtttaatcaccgctcacaggcacgtttgcatcagcctcggtcacacaagtgtgggggagacgccagtgtccttgggcacctacttccccatccctgcaaagccgacggatagaacctgtgatgggaagacttctgctctgcgcttctcatggggagatagaaaagcacccgagccttcatgcctcgagctatggtattttaaaaataaaatattatgctgcctgacagccactcgggtgtgtggtgaccgtgagaagcacagaggcccagattcctggaaagtggcatgagtcgtgtccactttggttttgtccaggcagagatctgacttttttccttgtgaacttggcatgtaaatgactggtctaaacagaggctccatttccaggggtctgcgatctgagcagccgtggccagcagagtgagtccttccctgtgtcactgggggtgggctggtcctgggccagcacccctgactgtagccaccacgctggtggggcctgattcgccctgggctgagctctggctgtgaccagggtgattatggagtttgccaggctgccccacttggagggatcttacacctcccatccccttttcagattgacagtaccaactcctgcacagactttatggatcactgggtaggtgaaacatggaatgaggcttagagcaggacttccagaaagcggctataggtgcataaggctgaatgaatgttcccgacatctcattacagatgacgaccctggcggtttgtgggcacctgttgtgtattgcattgggagcgcgtttcctggtgtgctattctgactttgagcatttctgtctcaattctaggactggttgccataaaggaagcccacgacatagagaccagg

SEQ ID NO: 119286 - DNA, 1113 bp, Homo sapiens
tatgtacaattgtgttaccaattttttggtttcaaattcttaattgtttggctacatctggatgaaattctcatgtcacaaattgtgtaggatgaaatttttaaagttgaggttgtattagtgattatttatcagaaattagaacagtttccggggctgtgaactctgaggctaacttccttaagcgtgcgttgcagtgaacgccatcctgctttttccgcagagtgcgcgcgccccctgctggtcagtcctgaaagacccgagcgaagcggctctgcttccgttttcaggttcgcttggcagaataggcaaccctcttcacctgcctgcggtattcatccgtgcgatctcaggcagtgaaaccaagtcggacaggaacccccagaattgtcatgccatcaacaatatttggaatataaaaaccaaaagttttagatgatctaaaattactgtatttaagtgcagttttgaaaacaagttttcaaatcgttgcttatggtaaacaggtgacaacatttggaaagaatccactagccatttggaagccaaagcacttgagtcacaaaggaggagtacaacaggtaggatagaaagaaacgcagatgcactcaatagtttgctttgggggaagcagtatttcttaaactcatagttcttgtctgttcctggaaaataaagcagtgtcttcagcgtggattctgctcagaactttttctttataaatttgagtatttgtaatttggcatgctggcagcaggagcttgaggtttccagctgtgaaactgagaaaccttagtgaatataaaacaatcagaaattgcaagatgaagatttcttttatttctgcactgtggtcccagtggacagttgtacagtttttttttaaaaagtgttttccttccacattaaatacacccatccgtttggtgtatttgaaacattttaaaaacaattgaaggggagtagggaaatgggagcgttggcattttaggaaggccaggctgtctgtagtctcttgccagtgtcacttcttgagtgggggcggggaggcgtttgctgctcaaggcagccccgcgctgcgttcttgtcgccgtgctctggagctctggtggt

SEQ ID NO: 119287 - DNA, 1149 bp, Homo sapiens
gtagtgtgcagatgaccccagagttttcagcctgaggtgcaggactggcaggattgccatttgctgccatgggggagtcggcaggaggagttgacatgggggagggggtggctcaggagggcagcttgggaggcggcattttagcgttttctcttagtaaggccatgatcacaagcccgccagcccatgtggtgctaatgtacctgcctgtgctcatctttatcaccaaagacattcatctacctgcatgctaggagactgtcgtcttagatttgagatccgagtaccaggggactggcatctgggacattaccagaaaagggctggacacagatgtgactaccagactcccacaaccctgacagctctaggaagatgcgtgatttgatcccagggcctgaacctgctcatgctgttctcgggtggacagtgaggggagaagccctgtgttaccctgaaacataagggagaatcccacccgatggccaactgcaaagccacggagtttactttcttagtgacagtggctcagaaatgatcatgggccacaccagtcccgggcagcagagcaggggcacagaggcaccatctctgccccatccagtgggcccttgcaagtggggtgctggctgggcctgccctttgccttcaaccatagctccacccccgtgcagaattcacctgcgtcattctgccccacccagaggggcagctttacttctcaggggacttggatcttcctttctgactcacagacctatttttgactctgttgacctggccaagtcaccctgcactgggggtgccctgccagggctcccatggggccacccaccttcacgcggcctcctcttcctctttcttccttctgttttgcttttctttgccaagcccaaaccccgccgcccactctgcttcccccatcctgctgtacctgggatcctcttccttttccataaatggccactgagctgcgtttggtttgctgcccccccgacagatctcagactgagcccctgggccccaggcgacacctgagctcacttcccagctggagactggacacttccacagacagacctgcttccagggctactgcctttcacggtggcagttggcactgaaaagctgcagctttctcacagaaca

SEQ ID NO: 119288 - DNA, 1109 bp, Homo sapiens
ttgtttgccaagtaaaatatatcccagtaatgtaaaagcagattgcaccttatttccatgcagatttattgtttgcataaaaagattatctggatatacaaactataaacacaaaaggcagccagatgtgtgtgctttgctgtgctgcaatgccggcttttctctgcatcattccctatcacattccccagtttacatggattgaactgtttctgggacgggttagatttgcattctctagttccatttaagagatttgtgaggaaatctggatttctgagcttctgctggcagtgggctggtgactcttggaagtgtctgcacacccttggagggtgtgggagccttggccccacttgcagctttgaatctgctagcaattaaagggatgctgagcccttttcttggtcccttgagtactgcagtgggggagaatgtgctttttctctctctgcacacacacactgtggagtggtgcttggaggccatccctgggccttgtatgtgtcacggtgacacatctgcagggatatgtcaatccctgcctggggtggaggcacagtgctcactagcgctctctcctggacttctgtttgggtgaggtcggaccgggctgacctcaggacttgcccagcttctgtcctctctcccctttcctcgcactctcactctcccacccgaccttcttctccatccagattggatatgccccctctccctttcttgtcccgcagccctaggggagggaggtagctgtttcctggggatattgtcgccgggttaccaaggtgttccgttcttgtgttttccagactcttaacaccagtgggcccaagtctttcatttcagtcccctctgtgcgatacctaacatggttcagggttaccctttatttacatctctcgcatctaggaaggtttatgctttaaaacataaacatgttgaatttccttgttggcattttgaggctcctagactttttcgattgttatttctatagtttcaggctttgtgatgtctgagccaaccaggtcaccactgcagcaacagattgtgttcccgagtagtcaggtgatctttcattcttagtagctgtacaatcaacattt

SEQ ID NO: 119289 - DNA, 1328 bp, Homo sapiens
ctgaaggtgttcctgaagtatctgaaaaatatgaaattggctctgttcccacttttctgtttttcaataattctcagaaaattgaccgattagatggtgcacacatcccagagttgaccaaaaaagctcagcgacatctagtggctccttcccacccagcactgatgaacatcttaaagaccaaaaaagctcagcgacatgcatctagtggctccttcccacccagcactgacgaacatcttaaagaagatctcaaccttcgcttacagaaactgactcatgctgccccctgcatgctgtttatgaaaggaactcctcaagaaccactctgtggtttcagcaagcagatggtggaaattgttcacaaacataatatttagtttagcagttttgatgtctttagatcaagaggttcgacaggggctcaaagcctattccaattggcctacctatcctcagctctacgtttctggagagctcataggaggacttgatataattaaggagatacacgcatctgaagaactagatataatttgtcccaaagctcccaaattagaggaaaggctcaaagtgctgacaaatgaagcttctatgatgctctttatgaaaggaaacaaacaggaagcaaaatgtggattcagcaaacaaattctggaaatactaaatagtactggtggtgaatatgaaacattcgatatattggaggatgaaggagatcggcaaggattaaaagcttactcaaattggccaacataccctcagctgtatgtgaaaggggagctggtgggaggattggatattgtgaaagagctgaaagaaaatggtgaattgctgcctatactgagaggagaaaattaataaatcttaaacttggtgcccaactattgcaagaaatacttaattacattgggagcagttcatgatttagtcctcagaaatgggctaggaatagaaaaatcctgcttactcagttacatgttttttgtatttcacaatgtcgtgctaaataaaagtatgttacatgttttcccactaaaaatagaatgcaataaacatcttcaaattattaacaataactgtataaaaaagtgtatctttacagcaatattaaacatacagctactagaaaaaaactgaaattggtacaatctacagagctcattcagatttcacaagttacacatgcccgtgtgtgtttggcataactttttgcaattttatcacttgtgttgtcttggatagccaccatcacaatcaagatacacaacagtaccatagccgtaagagtcccgcatgttaccactttatgaacatacctattccct

SEQ ID NO: 119290 - DNA, 1011 bp, Homo sapiens
atcagaagaccagtctcaaaataagcacagtcgtcacaaaaaaaagaagcataaacacagaagtaaacataagaaacataaacattcctcagaagaagacaaggataaaaaacataaacataagcataaacataagaaacacaaaagaaaagagattattgatgcttctgataaagagggtatgtctccagcaaaaagaactaaacttgatgatttagctttgctagaagacttggaaaaacagagagccttgattaaggccgaacttgataatgagttaatggaaggaaaggtccagtctggtatggggctcattttgcaaggttatgagtctggctctgaagaagagggggaaattcatgaaaaggcaagaaatggaaataggtctagtactagatcttcaagtacaaaggggaaacttgaacttgtggacaataaaattactacaaagaaacgaagtaaaagcagatccaaagaacggactagacataggtctgataaaaagaaaagtaaggggggtattgaaatcgttaaagagaaaacaactaggagcaagtcaaaggagaggaaaaaatctaaaagcccatccaaaagaagtaagtctcaagatcaagcaaggaaatcaaaatcccctacccttagaaggcgatctcaagagaaaattggtaaggccagatctcctactgatgataaggttaaaattgaagataaaagtaaatcaaaagataggaaaaaatccccaattataaatgaaagtagaagtcgcgatcgaggtaaaaaatccagatccccagttgatttaagaggtaaatccaaagacagaaggtcacggtccaaagagagaaaatcaaaacggtctgaaactgataaagaaaagaagccaattaaatctccctctaaagatgcttcatctgggaaagaaaataggtcacccagcagaagacctggtcgtagtcctaaaagaagaagtttgtctccaaaaccacgtgataaatcaagaagaagcaggtc

SEQ ID NO: 119291 - DNA, 1064 bp, Homo sapiens
tattcttgctcaggtccacaaccccttacctccaacccttggggccatatgtgctttggaactcagaaatttttgagttttagaaaggtgatatggtgcatctattatgtgccatcagtggggtctgcagcagaccccataatcaaacacgttaatatttctacagtgaggcatactgtagtagtcacactggggagaaaataagacaataaatggtgcctcatctgatcaggtccagtgctgccacctgatgaatgtgcactgaagaaagaaaaactttttcagatttttgtgaatttagaaattacataagggattgcagatttgattgaaccaataaataccatttggtttgttacattatttgatacgttctcttaacttttcactgcagcaactcttagccatgaatgtatttggatagcatccaattttatgaaagtattatcttctgtattgttattacagaaatataaataccttgctgaagatagcaacatgtctgtgccatctgaaccaagcagcccccagagcagtacgagaacacgatcaccatctccagatgacattctggagcgagtagctgctgatgttaaagagtatgaacgggaaaatgttgatacatttgaggcctcagtgaaagccaagcataatctaatgacagttgaacagaataatggtgagagagttttgtcctggcgacgcttttctctgaattgttagctctgtaactttataataagagacgttatttggggtgggattaggaaaagtaaaagattagacatgttgcttctgctgaatattgcagtaatataatattaaatatgtccttagaaatgttctctataaatgtgtttttattagttcacatatcctgaatagtatactgaactctcacatattcgttaccttttgttttgcttgctattttaaagcaaatccaattatgattttattccccttctgggtacttgtttgtgtctctgtcagttaagaacattaatgttttaaaacattaaataagaggtttccactttttggttaccccaaaagatagtttg

SEQ ID NO: 119292 - DNA, 1113 bp, Homo sapiens
attctaaaagcagcccagaaacatcacaaatggagtgaggtaaagtcttgatgtacaacctaaatatattcaaaattattttcagccatgagatagtcttccagaaggaaggggtacgtcacttactcgtcttgatctgaaaccaagaaaaacgacaaacaggaaactttggatgccagtcatgcggtatttgtcatgcgggactacaattggaaaaacttaatgttaaaatcatcagcagttgataggacaacaggaactcttgtagtgatctgaagtaggcatgcagcttctaaccacactctgatagagtgatcagtggaggcatggctttgattcttcattgtgtctaggaaaccaaatagtagagatttaacacaatttttaaatgactgcactgtgtttcctactttctgattctatttattatagtcagaattctaatttttcaatttgcctttttaggtgtgaacataggtgaagtcctagataaacgttacaatgtgtatggctacactgggcaaggtgtattcagtaatgttgtacgagccagagataatgcaagagccaaccaagaagtggctgtaaagatcatcagaaacaatgagctcatgtaagttcagaagacgtgaggaaacctttaacagtacggatacttacagaagaacatatttttaaactatttttttaaagtgatacatgatagaatgtgtaaaacaagtattgcaattataaagtaatggaaacagttgttttttttttttttttttttttttttgagacggagtctcgctctgtcgcccaggctggagtgcagtggcgcaatctcggctcactgcaagctccgcctcccgggttcacgccattctcctgcctcagcctcccaagtagctgggactacaggcgcccgccactacgcccggctaattttttgtatttttaatagagacggggtttcaccgttttagccgggatggtctcgatctcctgacctcgtgatccgcccgcctcggcctcccacagtgctgggattacaggcgtgagccaccgcgcccggccaggaaacagttgtttttgactggattttaaaattatagccatatgtcatatgta

SEQ ID NO: 119293 - DNA, 2147 bp, Homo sapiens
caggcacccgccaccacccttggctaatttttgtatttttagtagagacagggtttcgctatgttgaccaggctggtcttgaactcctcacctcaagtgatccacccacttctgcctcccaaaattctgggattacaggcatgagctaccgcgcctggcctgttttgagataaaatatacaagattgatattccttcaggcaaaatcaaaattttttaaaaatcaaaataagatgggtttgttcctcaatgtttctgttttgtgcagtgattattttggaaattaactctatgtatgataatgatagttgactaactataaagtgttatgtgaatgatatatagagacaccatttctcagtagatttattagtacttaaaaatatacagacttctcccacacatcacctgatcgtcatactggggctagcaaatacattatttagtgctcctaaattctgtatatattcaattttaccccaatttttttttttattttaggcaaaagactggtttaaaagaattagagttcttgaaaaaacttaatgatgctgatcctgatgacaaatttcattgtctgagactcttcaggcacttctatcacaagcagcatctttgtctggtattcgagcctctcaggtacaatgtcaaaacgtgtgcattaaattgcaaatttaacttcttcatctttacgatctcattttggataaatgctgtaacagattttctgcgtatttgatttgttttatccacacagctctggtttttgtttttaacttgtggttaacagctagtctttgttgttgttgttgttgttgttgttgagacagtctcactctgttgctcctcccggagtacagtggtgcagtcttggctcgctgcaacctccacctcccgggttcaacagagagtctctcttaaaatgaaatacttcaaggaaggaatttttatcttcaacagtgtggctttgttgtgttttcagatgtgaatctattctaaaatcgaaatgggagttttaccttgcatatctttcttcttacctatttagaaaatttgaatttattcagaaactgtgttatatacatacaatttgatatgctctcctttcaatataaaatgatttatcaaatgtgggggtggttcttacatatttttattttgcgcttgattttactttatgcttgcaaatgtttttgcctttttatatttccattttgcattttaactcctattttgttttctttttttaattttctcctaaaagcatgaacttacgagaggtgttaaaaaaatatggtaaagatgttggtcttcatattaaagctgtaagatcctatagtcagcagttgttcctggcattgaaactccttaaaagatgcaatatcctacatgcagatatcaagccagacaatatcctggtaagtcaaacagccaagctgcgctgtacatcttgaacatacatttcacttcttactagcagtaatattattactatgagaaacgacatcttagaagcatagttcagtatattaataacctatttcaaatgactaatacttttttatctttcttggaaatcggacagtgaaattttattgacaagtatgaagaaaaaggaaatgtacaattgtccctttttttctcttttgactgatagatttaaagtgtgcaccaatcctggaatgctttactgtagtaatgagtttcttctgttatctttagaaaaatgctgcacatgttgctgttttgaaataaggagtgtccgtactcttctgtttgctaattttatagctccctaagctgtggctcctgggggctcaaacacaataaagctcagttgtggttaggtattatatttaaaggcatcgcttttgaagtttattttattttatttttaaactttcaagttcaggggtacatgtgcaggcttgttacataggtaaacttgtgtcatggagggtttgtacccacttttcctgatcctctcccatctctcaccctccagcctctgacggaccccagtgtgtattgttcccctgtgtgtccatgtgttctcaccttttgaaaccttaattctcttcgactagtgacttctggtggtaacagcagatttcacaatgtatatgtttttaaaattttgaaatacat

SEQ ID NO: 119294 - DNA, 2387 bp, Homo sapiens
tagagatgggttttgcagtgttgcccaggctggtctcgaattcctgagctcaagtgatccacctaccttgggcttccaaagtgctgggattacaggtgtgagccaccgcgcccagcccagagttggcatcaactttttcatttaagttttttggttaccttttaaaaagatgtacagcatagaggaaaccacagcaaagttttaaatgaatagatgatgatgatacagtcatgcgtcacataaccacagcatacactcacacacatctagggtaagtagtatggccttttgcttctaggcctgaactgtaagttggtggactgaatactgtaggcacttttgcaagtggtaagtgtatgtatgtatctaaacatagaaaagggagagcaaaaatacggtattccaatcttaagggaccactgtcatatatgcagtctgtcattgcccaaaatgtgcactgtgtgtatatattttgtatgtatatgcatgtttttaatatttttgatagaccccaaaacaatctgatttaagttgtatatgcttagtaacttatttagagatacgcattttaaaaattatttttaggagaaagttactgttatgagcaccattaatccaactaaggacctgttggctgacttgattgggtgccagagacttcctgaagaccaacgtaagaaagtacaccagctaaaggacttgttggaccagattctgatgttggacccagctaaacgaattagcatcaaccaggccctacagcacgccttcatccaggaaaaaatttaaacaagatgaagaaactccaagggtttgagtaaatacaaagactgaagaaatttcacagcagtttattaatgtatataaacttataaatatttctccagcaaatttgaggaagcatgatatatttgaattaacaccaagggtgatatttcttttagagatgttagttaatctgttttgtgtcttacgtgaaatttcactgtagactgttttaaattgccaagactgcacaaaattacagtgctaatgtatatggttgcagttcacataaagacaaaagcatctgttatgaaatgagtagtaatattgggtggttgatttgttcttagcagacttggcttcattttggtcttgagataaaatggccagcataaatgctgtttatattcacgttttcctaggtgtgtgtgtgcaggccacagcagcatgcccttggtgtagtcagtgccgaaaggggtctgttccttcttgagcctgcctgcagggatggtctccttttaaagcaggttgtgtgcagcattcagtacactgaaggtaagctaaaccatcaacatctctggtgttttaagatgttattttattggaacaactgacaaatgagggatgttagctttgtggcagaattccctgcatgtgtgataactgatcttgttttattttttggcattgcaactgtggcatagttacaatttctgtttgttcatcacatttaaaattggaagagaacgcgcttgatggatagagcgccttcagtgtactgtttcttattaactttactttttttaaatcaacttgctatagactttatatacattttgttaaatatagttcctagtgacatagaaacgatgcgtagttttcatttactaattacaaatgttgaggcctaattctgaaagtcctcatatttaaaggctagacaacgtaatgaaatttttaactatttgtatgtcattttgaaagtgtactgctttatggtaaaagtgtttttcatttgttcattgttttcattatttgtgatcatgttgtctttcaatacaggcataaaccttccactcttgaacaaagcagctgctttttaaaagcggtaattgcttctttaccttttatttcttttgtaaatgaagcttttctttaagaatgtgactttaaagtgttgtctattgcataaaacagttgacactcacttattgtaaagtgaagattgttctactgcatgtgaagtggaccatgcagatttctgtatgttctcagtatgcatcactagataataaagtcttttgtgaacaaggcatttgtagccatttttaaaagtttttgtcttcagtgctggtaagtcaggtaaaccataaatagttaaaagcaaccttttgtttttttcctgaaagtttttaattgaaagtattattagttaaagatgtaaacctagccaaaattaccagtttattaataattaggatcctaattatttcaaaaaatcctacaaatattgtcagctttcagtgtagtgagattattcctgtaggttatggggtataattcaggatttaactaatgtttctgctattttctcacttttccttttgatggtgcggaaagag

SEQ ID NO: 119295 - DNA, 2696 bp, Homo sapiens
atgaactacagccaggaaggtgatagatgatataataagccacctctgaacctacaccccgtctcttcacggtttagacttactaaaataaatacaaggtgattttcatcttcaggtagagtgaagccttttaattaaggcgtcacaggtgcagctattctaccttaatgaaatgggtagtgattttcccaccattatttatttcggtgataatatgctgcatattcaagtctcttgtagttattttcacccaaagtagttgacaatttgatgcttctggtgatgtttatggcttcattttatgtaattttttaagtaagttccactagaaacagttcatcttataccttcaaaactgttacctgttctttaaaaaacaaagttgcttgttacttgttctttgtgttttaggtgcagctcagtggaagatgatgacaaccagaagacatgagctaaggtttctgtcctataaaagatttattaaaaaacaatccttcatttattttttgtctaattttttagttttcagcattatgatttgggttttattggtgtttggtatttagaattagtgctgttgtggagtgcgtctgtaaagtgcttgttttatcatacttcctgcctctcccctcccccagtttctcctcccctaaaataaaaatagtggtcaactttagtaatataaaaggctgctggatgctgagattccacataacacatggttgtcaaaattggatgttaaggattcttagaaaaacagcaaccaccagaatagcatatatctgaaagtagtcttcagctttaggcagatgcaaaagaatacaaactggaatattaagaatactgttcaactcctttagtatctgttccccaacttaccctgtagaaacctcgttattaaccagtgttccagtcttaaagtagacaaaatattcagagccattttttttaagggaaatgaaaaagatactctgggttttttatactccccaatttagcatatctagactacctatttgaaaggaaccctatcaactgtcttatgtacgttacatgattttcctacactctgtaattttgctgaggtgcaatttggaactctgcaagacctactagattgaatttatttagtgaatgctcctgaataaatgtgcattcctcttttagagtagctgtatgcttttcaaatgctatctgccgtgaattttttgcttttattatactttatggcaaaagtgatatcaagtgattgtcagacttgagggctcatagaagtgttaggtacggctctcaaagatgttacagttttttctagggttgggagaatagttgagatctggaaagcatagacattttttacactctggatagactttattcttgaagatcatcagaaatgaggttggaatttcgaggttttgagcagggggagcatcttatattcacccttaaatcgttattaatacatcctgttttcttcattccctgatagctatctcatttcactctactgtctcaaaattttgttttaaaataatagaaatgttttgccattattaagtaccactttattcctaacaaaaataagtactcaggacttttttttcaaaatgaaatatttatgtactgttttatggtatgtggtagagtaagtaaaatgtaatgttctcagttttgttccatatttgcattcctcttatgctttacctgtattttatcatttgtaagcagaactctagctatatggggtagaaataaaatctctgagatgaaacaaaggaatcaacatgataaaatttaggcgaagtagttaagaaatggcccttttgaatgttgaagataggaaagaaagccatatattcaaatatgtaattttcctcatttagttataatgacatctttaccaattgggcttcataaatgtgtttctttcttaatagtatcctagttccagcatatattcaacatgaattttatcattctcctcctaatggaatgtcttccttatagaaatgttcacgacaaattcatttgtgttttttacatgtcaataatgtatgctaaattaaaatgttttccagttattctgatagatgtcattatggcatccttaatttttcttctccttctgtatatagggtaagggactgttctgaagaacctttccatttagtgatcaagatatggaagctgatttctgaaaatgctcagtgtgtactctaattatttatggtaccatttgaattgtaacttgcattttagcagtgcatgtttctaattgacttactgggaaactgaataaaatatgcctcttattatcatattgtctcctggtttttttctttggttgagttcagattttcctcacaaacatcaaaacattttcaaagcattaggtgcacaacaccaaagagtgtattatattcgtgttcctgttacatacatttctgctttggttttcctagtaaaggaaacagataagtaatgagccaactcctgtttttataatgataaaaataaattggttcattgctcacatgatagcttgacaaatcttgggctcttatcctcagtatacccactctttattttcttcttttaaggaactgtttttggcttttcaaaacagtgagtaaaatagattcacagtgtagtttgtgaatcttagtgcatgcaaagcagataaggcaggcaga

SEQ ID NO: 119296 - DNA, 1047 bp, Homo sapiens
agcttctcccttactgagaaataccagcaacctcaaaagaccatgagtacatctctctaagcctcctgaaagcagttaactgaagccttgttttattaagttagtatcttaaccttgcttcttgcttttcatttcaggcaacagagatgcttatttttggaaagaagttaacagcgggagaggcatgtgctcaaggacttgttactgaagttttccctgatagcacttttcagaaagaagtctggaccaggctgaaggcatttgcaaagcttcccccaaatgttagtattcatcttttacttctaagaaccttgaaaatgatttcctaagggaaaaatttatttgccttcagagaataagtcataaaaagcacaagacacatctttagttacctctaagcacatctaaatttggaattaaaaaataactgtagtaatgttggaaatgcagtactgatttttacaaaacttatcaaatagaccttccatttctgtgtggggacagagggcaattctgtatggggattacttgagcaggatgctaggcagtatttgctgagcacttttactttggaatccaggtgagaagcatggattagctactttgagagtcttattgtatagcacttttgtttttgtatgtggtagtgagtgactgattgcttttatattcttgctattcaaaatgtagtcctggagccagaagcttgagcagctacctgaggctttttggaaatgtattatcacaggcctgccccacacctactgaagcgatttatatgcacactgaattttgagaagcactgtcttatattacacatgcagcttaagatttaacagcattagggccgagaacagtggctcacacctgtagtctcagtactttgggaggccaagaagggcagatcacctgaggtcaggagttcaagaacagcctggccaacatggcaaaaccacatctctatttaaaaaatacaaaaattagccaggcgtggtggtgggcgcctgtaatcccagctactctggatgctgaggcagggagaattgc

SEQ ID NO: 119297 - DNA, 1050 bp, Homo sapiens
aggtatttttaagacaattggggaagttttgagtaaggacagagtgttagaagatacctagaaatcatcgttaatggtgtcaaggttatataagaaaatgttgatatttttaagaaaagtgtactaaggatataggggtgaaatagcatggatagttgaagttctctaagcacaaaaagaaaaggatagatgaggccaggcatggtggctcacgcctgtaatcccagcactttgggaggctgaggcgggcagatcccttaaggtcaggagtttgagaccagcctggccaacatggtgaaacctcatctctactaaaaactcaaaaatgagctggactggtggcgcacacctgtaatcccagctacttgggaagctgaggcaggagaatcgtttgaacctgtgaggtgcaggttgcaatgagccaagattgcgccactgcactccagcctgagtgacagagcgagactctgtccaaaaacgaaagaaaataaagagagagagagatgaagcaagtaaggcagtttgataattgttgaacctggatgatgggtattgggaattcattatagtattctactttggtatgtttggaaatttttataacaaaatttaaaaactaaagctcttaagtttcaatgccaaagacttccctggcatgtctgcctctctgggctcctgtgttatctatttttctgtcctatgatgggtatgagcttctctttcatatgggtgtgtatagtaaaaaatttaaccttgccccagaagaggtgtggctttgccctcagcttctgggaagtgaatctctaatgactggtaggagtctttatttgcctggattgtcttaacgatgtgatttagggtgggggcttcaggttatacagtcatgcacaggtgatggagccctgttaaaaactctggacaccgagactggatgagctgagcatctctggttggcaggactccctgtgtactgtcacatcaattctggtagaggtgccctatgctgactccatggggaaaggacaatggaaactccacatttgctactgc

SEQ ID NO: 119298 - DNA, 1048 bp, Homo sapiens
agctcttgaggcagagaacctctgaacatgagtgtggtcaattcagtggctgggaatgtgttgcctccagctctacctgctgggcaaagcctgacccagacggatgtttgatgatggaacaaggaatcaggggagcgtcagggagccctttggaggttgcctggatgatatccacatcattcaccttcactctggggctgcccttggatcagctcagttttcttccttcctctacccagtcaagctgactgccagtctggctccctgaggtcagcagaaccccctgactttttcagagtccagcctgccttagacatgatcttattcacctcccaccagccatgggtgcagagtatcctcaatggtgccttgagattccatctgctcaggcactgctcctggtcactgcctcccaaggagctcttctcactgtgatcactgatgactgccttgggaagcaacgcactggcgggcgaaaagtggggtctttggaaccaacccaggtgtgaatcttatggagctttctctctctgtatcccaaattcctcatctgtaaaaatccaggtgctaaggttcactttcagaaagcaggttctgaggtttcatgtacttcacacattgcacttagaacagtgtctggcacacacaatgaaggcttctttaaagattaattgaagagtgaatgactgtctgagagaaggcagtgcatgtgaggtgcctggcacctccacacagcagatttcatgtaagtgtagggataatgggcttggaattgtaaccaacattgttccccagagtctccacccctttgaccttcctggcatccatcagccacacgtcctgggcttgttgcccccggggaggaatgagatggagcataaagtgaaaaatagcatgtgggtctttttttggctttagtttccaaaagcccttgtggaaaataccttgccctgggcaaggacaaaaaaagataagaaatgggggctgggcactgtggttcacgcctgtaatcccagcactttgggaggccaaggtgggtggcccttgg

SEQ ID NO: 119299 - DNA, 3033 bp, Homo sapiens
ggttctgtatgcttctttcttttgggtctcaggtttaaaatgttctttcttttgagtgggtgattgagatggaaattccaccaagttttctggagtagatactctatgacaagaacggcatttaatttcccttcagccactgtgggtttaaaaccaacaaacttaggtcgcatcttcataaaaatcacaattaaattttgggttatggaggaggtaaccaggatagaatatgctttgggggtacaaaactgttgaagggaatcattatcagtagcttttcacagctacccaaccataaaacgcctttggctctgagaatagtagtagctagattttggcttcttttgtttttttctgtcccatcccccatctccccttggatgcctttggattcaaatgtagatgaaatgcagattcttgggagaaaggaagacatgcctggtttggctggtgattgggaaaagaggaggatctcagatttcaggttttagttatcattctcccgagatgggaagaggctgtgattcttgatctgaagagtcttatcgtcggtagaacttgccatcgatgatcaattgtttggatttgaggaggagagaattgaattatgttggcctacaacaacgggagcaggtcaggtaagaatcgtttattgctggtagacgtgtcttttaatcatgtgtgtatatcgtctctcttgttgaccacttctctaatcttttaagagtcatatgtcttactagtgcatggtattgtgctgtatgtatttttgctgcaatcttcccggtgtgcttaggggatgtgatttcacttttattcttaagccactgagaaaataatagcacccacacacgtggtcatggaaactacagaacttcactgtttcataaaaggtggtggaaattccaagtcattaaataatcttgggcatatttacttctgctatgagtgctggtaaaatgtttatataaaaaagtgacggaggaaagcaaagtttgcttaaaagtaagacaaattgaacgaatgaggttaaaatatatatgtatatataagcaaaatagcattccataaatcagtgagttttaaatggagggcagatgaaaggaacaaagtggacaattgagaacttcctcaatttctcagtcgctaggtggatacccatctccttcgccagtggaagccaactgtcagagtggagaggtggttggaacttaggagtatggctcactcctgctttgttttagaggctactggtggttactcttaatgttgtagactaaggatagcagcataaacattccagattgtcaagattgaaaagctacgtaaattgacaaaggtctatgtaaattgacatttttgagttgcctttttgaggctataattcttcccctttttgtttccacaatggggaaaatcgccttactagctcaatatctggatatgtttgttgtggatgtctatgttcctttctttccctctcctgggcaacaatggcagttttggagactccttggagaccacagtaccattacgcacatggtggagccccttgtgaatgcctaagcttgtggatgttctgaagggggcaataattggagtaatggtcatggcgagaagtgcttgtatttgtattggtccatcattgcataataggcttatatgttatatgtatctatttcctattgaggatctcttttttacagttgatttttcttgagggattttaaactatcacctgccagtatttgagcgcttgccgaagtgtgcactcaatgctttgagatttcccaaatgtataaaatcctagtccttgccttcaaggaacttacaacttttgttgataaattggtaaacctagagagaaggcaacaatgaaatgcagcatataatggaaatgctaagtgagaggaaagaggcgctgtttggaggagggagagggaattggctgggccatcagggaaagaggcagagcttgaggcgccttgaccagttgatgaagtggtggctttaatttgcgattcttgtgcaaacatttgataatgggaattggatgtgtaggtattgggctttctcgtggacactgaaattccattcattgaacaacaccttatttcctgtatagagaatggtgctaggggccagcgtcaaatttgaagatgaagtctgactgaaggtcatcgtttggagttggggtggggtgaagagtagacaaaccttaaaatacagagacgagtgctgcagtgagcacgcgtgagtgcttaggcagcgcttgaagagggagttaccgatttggccctggaagtcaggaaggctatccttttaaggtgatccctgagctgggagtttgtttcaaacggtggggaccgcaggtagaagcaccgcttaaggggaacggcgattcgactcgcagtgacttaagggttggcgtggtgcttgttcctgggcgtggggaggacaggaaaccgcggggtctgtgagacgccccgtggttgttgaaacgctgttggggggcacaaacgaatagggctttaggaagaaaactggtgggaggagccttgtggctccaaggtaggttaggaactggagcgagatggagcacggaggagtgaggcggcccgaaggatgcccggggagacatggaggaactggcgagggcttcccgatgcagggcctgggggagagggtgaactaatgcctctgcagtgccccgtggggaagttccgcatactcggccagagtgatcggagttggcggctgtctgggggagttgggtcaggaagccccttctttcgccaccgatggggcacgtccagggcccggcaggtgtgccctggcagtagatcttccctgggaagtggagcgcgggccagccctcgctgttctgagcgagggcctgtcgtgtagtccacaccgttccgcgaaaggaaccaccattgacagcctcgttcgattagaacccggacctccctggaatccagactcggtcccttcccagctgcgcttcggaggaggcggacgctccgagaggaa

SEQ ID NO: 119300 - DNA, 3854 bp, Homo sapiens
cccgctcctccccttcctgccggctcgctcccggccccgccggccgcccgcctcggccccgagcggagcccactgctcccctcggctgccccgccccgccgccgccccgcccctcccgcgcgggcggcccgaaaacccggagcgcgggagcgcggctccgcagggccgggcggccgcactgggcatgctcagtagccggggcaggttttttggtcgcaagtaggaagctttctgcactacaccggagaggggagccgcgatccggccgcgccgcccgcacgccgccgcgcccgccccagcccgcccggccccgcggcggggcgcgatgagcccgagcgcgagccggcccgccggggagtgagcgcggggcgcccagggcgcgttgcgtagctgctcctgcgcacaaccccgccgcgccgccggcccgcactggccgcggagtgcaagaggctcgtccgtgcccagcgcccggccggccgcgggagcaggaagcgcaggccacgcaggacccaactgaaacaaagtgtcggccgcccggcgccggcgcccgccccgaccctgcccctcccgcccgcaactccgccgcccaccatggcttccgaggagctgtacgaggtacctcccctccccccggcctcgggccgccccccgcccgccgcccctcccggcccggccgcgccgcccgacggccccgctcgccgcccgcgcccgccgcgtcccctcccccgccgcggccgcagtttgctggacgggaaatgtgtgtgaggggagcccgagcctccgttccgaggggccccggccggggggtcctgaagttgccgggcgtggggtgggggggggggtcccagccgtggggaagtggtgctgacacaagtgacttgctcggactgagctcaaagtgctcttggcgtgggtcgtggaagtggtgcctccgttgccgctcggcggggaccgtgggcggtacggggggtggggtgtgggggggtttctggatcatttgataaagcatttgggagagggttttgcccctggtcggggggtggcggggagaagaccggtgcaaacgctttcgactttgctgttcgccaaagcgatgcaaaatctcgcaccgaaaatgctaaacgttgaccacatgctttaattaggttagcattgtggccagagccaggaaatttaaatttaacgctgatacaccgtcattcatttgcgccgcagcgttgcaaatgagaagggcatagccagaactgtaagttctggtcgatgggtttaaaccagcttcaagtttgagagttaccaatttggatctttagacatgttttgtatgtctccatgtaacttcttttgacgtatttcaaagtagacttcctgggagtacagaagtttggaaggctttctgttcttctggataaatgattctcttgtttcacatgtatttataaataagttcctaagagacttaaaacttgcgaagactctctagactcacctttatgatgcgtttagggacctgggtgttgagggacttaaggaagcatctgtaacaagtagagccctgtggccccagggatcctttcagttgtcttctcttatgggcgtattattgctgttggcatagaatagagctttgttgtctgcgatgttagtcttctagcaacttttttgttgctttttaagagcaagtgtttgcagaagttctcaggaggaagctgccatctgtagaattaagggtaaggttgttgcttctccttacattgtatgtggtcagtataccttagctggtactgaaaatgttccattcttttcaaccattttacacattagctgtgccccgctgtattcaggatactattttaggtcatttggggatgtaaaagaagaaaaatctccctgttctcaggagctttccttctaggaaggaaagtgttgtgtgtctggaagacacagaaatggaggctaggatgtttgaggttgaggtcttccaggtgaagtctgtacagggggaagtacatagcatgagggtatgggggattttagtttctacattagatcattctttggttgtttagtcatgagtgttcactcttggcatttgcttttatgagtatgattacataatcagttccatcagtggatgagagtagcaccttatacgtaagttgtatcctatgtgtgtaagaatgattctgaagacagcacatttcccattagtatattatgaactaagtttagttccttctgtgcttattctatatcttcaggtttctgttcctaacagaagttattaatgagtaacattttgtactaagtttgtgttcatttaacgtttattgaatgcttgccatatggaggtttcatggggaaatactgaggtgtgagaatggttcatgctttcaaggagtgtctgttggggaggaagtaagtatattgcaaataaatgatacacctgcacaattgaacttttgattctgagttttattttagttttggaaaaaaaggtattatagaagtatagttcaggtgataaatttaagtatgtgtagtaaatatgtagtggtcagtatctttcaaggcaaaatttgtaacttttcttttacttgtaggcaacactgtgactatgttaccattgaaagttgacattgaaagttttgcatggcagttgagagcctagatttggagtcagacaacccagttagtgacttccaactctatcaccttgggtaaattagccttgaaagctcagtttcctcatctgtgaaattgggatcagtgtttcccttatagagctatgaagtttacatgagaacatatgtaaagcccaccctaaaattcccatggcaagcacccagtaagtgatgatgattgtatggtaactggcttaaaatgcctccctgaaacctggttttgtttctaaaggtatagagttgtattgttttcataaaggcagtattatctgtagggcagaagtgatacgcaattgtaaatgaacgcgatagtctgacaaggctgggaaagacactaagatgatgttttgtggccaagtcaagggttgttagttgccttgttttgtccagttctgcctaaactgaaatagaagttttctgtttggcctcaggctccacaaatctagagggatatattgacaggaggaaatgtgaagtcttgcttctttgaactcacatggtctggtaggaggacaggtctgcagtaactgggaacttgggtgagttacccaactgctgagccttggttttctcgcctaaaagaaatgtctccaatacttagcatggaacctggtatgtagtaataggtctttagtaaatgtttaaatggctattgaaactaggctttgtgaacaaaaaataaaggaacagatcctggaaaagatgggtagagcatgaaccttgcaaaatttgaagagttactattagttgaaggatggaatagatttactccctacttttccagctgctaggattgaggaaaaacggatttttgatgcggcgtaggttagaacttcatagttttcacaaaaagacaagcgtcctttacatcacgcttctaatgtaaagggccagataatacatattttagacttgtgggttatattatggtctttgttgcaaccactcagctcacctcatgtagtgcaaaagcagtcgtagactcctatatgaatgtgcgctgtgtctcaaactgcttatggatagtaaaattcacttagtatatttcatatcattttatgtgtcatgaaatacacatttgtgttttttttccaatcacttacaaatgtaaaaatgattcctaacttgtaggttccacaaaaataggcagtgggctggctttgccctgtaggt

SEQ ID NO: 119301 - DNA, 2100 bp, Homo sapiens
ataaaaaggagttcccctgcacaagctctcttgcctgccaccatgtaacgtgtgaccttgctcctcattcaccttcctccatgattgtgaggcccccccagccatgtggaactgagttaattaaactcgtttcctttataaattacccggtctcgggtatgtctttattagcaatgtgagaatggactaatacacaagtcctcactattgtgttaaaattgcctacagtgttcagtacagtaacatctgtacaggtctgtagcctggaagcaataggctctaccatacagcctaggtgtgtagtaggctacaacattgatgtttgtgtaagttcactctgtgaggttcgcacagcagtgaaattgcctaacaacgcatttctgagaacatatcactgtagttaagcaacgtgtgaccgtatagtatactttcttttttgtggagaggttagcttcaatatatctagagaatgtcttttatttactttttgtcttatttccatttgtagtaggctctctgctatgtgaagttttctttgttggtagcttcctagtgtttgttgttaaaacccaacaatgttgactgcacatcatgaatgttctttggttaaaatgtatccgtttttcacttgtacccatttttcattagtagtttactgtttaggaattcaaggcatcacatagttgcacacagaagcttttcttattttattaatagcatgtaactaatgtggatatcccagctctttagtgtatctcagaaccaggacaaaaaaagtcatcttagtttgcaaaaagatgcaccaccccatgcacactggacaacagctctgggtctctcttggagactgttgacatttcctttaggcattatgtacttggacttgactggcacctttagcatgttagaaacaggttatttggtaaaggaaaaggctctgccagaggcaggtgaattgacgttaataagtttgttcatgaagttcgctgaagagggtagctggtgatggcactccaagtcttgaggtgacaggctccgtggggccagtcctgcgccccttagagcaagtgaagggcatgcttatgaaagaaaaggcatatgttgcaaagagctatcaagaagagtttttaaaaagtgttgctatgtaagtgtaagcgaaaaaattaagtctacttttatggtaaacttaaacataaattttatggtcatttccacccaagttctccagacggcagaggagtcagcaggaattctcctaaggaggtggaggtgggagggaggaggaaatggcctttgcaagcctgacctgttgtttgaaatctcaagttaccttacatgttttatgatattaaccatgtagtccatacaatttttgggattcaatatgaaatattttaaacatatttaccaaggagctcttctccagagatccttgatttaggctgatgtttcaggaagctgagctgtggattagtggccctgtgtgcccttggtctcttgctgtgtgtgtgtactctggcttcagaagcagagacggactgtgttaccttccataatgatgccgggtaaaggaggcattagctgatctggtgaaatgtaaataagatttgaattaagtagttcaaaaaaaatttaaaaagtttgttttagtaattgtttttaaccaataaagattaaaaatacttgttttctgtctgcagtcatcttactgctaggggttcaagagaaggtgcactagtagtttttatctcgagtctcgctgtttattctctgtactttaaaaaagtgactgtgctgttgccttgagctggttgtgggagcatttgtagggtccctgttggaatgaggaccaatctgcttcataactcctctctgtctatgggctagaccaaagtacccttggagaactccatgtcttccaggaagtttccaccctttttctcctccctctttcctgagtgttattgtctgcatgtccagctgtgtccctctaacctgattttcagccatctgccaggtccctcgagttgaggcttcactcctcctgtcctgattcttgaccctggcttctgcacttgctggtggccctgcagagctctg

SEQ ID NO: 119302 - DNA, 1432 bp, Homo sapiens
caggtgaacaataaaatcctcctgttcctctaaaacaaatcgcctttcagacgacagaaagctgccctttatgcctttgtgctcccccttccctgtgggttatttgtccttgctggagaatgggttttctctcctgctgtacatcattgaggacatcatcctgtcagggttttgctaggctggtgttgtgtggatattgataatgataaaaagcaacaagcatataggaagatttgctgttctcctcagttatctcttttggatatatgctgtattagcaagaagctatttactctttcagtaagtgtttgttaagggtggtggtatttgaaagccttgagtttataaagtactaatgaaaccttttaaatacgaagacagctttttacttaacaaatgtatagtgagcagttaacaatgggacttaatactatgtgtaagtgaccttttgcatgctgtataaaagcttgtcagagttcaggaggtgttactgctgtggttttgggtttgcttgagaacattagatgttatttttctccaagacacatactagtgaccttaacaacaacaaactcatttttcttggtatgaggactagagttaggagaatttctgaagcgcttttggaaagtaggcggacatttgagttcctcatctgccttttcccctggtcatcatacatgggatcattaagcagaacacagagcagacttgactaaagcaatgacattttgtaatgtagcttatggaagtagaataggaaggctcagctaattacctgtaatttcaaaggcagccagtaggtttcctgtgtacagcaccttggaaatcttttgtatggacccaaaaatgagtgactaattacagaatagaaaatgaataagctttgtacgaggttaagcaaatttgcaggaagaatgtatttaatgcatcatcatggaaagcaatttttgactgtcatcaacgatttcaagttaagcaagtatctgtaatgaagcacaaaagattgataaaaacagagaaaatatcagagattggatttgtccaagtaggctaactgaaaatttggtccaacaaacatcagcaagtgctcactttggaagagaatttgagtttttaaaaaattagaccccaaaggtaggtacaaactgatgatttaatatctgttattagtgtttcttagagaaacagaacgaagtgtaacgtctttggagaatacattaagggaggaagctttccaaaacccaacatgaagactcatatacagtggccagcattgacattcctaagaatcaagaaagcatcatatgatctttgtcatcaataccactgttcactgtataaccgattccataggctcagagagatgtggaaatcaggatgttttgagaatcagtgaggtggagggaacagggctgggccctagtgatga

SEQ ID NO: 119303 - DNA, 1185 bp, Homo sapiens
agtcagttcttgcctttttaaaataatcggatagtccatgctttttaattgaaattaatccatttacatttaaagtaattattaatatggttatattaggtctatcattttttgcttttcttagggaagggattttatttgcttttgttcctcctcttttgctgattttgtgttaaccaaaatttcttattaattttaattcttctgttggttttctagctatatgcatcttagctttttctttaatattgaatcactttggataagacatataattttttcaatgatgtgtttccagttccactacttatccttagtattattgtcacagttgttgcatttatatactttgtaaacccatcagtagtgttgtattttttgctttatgctgtcatcttttatagaaaactaagatattacatatatccacataattaccatttctggctgtcttcatttcttcctgtagctctaagttgccatctagtgtagtttccatttggactagagatctttctttagcatttcttgttatagatctaccaatgacaaatagtttatttgaaaatgcccttattttaccttcatttttaaaggaaacttcttctgaatactagaattcttggttgactggttttcttccttttccttcttcagtaatttgaatatgtggtcccagtgtcttcagacttaaaagtttctaaggagaagtctttgttcttatcgttattgttgccgttgttttcctgtttatgacgtcattttctctggctgctttcaagattttgtttatccttggctttctaccatttgactaaggtgtgtctagaagaagttttgtttgtgttattctgtttgaggtttattgagcttttgggagatatttcagttgttgtgtcttcagatgtcttttcctcctttcctctctctagagtccaattaaggtactgcttcctgttgtcacatttttgggaattctacttatttttcattcatctctttctctttatgttcttcagattattctgtattcaggttcattgcagatggcagaaccaagcatcaatccgttgcttagccagtctaatgcatttattttagtaaatgttttgttcagatctaggcttttagtttttctggtttcatttttctcccttgagattgccatatctgttcacttattga

SEQ ID NO: 119304 - DNA, 1059 bp, Homo sapiens
gcactggtggtggttttagtgtggcaccctgtgagtctcccctgtgtctgcaaaatttgaaagttggctaaggatctgagtagagatggacttttctctgtggttgtctttattctggggattcccctagtttctagcactccaccagctttgagctctgtactctgacatttcaagctttatgccgccctagcttgagcatagttgggaaagagcatcatattcacagatttggctccatgttactcttttttaaaaatattgctttctggtttctgactgctttttcaccgtgctgcttgtggtttcctcagcacatatgtagtatgtagttcagctgtcagctagggatttcagcatcttatgctctgaatttgagtgtcacctctatattctagtgctgtcagagtgctttaaatttctagctgcttccccaattccagattttgatatctggcacctttagttggtgaggaactggcttttgtttgcccccatgttttgcagcaatagctgtgggagttgagcagtgccttgagccaagatgccacaaactcacaattcttaacccttctagttacagtttttgagatttaactctcttcctggcttttgcaaatactacctttagatcattgaaaaaaaaatcactaattagcttggcatggtggtacacacctgtaattccagcactttgagaggatgaggcatgagtctcacctgaggccaggagtttgagacaagcctgggcaacatagtgagaccccgtctttactaaaaataaaaaaaacttagctgagtgtgatggcagtgtgtgtagtcccagctacttgggaggttgaggtggaaggatcacctgatcccaggaggttgaggctgcaatgagctatgattgcaccactgtattccagcctgggtgacagagtgagaccctacctcaaaaaaacaaaaaacagttattataaatgttatctgtgagtgtttgtgtgacctcttcacccttcctgccattacagaaagttgatatttttagttttgaaatactagggtgagtatagc

SEQ ID NO: 119305 - DNA, 2783 bp, Homo sapiens
ttattcagtttattttgttctttttttttcccttgagataagtttgtatgagagtcagccaccatcctttttctgttcttctttttatttgaaattaggttgtgtgcacttgtgcagggagggtgggcgggagaggttttcagaggccacaggattctcttttccggcatctcactaagtacttgacagtgtggcctggtaccttttgagctcaagggctgtcctcccattcctctccttccccatccatctgggctagaccttctctttccattgcgtcccccaccccacactatccctttcctgctccattgctgttctgttcccagcagtttttcttagtagaaggaggctttggctggctagtttcaagagcccttcagccttagactgctgcagtcccttcggacctggctgtgatcacttgcatccacctatagatggaagtgtgcaaagacccttctagttttggctgctattctcagctggctccctgagttttcctgtgaggtgcctgttgacagtgtcagggttcttctgctcccatccatcagacaccctgttgctatcctctgcttcctctgcacagatcctcatccacctggtcctgcagcttttgcccatttatcatccctttccagtcacttagttttctcttggctattatctcaagatttgagggattgggcaatttttgcacctcctctgctgtccccattctcctccatctgccttgaagtgaagcagattttatcctgctctgaagcctggggcatggatgagaattctttcaggattctctcaccaactttctccagtaacaggattgacagacgatagacaggtgtgggctctgttccctggttgccctttcacttgagagtgtagcccctgaccttgcctgtctgcgtgggctctaatctgaccttacagccccgtcactgtggctctgtgtccctgtccagcatcagcacgtggcctcgggatatctcctggcttcagacttggctcactttcctgattttttttttttttttttttagttttcatctttattttcctgatgacttctcttcattctagcttgtaaatgatgtatttttaaaagtagttaaaagatattttatccaactctatgtgtgtatgtgtgttttttgtactaggaggaattttgggggtacctttgtccttatattggtggtgtaaattatattttttaaaacttttctttttaaaaatagcttatgtgtctcatggcgtagcgtgcttttttttttttttgctctcctaagtctttttgatttttaaaatactttgtttgccgtgcatgttttaagagtttgctctctttaggaaaccagtcaaggtccataattttatgaaacttgggctgtcagttatttacagactaaccagtgtggacagaagtaagaggaaaagtgtaacacttgtgttatgaggtctgggagagctgaggccactccccctgttttacaggaggaaggtcctaagcagtggcctcgcccagtcagccaacctccagtttcacccacgagaatggtgggcctgagaccaagagaaggccattattcagtcatgttgaagtgcggggcgctgcctaagaacctagctcctaggctccccacatcactgcagggcaggcattagtcaccacttttagagctgaagagaatgagtctttggttaagtgttgaaatagaagtacagttcagatctcaaaataaagacctttgtcttacgaccgcatctccaggccagtggcctgggagccagagagagcttgttctctgatgcccagggccctgctcttcctccccatcagtaggaaacgatggccttggaggcttattttgctcatcactctcgccccactgctgtaaataacagaatggccctcgctctgcggtttctagaccctggcactgtttttcaaacttgactgtcatagagaccgctgctaaaaggaactgtctgcacgtccgtctgggtccattctcctactcatgaccagtggtggaaattttaggttgtttgaaaaaatgtcttttaatggcaaattaacattcaagaagagtaattagacttaataactggaaggcttttttagtccatcacttaaaacacaaacgtggaaaatgtcacagaactcttggcccatgtagcgcatgcatctgtcccatttctatacttttatctgagtgttccaggttacacttgttttaaataagagaagaaagagggagaaattgttcatagtagctgcatggttaacggtgttagctagtttgaatcagatttctaaatcagaccaaaaaaaccccaaaaaacaaaaacccagaaaacagactagatggtgcttttgaataggaataatatataaaccattgatctcaaaacactaaaaactagtatatgctcatcagtcagtgaattagctttttactctaaacttaagagtaagttttgctttacttttagaaacttttagaaccaaacatgggaactcatgtaatctaagtaacttagtagtgaaactctattctgctccccattgggggaaaaaaaagcatatgcttggtagaaagaatgttagaacttgaaagtagaaagaaatgttagaactcgaatcaggcaaggtaccatcagggctcagagccacactggtaattcgaatggcggaaatttcatagaattgttggagaggtgtttaggatcctccagagaaacgaacccataggttagagagagatatatagaaccag

SEQ ID NO: 119306 - DNA, 1404 bp, Homo sapiens
tccacctcctaaaatgctgggattacaggcatgagccaccgcgccgggctcatttatgtctttatgcacttagatttttttttaactctatgtattataatccagtattcttattctgttactcagattgtcgtagctttggtcattggaagctcctgcagtttgggtcctatgtcctttcatcatgttttcccaatttcttattttcagctaccacaggacactcagggtgcatcttgaattttctttgctccagctctggagtcaggcacttgagggagcactgtttcattttattggcaaacggcatttagaaatgcacatgcggggcaacacgtgcttgttgccgttgcctctcgaacctctaggaggacaaagcttggaagtgcatgcctgtatcttagcccacacaaacctgcacatctatatatggatctctctgcatatgcagttaaaaatgagttcctattgatgaattccatttccagtttaacaccatagcattcattctaaccttcttcttttccttaattgttaactcctttctccagcagtgagaaatccatactccgctgtctgtaatacatttactcatttgctcaactctagtataacatcaaagtagtttcaaatttgctaacccaaatccctctgagaagcagctttattaactagaacacatgccagtgaactgtagcccatgggttcaatctggcccgcttgatgtttttgtaaataaagttttattggaacacagccccgcctatttgtttatatatcacgcatggttgcgagagagaccatatggcctccaaagctgaaaagctttactgtctgaccctttatggacatggtttgctgactcttaaagtccaagaatatagattttgtgtacggctctttttgtctttagctttatggtgtcccagtcaaaatactgttttccaagattgctttttcttttcacctccttcaatgtggttattttattcatttgtaattgagttagattaatttgttactgcttggattccatttttttgttccccatacacacatcctggttgattgtcattgtgtgttttggatgtgtgaaatattgatgtggcttccaagcgtgagagctgtgcaccagggtatacactcagaaaagcctcctcgttccagctttcccattcccattctgtacgccctccactccttttctacccaccctctgtgggtgaccagtctctttagtttctagtttgtctttcatgtatgttttgtgcaaatcaacagatacatatgtattttattgcattatctttcttaaaaaaaagagcaggtagtatggtataagatactcttctgcacttgacttttttcacttatcaatatgtcttggaaatcactcacatcagc

SEQ ID NO: 119307 - DNA, 1472 bp, Homo sapiens
ggggtattatattagtccttggcgatattttgtatggtaggggtattatattagtccttggcgatactttgtatggtaggggtattatattagtccttggcgatactttgtatggtaggggtattatattagtccttggcgatactttgtatggtaggggtattatattagtccttggcgatactttgtatggtaggggtattatattagtccttggcgatactttgtatggtaggggtattatattagtccttggcgatactttgtatggtaggggtattatattagtccttggcgatattttgtatggtaggggtattatgttagtccttggtgatattttgtatagtaggggtattatattagtccttggtgatattttgtatggtaggggtattatattagtccttggtgatgtttcttggacatactttctccccgttggcttttgactttgatcttggtgtatgtgtgtgtgtttatttttgcctttatgactcgcccttgcctacgggataatgacataatgcatagttgtctaagtgtgtgatgggttaccctttgccttttgttgtttgcattgtacttcctaactcctacttcacaagatttcagttcaggcatcagttccgaaatgatttctcaactagcatgagttaaagaaagagattatgttctgccttctcagagggtgctacttttaaaagttgtttgatcctcatggtaccctttaatgactccctgtgattatatgtctagtaccagttaactatgtcagagttactttcagattttatcagttgttgtgactgtatgggatgactcagtgttggacctgagactttgcctccaattttaatatatttcatgaatccatttccactaaaatcttttttgttttagtatataataaaatctacacatctcagttttgacttgcctggtgtcatagtccatttggagagctgtaacaaaatactataaactgggaggcttagaaataacataaatgtatgctcatagtcctgggggcccagaagtccaaggtcaaggcacccagcagattggtgcctggcgagggctgctctctgcccttctcacagtgtcctcacatggtggaagggactagccaggtctcttatcagggcaccaatcccattcatgagggcagagccttgtgccactctcctatgtatgagacctagttatttctcaaaagtctaaccttttagtaccatcatactagggattgggtttcaacataggaaattttgggggacacaaatattcagaccatagcaagtggtcatttgtgtctattcagttattgcaggcaattccttcagtaaatagagaaagagcttgtcaatgcatatcatcttgtgtcagatcagccgtacagaggtccatttactgggagctaatgaagcttcagtttcaggtctgacagaagtttttgatagttggcgtta

SEQ ID NO: 119308 - DNA, 1687 bp, Homo sapiens
tgatcttcctgccctgcctttccaaagctctgggattacaggcatgagccaccacccctggcctctctcttctttaacaaatactaaattaatttatttagtttagagatgggtctcactgttacccgggctggtctggaacattataaagactcctgttggccatctcacttgactgttgtcttccaccctcttccccattcatcagctcttagtgttggtctcccctggaaccttccacatcatctcctgtgcctttgctgtctgcagggtggtccatggactggcagcagcatcaagcttgctggagttggttagaaatgcagactctgaggcaccgccccaatccagttgaattggaatctgcatcttaacaagatctttggtgatttgtagggacatggttttgtatacatgttttctatagtgaacatagaaagtactgccaatgtgtgtttagaatgtacacaaacgatatgatgtaactttttccatcaacaagatgccctagatacctctaaagatcactctgtgtggtgtgtgtagacctgtctcattctttcttagttgcttcctaactttacttctgcagtgttaaatgattagtcacttccccattgaaggacattaaggttgtctgcagcttttgtttttttgggatgtccggtgtagcggtgaactcactctagggcacgtcttgtgtacatgtgcccagaaagtagctggatagaagagtgtgaacatttttaacttaaacatcctgctaaattgccctccaaactggttgtatcaatctgactcttactttgtttcagtgatcaatttacatagtctttattctttataacattgttttaatggccatagcattataatgttttcatatcaagttgcctatccctcccctttgctgtaattcttcaaaattatattggcttttaaagaaattccacagtcttctataggaaatttaaaatcagcctgtcaagttctgtgaaaaattctagtagggatttttttttttcatggctgaagattgtattgaatttctagattaatttgggttggagactaggtatgtgaagtgttgagccttctgatactcatctctgaacatggtatttctcccaatttacttgtcttcttctgtccttgagtaaagttttatagctgaatgtataggtatatgtgcatttgtatgtgtgtgttgtgtattgtagttttgtctgttttcttttagatttattcttaggttgtttttctagctattacgaataggattttcaaaaagactgatttctaattgattgccgttgtataggaaaatcactaagttttcatatgtttaccttgttcctttgctggacactgttttaatggtcagttagagctctaggattttggagtcggcagtcttctaccttcgaattaattatagttcgtacttgcttttccttgtgtttatgcatccatttcattttctcatctggtgtaggctgggaacttccaggaccattttgagtagtaacatggtagagaacactgccgtcgtcatcttcgcctactggagtgcttctagtgtttcaccattgaagtatgagcattcccaaaaatgtctagttgtagatattctatccagatttgctggcgaagaggtctttgttactttttaaaatcatgagtgggt

SEQ ID NO: 119309 - DNA, 1899 bp, Homo sapiens
gctggagagggagctgttagttatcttggacctggaaagggcccagaaaataggtgatttattcctggttgactttcagagttaacaacacattgaagtgtgaactctgttcgctgtatgtgtgtcttgcatgctactagatgagatggtgacagaagcaagacatagaaaaaataggttatttattaaactcaaactggcttattttaatgcaatagtgaatcataatatttaattaaaaatgaaaaatacaaagacaaaaccagattggacattgagacagcagttgtaagccaagactgttttaggcaaaccaagacatatggttgtcctatttaaatccataaaattaaacttttctgtaatttggatagttctactctttccttttcccattttggtcagcaaagtagccccctattaggtttctgcagtagtctcagatccacttagatctgtgatccccccattcttattctgcacactacgtttacacagccctgctgtgtgaactaatgagacccagttacagtcatgtctatctgctgcttaaaacccagcatggaccacccaggaatgccaccagtggccctctaactattgcgtgcaccaaaatcatcagtgtgtgagggtagttgcaaatttctggttccctcctagagattggtattcagtaagtcttgggaaagccctggtgcatcaaagttgagtctctgtgcatctcattactttgtcacttgccgcccccatccgtccctgtctcatggtccacccagctgttgtaggtccccagtgtcctgtttagtggacctgtctgtctttttccccacattctttcagcagctaaggagctgctgttgtacatctttctgttgaaattaaatttattgctctttgattccatttttctctagctgagcatcttgtgtgatagcagggtctaggtctcagatcatctgtattcttaacctgatgcctgaaacttgtagttactgttgagtgatggtataagattcaagttaacagtctttccattgtttctcttgtcatgaactgaaggttcagtgaattaaagtaggatttgtgtagtcacttcattgtatgtatcaagttctgcctttaaaacttcagttttctccaggatcaatcagtgtggtaatttcaaatttcatactttaaaaattgagctttagaacgggcaaaaatgcctcctaaacatttacaacttctgctgtcttttgaattaaaataaaaactgtgtctccctacagccaaggtagggctcaacaaacgaaagctgaaaggtgctggaagcctcctgcactttgggaatatacagtcaggaacaattgtcaggagttctgtagttgattctgtaggttgggattgccataaggttggttagaaaaaagatgtgcgaaagctttcctgagggtttttgcccttgctttcacatgtcccataattgaaattaagaactgctggcaactggttagtgaccagtgttgaaatgggaaaatattactggcttatgcttttgcttatagatattgaaatttaataaaatttaaccatagttacatatgattctatgaaattaggtaggctcttcaagaaaaatgtgagcaatgtaaggcagggtatttttgggaggggggtgctttattgtataggcaagctctcgaacagtgtctgataattagtagtgtctgacaatatttgctgaatgagtgaactcatggtaacataactccagtatggcagattgattcttggtgctttttttccagtggcaaacttttatagaaattggagagtttcgtaaagacttttaaaaagttgtcagaattacctattatgtcctttcctagataatcaatttggaaacaattgctggta

SEQ ID NO: 119310 - DNA, 2183 bp, Homo sapiens
tggccagtttggcccttcttagtgaaggtgatagagacaagggcagaaggtcattgtatttataggatatttgaagcttatcttgtttactttgttaataatacttgagtcatttttctaaacattctttgcataacagcaaagattaaaaagataagtaatgtaatatattaggccctagttgtcattcacctgttcttgtagagctgatacttttttcttgatcaaattttaggtttaatcatatttagcttagaagagtggtctgtcttaagagtattctgattatttaggaacatctagatgaaacttctttgccttagtccatcgtttctcctttaaattcctaaaggcaggaatgagtgtttcttaaaaccaacatgtataaagcaacattttaggcaaactgggatgaggaaaaacatcttgaagggggcttcataatggtgttggagcctgttaaaaatgtggaatggaaagccgatcatgaaaacagatagtactgacttttggcaaaatgagtctttatgaaaacataccttaatgattatctgacaaatgcaagtgctttttgaggttaacagaattataaacaggagactgcagacactaaggtcactactgagcagcacgataattcgtgtggtgtgttctttttaaagattaacaatcttaagtcttttgtatgttatgttgctaagttatttgggggaaagtgttaaaataagtgctcttactttctttctccactgcttttgcacaaaaactttactgttcaaagaatattgtccattcagtttactttttatttttaagatgaagtatcccccaaactggtcatgccaggaaaaaaaaaaaaaaagtctcttccttccaaatttaagcatgtcagaaaattcttacttcttttgcacctgttaagtgccaggcacttaaaagttcaagggacatagcaggaaacagtactaatgaactgccttcatgaagctcacatgtagaccacaaacacagaaagaaaacacagtgtgtttgatggtgagatggtgtgacgtgctcaggagaaaacaggaggcagggaaggggatagaattggggggaaagggtggggagggaggggggcagttccagccctaccactaactagagtggactagctgggtgacttcatttaactctggaacctgttttctcatgactggattggcaaaaatataatacatgttcaacatacttcatagagttttgtgggtaagaggaatattattagtagtaacaagggccttataattgcacataggataactgtatttgcttactgaatcttcatagtaatgcttcacgctaattgccagtatcacaattcattctctgattaattcagcaaatacttgttgagtgtctgctaggcacgagggatatagctagattttagatacacaaaactctgttctcattctggttgagctatgactgaagagatgtagtgtcttatacctttcaccgttgctgtgtattttatctttaaatgttcagtttggtgacttttgtcaattaactagaaaagtcgatgttttagcgaaaaagtttataattttaatagagcttgtggtagggaactcacagtggttttattttcctattacttactcttggggctatttaaactagtaattttgtttattctataagtttcttaattttaaaagtattcatagagttcttttccttgtaagaatgctactgtatagccctaaaatttataatggttcaggagaactttggatataatacattttgtgataacagtgtggatcaagaagtagaaatgaaatatgccatttgataattgaaagcatatagttagatcgtgaaagccacgcactagaatttgtctaagttgatgaaatgctgactgatgaataaggtgaatctttcttcatttgggccagtagaatggagagatccatataatttggatatttaacaaaaattttcaagtgttaaaaaattatttgaaaaaatgtataatttgcattagccagtacagaattcttaactaacaagcagaaaatccaggagtactgctcattttttaaaagtttttgattaccaggggaaatataatggcaccgaggcacatggcaatgactaattaaaactgagcactagggtctgtggctctc

SEQ ID NO: 119311 - DNA, 1092 bp, Homo sapiens
tttagagatgaggtcttgctctgtcacccaggctagagtgcagtgttgtgatcacagtgtcatgatcagagctcactgcagcctcgaactcctgggctcaagggaccctcccacctcatcctctggagtagccgggattacaggtgcatgccaccacccagctaatttttatcagcagtttttaacctatttaagcccagggtcccttctggaatgtgccaagaaggcatagattctcaacctagaaagttgcacacatgcacccacgatttttcacacagtttttttccatttggtggaaggaccaggggaatcacaaattcatctgaaagttatttgtggatcttttatctcaaaaagttttctggactgtagcccacagttgaaaatgtagtttacatcacaatctacacgtaagcatataagatgaaaagcttcatagaatactaacctgactatgggcaacacacactgttctgttctggctcgttttatgaaatgattttatgacacactaaggggtctccacctgcagttagaaaaatgtagctctcactatgcagagtgggtagactttagaacccttgccttgtcacggccaagctcagtactgggcatctcatgctcggacgtagttcttatgctcattgtccatttgttgccaaggttgattctggctaaatgcataccccaggcagttagaaaagaagaattgcaaatcaacttctgacacattaaaagtgttatgatctggcccacattcatatagattatagagatctcacatgctcagcaaatgtgcctcctttgtggtcacagcacaggtatctaaaaacaccagggtatagcagtgaacaaaacaaacaaaagttccagccttctagtagaggagaggggcatcacatgagatcataaaatatgtcagactgtgataaatcataaggagaaaaaataaagcagagagtggggtatgaagaattgggataaggtttgaaattttagcttggatcgctgggttgttggtgtcactgaaaaagcgacctttcctgagtgaagtgaagaggtcggccggatagataattgcagacagga

SEQ ID NO: 119312 - DNA, 1554 bp, Homo sapiens
ttcacgagaagcccaaaccccagctttatatattataccattgtaacaaacttgtacatgtagtccccgaatccaaaatcattaaattatttttaaaaagactacctcttccccttctttgcctcgcttttcgtggcaaaaatagaaaaaatcgagtcacataatttcttgttcttttggaattaaaaaaaggtcactttacactcaaaaagaatgatccttccaaaggaattaacagctaactaggtattgtttgacatttgcatttggtggcattcttctctaagagatccttgctttgatgcagctggttccagttgcaaaatggtatttcccatgagtgtgaaattatgaagagttgctcctagaaagccattttgttctacaagcatgtttaatcaagaaaataaatatccttttgcaaatttttataagcatgtaaggcatatttcttgcagaagctgagacatatttaatgcagaagctgatttcaaattggcttaatttttaatgcctgcattggaataaacctgtatcccatttcctttccttatgtgggacccaagaccttgtctcaagcacgagaaggtccagtttaagtaaaattagtgtttctcaggagacgagagaggccctgataagatcctcaagttgaaacacgctaaaaccctagcaaattgaattgagacctagatatattattagaaagtacagaccctcaaaggtaaagtagaagatgttgaaggcacagagggagaaagagagatcgcctgagggtctgtaatgacactgactatggatttccacagtaatcatagaagtatgaagatggagctgagaacgtaactgccaacctagaatactttactaatgtaaaatatgattcaagaaacaaaatgaaatggacactttcaaacaagccctgaaatttttaccactggtggactcttgctaaaaagatcatgaaaagatattcttcaaaaagaaagaaattgaactcagaaaggcataagatgattggtgagcaaggaaatgggagatggcaggtatgtctaaaccacattagttgtacgaaacagtaatactgattttgataaaattgggaaacattttattgactaaaatttgtagcaacaagaagaagataggtgatcaggaataatattttatcctgtccttttattatttgggagggaaggaaataactttagattttaatagataagcatgctgatatggtttggctgtgtccccacccaaacctcaacttgaattgtatctcccagaattcctacgtgttgtgatagggacccagggcaagggggtaattgaatcatggggccggtttttctcatgctgtgttgtgacactgaataagtctcacaagatctgatgggtttatcatgggtttctgcttttgctgcttcctcatttttctgttgctgtcatcacataagaagtgcctttcacctcccaccatgattctgaggcctccctaggcatgtggaactgtaaatccaattaaacctctttttgttctcagtttcaggtatg

SEQ ID NO: 119313 - DNA, 1043 bp, Homo sapiens
ctcagcattgcagcctctcacgtggcagacctacaagctagtgtcaaacctggagcctgcaaatattgactgtgcatctgtgattcgctctagtgggttgggattttttgtaaaatttatatttggccgtgtcctctccaccctaaatagtctcccctagatgagctttagaagaaatacaaaggggcgctttctcacaaaaactgctaagtacccctagtctgtctgacactcatcttctgatattcatgttacggctctaggaacctaagttcccactgacccctaatattccgcattggcattgtgacagttttgctgttaggagcctgcatcgtgaggttggaagaggtcctgcctccataacatcgcccaggatctctgtgcaggagttgcagtttgggtttctgaccagagctgttgtattctggttcctaaatgctttatctgtctgtcattggtctcagtatgtgtgcgcaagtgtatcagtgtgtggtttgagtagtcttttgtgggctgtggaacagctttgctgcatttcactctggagtggattttattcctctggtggaaatactcattcttgttagcagagggcttagtttttcaacactaaggtaccctctctgtgagtgatcatcagactgcagctgtgaaacctgtcatgacctttacaccaagagcttactatgtgcctggtgaattctatacccatttaattttggcatgtcttggtgttttgatttggctttttttttttttttttggttggtacattaggtttaaaagcgaacacgttggcagagttttttggttttgtttttgagacggtttttacacttgttgcccaggctggagtgcagtggtgcagtctcggctcactgcaacctccgcctcccaggttcaaggattctcttgcctcaccctcccaagtagctgggactacaggcatgtaccaccatgcctggctaatcttttgtatttagtagacacagggttgcaccatgttggtcaggctggtctcaaactcctgacctcaggtg

SEQ ID NO: 119314 - DNA, 1083 bp, Homo sapiens
acaggcttagctgttaacgggaaaggtgagtgtctagggagctgctcaggctccgtggtgatcccagagggctcgggtccttctctagagatcaggccttgagctgggcagagtccggggcttctcacggcatctgctggagccttgcagagatttcgccttctcctttcttcgctggaagcctttgatatttctcttaattcggcaactagttttttctgtgtaattcgccatccacagactgtgctaccacactgacttgctttaaacagtatctccctctaactaggttattaggtgataagtttttacagcaagtttctgaagctgtctacctttcttcacctctgaagtgctgagtcttgtctcgtgttaagcgttttcttctaagtgtggccagcattgatacagaagtgcaggttcttattttgctcatctgtgtgaatacccaggaatgcctttcagtgggagcgttgctaacccagcagagcctttgggagccgggctcgtttctctgttgtgatcggcagtgcaggtgccattgcttcccccgtcagagcccagtctgcctggcaccggtggtgtcctctgttttactctcatccccagccccgctcctgggttctgcagctgccttggttgtgccatgacctgtccatctcccaggacagcacaactgggagttcacatgggtggcttccttctcctcacttgccacactgtgccggccacagttttctcttacgaggcctcatgacttctcacctgctggagctttctaatagggcttcctgcttcctgccttctgacagctcccatcccttttcagtcattcttggacgagggtggtgtccactggtgcccccaccccattgccttcagtagcaggtgtgccctgtgtgtctgcgacctggcgctccgctgccctctggctcgctctctctgtcagcaccagggccgcacgtggtcccttcctctccatctgctcaggggcccccaccacctggccctctcctctctctcccttctgagttgtagtcttaaaattgtctctttagccgggcgtggtggctcatgcctgta

SEQ ID NO: 119315 - DNA, 1389 bp, Homo sapiens
gacagagtgagactccgtctcccaaaaaaaaaaaaaaaagagactccgtctctttacctgtgtgtgtctcctccaacccaagctcagtagaataatagcaaacaaaatacaatggtgttggtttgtttggggagctactttcctctaaagcgaagtgttcactaagacattctaaccgtcctgctttggtgcattcaacaggttttctcctcggcccaggcccttgtgtagcaaaaaagtggaatatgaactgaaatctggggtctccctttgacaggaaattgccatcttgccaatgtttttcagatacacacttgacccaaacggtgccttttccggcttcattggagcttgtgaacttgtttgcaggtttgacttcctatattgtttgacctcatggatacagttttctcttacttagttgtatgtgagggatcagagaagttcagaggtagaagggactcacttaatagcacgctctattttgcagttagggaagtcgagtccagagagaagatgatgttcatggagagaaccgaagccagaaggggaaccagagcgcgtgccttagtgcctccctggcgttcttcccagcattgcttgttgcctcctggacagataagcacctccgtcttcattgatgacttgggggccaggcacggtgctggactgtagtgctaccaaaaaggactgatgagctatagtccgtgggcttggccctgccctgctcctggttttgtatgacctgcaagctcagaatggattttacatttcctgattttggaaaaagaaaaaaatcgggaggaatatttactaacgtgaaaatataagaaattaagatttctgtgttcacacataaagttttcttggaacacagctaaccatccattactatgaatgaatggagctatccattcatttacttccaccaccaatcccggctaatttttgtatttttagtagagacagggtttcaccacgttggccaggctggtctcaaactcctgacctcaagtgatccacctgccttggcctcccaaaatgctggattacaggcgtgagccactgcatctgacctacttggctctttacagagaggatacctgatctctgctcttaggaggccatagatctgtgagcccccttttttgtccacaaaagtcgtgtgtgtgtgtgtgtgtgtgtatatgtgtatatacacacatgtgtatgtgtgtgtatatatacacacgtacgtgtgtatatatacacatatgtatgtgtgtatatgtgtatgcatgtgtatatatacgtatgtgtatatgtgtatgcatatgtgtatacttgtgtgtatgtttatacatatatgtatgtatgtgtatatatgtatctatatacacatgtacatat

SEQ ID NO: 119316 - DNA, 1801 bp, Homo sapiens
agaacccttgattttcaaaacttcgagccaacaaggttaagagctctagtccttaacccgcacgtccagttttggttggagaccacctccaatgcgatcttgctggttccctctcgtgtgttagttctttcaaaatgaactgcagccctcgccagatccacattgcgctttcaccacatgtgaaacaattcgcaacaagaaccttcattcctttatatttcttatataaggaagataataatagcttccatttaaatgaggatttagtgacttcctttctaaaaaacatccatccacacatgtggcattggttaaaccaaaagggatgtgtaagcatagaatcttaaattattttaccttgttgtgcggagttgggaggttgggttgggaatgacagtatttttccaaggccctcaccatcatttttctccaaagctatgatctctacccctctctcacttctgcctgggcgctggtcagatcagccctgacccctgtatactgctgagaatataatcactagttagaggaaaatagaagctgttagggagcatttttaggacagtggtgaatgacatcccctgcggccttgatctaaatcaggcttgcagattaacgaggaggaagtctttctggaagaaaagcaactgcaaagctggtggagcccctgacagcaggcctcctgtggatttgggagggtcagttctgtcgctgccctggtacctgtgcagagaagagctttgttatactctgctagatcgtaagctccaagaaagcattttgtttttccagactaaatcgaactgtgcccagaatggtgcctgccgtgtagtcggtgctctgcaagtacttgtggatggagtgattccagtagaatgggtgcgcatggaagacaagggttgttgtaaggagtcatttgtggcctgggtcttttgctcagagaggagggaaggagagcaggaggggagaaatgctattgaaataacaacatatatggccagaaacacagacattccagaaagccctcgttcgccctctggcacatgcttcctgaatgaggagaagccgcgctgaagctctgttaggctgttggtccacactcagacactttttaagccattgtttgtttttactttctagactaattttagagctacgtaaagaaactgatttgtttttctaaaactaattgaagtagatactggtggagtcattgggaaacgaaccatcattcaaaacattaatcatatactgaaggaatatttttgccaccaaaaaccacagatatttgaatatctgtgaacccaaagaatgaatgtttctggagtattttcacacacactcacttttatagaataaccatatatgtgtttgctttttaattattttaagtatgacgcaaaggcttaaatgaatatattatttcactcagaaatgtgagaaattctaaaatttaggtgatgcagctagctgtcttctttctctctatcaatgtttaatggtaatttcttgctcttttaattccctaatgaattaatcctacaaaagaagtaattgcttttaaaaactggattatcgtaactttgtcctttcatggattcaaacatataattcatcatcattccgtaagtatgaaatttcagaaaatgctattagcaaacttaaaacaaataggtgtaaaccttatcagtgttgtgacatagggttggcttttggatttcatattgaagccaacagacctagtaggaaaatgactgaggaaatattaataccttagcacaccttgcatttcatgagcatt

SEQ ID NO: 119317 - DNA, 1156 bp, Homo sapiens
gaagagccaaggacttttgaacatggattcattgcttggagccctctcttgtgtaaagcatgctcgtaatgtatcacttactgttaccactttggatttcttcaaagtagagcaaaacttaggtgtacttagaaatctgagtacagccctagcctttttgatttttctcattttctcacacctggttttgacaacagtttttagtctagagcctttccaaatcattcaatgtagttttctttgaaacatcagctccccttttgtaatcatcccctgttgtatgtaaaaatgaattaaatataacaagttcagctagccaaaaaagtgtaagaggaaggagagcgttccctctatcctcttaggtttgtggctggggcctgtgaattacagtggtgaaagacatattaacaggagaaaaggacatatacatttaattggtgttttaaattttatgttcccaagaggtctccacacaaaagaggaaaccccaaagaagtggttaggtttgagggctcatataccattttaacaaaggatgataaattgcggagaagttcctagacaaaagaaagtggggtttctaggcttcttgggggtggtaaaatgtggggaggtggatatacggggaaacaaatggaagacaaaggctgtttagtaaggtctgttgatgccgtctcggcccagtttcatctctctggtaatgaattgttttccttttcctggtacgggaaagtgggaatacctttacagacaggaatttaagccctttcaggcagcaatagagagttctttctgcatctgttgcttctcagttgcctttagctaaaaataatccgtattcaaaagtggcatattttagaattgcatattctgattcccgtcagaagtttagggaacgaaccctgccagctcttcagcagccatatcccgaggggaagagtcacgtgtgagctgtgtggagtcccgtgaccatctcactctggatagggaaccaaggtttctcaaggagtgttttccttcttattctgagagtccctgctgcagactttgagagttttttccctgcaaatgaagtttattgatgtcacagctccagaaatgttaacacacatcctgttgtaaacagaatgtgtaaatgtcatacatttttgcacaa

SEQ ID NO: 119318 - DNA, 1175 bp, Homo sapiens
ttaattccgtatacgtgtgtatatatatatatatatatatatatatatatatatatatatatatatatatcttgcctgtttttcttttgggtggtttaacttccaaaatgtgaacatttcgtgaatgtacctgtctttgcccagggactacactgatcttctctgcatgtttgagctgtggcgtgcatgcttgtaaagagagtgcctaaaaagaggtccatgattcagggtcctccccaccccactcaggggtgaggtaggactatctaggccctgccttaagggactagaaaacttccaattaatgtgcattaattttatggttcctgctcagttttgaatataccaaagtatatttcattactttgggcttatatgaagtacaatttaaaagaaatttagatttcttaggtcagatgacataaaaggaatatttctaactatagttcttgctccttttgaactttaactgatacaaggacaaagggggggaaatcacattttcagattaaatttgctcttgtcgctgcatgtgctactaggaattaagccctgttacaaatcctccttgtctcctctattcccgttagcattgtttttgctgcagtcaggtactggccttctggaatattcctccagtggcatgctgtaccttaaggttgggagcagctatatatacacagggtacaggctctctagcctcttccgagcatgctattctggtgcctttgttctgtcttaagttcctccaacattcatcttcctctttcagagaatccttgttttacagaagaggccgcttgtgaaagagagtgatttgatcaaatcactagcagaattggtgggaaactagactctacgttagaacctactcctgacttccatttagttctttgtactgtgtcacactgataagtgaattttttataagcgtaattgattttattaagtacacagtattactcaagactttcgcttctgtgtcaagtgagtgaaactgaacccacagtggcttaaacatacaagcaaatgaaatggcatctgttggctcatgaaactgaaatccaggcacagctggatctgtggcctgaagttaccatcattctcataccccaccccacccccagcctccactttttcagtcaggccatccttcccgcatggaagcaaggtgc

SEQ ID NO: 119319 - DNA, 1058 bp, Homo sapiens
ggcttctcttcctcctacgtttcaaggggtgaggtcaacttcatctaaactctgtaacctagaaggaaggggatgagaggataccccaggggaaagccagggctagtaacaatagaaatggcaatagaggccgggtgcagtggctcacacctgtaatcccaacactttgggaggccaaggtgagtggatcaactgaagtctggagttcgagaccggcctaaccaacatggaaaaaccctgtctctactaaaaaaaaaaaaatacaaaattagccgggcgtggtggcgcatgcctgtaaacccagctactcgggaggccaaggcaggagaatcgcttgaacccgggaggcagaggttgcagtgagccaagatcgcaccattgcactccagtctgggcaacgagtgaagctccatctcaaaaaaaaaaaaaaaaagacagtaggtactgagcaagcctggacaatcatactttgaattaatgtcatgttccagcgtttgggtggccctctgaaacagtacacagtcatcctcccaatgcagctgtgcccaagatgctgctcaccaggagactgagctgtgcccagctctgtacttcctctttttgaataggtgttcttcctccttttctagtcctatctttgggagctaggcactgcatttatctcctttttaatttgatatctcaccttttacacatcagtcacattaattacacaaatggactgtttatgaggatccccttggagaaggtgccagggagtccaattctccaaggctcttttgccttgggtgcagaaggtttaactaacgtggcttgagtacttagattggatggatgggagccgattccctagaacagtctgaaaaaataaaatcggatgtttttaaaatatccagggaaagatccagagtagatggacaaattcacttaaactttaaatggtaaaatggaagtgttgtgcagatatttcagtggtctttagaatctcctacattgcctagtccaattgtttacacacattaggggcttcattaacatttgcgtgtacatgagtgagt

SEQ ID NO: 119320 - DNA, 1041 bp, Homo sapiens
atttttcatcttgctaatgtagttttaaattatgtattccatgttcacattgtaattgtagcattttcttgcatgacactttcagcaaagtttggtagctgtttcccatgcttggcattacctctaaaggtgaagtaacataagaattgtataggaataccatgagagcataacgtgagcattatcagctaggtgagtgcggaagatcacactgtttaattgctggattgccagcttctgacccttctctgggagtgcggctgcctctgtacctgcttcatgacagtacaagcgtgaaggccacaggagaaaaagaacaggaccacacagcccagaccagccttggaaggcatgacattgcgtacagagtgtatcggttgcttctgatttccgtgatttgaaccactcttttattatggacttcaaagggaaagtaagcataagtttaacttctgtgctttggtttttcagataaaccttatctgatgggacaaaaattctaaaactatggcagctatcaaaattgtcacagctttataacagcaaaccaagaggaagagtggtgtaaaaatagactcagtctgagttttggtttggtttcgttttatctgggggagaaggaggttgccctagtaaaatttctacttgcaaagtcttccacgtgccattttttctgttaatatgttctcagtgagtggtctaaactaaatgtattgtgttctattaatcactgtttacagaaatttgccatttaggaatgtatattgtgcagtctaatgtgtgcatttcccagttttcacaaggggttttctcatgtgcatgtaataagcagttccacactgggttttcttgattatagagtctgtgtaacgctgtgacagcctggggtggcacctcgccacaatcttcagagttgcacattactgtgtaacattagaaactgctgctactctgagctcaagtgagtcaggggtgcaccccaagagctggatcactgtagggccagtgggttaccaggttgtcctcctacagaaaggggag

SEQ ID NO: 119321 - DNA, 1086 bp, Homo sapiens
tcagctctgctgctcaccattgccaccaccttgtccaagcaattgacatcagtctttattgcctttttccaatccatttctcacacaccaggaggattttttatagatgtaagtcatatattactgccctgcttaagggtgtgtcttcgctttctggtgtacttgagataaaattcatacttttttttgtttgtttttgagacggagtctccctctgttgcccaagctggagtgcagtagcaccatctcagcttgctacaagctccgcctcccgtcttcatgccattctcctgcctcagcctcccgatttagctgggactacaggctcccaccaccacgcctggctatttttttttttttatttttagtagagatggggtttcaccgtgttagccaggatgatctcgatctcctgatcttgtgatctgccttctcggcctcccaaagtgctgggattacaggcatgagccaccgcacctggccaaatttcatacttcttactgtggcctacaggaccctttggggctggcctttcattgcttactgggcttccaatatgctaggctccctccactttctggaattggccaatttctttcctcctgttttgcacatgtattcatatatatacatatacacacataccttttttttttttaatctggttgacctcttatccttctggcctcagcacagacggcacttcctgggagaagactccccgattttccccctccatctaaaacatagcgctcagccacagttctagttgcatgcttaatgtgttggtttctttacctaagctaagctgcgggaagttaggcagcacatatgtttatttactcagtctcacggcattagcacctggaacaacaccaggcagtgctcacttgctcaggtttgttaaacagtgactctgatttttgtgtctttgtcttgttgccagattaagttcttgtctgtggttttatggccagaagaggcacacataaatgaatgagtactctgcctttaactcccttcatactttctgctcttttccttctgtccaatttattaagcacactgcatactatgtgccatgtc

SEQ ID NO: 119322 - DNA, 1004 bp, Homo sapiens
ctattatctgtctcttgtgttctgccgcagttgagacagtccacatggccccagctttccttgcagcggctcatctttcctcagattgcaggctgtgtggctgccttgcaacctcagccatcctgcaagttcaagaacagttgtaattgatagtttatccagctgtaaccagcgttttagctgtgcacgggcctattcttcattctgagctattaagctggttttcatttgactttggtttgcatagaacacagggtttgcagaatgggtttgtgactggggtgggttgtgacatggtttcttagaacggggcccacacatggcccacgcatagaggtgtttcagtacagcagtaacagcccggcacggtaccacagtgttcacagttgtgggaacagggtgaagagtagactgtcctccagctgggagagtaggcagggatgagtcggtgcaagtggacgagtccaggacagagctggcttctgagcctaggaggtcgggcacgtatccttgcctttattcactgtgccctgcctgtggtttgcatgtgagaacacacatctctgtcttgtgtgctggggctggcccaacctcgtagatcatgtttaactctgtgttgttaggcataaccacagtctactttaatgacagcagatgccccactgtttagtcacactgcaaagagcatcctttcgatcacctcccagtggaaatccatgatgatgaataaattcctagattcggatttgtcaaagatttgttttgttttgtttaatatttttgatacaagttgtcaaaccatcttccaaaacacattttaccactctgctctctagccagtgaacacattttgcttggccctgatattagggttgttttgggtgtttgataaacttatgtgttttgacattagaattgtaaaccaaaaatagcattctaagccctgcagcttggaatgtgaactgcctcttggccaaggggaccctaaagaaacctacataact

SEQ ID NO: 119323 - DNA, 2788 bp, Homo sapiens
ggcctgcctccccctctttcagtgatgctgaccattcacctttatctgagtggttcattccagccaagcagctgagcctgtgaggacagaggcatctctccattctctcaacagcctgtttctctctaaaataaaatcacatatttccattttcttatgatgcttcctaattccaaggaggtgtagtgtgtagtgatcccctcatgctgggcaggtaccccggatggaggcctggccacgtgcacggcccactgccacacctccacctctgacaggtgggccctgaggctgatggggagtccagagcaccctgcccaccagagaacttcagctttgatccgttttgtttttgaggttccaagtaagatttttctttaggaaggaaaaaatagctctgtatacaggggcaatgctaggaaaactgttgcttttctgtactttgtggattctactgagtttgtaacctgccctgtcttatcaaatcgtttgctttcatggttattccttccttatggttttggggtggttgagtgtctatgtgtgtgttggcttgttttcttttaaagaacctcatggagaaatttatcttagatcttagaagtaccagattgtcttttgaagtcataggtttgtttttgtcttagaatcttcgttttaatggcgtttccatccttgctttggcctctagaaacaccagaactgagtatgtggcttgcttttaggagctaaccacaagactgactgtttctgtgtggtggttctgccgctagcttcttgttggggtttgttagactttgagtagctttgcctttgtagttttaagggaggtctataatgtatactaatactaatacattgtaaccaagcatagagcctcattatgatagcagttgagacacagttaaaattaatgtaaatgttactcaagtttaaactgtttctctaatctccgatttacagatgaagtggggggcagaagtcagaagttaattgtcctttggtgtagtctgctgttagaatactgagaaattgatagaaatggcagcactgaggaaggattaaaagtatagatggcaagttttcattcttaggctgttgctgttggcattgcagggagaaggttgaagtagacatgatgatgaatatcagcaaacaccttgaacccctccttactctgggtaattacagatgtacttccaaatgaggtgtctgaagttctgccctctgtgaggtgaactaggggtggaaaattagcacttgaacgtcttagcttagaacacattggatgcaataactataggttgtgagctaattttctttgaagtagatgtttgcctgtagctactattcatgtatctacccaagatagtatcttcctttaatatctaggttttgaaattaacggccacacactgttaatgaaatagagaaattagattgtaattgatcagttgtcttatgaaaacaatagttgcaaaagccagttggttctgagagtcaggataaacatgaagaaaagtattgatcattcaatcccatgtcaaagtagaatcatttctgcaggaaatgtagtttttgaagatgtgatcaataataagatcccactgctggagaattataccatgtcgatagctatggttatttttgtattttcatttgtcctttttaattgttgttgttattgttaattctgccttattctctgcactgaaaagaaaggttgggtgatgttctgccccccccccttttttttggcactttgaggtgacattataacataaaggttgttgcttttttctctccaatatttgatgtattttcaaaggctttaaaaaggaaataactaaatttaaagtaccacctgtcttgtttaatttgctttaggaatttatccctatatgcttagttagaatgataggattgatattgcgtagtaatttctgatgtttttgttttagtttgtcaaaagtaaaactaaatagcatgaatttgcgtctgtaattaaagattgaccgcgcttgaataaagttttccattaacttcttcaaataatggagttcacttttaaggatttccctttcctcagtgtttttaactttgattctaaaatgctggttgtagggatcgctttgaaactgctttatctctgtgtatgttttgaagaactgagtaaggatgaacacttcgatttcctttgggttactaaagactttgctgcttttctgatttaggagtccaaatccccttaaggattaatgctctcagaggagctcagcacaactcaaaatgaagattaaaattgacacaggattcttctacacatagtaatctataagtatgggcctttatactacagaaccttcagacgtgggcaaagacacttgactgtctctagttgaaacctgcgctaactgtatagttttgcatagtttatggtgatattgctaattagagtgttttgttccagaagaccggaacaaaacaagttcaagttcttttcgttatcctactgtcagtcattcagcaaaatgagtgtctttaagagtgaggctcctgcacagaaccagaggcacaagcttgatgaggcctggatcctacactgggtacatgtgtggcctgtgtgtatacattaaaactgcaaggctggctggcatacagcagttccaggatataaaaaaaaaaagaagtaagagtttgtgaaggtattgtctctaagctaagatagcctcaaaattggctagagattcttgcacaatttatcattgataatacaggttaaataaccctg

SEQ ID NO: 119324 - DNA, 1293 bp, Homo sapiens
tcgttttctctctctgcccaagtaactgaagctcaccacatggtggcccagcaccggccttctccccatttgtgaaaaccagtccacttgcccttcccgtaggttgatgccagaagtaacaagaggactctagttcgaagtccttaacatttaataaacaagaagacatattggggagttacaacagctcttgatctttttatgttttattttttctccttaagctggctcggaacacattttctgagccctggaagatctttctcagcccccacttcctaggctcagctttttgttattcctcgtaggtgggtgagctgtagacttccttgtgccctttccaatgcctccacctttgtgtcatatgctttttaacttggtatttaacccttcaaaggctggctgcagtctgtttgtttccatcctggcttttcatggtaaaccttcatcatcccctgagtatgtagtgtatttggccacctccgtttctttgctaatggcatagtacctcgacatgccatatactttttttttttaaccaattacattcaaaaaatacttattgagcaccaactgcatgcaaagcacttgagagtcagttagaatcccaactccataaagtcttcaccagcattccctgggaatattcctaacctccgtggagaggtttcttgtcagtaaccactcatttttccaccacttttcttttgctagttcgtttttcacgtaggtaccgttcctgcctctgtggtggcagctgggtatgacggaggctgcatttgtgcagcctcatgggcctgaatttggtatgagcttagcacccctcacctgctcagtgaccttgggcaggcgaggtggttaggcatcctggacctgaagttttcatcttcaggggattatggcttgggggttgggtgagacacctggtactgcccggccagcagtgatgggtccacagatgctggttgccgacccgttgcctcagtatctgtgtctctgacctcctgtgaccaccttgctctgaaaagccagtatgatcgttcactgggatttcccctcttgcttttggtgaagaataaaacaaagttggaaagagttatcaatgcatgggcaatgaatcctgaggacagatgattaattaatatgtgaacatttttatcttcctgaatgatattgttaaaaaagtataaatacaagcagtacaagaaccagcagttaaagtgtgtctacattggagaccatttcactgtgaatgggtgagcgtgtttccttgggtgcagctttaacgagcag

SEQ ID NO: 119325 - DNA, 1140 bp, Homo sapiens
tccaggacagagccagcttctgagcctaggaggtcgggcgcatatccttgcttttgttcactgtgccctgcctgtggtttgcatgtgagaacacacatctctgtgaataagaatagcccggcaggagctattcttagactgattctagctcatcgttttcccctgtactagaactatgcgcttcatgtagatttataacatacaactagttaggtagatttcattcattattcttttcaaaaatgtcttagcctatctccctgctaaatcctaaccaccgagttttttattggaagtctactagaattagactagcctttaactcggagacccctatggatagagaactggaagtgaaggagttagagcaaagacacttttacaattatttgtaaaggatttatttaacacattatgaagaaaagaggtattgatgtttaaagcctgcatttacttccatgttcatatgaaacatggttcttcaagaaaatttgcagattatgtaatctgaataaaattataaggttttgtataggtgaataggattacgttcaatatatgtaaataacaatattttgaaatattaaactccataaacggagagctattaattctgtagatgctatagtccttgctttttaacttcagaccaaagacaacagtggtcattaatatccaagatggttaaaaacagtttttgaactctttttgcagttgagacccttctgccttgaaaacattaaaacttgctaactcttgattagacaattctaaactaaaatataatcggagaaataccagttaatctttagctagtgaagaataatatcccagacatttttgtctggattttggatgctgtagtgtagtttcaagtggtttcttgattatgtcaaatatattgtaaaaattcacaaaatagcaagaggataagaattattctatgtctctctcaccaataaagagccaatattaacatttctataatttacattcctaataaactcacatggaaacattgttgatatctgtctgtccacataccccttctgttatctttcatttttatttttttcatgtatgattttggggatgggcagtggaaggacacaagcgtgggaatcagatctgcaggtacca

SEQ ID NO: 119326 - DNA, 1170 bp, Homo sapiens
tcatactgtcagttcagccatttctggcaccaaccccaagtacctctctccaaccctgacttccctcccctgatctagatgtgcactttgggctatgcacatctccacctggatgctcaccctggaggagcaagcatctctccctcgcctcctccctcagcaactccaggctgccctgtggaagcccctcttccgctcccccaggctcacatgtttagagtcatccagcatccatttctctagactcagaaggttcctggccatgtggactctgggtcccagttgaatgggttgaagaatgatggacagagggagaggtgaagacagcaagtgcaggcaggtgaggccgtgatgggactgagactggaggaacagattagagagggttcctgaggggagacgagattgtcaaacgtttttaaacaaagatgggagaaggatctggtagggtagaggatggaggttaaaagaaaaagtctttcctgagtccctcagaaggactcagcaacacctttgctgactggtaacatccgacccagtggtctccagttagaactactccaggctacaagtcctttggaagcttgtagagatttgacagcactgggatgacagaggtcaggattatgtgtcactgtgttgttggtcatatcgacaagtcactgaatagtagtgcgtattgcagtgtgaactggaaaatgaattacagtgcatccctaccttgggcctcgcctgccacgcagccttaggaaagaacaggaagctatgttctgatagaggagccattctaagatattgtggaaggaataaccatgagatgtaacaatgtgtatatcttatatatgtacaagcaagacaacaatgtataagatacagcatcttatactacatctagtgtactgccatctgtgcttttaaaagccagggtggtggagaagtctgtattgatgttttcttgtatatccatggagatactctggaggggcccctgagaacccagcccaagtggctaagagggcagggggatcctgtgtaaacaggatcaggctgtggggggctttcaccttaatatcttttatattcttaggtttttgaaccatatgtatgtattataacctctttaaatttttcaaaaatataattaaaaaaaaacctctagcaattaaaata

SEQ ID NO: 119327 - DNA, 1331 bp, Homo sapiens
agatactctccatgagacccattctgtcttgattctgtcctttaaaaaaatctctaactatgtagcttcctttcaataagtacctctccatctgtattttttaggcaaggtgaaacaaaagagtgactttcttgtcagagcttgaaagagagcaagtggctttaaaagtagactttggctttctaaaggttctaagttttaatattcttatattcgtttaatcctaagtgtgtaatgaacatctttatccaattcaaagatgacacctgggagtgaactggtggtgggacatcacagactactgtgatttcaaactctcggcaggtacatctccgttcatggatgcattaacagccaatgggacaaccaacatacagacatctgttacaggagtgactgccagcaaaaggaaatttattgacgacagaagagaccagccttttgacaagcgattgcgtttcagcgtgaggcaaacagaaagtgcctacagatacagagatattgtggtcaggaagcaggatggcttcacccacatcttgttatccacaaagtcctcagagaataactcactaaatccagaggtgagaggcgctcttgggctggcgtgggcttcgcgcttctccctgcctgatttccaggcctgcctggctgaactggctcttcctgtgctctttctaaacctccttttgggccatctcccgatgcccaccagaagggagggagcagaggggaagttgcgggctttgctccatgtcccacctccaatggccgtgaattcaggatgcttggcctgtgctgagtgtccatccccattctcccgggtgtgggtccacccaggcctctgtgcctctgtggttcacctcctgcctggaagctcttcatctggcgggcacggggctccatgaaggcacgtgggaaatgtgtgtgcacgcgctttgctttagctttcatcagatccttaaagggttctttgttcagacagaatttaagtgcccccggggatcccagtcccttcagaatatttatcatctttccagtccccagatactcctcagcggttgtagcagaacacacagcaacagggatttccacacatgctcattgctgatagtgcctagtaagtaagttttccagaactggttgttggaaaggttagaacatgaattttgtgaagtttctagaatcgggagtatttgaacctaacctatatctttccaaaattttaagtcctagtagtttgtgagtagctaggttgagttttgtccagacaagaaaacttaactacagaaagtctgtgtgttcgcccggggtcacataacaaaccagttcaa

SEQ ID NO: 119328 - DNA, 1150 bp, Homo sapiens
caagcctatagtcccagctacttgggaggctgaggcgggaggattgtttgagcccaggagttcaagaccaccctagacaacatagcaaaactccatctcttacaaaaaggttgaaaaatgagccaggcatgatagcacaagcctgtagtcccagctacttaggaggcggaggcgggaggattgtttgagcccaggagttagagagcacagtgagccttgattaaaccactgcacgccaacctgagcaacagagtgagactctctccaaaaaaaaaaatgctttaagattttaaacccaaaatattctttgccactttaacttctggtgactttcaggtaatgagagaagtccagagtgctctgagcacggccgctgccgatgacagcaagctggtactgctcagcgccgttggcagcgtcttctgttgtggacttgactttatttattttatacgacgtctgacagatgacaggaaaagagaaagcactaaaatggcagaagctatcaggtatgtaaaaatgatgttttttaaacattggttgggtgttttgtttttggtaaaccaatcctgatagaatgggcctgaccaagccttgagaataagatacacatcttctcccatggagagacacgagcagcaaaattaattaaatcatctgtctcttctatgggcctgccataaattactacttgccttgggcaaaatcttttctatgggcctgccatgaattactacttgccttgggcagataactgatttcaaggttggtttaaaccctgcaagtgttcggagaatgttctgatgattagagtagatgatcatgggtagccagagttcctattatttgtgccgtgagtatgttctgtcctcaacccctagataaagatctcttccaaatagtaagttaccatttgctcgactctgaagtaaattgtctaggctttatgatgagatagctccgtaacaccacatggagagttttgttttttggttttttttgttgttttttttttttgtttctttaaatacaagtagtgcacattcttgttcagtttcatcctaagttccaactggacagagaaccagatagtaggaaataaaaagcagaagtcctccttgtccctcactcccctcaaggtatccaacat

SEQ ID NO: 119329 - DNA, 1045 bp, Homo sapiens
gccttgatttgcagctcccttggttaagcctttatggtcctgggaagtttctactaggcagagaaagcatttctgtaaaggttttcttttttaaaacaaaacgagtctctgtgtgcaccacatccatttctggcatctcagggctcactattcagaatggccagttcccattccctgaaaagggaaggggctctttgctccagagcatgctggttcattcataccccgtccagaaagagccaccagcttcaggtgaagtcaccattccaggcaaaagtaaaaataaaatttcagttccaaaaaatgccttcagcctatcaaaatctaagtttcgacttaccaatatctattaatattttagaagcagatttttttatacaaatatatgggcatggaggcaaggatatatgaaataattccttttactgtttttctgtagaattaccttcttattaccttgactttgatcatcgcttttatgttaatttattgccccatccgtggtttccagatgtcagcctgggcaacggctataacagtttgccttctgttccataaggcagatgaaattggagctactcagattttggaaacagctgttccttatcattgagagacagttcagcagttttaccttttcatgagtcatcagttactgggcctaggaaatgtatttccatcttgtgtcattgaccccatatcttcaaaagatgacacaactgaaatagcttcatgtagttcttctaggcttatttcaagagtctgcttaaaaggttgtctgacactctgatcattaaaccccagtgtgatctttctaagaatgcctcaggctctctcatttagaaagacttagtgcaactcattcatttgaatgagttaattcttgctcaatgcaaagatcccacaaaccttgggggctaggctgaggtccagccgctaaactctgcaattcctcactctcctgttcatacacacacagacacaaccctcctcacctccctgacctgcccctgccaaaaaatatgagtcatccgtcagtgtctcg

SEQ ID NO: 119330 - DNA, 1027 bp, Homo sapiens
agcctgatctaaagcaaatcccaaaatagcatgggcttgatttattaaacctctgtcctgtgcagaggctgccccacgcctgaccccactgtcctccgaactcctgctgcagccgtaccctccagccctcagtggagcaggatgtgggtacaggcctgagccctgtgctgtttgctcttcttgtttgcaggtcgcatgtcttgagccagcctgtgacactcttgtctctgtatcccccagactgttcagtccacttccacataaactcaggaaatagcaattattgccagataatcagtgagctgtctgaaatcatgaaccaaggccagacccagatcccagggtttttgtgaaccctaatccaccaccgtacacttaacaccaggcagtcttagtatgccctgggccagatttcctctgtgacagcttcttgatttgtcttgtgaagcccagaatatgtactgggctcctgtgtcttcgagggaagacaggttggggagcaagatgtgttgtttatagagcccgagagccacctgcaaattccagtgcagctcatggctgcatgttaccctgtggccttcacgtagggcctgtagtgacagccactacatgcgtgggctccaggctgtcaccaaacctttacaacacgtagtaaataagtctagggtccacaactgctggggaaggccttaaacaaatctcaagtcttcaggatttccgtagcatttacatcttggtaaattgaattccataatagacttttcctttgctcaaatatgcaatgttttgagtaattccccatttatttttcattttagaaacttcgtgaatactttcattcaatttaagaagcccattattgtagcagtcaatggcccagccattggtctaggagcatctatattgcctctttgcgatgtggtttgggctaatgaaaaggcttggtttcaaacaccctataccaccttcggacagagtccagatggctgttctaccgttatgtttcccaagataatgggaggagcat

SEQ ID NO: 119331 - DNA, 1037 bp, Homo sapiens
cctactctacaagccttggcagatctttactttacgcttcccctggagatgtactggtgcctcttgagctgctgctttcaactgggcagttttcacccccgacctcacccctggggaacaatgtctggagacaacttggttgtcacacatgaggagatggccgttagcagaggctggggtactgctcggcaccctccatagcccacgggacagccctgcttagcaccctgcatgtagcccccacaggacagcccccacaccaaacaacagtccagcccagaatgtccctagtgtccagggggagaaaccctgctctaactcaagagcgaagagcctgcatttcactcggcgtgaattctacactttctgagcagagtatctgacgaagcctctctacagaaagtgaataaacgttgttcagatgacttcgacaactcttgttgaaagtgactatgcagatgatgtaaatgatgtcgttcctttcatgagcctttggtgtacttgagctttcagcagcctgaggcaagactggacaagtgtggttttccccactttgcatgtgcagagctctgccaggaggataagctaaaggaatcacattatcaagataaaaagaatatgcaaatagtgcaggctgtgtggcctctcctttcttacagcaggccctccgctgtaggcgagggctacgtaaatcagccaaggagtctcttccagtttagccttcctggtgcccagtagacattcatggagtgcatggaggatggcacggtctgacgcccacaggctcccacgtggaaatcttgcacctctcaggggcctgctggggtgtgaagctggagaatgcccagcgagtacctgagggccttaccccacgctcacaccttgagagccctctcttggggacttcagagactggcctgagggagcaggtggtaaaacctctgccacagcagtccccataaggctgaagattcctggatcccctctgctcatactgggccagtttcctcgccacccgtcctgctgtactctggcca

SEQ ID NO: 119332 - DNA, 1921 bp, Homo sapiens
atccaaccacctggaatggagaacaccgaaggtagggaaaggatctccagggatgagcaggcctggagccggcggggctgtggaggaagaccggccgcaatgagtgagtgctgagcagagagaagggccgttctcggctggtatcaggcccaagagagtcaacaaaggggggacgaaagggagacagggaagagaacagtggtggggctgtaagttgacctccaggtggcagaaaataaagttggaagaattgactgggacagacagccagggccctgcaggaagggcgggagaggaagcctgcggacacctgccctttgtgattgaaccgcagacaccaggcctggcggggtcgcttgcctccgctgcccaagctaaggctccactaagctggtcctgagaacatacttcatgctcaacttcagggatgtggctgtagtgtcctcactctatgctgagaatgaaagaagcacagtctatgaaaggaaaaccccgacagcacagagcacttcgtgcggcagcagcacaccgggagtcccactccctttcctgctgcgtttggatctgccgtgacaaggactatcagaaccactcacagtaaggtcgggtcgcgtttctaaatccactgtttatggaccgtcttttcactgagaagaagctcgtcagttcaggggtttctagaacttctccagactcttcaaaaactcatgactttctccaagttggtaatcccagcactttgggaggcccaggcgggcggatcacgaggtcaggagatcgagaccatcctggctaacacagtgaaaccccgtctctaccaaaaaatacaaaaaaaaattagccgggcgtggtggcgggcgcctgtagtcccagctactcacgaggctgaggcaggagaatggtgtgagcctgggaggcggagcttgcagtgagccgatattgcaccactgcactccagcctgggcgacagaaggagactccgtctcaaaaaaaaaaaaaaaaacttgcaaaccctcatgaggagcctgtccccagccctgttttccagcctctgcctgcatgggaggggcagtgagtcagccacgtgtttgctttgccgcctctgcctgtgtgctctccaagctgcgggtttcacatgcagtaaacggcatcaagacattgacagaaggtgtatgggcagtcttacactgtctcagcgacttcagggccaaaactgtcttttgtgattttgcctcttttggaagtggaagccacctaccgaaattgtgttttaccagagccccaggagctcatagtcaaggctttgtgacatcagagttgttaggaaggttaaccgggcaagataaacgacagaccaaaaattgtcccctcaggccagtgtggagtttctttatcagacatgtgtgcaccccttcccgccttatctcggcatctgtgagcctgtcatttgaatgatgtaaaatccatacatgttgtactgagaccttaaaagtgatctagttcagtgtcatgtattaaaaaataaagtgatctagaatccaggacaaggttaaaattaatttcatatatacacatatatattcttttaaagaaaacctaatgttagctttctccactgagccgtgtgaggtgactgtagccagcccctcaagcagattacggtcatttttcgccacattcaagccctggatagttctgtcttttcgtatccaagcgatacaaggcagcctccaaggtacgctctagcagaaacggtcgctgccattagaatattttttctgtatattaaaaacaagtcaccattggcctcccagataaagaaaaggtttggtaggaattctgtgcctggttcaaatccttaaaattataaattgcctaactttgcatatgctgattttcccaggattgttttgtgtattaa

SEQ ID NO: 119333 - DNA, 1046 bp, Homo sapiens
aatattaactgacacgactcccatcccaggcagacaagcaaccctcattatgaaaattacattttgtttagaaaaattccctcaacaggcatccccagagctttctgggcatcagcagagcagacgtccagttcgggggtccacgccagtatgcggcagtggcgcggggccgaggctgctcacaggctgggtgccgacagcccagctctcctttgaaataagccgttttgaagttaagaatgcacccagtgccaagtgtgaaatgtgctttatacatatgttaggcccgacatattgtgagaaaatgtctggtaacctttttaacaggtgattgctggaatttgatgattgcctccgtaaatgtggaggcacaggggacccgtgtctgcccgcatgcaccctgctaactggctgcttgttttccggtgcaggtgcttgaggaatccaaagccctcgtgcgctgcaacatgaagatggagctggagcaggccaacgagagggagtgtgaggtgctgaagaaaatctggggctcggcccaggggatggactccatgttaaagtacttgcagaggaagatcgatgagttctgagtgtcgggctgcccactggtgacaccgggatcgggctgagcaggagaacatcaccggctccagttcccctgatccattctcacagcctgaaacaagctcacccgtagcttacgcttggaagcaggactgggaacatccacgctatttattatcgaggagttttaaagtactgtaactttaaaataaataactacaaagcttctttgtccaaacgtcattattttatacttatatacacgcaggtgtaaaagtataaaggtgagcactagactgctcttagaagctctaatttttgttttctttggctagtactgtataaaaaacagaattgtgttttattggttttggatgacagaaaagtctggaataatgtttgttttcctcatttcttccttctagaacacagaatctaaaggggtattagccagcctcgcctccctgccccacgtagagaca

SEQ ID NO: 119334 - DNA, 1020 bp, Homo sapiens
aataaaatatttttatgtttataaagtgtaatttttaggttcacttagaatatattttatttaataagttaaaattcttttggcacactattaaatgcaaaaactcctttcaaaacaaaaaagaactaccttatattcaacatttaatgttcttggcctctgcttttatgtctatacaatatactgagttcagtatggtgtccaagagtgccctgtgtggatagacatgtgcactccttccaggagtgggtactgattccagactccagatgcctattattagttaggcttctgagcttgcaatcatattgaatgtatgaagagcgaaatcaaattcttatttttgtacagttttgaagtttatacttagaactgaccacctccccggccacgcggagagctgtacagtgtgtaaatctgcctttatcttggattgattggtacagtatttttgcatctgtgggacctaccttttcgttcagtagtttgaactatatataaactgtacaatctgtaaagtttttatagaataaatattcagctgtgaaaactggttaaataaaactaatatttcttaacacatttgaaatgtttctctgattcttgtgagatttctcatgggatgttttctctttcgtgtgtgtgtgagatatacatgtgtgtataaagcatctgtacagttcaatggaatgaaaccctgtgtgactaacacctaggtaggacctaacaatttgaccagtatcctccctggtcaccttcacccgggtgaccatttcctcactttgtgtccatcatccacttctccttcaaagaacttattcctaaaataaattacttttagttctacatgtttttaacctttatatcatatcacaaataagcttctgtgactgactgacttcattcactgttaagttttctcttacgtagagttgtaacttactccttctttacccaaacctgtcgtggctgttttcactcctgttttacagatgaggaacctgaagaattaaacacttg

SEQ ID NO: 119335 - DNA, 1060 bp, Homo sapiens
ggagaggagatctccgatgtttcgtgcaccagtttaactttacatgtgaagaaactgaggcccagaagggtcaggccacttgcccaccatcacacagcctgttggtgacctagcacctgggaagagagggctacactccactgctctatgcactcttcccttaagtgggaaggcaaggaggggaccaatggcctgtggtgtccagcccatcctggcatcccatgggcctgtgattctctgcaagtgagagtggtggggcagcatggcagaacgggtggttccagcctgcccagtggctctggatttaggctattttcaagtcaacgctaaacttaccagggaattctgatggtctacaagctttctgcatctgtaagagctggaccagcccaccgagctctctcaatactaactagcatttaaaaataaataccttcactatttggcaacaggggaatcctctcctatcacaggaatcctctccctcttccctagggaacgttctgacagcatgtctgtctgaagaagcaaacgaatgtctgctttggtgaaaatgacattgaatgatttcaaccctggtttaaaacttacttttttggcaagataagagactagcatttcaaaatttaaaatctgttttatgacctttagagtcacaagcacttaaatggctaataaatggtttaatacaggtattagaataaaagctaagatctaatgtatttaacattaattcttattttcttaaattttatatactaaaactgggtaaattatatacatatatatgtctatcacctgtatgaaacacactgcataggacaactagacagaggatcaacaaggaaatagaagactggaacaacattttaaaccacctagacgtaacacacctatacaacccttcatccaataacagcagagggcatatgcttctcaagtgcacctgggacattctcgaggatagaccatatgttaggcaataaaacaagtcttaaaagtttaaaatgattaaaatcatacaaagtatgtcctccagcctcaatggaatgcaatgaga

SEQ ID NO: 119336 - DNA, 1146 bp, Homo sapiens
aacttgtaaatcttcaaggaacaagtgtcaagaggtttctgtggagaaaaatactctacaagttacccaggcagttctcttcggtttggagcaagggaacagtaacacagcacaaaactacaccagaagccctccttttaaggagctaagattgtgctgaattctcagtgtaacctgctggatcatggggagtagagtgtccatgcaagcatattcctcagaatacaggttacggaaaatagtttctcctctgggtgaaagttattcaatattcgctttagcgaagaggtcaaattaaattagttagttggcagccagtgagatccacccaattccgaggaaatgactgaggccaaagagggtgcttttcatctcttataattagagaaataatggtctcgttttcctgtggccaacattggtgttggccccaatggcatgttgcccctaaacccaggtggcattttcaccacgaggctccttcatgaattacttgggtccattgtaacgtgcactgagcacttggcctacactccatccagttcctgtgggggctgtgaggacaggaggatgggatgaacctgctcctccctttgaggagaagacttttaaggggactgccatccctaccttgacctcatcagttcttggctcaagctgatgtgctagacggttatccccaaggaggtgcatgaacacatggaaagagacggagccttgagtcagctgggaccctttccccggggaggagagccacccgggaacttcctggtcttggagctccccctccctgacctttctcccatgcctgggccccagtgtagctgtttagaaagacattgctcaacagcacactggctggagcttcacaagcaccattttcctgtagtggtgaatggaaacttttcttagcagaatgcttgactttacagaagcaacagttttctcggataaaactccacgtgcagtgatggattagcagctcacattgtgtctatggcggctttccttgttttaggacagggagagtcatggaaaggtggctggacttggggtagagcttttttctttctcttttaatatccatgggagggggttggaggagagacatcaggggcaagctgggcgggaacgagctgcaggagc

SEQ ID NO: 119337 - DNA, 1037 bp, Homo sapiens
ttgttttgggttctttttgtcttaaagacctcccagaatgagggtgggaacagctgaggtttgtttcatgtgttgtatattagttaatccttatggagttcacagtgtgacatcaggaacttatcacacacctcttgattttcaaaaattaaagctaagatctaagctttattagaatatcagaaatactacttatcctgaataaattttttaaaatgcagacattcctaactctcttttaaaactctgtttaacaactacctttttttcagtcactactttgatgaaccgaagttagctccatgggttacactgtccgttcaaggctttgcagacagccctgtttcttgggaaaaaaatgaacatggttttcgaaaaggaggagaacatttatataactttgtgatttttaataatcaggactattggcttcagatggctgttggggcaaatgatcactgtccaccataaaaaataaaaattaaaaatcgtgtttacttacatttacgcttgctttcagatttcttaatggtaaaaggtctgtgtgtccactcaggcttgtgtgatggtgacatttctcagatcagcatttgctggcatcctgccctgcacctgagacccatctgtgatggcagcaaggcctgctgtccagtgaatagctcatagttgatttctctctgtcaacataagcacagggttgtgggttactatgtggtacactgggccaggatgtccagggaccggggatattggtccccatctcactccattggttgagatatattttgttcattacaactttttcagataataaaaagaaatctcatccttaccagggccagtccctgttgtaagtgctgtttatatattaccatgttagaatctcacaccaaccctttgaggaaactgaggcacagtgtgtaaatacactaccgaagttatagtggcagtggacctgagacttgatctcaggccagcctagttcctaagtgtgttctcacgctaatgcctctggatcagagagggatcaatggata

SEQ ID NO: 119338 - DNA, 1047 bp, Homo sapiens
ccagtgccaccgcctgttgctgctgctgctgcaggaacttggccgcctgcaagatggggtcggcgggcaaggaaaaggagcgcgcgcggcagcggcggcggcattccagcagctcctcctgctcctggggggcggcctcttccttcggggacaggggcctatcccctagctgagcgtcaggactcggggtctccgaagcgccaccgccgtcgccgccaccctgcacacaggggaccaccggggcgggcagctcctcggccggcggggcctctcggaagggcgctggtcccggcgcctccaaacttagccgcgcccctatgggctccatgacgccgttcgcccctggacttgctcgggccgaaccgggcccctctggagacttaactaactcctcgggccgtggaaggagcgcagggctgcagttcaggctcgccctccccgaggcgagtcgccccaggctcgacaagacaacgtagttccactttggagcctccggcttttagctgcggctgcccagggcgaagtgggaggaggatgcgggcctggggccggctccggggccacgccgcctcccggttgaacctgcccgcgacgggggagggccgggggcggggaggcgcggccgctgggacacctggaagccgtgttcccgagtgctccggtggaatgcggggggcgactttctgtcgttcgcgggctccctgcagccctcacccgcacccccggcggggctcgcgtctgttccgcttcttgagtgcctcgaagtgggggtgcagagctcgcgctcaaccttcagagacccccacgtgcacaaagtcttcctgcccatgaacttggcctgacggctctgcccccagagggtcactgagcgctctcctcttggctgcctcacgggctggggagtccccggtgcagcgcgcaactggggaaatcttgcctacgcagaggctggaaggaggcccattccgcgccgccggagagcggggagcgcatcccttcccttctgctcctgctttccccaaacttcagggcgccccgggttccaat

SEQ ID NO: 119339 - DNA, 1010 bp, Homo sapiens
tttcagaggggaggaatgggtgtgtggatctctgtaacttctcacagtgagggaaacgggggttggatggtgctctagtggccggctttgccccgcagtgcagttgccggaagggagcagccctgggatggccgacgtttgtattagaaatgttaggaaatgttccttctggcctttcccaggggctagagggccacggttcctgacctgtgtcctttctttgccttcaggtccacattggccaactgtattcaactgacaagctgatcattgagaatcgagacatgcccaggacctagcaagccggggaccagccaccagtggcggccagggaccaccttcagcatccactctctgtttgagatgggggctcccaaaaccagcttacaatagccttttgcgctgcctgtcctgtgggagctgataaaccaagtcacatttgcattctgttgcaggcttagtgaaaaaggactgctgtctttccttggttcaagtgttagaatggagagctggagttcgttcagaatagtgctgtgtgttaccacgtctcccctgcaccccattcctaccttgtagctcatgaccattgtgtatagcatttctacactttgtttcttggtccttggcaataaaaagaatgatctccctgagcctttgaccccagataaacccctcccaattaatgcattttcatttcctactgatacaaggcctggagagggctgttgggggccctcagggagggttcaactctgagacgagaactgccttggtgaaggcaagttcaagcaccacttgagactgggggcagcatggagtagggcagggctacggggatacacggtgcaccctgcaacttatacctgagcccagtacaacaaaggtgacgggtgtgtaggtacacacccagagatggagcactgcagatcagcaacctcagccccacctgggaatttgctggaaatgcaggctcaagcccctccccacacctggtgaatgagagagcccca

SEQ ID NO: 119340 - DNA, 1041 bp, Homo sapiens
ccccagggtcttgaagggtttgtttccattcccctgagcattatactcagttggtgctggtggcctggctctggccaggtcactagcaaagggccaaggatgtgaaggtttttcatcactgtcttccaagggagaggaagccttgtgtttgcacagctctggaagagtcattgttctgcatcagaagagcttaggatacttctatcaaaaagtaaaggaaataatcttcatatctaaagggcttaactttgtggtaaactctgcagctttctataatagggtcccaaaggtaagtgacaggaacgtattactctaattcagaaataaaccatgtgcatggtgaaaggcgatgtcttcgcaaactgcccagaaggaaggtcttgtcccaccaatgggcagtgtcctcagggttagacccagagtcagtgtccctttgtcttgatgctgagaaaagtggatcagccgccttgtttgaaccaaaacgcacatcagaaatgggtccaaaggaaagccacttactgcaggctgagtttgtgggattcagaggtcagagtgcaaacccagagcttttctcactgagcttatcatcaaagccttcaaggtttgctttgcctaaaaagagctgagtccctcagatatctcagtttcctagttcatatgagtacattagaacgtcttgtccctaaacagcatgaagaatgctcctgggaggggtgcctccctctgccaggctcagctgcaggcttgtggcaactccatgtgtggtgaccactctgggattcttgttcctcttctgccagggcttgccctgagaccttacacaggtgactccttctcttggaattcattccttcgtccagcagagtggctgaggcaccacgcgaggcactgggaacaggccagggtcactgtgctcgaggaactgacaggtgaatgggggtgtttgctcacagcctgggtcatgggctccatcccggctgcctagaccaaaggttccatgtcgaggcaaccaaagcatgtgataggccaggactagttgat

SEQ ID NO: 119341 - DNA, 1046 bp, Homo sapiens
actggctgcccaagagaagccccaggcccttctctgctggtagcatctgctccctccaggtgctggcggcatcacctagtcatgcaggtgacatggggcctcacacaaaaaaatgtaaataaaagcaagattgatgagcttggtcataccccatgtagtagttcatatccagagtcctgtgggaacatcgaagtgtggacaaagaggaaaccaaaagaacagtaagagggttcaagagacatgttcacaaaatagttatgaggagggaaaagaggagggaagcatcttctccaaatgcacgtatttgtgactgtcacttcctctcaaggggcactgaaatctccagatatgatttccttccctgaagaggaagaagttaaaggtggctcctttttatctgccatctgtcagccaggcagccttgtcactttgactttcttcaaagagatgtactccaccactatgaagcccagtagttccatttactcctgagtgaggggtgagctagggacgcaatttgtatctacgaggccacagggcattcttattttgcaactccatatcacccctgtgtacagctgggagcagggtgtgtgagcggtgatgggtgccctgcttccaggatataaatgtcatcactgcagtcctcttcactatggcagcttctataaaatatttctctgcagacagtaagaaacctaaattgggattttcacttaatttttattaatccaagcagaaccaagtttgctttatagagaaatcaacaactgtaagacaccctctcccattgcctgcccagactcttcctcgtccaggtgctgatttgtctaccaccaaaaaaattgtaaaggatggtgtaaatgtcaatttctgggtttcatactatcctataattcggcaggatgtctccattggaggaaatagggtgaagggtacagggaccctctctctactattttttgcaacttcctgtgaatgtatatttatttcaaaattaaaagcaagggttaaaaatggtaaattgtaatgtaacaatgttgttt

SEQ ID NO: 119342 - DNA, 2067 bp, Homo sapiens
taaatcacttatacaatagctgtgaagagccaccttccagcacttgagaacccggcagccagtggctcacaaaggcctctgtcgccatctgctggccgcatgctttctcatgctgttaattcttgctctggtattttttgttcccgcagcctttggcactcaggttcttctgctgtaaaatttgcctccatcagagctgtattgccttgtgtttttgaggcttgcagaagagacccttagcactccttaaaattctggcaggacagagaaaacaagatggagagagatgacaaagccgatttcttcctcctggcttttttttaaccagttctgtgcactatcaggccctctgagcttaggcctatgccagccacatctcaaggccaaggacacaatactcggtttgtctttataataggtcctgttattgtgtctgtcaacctcccgatgtctgtatcacagtcaccaatatattacgctaaggaaataggaattattcacattgccagtaaaacttgcccatgtataagcacagactcacacagttatgggcctgaagaccatccccagtggcgaaactgtgccccagaggttgccataagtcactggagccagaaggcatatttgatcccctgtgtaagattggccaccgtaccctgaatgacagtggtgtgctgactcacacagaagatccgcttgtggtgcaggcttggcctcctcaatgtggccacaggccctagagcgctaacagatgtcacttatcgggatcacccctgaggcattgtgaacaggaagtggcatcactgatctcccaccagctctgaaccaatacatgtggcatcccaacttccggagaggctggacagagcatatccggaatgcagccacgtggggagtcagagtagggcaaggatataggagtgctgatgaaaactgaaaacacaggggaccggcccgcgatgcggcctcctgggagacatctgcatgaggccagcaggccaagggtccatggctggggatggctgcgctctccttagggaaaggcattccagaaactgaagttacgaggcagcgtagggaaagcatcctgggctcttcaaatctgggcatggctgtgagtcccaaagcgttgtcagtttacaccatctcctaatgcaagggctaagtcattagggaaaaaatcatgtttcaggttttaaggggaaaaaatgaaaaggtgcatggcctttacctgtaaacagtagaagggggtggggaatggttgaatggtagaaatgaaaatcaagaaatctagcaatggctggtgatttaaggaccttgtatatcagttattgctgcacagtaagtcatcccccaaaacttagtggcttcaaagaacaatcttcatttattgccacatcccacttctataggtcaagaattcagacagggcatggcgaggggggcttgtgttgctccacagtgattgaacctcagctggaagattggaaagctgggggcaggaatcatcttttacttagctgtctggaggttgatgctagttgtgagccaggagtctggccagggtgtcagccagaacatagcacatatggcctcactgtaacctgggcttcctcacaacatggcggctgggttccaaaggcaagagtcccagcagagagagccacacagaagccatattttctctacggcatagcctcaggagttgtacagcgtcacctccactgtcaaggttatagaacctgtccaggttcacatagagagaacacaaaccccttcactcagtagaggagggtccattcattgtaatacaatcattggaaaacaccatctgccacaccggtttccttatcacctgtacccgcatcccccccgacacatgcacagaaacagggcagcctgtcacagaccctcagcgatcatggcatgggtttgtgctgggtaaataggtgcgtttgtgggtcagctctgcttctggtttgtagtttgacctggtcttaacctctctggatctcagtttcttcttctgggaaacaaaaaggctgagctccaaacccagtcattgga

SEQ ID NO: 119343 - DNA, 1221 bp, Homo sapiens
ctaggactgaatacgggaaacatgctactaaactgcccctgaactcacaggcttgtgatgtgtggtggatgagacacagcccgtgctgaggcaggcaggtctgaatccagtgccagaagcaccatgtgccatgaggtggcattcgaatatttggagcaatgaagcgatctcattgaatgtatatatatgctagaggaattgcaatcatgagaaaaattaattgcagagttgatcgtagaggcatagtgtccaggcagaaacctaatccaagcaagagatcatttgacggctgagggaagagagagccaaggggaatggagtggaatggaatggaatgcaggaactctagaggggatttaaaggctgaatatgctggtttgcgggcttgagttaggagcccacctctagcagtcaatattactagagcattggtggtgaagccgtgggtgtaaataagaccacgtgaagtgggcgtatattaaagacatattggtgacctttctgatgttttctaccatttcatattaataggcatgaggatcgaaaataggaaatgatttttcttttctcctccctggcagccttctctgctgtgatgttttttcctcataaggctggggtcctattgctttcccttctgatgaagcttttttattacttggtgggtagagggccttaggtgtggcagagaaattccgcagcctcgccctcgccgtcatagtgatgaagagcgttgactccggagtcaccaagggaaattaagcacatgttttattaatctttatgaacctcagtttcctctcctgcaaaatgagaacaatactggtgccgacttcgcagcactgtttgcagcgtgagggcgataaggcacttacacaggcgcgtgccccccacatggaaatgcctggagatgctgccggctcctccactcaccgaaactgcactttctctcctttgttctaaatgagaaaccaggtgtggggagcaaatgggagaaaggggcaggagaagcttgcctcagattccaactcatatgacctgtcagtgactaaagacggaatgccaacacatggattgtgtgtgtgaaatgccaggttggtgttttccacagggatgtgcccgttgttctctgctttctgtggaattctcttccagcgccaggcctggagatggggcctgcccttttacctctcaaatatgttcccagggaagagtgtgtcc

SEQ ID NO: 119344 - DNA, 1059 bp, Homo sapiens
ggaatccatgtataaaacaggtagtcacatgagcatatgtaaagtttggttaagcaaattcaaggactttttctacttacctagggccagtatattctgtggacattgataacccatagtttcaactgtaacctcacattgatccccagttttcagagaaagaggacaccatctacttctggtcactggcattttaggtgaaatcctgcagtgattgtttactggtagcctaattaggtacgttatccattatttaacccaaaatccaggttaaaatatgacatcagtgactttagctagaccataactacacacgtttacttcctggagtcattaaactgcttaaagaaaacaaaatcccagcacacccttgttttgttaaggtaacaaaatgagctcgtatcaaacataaatacaggtttaaattactgtaaaatttttttgtggactcaaacacaaacatcacagcaaagcttacctgtgacccaattaggatcatcatgaaaacataaatcccagttctactcaagtaataccaatggcctggtaccaatggcttccagcaggccactggggtttgactgccaactaggaaaagcccctgcctctgggggatagatgatggggaaatcattccatccatctcagtgctgagctctcacatgctcttctgcttttctgtaaattgacctaaaatggccatctttgatggtctctcactttccctctaaatccctgatgtgagaatgtattggaattatttcatgtaacagtgtgtctgcccacagaccggcctcctggctccagcttagcagtgtccaacagtaaaaatagaaaagcccctgagtcttgtcttcttttgagaggaaagaacccttttgcagaaggcccaggaaccccctcctctagccactttggccagagttgtggtatgcaattattcctaagctgttcactggacaggtagctgggccccaccacaactgcctaacgtcaagcaagattgatgcctgggggctgtgctgggaagaggcccgcttcagggggaaattggggctg

SEQ ID NO: 119345 - DNA, 2205 bp, Homo sapiens
cctgacctcatgatctgcccaccttggcctcccaaagtcctgggattacaggcttgagccaccgcgcccggccgaatccgcctttctttttaatctgtatgaggtgttgggttgtcttctgatgtttccatctgtgtcctgtgtgatcgtagatactgcatgccactctctgtccagcacgtgatgccctttgcaacctcctttctcacccaccctggggcttgggagctggagatgggggaataggggtggtcagtgaaatattaaaaatcagactcctatagacacagtttgcaggtgttatatggagttccttctactgtttcattctactgcattacatttttatgttaacttaataggctaatattttatgaacttgtaagattgaatatatggaatgaaatcaatgtttctgataattacttgatggggtggggagtttcaggagaaagtcatttaaaacctccagactgatattgattaaaattagtggcttaaagatttagaatatctaatttatagggtttttttcttggttgactctataacttaggtaaaaaaatgtttccgtagcttttatgataacatttagcaggtaattttctttactagatgtagggaagagccagcaatttacaatcagagcattccatatatccctgtttagggcgtttcagggtttattgctgcaatttagcatttttatctgggatgttcaacttctaagggacgggctctctgtttgctgttttaaaattattagagtctttcattgtatctgtctgtattcacagcatatatggtcatttcatttgagtgttcatgaacagccctcaatatatcagtgattactttatgtgtcgagcaccgtacaacagtggttgccagttctgactacacatcaggatgtatttttgaagacttacagaggtgattttgttgagcatcactgttgaaaaccacaggttttccaagagtgtccgtgtgtatttcacatggctttactcgtcaggaggtactggtgattgcctctttcacaaaagaggaaactgaggctctggaaggttctgtgagttgcccccggtcacaccgaacagcagcacttcatcaagttagtttccagatgtccagcttctctctgcccagctgggcaggcacaagagacttgctgtgttatgacctggtgtcttagttttgtttaagattagcaagggcgccaggtgtggtggttcacacttgtaatcccagcacttttggaggctgaggtgggcgggtcacttgaggtcaggagtttgacagcaacctggccaccatggcaaaacaccatctctcctaaaatataaaaattagccaggcgtgttggtgcacacctgtaatcccagctactcaggaggctgaggcaggagaattgctggaacccaggaggcgaggcagagctgagatcacacgactgcactccagcctgaacgacagaacgagaccctctctcacacaaaaaaaataataataagattaccaatggttcaacagaaacaaaaccaacagcctagtgtattgtgacagtcctgggacacagaggcagaattaggtacgtactgccttcatttaaggaacctgcaagcccagcggccttaagtatgctactaaggatatagtactagttgtcacataaataaaattctaaatcctgtcattaaataagccacccttatgcctttctcatctggcagcaagtttgtcagcacagggcagtgggtaaagagttgccgtctgctgcgtgtttccatttgccccgtgacctagcctggaattcctaccagccaacaacagaggaggcccaagaggaaggctttccccagaaacacgcagtcccatcccctggaaacagttccatgagcacattagcttagctgattatgagagtagctaggcatcagctcaggcactgagtaaagcagacctttgtaatggggctgagggaggaagcgtgtacaacagaggggaacagccaggccggagacagacacgcagctggggctgcctcacttctccgtttgcctccaccagccatgccttctgactggacattttcaccaaagaagatacgatggggtatagtttttaaaaaaatattagaaggatggcagattattaaaagccagctctcgccccctatttaatctagtacgtcatgccggcact

SEQ ID NO: 119346 - DNA, 1041 bp, Homo sapiens
cactccaaagacctggaccattagcaggcacctgtggtcccagcacctctcctaggacccaggggctctccacctgaagcacagtgccttgctggaaggagccgcctcttggccactctgcagaaaaaggggctgtgagcctcagcttcatgaacggctgccttgcatgttgagcttaggctgtatctttggaacacagtcttcctcttcagagctaacttcgtttcatcatcctggatttgataagggttattcattctagctctttgcctcctattttggcaaacactccagaagacagatgataccatcctattgaaaaaatgactgttgaataacagattataaatctgtgtgtttcctctggagaactgtgtgtgaaatgagaacattgggtttgtccagcctgcctccaaacatatctcaagatgtttctctctgcctgttgtccttagccataggagacaactaatgtgtatttcacagggaacatgtataatactttggaacatacacaattccgagaggtgtaacataccagagacctttgctttttcctttgctttgcttaatgccttaaactttcctaagtgctcctccgtacattaacatgtgagccttcaaagtagctgggagaggctatccatacgttttgctgccaagaaaaacaggcccaacactttacaacagaataatggcaggaccagtgtgagaatcctggttttctggtaggctggttccctgacatcctggttcagcaacgtatcatccttaaaagatatataaatgttggcatgactacccagcctttccaacacccacagccagtgaaacccagttactgaaaaatgatggaaagtaccagcatcagtaatttccttctgtgtatatgatctcagtggctgaggaattgcctagtagcctagtaaagacggactctgaaaactgtcctgtttctgtagtagtatttattagtaatccatctcagccgggctcagaggctcacacctgtaatcccaccacaatgggaggccaaggcag

SEQ ID NO: 119347 - DNA, 2227 bp, Homo sapiens
aggcatggtggtgcatgcctgtaacctcagctactcgggaggctgaggcaggagaatagcttgaacccaggaggcagaagttgcagtgagccaagatcgtgccactctagcctgggtgatagtgagactctatctcaaaaaaaaaaaaaaaaaattaatgcagtcctgggactagcaaattttcttttgcagaaactgagacgctcattcaaaaattcacatgaaaatgcaaatggccaagaacagccaaggaattcttaaaaaaaaaaaaaaaaagttggaatgcttctgccaccagatgccaagcctgttctaaagctctggtaatgaagggagtgtggcgttggtgcgaggctaggcaaactgatcggtgaaacagaacagcctgcagaaagaaacccacttttatacagtcacctgattatgtcaaaggtggcgtgcagtgcagtgggcatggcacggccttgtcaataaatggatttagccaatgggattgctatttgaagggaaagatgtcttgaccccttcctcataccatacatgaaatggattgtagatttaaatgggaatggtgaaacaatgaagtgttggaggaaacaaaaaacacctttgtaaacttggagcaggcaaagacttcttaaacaggacacaaaagagtgaaccataaaaggaaaaaattaatacattggaccatattaaaattatggtatcagagtaactattattgagagaatgaaaaagtagaatgaaaaggaagaaaacatatgaaaaatttatatccacaatatataaagaatcctacaaatcgatttttttaaggctgaaaaccaacttttaaaaataggtaaagacttgaatgttcactttacaaaaggccatatccagatagccaattaacatacaaggattccatcttttattgttatcagtttccctttcgtctaatgagagaatatgtatgtaattcaactattcaaatactctatactaatgacgttcttaaagagtatgtttataaagcattggcattgtgtatgattgcattaaagtacaacatcctttaaatattactgtttaggctcatgatgttttggtgccatagacatataaacatacagaatctaaaggatgcaacagcaggaaacaccagatggcttcacagatacttataaccctttggaaaaagtttttccattaccatgaaatgtgagcaaacagatctcccctgccacctgcctcctgtctttctctttctctctctctctctctctctctcgctcgctctctgtcgctccatctctgagctgtagacatcacatccctgacccagggccacatcaggctcactgtcgagggtcagtagtgtcatccttcgggaaacactgaagggacatatgaggagcaatgatgaagtaaggaggcctcttgtgtgctctgcctggagacttagtgggatttttaaaaataaggtaaatgaaatgggtgtaaaattgacacaaagaccaagttaaaacattctgctctgatacatactgattgaaatcatctagcgagctttagaaactagcagtgcctgaggccaagagtgtagccaggtgattctgcagtgcaggcagggttgacagccttggtggtgctcagtcctctcatagttaaagctgaaatgccatgctcaccctcctgagcaaccctgttaggctacatgacttgtgttgtggctgggttggggaggagttctttttacactttttttctgggggttgttgtaaatcctgggaatgagtaacagaaagtggtaagagtgtcttttcatgaagatgctcacagatttcctaaagagatagacttccctcccttcctaatcaccccttgagaacctcgctgaagataatgggcacccagtgttatctcagcagagagagctcttgcaaacaagaaaggcctagatcgttcatgtgtcccttcgtctttccttctcctcagccctactacactgatcaggagttcatgagcgtaacgcaagtatgtcaatactgtgaaagcacagggctccaacagcctcctccaatgagaaatgtagtggtaggagctgttttaatttttatttcttaaatgctattgtgaatacagatatactgtcatgaaaatacatctctgagatatttacatatttcatacagccctttgcaactgctttcttcagcagttaaaatcttactctcctctt

SEQ ID NO: 119348 - DNA, 1041 bp, Homo sapiens
atttggtttgaatggctttttggttttgacaagtttcaggtgtatatacgtgttgtttgtttctctcccttgaatataacaacttatatcgaaggaaaagaatcaaacactctgaataattcaactttcattcattcacatacaaatggtcccagttcatccaagcgagcttttgaaaaagaatatttcattcctccttgattttaagcaacttatcactttcctcctgtctccaaaagtaaccatgtgaaacccagaccaataatttgtttcatctgtgcttaagtctcacctgatgtggtgatgataatatacatcccaacgtgggttattttggggataaaatgactcggttttttctctcttctactcttggaccgatatcctagaacaaataggacaagtaggaaaaggcttcaatacaataatgttgtctgctctctttctaccctgcccccaaaatcaacagtcagtagaataccttgaaaacaaatgaagaataactgcatgatctattcagcttaaacagtgggctggagtatcacgtgacagggctttctaaaatgattgtcaaacactcagctctccgctgtttatgtcatgatatggccatgtcaggtaacttctgtgctttcttaaatgaaacctttaaatacttgatgtggtttttaaaagtttttctatgaacggctttcaaaactaccacagtctatttgtagtgatagttactgtaatgtgtttcttaaaaaattttaagtttttaatgcattaccaaagctgaggtaaatacaaacacagaacagcatattcttcaggttagctcttcacggcacttgctattctcatgtgtccgaatttatttttattgaaatatgtgttataattacagttttatataagtttataattttaaaaaaaacactaaaattatccatctagccattcagtatactcgtttgcttaaataatctaaatttcttccataattcgtagtttcatttgagaattttttagtgaattatatgtgaagctcaatcacag

SEQ ID NO: 119349 - DNA, 1048 bp, Homo sapiens
gtcactgttatgtttatggactctcttccaatggagtggtgatttacagtgttctgtcctagaaattgatgaactctgagtaggttttcccccattcataattcttcccgtatcccttcaacctaaaaatcatgataaaaaacaatttaaagatgctgtataaatctgccatgtttgataaaacaggggaaatctcatcacctacaatgacagtggtgtaaaagccctgcattttgtatacttttgcttcatgagggttttcgccacagaaagaggtgctttgtcagcacgttagactcttaaaatgtttatacggttggttaacaagcaccagcaaaatggtaacaactgcttatcgattcttatatcgagtacgggaaaaatttaaactccctgatttatttctgcttataaaaatatttcctggctttcttttagccttcactgtttctccccccaccacttcccctaacacacacaccaggaatcatttatttttgtttgatgttggtgtgtctttctcaggcaagaggtataaactggaggccagaataggtcttccaaatgttagatgctgaatggctttagtgattcacagttgtaaacataggagctggagggatggaggactctcccgaaacagtgttttagtgttgtgcctgacaggaaaggagagttagggtaggagctggagagggatgtaacgtagatggatgactaggggtttggttggcattaggaggggtggcttaagggaagtattgcttttttattacacagataatctgtggttattgtaataatatttgagggtagaaagaatattcataatctttttatcatgaaatattattttcatgtatatcctttcaaaatgttattccacagatagataaatatgaatgcatagttttccttaaatggaatcctactaatcatttataacttacttttattatttcctaatttcaaattaacatctttcatcagtaaaaaatatgcctgcatcatcagtttaaaatggacacatagggtacactcaacgcag

SEQ ID NO: 119350 - DNA, 1183 bp, Homo sapiens
cataatttagttgaatttcaaatgtgttaatgtaggatatcattcatagaaaagaaaaggattgtaattttacacatcatgtttaactttttaaagtgtggcatctttaatgcaggtatttgttcttagaactcttattgtatgactgattcagacttcgtgattcattagccctacaaatctcgagaacatacatgaatgtgctcatacagaggttagaaacttgggctagctcaagggtagcctaagagaatattggagacagaaggttctcattccttgagcagtgctcagagcatagctccatgtatagtgagcataacagcgttgatgtgtctgattggtgtgttggtattaacaaacatgtaatggcacagaggacaggaaatttcattacatctctggcaaattcatattgaaagaaagaaggacagatggttgaaaacagccataaaatattctattacatgtctgcagaagtcattagcagttaaagagatgttattaatggatcagattcacttggggagtcatgtttctataatgcacattaaagcaatgatacttccggtatttttaatgcagtcagggccaaagacaaacctgtctttctgaataattagaaaatggatttattggcagtgaagaagctgctcttcagcttgactccagatcatttggggaggttgtttttatcatctaatgtgaaagagtagaatgtaactggctgctagccctataggtcactgaaataatgccatattgctttattagtattttgggggagaaaggaaggaataaaattagtatttctgaaaatcatcaaggaataattttagtctctcaagtgccttaacgtgtctctttagaattaatgcaaacatcagggttttgactttgtgagcatgagaatgatttttggtgcgtgtttctgtctgtgtgataaacaaaacagtgtctgtgagatgctggggagccctttggaccaggtgcagtcatttgtgtggtcctccctttgcagagaggaactttcagccccacaggtccaggatgtgagaacacgagatgctcagtccctgggaggagagctttccttagggcatctcacatttcaaagcagggtagggtcggggcagcttagtgacgctagcatcaaagcaaaaggaagggaggtgctcgtgaa

SEQ ID NO: 119351 - DNA, 2023 bp, Homo sapiens
tatttttttggtcaaaggagtcacaggctcagattcaaagtgtgggaacatagacccccgattctcaatggcaggggtgtcacaaaatgtgtgaccctgttttaaaaccaccacaggccccctctccttagtattccactggccctttatcctggaaacctcaggaaatggtttttcctgattttcttctttaattctcctctcccatcccttcctcaatccagttcaaggataagggcctagaactccacctgtgtcctattccctcttgaatccacaggtcgagcaggaaagtgaaggatgaggctggcatgtgtagaagtgccagtggagggcgctgtggctgactagaaggcctctacgttttaaaggacagctgttccaaacggaggtgggaatgaagtccttgtgtttccagatttcccattttaatgtgaaattagatattgaaatattgcttcataatgttttaaaagcataccatgagatctgggtttatgctcttgtctatgcactggctctgagcccctctttgaaagacccagaactcataaaacaaggcattatttaagattgcacatttatgtttatccccagaaatttccacattggggtctggaatgccattgcttctttaaatactacttactttaaatcatatttgcaaagaattcttgtaactgagaatctaggcgctcaataaatagaccgcatccttccttcatctgcacatgaatggcagcattttgtgcattaattacgtgtgtgatgtgtctaagctgaattggctgaggagcagaactttaatgattagctgtataaaactgaaagagagcttcaattttgacgttaagccttgcttatcttttatattctcagcctttctcgacgtttgttagaatttaaacttgtcctaagcatgacaacatctgttcaaaagagaggggggataatatatgtttatatatacacaccttaatttagtattggggaccttccagttaccaattataagtgtaaagactaaataaaagttatagaaaattagacaaaataaacagtgaccaagagaagatttaagaaatctgaagctaaagatttatttttctgcctgccctccttgaagtaaccattaagtttataaatagcctccttcctctgagaagaaaggtcctagtgacaccaaacaggatgcgacgcgctgagtactctcccctttcattttgaaactcgagcttttgtgaagactatcattgtgcatccgtctgtctctcctcattaccacttctggttggagccggaagcaggacagatgcatatagtcctcatttcaaccacaggaattgactttaaaggtgacactgtccttagtaacacagctgatgccctgtaggggtaaaattagttgtgttttctctgtgcaggtgaaattttaatgaattttttgatactctgtagagcattcactgcaaaatgcgttgtaagctctaaacaccaacagctgattgtgaaagactctttattttttctttgccctaacttaaaaaaaaacagagaatgtttccagagaatctactaaggaaaacatcaggtctgacaacaaaagagaactgagagagcgaagaggaggcagctttctgcactttgcacactgggttgcagttctcacagaatcctggggctcaggacaaaatggaagcttcctccttggacctgcatttaccccaggcctcgaaacaaagccccccagtctatagtttccagtgtcacttcacagatcttttcataccacagcaacccatactgccaggaatctgcctgttgtctccagcacagcttcctattgaaagcaactctatgtctaacctgccttaaagcaggttacggctatattttaaaacccaccgcattaattcaggacatatctttttatcaaatggatttctcttctgcatacatatttaaacatgagccgtacactcagagcaatggactgttttatgaaaggtgattagcatatagt

SEQ ID NO: 119352 - DNA, 1252 bp, Homo sapiens
ctatgttgccaggtgttctgctagacaccagggatataagatgaaaagacaattttagtcactgctcttaagctggtgacactcttaggggaagacagacattctcacaagtaattaaatacttagttaaaaaaaaaatagtggcatatgtgggtatagtgagagcccagggtgagcagtggctttcagaaatgttttaaacaaagacgtcatccccagaatgcattatcccccaagttggcagtgttgaggagcgcgtgaggcctagtatgttcttggaaagaaatctttatttcctgagaatcacttctcatccctgtataaatgcatctgacctgtttgtaagagtatgaaacagacactgctatgtgtgataacttgtcctcgagcccctcaaactcttcagagaagataacaagtcacagcatcttgtgactctagttggatttttttattagtcacggaaataacctggtgccgtaaggatacatttgacagctgtagctaaaaggattaaagaaaatacataaatgaaagattcctcaagccagagcggcaggacagaaacagcatgtcctaacaaggcaacgtgggagactgggtctagaggtcaattcaacaatggtcacctgaatgatcattgtgttgacaccaagagcttgtgtctcactgaatggtgccccctagagaggcaggcagtgcctaggaaggggtcatcccggagagctgggtaggctttccagtcagatgactgagttccaagcgattaaaatgtttgggtgcagtactcctccaaggacatgcttatccctaactgttactgcattactaggaaaacttctttgttcagtctgtaagaggactgtggcatttgaggacagccttaagaagatattaagtagcagagaatcttctacgctcacctgtgatttcagcagtggtcacacctgttaagagcagagttcttttaaacacacggggaagacacaggaggccttgagagtcctctggcagctgtcgatggtgcaactgtattcgcacttttccatattttcccttcctattggcattctcaagttttgtgcacatgtatgacatttacacagtaggggatctattgagatattttcaaacagtcaacaatcctaatcaaaatgtgtgctactgaaataagttatttggagtattaaaacaagtatcttcctgtggacaacactactcatttgtaattatgtgatgggaagcttgggga

SEQ ID NO: 119353 - DNA, 4266 bp, Homo sapiens
gtttaatacctactgccttctaatggggaaaaagaaaatttcaacttcttttctcttaaagggacagctcttttgaagaaggaagagaggttatccagttataattttgaacccctttcttgtgaaactccatgccactcgccatttatatcctgctttagattgttggggtttatttatttgaatacctacaaagtggacatctcgggatcattatcgttaagaatatgtatgaaaaaaatttgtcttcaatgcaggcaagtctgaagataagaaaatggactagattaccacttagtttcttgtataaaagctttgatacacaagaaaaaaaaagtatgacttttggttcttactctttaaaaaaatggacaagtaaaaattgtatgtatttatggtgtgcaacatgatgttttgttagatgtgtacattgtgaaatgatttaatccagttaccacatccattacttcacatacttaccatttgtttatggtgagaacattcgaggtccactttcttagcagttttcaagtatgcaatacattattattaatagcctccatgttatacaatagatctgcagtggttcttactattcttaacagctcaagtggagcattaaataagattcaggcttgccttcttatttagttgtcagactgtttttctccaattttgtttatttctagtcacataattgcacagccgaaagatgagaaattaccacttctgtgccatacacttgattttgtcggtctaaagggggagaagaggggtgtgggaatagagagagaactgaggtttgatgtgaaattcaaaattggagattgtagaggcatagcagaattactcagtagtaagcttattctccagaaatttttttaccaactttattgcattggtgcaagttcattccttttgaataggaaacctttgctatactgtatatgattatggctataataataatagcagttaccatttaatgcattgcttatatgctacatgctataacctgttttcactgactaaggataaaaaaaaatgcatgccactgaaagctgcagaattctacatttaagtatttaagatgatttctcccacagcagatgaaggatgttgtgcagggatagagcacagggaacctttcatttgtgcatcataggaaaggtggaattagaacacagtacttttattttctctttcttcctccaaccatgtccccataagctctagattagccagctagaggcctcatctctgaatgtctttctaaataaatacacgttggctgtaggttagttttggtagcacatggagcctaaaccctggagagaggaaagtggggtgaagggaagaaaaagctttagtaatgaaataatataaatgtgccaggtactttcacttaaaatctaagatttatgctttcattatagtctctacaactgtatgtggcaaatgctagattataaaaatcatgcatgcagattaaatcttttacaataaaaaattctctataacataaaatattctccactctcaggcaatggcctccttcaaaactgatgcatttcagctaaaaaaatatagaaggtccatgaatgtcaagcaaaattagatttaactagtaattcaggtgttatacaggccacactgattactgtcctctctcatggctgattaaaggatgtgtctaaacagtggttctcaaacagggttacctttttaaaatacacatattcaggctcgtagttctgagcccctgggctctcctaaagtcattgttctaaaccactcttaggatgaagagagagatgtgtatgatatacaactaaagtattgatgggttttcaatatctagagggcttatgaccatgtataagtttattctcagttgaatgatcaatttattaattttacacatctaataaatgaaactttaaaatgaatttttgttaaacatttaagcattgattaaaagctaaattatatttctataaccaatttaaaaagcagttgctaatctaatatggctgtttcttttaaagtcttcaaacaccttgaagggtaactaaaacaacacaaaaatagtcattacaaaaccagttactacatttacaattccacctatttcaaaatattgacatcattggtttaattcaaatctcattctttctgcataacatcataggggttcagaaatgtcacattaattaatacctgtctcagttaaaaacaaaagaaaaaaaatagctgcagttacaggacctggaggagatatcacctgattcctggacagggcactggtcaccagtctggactgcctcattatgggcgaagttcatttgttataaagtttacttattacaaagtatgtctggggattgggggggaggtatttttttgcttggttcaacaggaatgctcttaacagcaataaggaacaaaggggatccatgtgaaggaaggagagttctcttagagacagactgagtctaagatgctagcattgtgtcttctaggtacattgagcaggcaggtgaaaatgcagacctagagctcagaggccatctgggcaggaggcctgagtttggaagtcatctggtaagaggtgaagctggactatattacctagagggagtgactagaaagagaagaggctgagaagagcagtaggaagaagagagttgtgaaatgggatgtttggcaacatctcttagagagagctcggcagggaggccagttgagcatggcccgtgggaaagaatggaatctgctcacaggggacctggagccagggcgtggtcaggaggcaggggcaccagacctagaggagcagtgtggtggtgaagaggaggagaggacacagggaccatttgaaaatctagggaatgggcagatgggcccgcgtggggtcttgttttgttttctttggattttaggttgtggtttttataaggatgtaaagattgtattgtgtgtgttgacggggaggaaaaagccaatgcaaaagaaatcattgacgacacaatacagggtagaaaaccattcatggagcctggtcccagggcaatgaggggaaagtagggtttcctacgtgagtcctcgatacatcgtggaagaaaagagggagaggacaaatgagagctatgcaggacaattctaaggcaaagaagttggagaagctcacattttcttttcccaccttgtcattcctctttcaaccaggtttgtggttttgtttttttaaaaacaaacaaacgaaaaccttgtaattgtgtaatcaaatatttcaattatttctttcatggttttgtttatttggcgtgaaaattcatcttaaatgggcgtgatcctttcaaaaaattaaatgaagaaagcaaaactctgtgcataaagtctgcattgtaggattaagatgtattgcttgagaaaagtgaaaagggttcaataataatgtagtggatgtagggagggtgagaggcactccattaacaatgggttcaaggatagctgtacagcagtgataacaaaggtgagtgacatacttcactagcaagaccagtcagtcctgttttacagtgttctggcgcacatgggagagagagattggtgccatcttccccaggctaggattggcaaggagaatgcagcaatagaagttaggtgaagcaagggtatccacgagagcatcgctgcagtgattggtcaccaggtccacgctggcagagcagctgagaggctggaggcaactctgggccaggaaaataggaggaaccaacgaaccagagatcatgttgaggaagagcaagctcaggggtgacagattgagaaaagtgggaagacaggaaactgagtcaaagtctagggctcaaatatgttctaaatggtggtgagatccaagctgcaacctacctaaggttaggtaacattagggaggcaatgaggatctacatttgaggatgctagggcctgtgtagagccaggctgtttggaagatctttagcatagatgctgagcctaaaaatgcagactgaatattgacaggaaaactgagctcggtattgacattgtcacagtaaggaaatcacgagataacagtcacacgcttaggaagatgttcaatcctgccacggtgtacacctgtgccaccatacatggtagccccggggaacggctgctgtctgtggagcagcaggaggtgtaaactgcggaagaatccacaggttctgtagagacctctaggattaccagcccttcagattt

SEQ ID NO: 119354 - DNA, 1092 bp, Homo sapiens
ttttgtggcacatgactggtttttggaattcagtgttttcagtcacatgagagatagtcaagttatcacgctctgcatgcctgcatgtgtgtgtccctcctgtgtatattacggggaaatgattttaattaaataaatatcatttaattgaatatttaatgccagagcctattagaacagatacggtgttactacagaataccaagtgaatttttttctaaatgggctttttcctaagcagagttacattgtgctaaaatacatccatccatctatctatatatcaggagagcatttagaagtcactgctacttaaaaatgttgagcattctcagtttgagccaaattggtttttaaattaaaaaaaaaagcctcaaggaaatcaaatgctttgagtctattaaggaatttactgagactccagtagtatctactctgtgtacttagcataatactttattattccaaaatcaactcagaactgattccaagaaaatcctaggaaaaaattaaagtgaggaggaaataatccctttgtgcggtgtttgaggcaaattagaaagcaggagtctctgaactcaaatctggttctgtcattaaatcactaaaggacttgggaaaattagataaattctttttgttctatctattaaatggagacaacagtatcagcctacttttctagaccaggaaaacaattctttgtgtcagatcaacctctgttatataaagatttcttgaacacagtagtactacagggaaaaccctggattggggagaacagtgattcgattcatagattaggtgaagcatgtactgatttttttagacaggtgatttagccacctttgtgtgttttacttttttgctttttgaactcttctcactctcatggctagcatcgtagacaaatttaaaagctcttaaagtcatgctcatcgacaaaatggagttattagtagctcttaattttcctgtcttaggcaccatgtggaataatgtagagcttcatggtgccttgcggctggaatttcagtcacccgaaatgcatgtcagagcaccaggactagtggcttactggccttcagacag

SEQ ID NO: 119355 - DNA, 1850 bp, Homo sapiens
tggggtggccaaaaaccactttggaaaggcctgttggaacaagtacttcttgcccaaacatctgaacagaaggccctttgctgagttaggccacatggtccatccagtgcccacatcatccttttgcagcctcttgggatggcatagaaagttcatattcctcctgtttgtatgtaaggaggttggacattgggaaatcaggctgcccctggaagttggaacatcaaaggcaagtccaggaaccacatactgcacaatgagccaggcccctctgcctgtcagtttgtctctggacttccatggaatacaggtattgtagacacacaaacccttcacacaatgcaatttactcacctttacctgtgggagaattctatgtatgtgaattcagacatgctgaaaatacagaaagatcatatatagtaatgttcttgtcagggcactttgtttacacaaattcattataaaaatttagaattgcaaagtgtaattcagttaattgagcacctgcaaaaacaagttttggtcatggttattcactgattatggaggctgaagcagttaacttttcatttatgttttatataccaggtgccgcaggcatggatcatttcatgaaagaggatgaccctgcagggcctccttattttgcagatgaggaaactgaggctcagagaagttaagaaatgagctcagagaggttaaggagcttaagactccgcagccagtaatggttgatgccaggatttgagctgaggtctccatcaccatatcatgctgcctcccaataggatcctttaattgcattttaatagaatgaattttattaaaattttaggtagatatactttcgtagccttggctaaccccttccaactgagagccagtgacttgctgaaagtcagagtgcctctctggggaaggcacccacagccccgtgattcctgactgccccgtcttggtgccctggatcttcaggagcgcacagagagaaatgaggtgcagggggtcactgccagcaggtttggaaagacagatggttccctctggagcaacaaacagattagctaagcaggtgacccagcagggcagccccagagctgagcgcagaaggctgaaaagaggatttagccagctcggtgaactgattcacccaaagaaaagtaagacagtttgtggcatgagcttgtcaacccctttaccccttgccagttgatgatgatttgatgcattggtatgtttccaggccactctcagggatctgaaattcttggctagacagggaagagcatttgagcctgcccgtgcacttgcactgccaggactagcaagcagtgccaaggtttgcctgatcacttgtccccatccttgatggggacaagaaaactaaaggaatttttcttttgatggcaaaagaaaactaaaggaagactgatacattccatatcagatacccatgttgcactctaaattactctcctcagatactttaaacccttcacagctggagttttccattatctaagcacttgtaatatttggaaagaaaaaccataaccaatctcaaaacaaccatgattcactcccccacaaaaaatgaaaaattaatcttaattttaaaatattttgttcttatacattacagtacacttggaatttcattcaactttctgttttacacggtattactgggtgaacaaaaggctttctggctctgagggtatcttcaaagacgggacttttaccttataccagtggttatcagccctgactgtacgtcagaaccacctacagtgcttgtacagaccagtctactccagaccagttgaatttgaatctctgagtgtggg

SEQ ID NO: 119356 - DNA, 1080 bp, Homo sapiens
aaaaaaaggagagagggtaagcagtgaggcaagtggttccttccttgtgaggctctgactagcgctcagtgagtctgcatttcacatgggaagagagggagggagaagtcagttacctgtttgggagcagaaggaaggcagtttttgtgtgactcacttcccaagcttccctttccctttggcatcatgagtttggggtccttcgattctgcttttctttcacaccagtgagtcctgttatccttaactaacaaacactcagactaaaactcctcctttacttgaggaagtgggcatatccctttccagaaaagaagccaaggaaactagagtattcccctgtcccccagcccacccccagagtcagttgaaaagaaaaggtgatccatgaggtaagttccagcaggatgaaaggagactgtggaactcttttattttccctggtgccccacgggaaggcatgaaggcacaggcccaggagtacaacaggagtggtttcaagtcctggctatcactcccaagctttatgagtttaggcaaatgactttctgtgggactctttctcttctgtaaaataggcataattgtctgcccttcctaggggtgtgaaggagactgacaatgtttgtgaggcacacagcacagcgctgggcccatgataagtgttcagtaagtaagagacagctgcagcctcatctatacttcaaactgctttttccttactacttttaaaaactcaagtgctaaaacaaatcctgatggagacgttcccactttggtttcagccccataagtgtgcggaaagggagcagctgtccgttcttctttcatgtgcttctgctctccagccgcttagacgcaacacgaggggccctgcccagctgcaggctctcggcatgctgttcttgttataatacacgtctgacttccccggccgcttttcagtgcattaagtggagctgtgaagactaaattccaagtgacagtttcagtgtgaaatatttattgcatgctgataaaagaatatccacctgaatagaatcaggagggccaagggaaaattgcagtccatgtaatctt

SEQ ID NO: 119357 - DNA, 1204 bp, Homo sapiens
tttgagaaaagcctggagctgcactttgtgaaagcttttgacacccagcaatggcaggagtgttgcatggatcatggtgatttctggggtactgtgacctggaaaagagaacctgccttttcctacaggtgataggttatagatatctcatttacgaatgaggtttccctccctggaactcatcagagcttctgagaaggagtgaggtggagaagggggagctggtaaaaatagcaaaaataaattttcctcttgctttgaaccaggttctattttagcagagccaaacttagtgttttgttttttaaaaaataagtatcagctattatttgaagctcactgctgtctgtatagctgttcatgttttttgtaatattaaagtatttttcctactggaaataatttttgaaactcagcctgtttttttttataagacattgaccatacttttttctctccctggcagttcagggaaccactcggaaaatggcttgctcctgtctatttctgtactgtgttcagcctgtcccccgatagtcgtattttatggccagcctctgcagtattccagttgatttgtaaccatgagtctctctccagccagattgcaggatgccggagggctgggccttccatgtccttgggacctagcacagcacgaggcacacagcacacccagtgcacttgtgtctgcattcacctcctcccctagggaaggccttcagtgaccttcctgcccctttcttcctgctgcaatctcattgttctctggaccaacaacacactttattgtgactttgcttaatagcatgatcacattgttttagaatggcattttaataagtcatcctgtccctaccctgtgagcttccagaggattagcgttgttcttattcactgtgatccccagtgccttgttgatgcagaaagcactccattaatgcctaatataataaggccaagctggcttggtaggaaaacgtagggagttccgctgaaactcagaaggatggttccagtccagactctgacttgctttctggccagaagtcttcacctaccctgtgcaccacttagcatctttgcgaatagacaaagtgagatgatgtgcactagcaccctgtggaaacagcaaagctgctgatcagtgtaaagcaaaaagtgaccgaggcagatctcaatcgatagaggtttatttggccaa

SEQ ID NO: 119358 - DNA, 2040 bp, Homo sapiens
gttttctcatctgtaaaaccaaaggattatactgtaatttctaaggctgctgccagttctaaaatcccatggttcaacattcacataaatatctgtccccttcttctctatttacagaaactactgatacatgttagactgaattactctatgcctggttttccttggccatttttcaccaagaacttaacactacagagtttaggctgcagatgaacaaagttatatgccagctatatatttatatcattatagattccaaagacttctcttcatctagcctttctgttagaaggaaacccagaaaattgaattatttcattcatattgttagcacctctgctgttagccttcttccttcctggtagaagatgtgttaccagtactagaatatatctctgatcagacagttttcttccaaagaaaatgaaataatagttgaagaacaataatgtaataactgataggcaaagagagatttaaatgcttttcccaagccccatcttaatgtttatactagtgtcttggtttgatttctccctgttccctggttggcttctcagctatgttccacatcatctgctggataagtaacacacactgtgtcgtttacaattccattgcccaaggtttcttttcctagatatttactgagcacccattctatgccgtataattatgaaatggggagttaccatggaattatgaggtccttccggccttgtagaagttctttctcattttgactcttcagggacctagcactcttcccacttctaatgtcccatctgttcgctcatttaatagaacagggataaagtttaaaagcatacgccagcagcactttcccctatacctttataaatcaactacgattaaatcaaaggatcaatctacatatttaaaaagtaataataggctgggtgcaataaaaatgtaataataggctattgtaataaaaaagtaataatagattcacacctgtaatctcagcactttggggggccaaggtgggtggatcacttgaggtcaggagttccagatcagcctggcgaacatggtgaaaccccatctctactaaaaatacaaaaaaaattagccaggtttggttgcaggcacctgtaatcctagctacttgggagactgaggcagcagaattgtttaaacctgggagatggaagttgcagtgagccaaaatcgcgtcactgcactccagcctgggcgacagagtgagactccatctcaaaaataatagtaataaaataaaaagtaataataaacccatcagaggcaaaggagatttaaatactctgtcttggacttcaataaaaatcctcaggaaagcaacatgaatttatatacaatgaccagaactgccccctaagtgaaccctatatcttttggatataagaagtttttccagatgagtggaaaattccccagccccctgtcgaagtttaagaaagcaaggcaatgagacagtttgtttagttttatagcttggcccctgtatgacattcatttgttcagtctatttaatatataattcctctgcagctataaaaagatgtcttcaaataggaatttgaactaatttcctccctgctttttctagaaattccagtaaatcctcgagtctggggcaacagcattcccatagttggcgttcctgtggaaggaatgtctctcatttggttggagattgcctgttagttttgcttgattcctccgaggatgatgtgcataaaacaagattccatttcctttctaaaagaagcctgtccctatgcgtctttcatatacaacagttttcctttagtgtatttccatgtgctggagtgctcccataaaaggcagcagtaatgctgtgtatagaaaacttttgcaagagtttcatttgggaatttttattatgatatccatccttctcccatttagtcctcatatcattcactgtggaattccttaaagaactgttttgatgctgaagcagatattattaactctggcagagaaagcacattggtctcacaggcaaga

SEQ ID NO: 119359 - DNA, 1106 bp, Homo sapiens
acctgggtggtttgtaggcttgggcaaatagctctcaaacagtctgagcagcaaagaagcaccaaaggatttctaccccagacaattaacaaggcttcgtaggtgttttacatcaggaacagcaaaaaggcagccagattttgcttttgtctttgtactttgctccattttgctgttctaaataaagatactcctctggaccctatttgcaaggcgttagttagaataactatcagtaaactgccctggcttattgtagctctgcagtttgccacacccctttggtttttaaacaactctagtgtaccttgttttgtgtcactatttcctgtctgttagcacctgctcttcgagcatcttctagagacctgcagcatcagcatcactgaggcaccttccttccctgtgtagttcatagagatttagtgttcaccaaagagaaaatattttctaagcattttgaaatagagttgtaatctttgttatagagctagcttcatagcctcatgtctagagaaaacagtaaaatagagtgttgggaatgggaaacaggaatgggaatgcagcaccacagaagttgccagaactgggtttctggattctaatgagattcccctgaacaaatgaattaagatcatgatttcaggaatattcagcaaaatctaagtatttggatgaaaaaatatattgttactatagtacataattgtgcagtaagaagataaactggatgtgttctaattctagataatggtagggttttggagtcatgcccatcttcccatcagcttttcaggggtcactgttttctaccacagcagctgttcttaagcttgtgcttttttagttaaggaactcaaaatagtggatgtattacacccaagttcagaatctgcagttgtaagaaattaagagcagacactatgtacagccattaaagatcattggaaaggggttaacattacacgtagcatccatttttgttaatgtaagtgtgagatgaagcattttcagtgtttcttagcttacactttttttttccttttgtagatcgctaagcaaagtaatttgctgaatttattgatgtttggggtagtggtagttga

SEQ ID NO: 119360 - DNA, 2989 bp, Homo sapiens
acaaggactggaaagcataggtcactatctgggtacatgcaaatacgatcgtcatgtaacctctgaattttttcttcctttcttttaagacagggtctcgcattgtcgcccaggctgaagtgcagtagcaccatcatggttcactgccgctaacctctgagttcttgatttgtctctgtacactaaaggttcaattatccatgtaaatggaatgaagccagatgtgaataaggctaaagaaccaataatctaaggaacacttcagtagcagtttgccatttgtatgtgacttgttgagtagatttattttcctaaatctgtttgcttagtcatcccagaatggtagtggatcagcctgcgccacgagcaaagatcaaagtggattatccgtaggggaagattaaacagttaattctaaaggaaaaactttaaaattcatttgaaagcatagcctcagacacgctgacaccttttcttttttttcctctgaattcatttagaacatatgctgtcaggaggataagagatgccttcagagaaaataaaaatgtaaaggatcctgtagaaattcaaaccctagtgaataaagccaagagagaccttggagtaattcgtcgacaggtaagatggttcaatgatgtactgtttttcattaagagctttaaacttcgacatattccccttgattagacagccgtgcttttggtgttggtgatttacagagcaggatcatgaaactctgttccttgtactaatacagacatgtaaaggtgaactctcatattttcagattcaagttgaacttaaaataccagctttccggaatttccagggagtgtatccttctggaaagctgatacttttaagtatgagaaacttctgcattaatttttttgaaagctaagtttttgtaagatgtatcgcacatgtgtacttggatatatttcagagtataaatatattctccctttcctagtatttttaatcataattcaggataaacagaacgtggcccttttcttgaagacaccattgtgggtggtgaacctgaattacgttgccacatgggaggtgcatctgcaggtgcagatggtgtaaagtacagctgcttgggtgctgaccccataaaggaacctggagggtgtgttagttttcgttttgtggaagtgccaaggatcaccttgacttgtgcttccttttctcattctcatgaggtgggtggagcatgtgcagcggcatgatctcctgcgtggtctgataacatccgcaagagtaattagaacgtcagaggttaaagtcaccgtccactgatgggttttcttgctctctaaaaaacacccttttcactgtttttctttgacttagcagcaatcacgcaataaactccatttctgcttccattcgtgtttcccttttacttgcaggaaatttgcttataaagtgtggagggggaaactctttaccatttttgtaagttatgctgtgctgttttgaaagggcttctttagcatcaagagatgccagcttggctgacattaaattagataataatctttccctgacccttcttcatgcttgactctaaaaagaattcaaaaaagaagcaatatttgaaactataatttgcagtttatgtcaagattaaaggtcttgttatattgcctacataatgtaacagttctttctagaatagcatttcggattctcctaaccatccttgagttctacagctatttagtaatacagtaactgccacactcagacaggcctaggaaatgatctctaactaaagccatgaggatagtaaggtactcagaaaagaaactgatctgcacatttatgtatactttgagagtggcatttatatgagtcagcattttgaaaactctagaacaatggcatttccagtcaccagtagttgaattttatgaggtcctttagcagtggagcatagaagaacaagcagctgagttcttactttgcataaactcagaaagattttgttctttggcacttactctgtgtagaggttggcaaaacaggcaggttttatctttagcgtaaaattatccagagtataaactgcctagaaaagggggattgtaaataatctgtgccatcatttctcccgctatatctaattgtctgtgtcacttcttggtttgaaatgctcaaactacccttgcaaaaaaaaaaaaatactaaactggccctcatctgacatcccagtgagttcccctcccaggacagacgcactggagcagtggcatgtgcagggcaagggcgccctccccagggcagcctggccactgcacgttcccgatggagaatacacacggcgaccttgcagaacagcttgctgtcaccacctcagggatgaaagcattctcatcccttcagagaaccagttagacagcagcagctgggaagtttctactcacttccctttcatgtcaagactcttcctgaatccacatgcagcctttacagtagttagggcgtaaggcacagtggctcccccggccatctggctgcaagctggcgtaagttgcctttggactaacagcctatggcaaggtggagagtctgtattcttgcacactgttctctgtaactggctgctgtagcagccttctgacctgtcctccgggtgcccctgcccctactccaccccacacatggtctgttctccacacaccaccaccacagtgatctttttcaaaagaaagatcgggccactgccccgttcaaccccttcaaggctcttgcttcgtgacaccctaacataaaacctgaagccagtgtgaggtccccagaggccctccattgcactcctctccctcacactccctatttccttgaacttcttgctcccatctcaatgcttgtgcaccacctgcctggaggagtccctccaaatgttcctgtagctccctcccccttccacccaggcctgtgctcagatttcaccttcccataggggcccccc

SEQ ID NO: 119361 - DNA, 1037 bp, Homo sapiens
cagggtgtacctgtccctttgtcttttcaaaaactgcaggtaatttgatggacacaaaatgatgcctcatttaaattttcatttgtttgattgtgactgaggctgaacattcacacatctatatctgtctgtttcatcactctgtggtctcttgtgagttattgttttatgccactaatttatttactgtggtcttattgtcttctcaatttatatgtgctatttgtattctaaggatattaatattttgtgatatttgtttctaactgtcttaggtctttaaagatgaataggagttagccaagaatccagctggaaaaggacgctccatgtgtggagaaatagcaggcctccaggagagaaaaccagggagactgcaagtcttccaggatggccggagttggtggtccttgctggaagctgctaggtggagtgggagagatgagcaggaatccagagagtcctgtaggccatccatgccgatgcagttgaccgttatctcaagataatggaaaaccattaggcatttttaaacagggaagtgtgtaataggttttattcacaactacccaaaaacccgaagctttgatctccaaaatggattttctcatggtaatttcacctgccactccacgagcctccattggttgccctcttcctttttaaaacaattaaactcaattatttcacttagtccttttattaatagctctttcccttgaaatgctctcgtccatttgtcttttcttaagacatgtttggcgctgaactatttataggaacacttgaagcagagttgaaaagttagatgacctttttaagctttgtgatgccagagacaattttttttaatgcctgttcaaatggacaaccactcggctttataccaagtacttaacaaagattggatagggcttatcgacctgtggaggaggaatagcctagggttgaaaatcacaggctctagagtcaactgggttcagaacccagctctgccacttacgagacatgcgatcttggcctacatttttgaaatc

SEQ ID NO: 119362 - DNA, 1009 bp, Homo sapiens
tatgtctcacgagttgattgctttttgttggttcatcagtttctgtctgcattttgtacagccccctccgggtctatctacctcctgttctttgctctgccaggcatcctgcctattgccaccggaaagaatatctttctaaattccaaatctgattctgctgcttgcttaacacatgcgtgtaaaagtagcataatgggttatcagaagcagaattcttcctttagaggctaacattttgtcaagaaaatttgactaggtagatttcaaatgcataaatgctgaatgagagcccagttaatagtctcggactatgaataactgtgtccaagaccttattatgtttatatgaaataggttggatttgcttataaaattcaggtatcctagtagattcattttctgctgctggaaatagtaaggactgaccctgggtcaaaatttgcatttgtttcctatcatgtagaaacttcagcaaaataaacaggatcataaaattaacattttattgttcttcacagatctgtattcacttcaccactctcactgaattaaatcaccctgttacttgtttatgtaaggaaaaaagaacaagtcaactgactgaataaactatgggttatttacaaggcccctggacttactcctatttaaatgcttatgatttgttagttgacttaatatatccagtgcctatacaaattcagataatcaatgatgtctctttaaacacaaatcctctaataagaatttcttttttaacatgagtatagaattacgctgggagtgacttctcttaacactgtcattttgctgcagcatggttaaattaaatttacttggactgccctgtgaaccttaccatcatttaacattgttgttccaaattctcagtaagaaattttagaaccctatcatgtctctcagtatatagtttatactcccatagtttatttgaaaacaagttgcatttaattttattctgaatttcgatatatttttaaccaca

SEQ ID NO: 119363 - DNA, 1048 bp, Homo sapiens
agccctctatatctgcttatttctctctttttcatccagtttttatgtatattttctatattaatgttaataatttgccgattaattataactatagtaaataactataactgtaaactattaatgttcatcattgctcaattagttgattatgtctgctctcagagtaatttttttttatttaatggatggctgctgccctcattagacatcactgatgcatctattaagctgtatgtatttattcttttgttcctggtgtgatgttctgaaagggtttaccaccctctccctttggcctagtttattccaagttaacttacgtgatcaattcattgtaattatgaatattactctgtagcataattactgacttaaggattttatacatgttttctgcatattcactcagatattttccctatacagttaactctcctccacatctgattcctaagagtgatattgttttaaccagatatcacttctataggcaaaagtgtctcttaactaaaatctcctttacgcttgactaaacaaaaagctaaattaaatgagaaagcaattccttgcagacagattggagccagaaaggatcatggattctcctgtcttagtccagttgtcttttattcatccagcaaatcttgtttgagcactcactgcatccggtagtctagtgttctgtttctctcctcctcagactaagaatcaaaagcttccagcactgtgggggcctctggacttggggggacattaacatagtgagcatagcatgcttttgcctcaaacttgaaacttgaggtaaattcccaatgggggtataaccaaaccagagcagaccctgatcaggcacccttctggaatgggcattgctcacaagctctgcccgctgtgggccgcagaatcctgaccgtgaccatcagtctcagcacccggattagacacatctcctttcctgtgtctcaaggactgttttcacttgaggctctgacgtataaaagtatgtccagacacctcagatctctgtgggtggtccttcacccat

SEQ ID NO: 119364 - DNA, 1067 bp, Homo sapiens
cacaaatgtctccgccaagaccccagacggttcccaaaggctctccgtgatgcaactgcacgtccctcgaatgcctgggcctccgatatccgtccgccaggagcttggctggatgcacgggcggccagtcctcttatttccccgccctcccgccgcgtggagcggctgctgggtcccgagcctccgggcgggggcgggatcggggcggggcggaggcatctccctcccagcaccgcccccttagctgccccgagccctgcctgcgcccgcccccgaagcggcgcgggacgcctggcgccgtccgcgatccgcagggctgcccgcttaggcttaggcccggcccgctggcaaagccgagccgcagcattttatttcgttcgtggtttccgcacaggctggagtttcgtgggttgggtcgtacttgggacctcggcgaagaggacccgtttatttttttttctttccaaaatggcagcctccagtcgcgcacaagtgttatctctgtaccgggcgatgctgagagagagcaagcgtttcagcgcctacaattacaggtgacccagcgggcaccgggggccgggggcggggggccaggggccggggaccgggggtgcgggctgacgcggaatatccccggggactgggagccaccgtggtttgccggcggctgcgaggcaaggaccgggctccgccatcgaaaagcgtgctcctgcctacaggtgtggcctctgagacctcggggaggagcctttctttctaccaggggagacgttcatgtcttgtgacgttttccccctaaaggctatcttggtagttattctaggagcatgattagtgttatgtttctgcagaagagaaaaaagggatggaaatcagtcatttgtgaagttaaggccagtgtgttgcatatgtaaaacttcccttgagcactggaagagttgagagtggaagtggccagtgagtagtacactgcgacaaagctgaaggcacactctagcacctccctaaaatttcctaggtgtcgtaatgagttcttttggttgcaagaatccattctatttagggta

SEQ ID NO: 119365 - DNA, 1043 bp, Homo sapiens
tgcaaagggaaagtaaaatgaagcagtcatgaaatagaaaaagcttagcaggcagcatactttctttcctgtttcttgacgttctgagataagcacattgttatttatttcaagtcttggagcactttgagacaagcacatgtgcctgggcattcataacattaagccctgttaggaatcccacttacacccttggcttctgcgtactgtgagagctgggctggatgataattacagtcagctttcatttgtagagcccaggtcttcaaataatttccaagtaaactatcccagattaatacgtttcaggacataagtgtggttcgctagagctgtcaagctgtctggatgcccttctgttaactttgtagaagagattccacgtgtgtcaagttacagtgtttgctgaaatttttctgttgtcttgaaagctatttgaaaatgaaatgttcattatagtactggtggtcaggtatgttccttagatatatatgaattaatgtcaccacactatagacagtaatttttatatcaccttctctccaaaaacctgcagcacttttaggatgaagtctaattccttaacacagcctatgagaccctgacgactatggcgcttacccacttctccagtcccatgtcatacctttttatttttcgcttgctgcttttcattctttagtactcacctctttcccctctaccctggggacctttgcaaatgctgatccagctgcctggagtgcccttccttcccttgctaattattcttctgatctcagtttaagagatgcttactcaaagctaccttctctaacttgagtacatcttcctctgttaagctcccttagtatggtgaattgctcttcagcttagagtgactgccattgcaagtaactgaagtcaaattgttttaaacaaacctagtggctttattgtctcctgtgtcttgagggttcagaagccagatgggctttagggttgattggtttgagtgatgttgccaaagattcaattttgtgcttttctctactttgtcttct

SEQ ID NO: 119366 - DNA, 3198 bp, Homo sapiens
tgttgggctgtccagacactcccaaggacttggctgaccccaaagatttctctctgcctgtctcttcccatctctataaatcaggcagcacaggaggaacaaacacatgttattgttttaccttgaagtgaaatccacctattcctcctcagtgcaggctcagtatctcctgagccagcctcagtgcattgtggtgtaaagagaaataattttttctccctgtggtgtttaagcctaattcaaatagaagctgctctgtgattaacttacctttctgtcattcattgatcaaatggtgactgaagaagaagctgaatgaaggcacagatagcgagtgcagcgtcatgtcacacaaagcttttgcatttgtcagcaggggctggttcacagttttgttttttttttttcttttcttttcccagattaattgttacttgtcacatgtagatatttgacttcttgaaagacttaaaccaaaacattaaataaagtagcagcttagaatggcaaaatggttggttttttaaacaaactaaattgacccaagagattttagaatgactatatttttcagttacatttttgaggaaaagaaaatggatatcaattacaaatgggtggttgcagatacatttttttaatagttccaataatacacattttttttatttaccagaaaagtacaagttcagctgcaaagaaaatgcagtaaaacttggtaaagttaaggaatgccaccttctgaatactcgatacatttgtttgtaaagagacgatatatcgtatcatctctgtagggcataaagggtgctggcaatttcaaaactaaaatctgtttctgtgttatagcatattatcagcagtaccagatttacagtgaatacatttaagatttgaaagatattttggggacttttggttctttattaaatctttatatatcatgattgataatatgcaagaacattggctttttttccttgctcagcattattcaaaaatgttttgcaataaaatcctaacaccatgttgtccattttcactgcccccgacccctcattttaaggaatatcactgtacccagtccattttgggtatcctgacttcataaatgagggaagtgttagcagagtggatacttaggagtttgatgtcttatatcctgctccgtttggactagaaccttaatcttttcaatattttctccttaaagtatacttcatctgtcattaatctaaattatcatctcacataaagcagctgactgttgacgttttcagttatcacagtgtgatcctgaaatggggaaggactgaacagagccctgaaagatgagagttcggctctggctgtaccctagcttgtgtgatctgtgagtaaatgaccttttcctcctttactttcttcagtctaaagcagaactgaaataacctattctctcctcacccctagggacattgcaaagattcagaacatattctcattagtgcgctttggttttctgcaataaggagggtgtgtagacagagcttggtattgttgccacgagtgctggggtctaataggaacgctggtttttggttggttgtttttttaacttgcatggtgttttaatagcagaagattatggtttcttcaaaatatggtaaaacgaagggatttttacacaaagttttttactaaaaatgacgatgttaatggcgtactttatttgaaagaagccttatttttattagtaaaatacttgatgtatgttttaatgtgtgtagatttaaaatacattctttaacattattctccataactattcaacctcactaggttttcctgtttagttagcaatggtcttttctttattaggctaaaaaagaaacccatcaaaccctgacatgagtcacatgatttccacatttgactctgaattaattgggtatgagatgcagccttccccctctccaccccgtgtgatacacttcagctcttcccagcaagagaggttctgttttctctctctgaaagaaatgcagagagaaaggaaatgcctagatggtttggcttccactaagtagagaggaggatagagtcttcaggcatcctcaggaggccttgagtgcacaacaagacaggtggcttcagcgcttgcttgtggccctactgtccatactgttcagaggtcttggtgatgtgtcttgcagatgctttgtgtaggtctttgaaagagaacttgaactgaggatggtgtgctgtgatgaacacagccagggatgtgagattagaaaatcttgaggccgggcacagtggctgatgcctgtaaccccagcattttgggaggcctaggcgggcggatcatgaggtcaggaaatcgagaacaccctggctaacacggtgaaaccccgtctctactaaaaatacaaaaaattagccgggcatggtggcatgagcttgtagtctcagctactcgggaggctgaggcaggagaatcacttgaacccgggaggcggaggttgcagtgagccgattgcaccactgcactccagcctaggtgacagagcaagactccctctcaaaaaaaaaaaaagaaaaagaaaaagaaaaaaagaaagcaatcttgagttgaaaatgcagtgagaagattgaaagataacagaatgacaagtgtatataaatggagttgagtgagttgctgagtgtattcgtttggctagtttctctctataaataaatatagaaaaaataaaaaatataaatgtgtgtgtgtgtgtgtgtatatatatatattttatatatatataaaataaggaagacgagatctgtagttggcaacctggagacccaggagagcacatggcataagtttcagttcagtaccgaagacctgagaaccaggagagtggatggtgtaagttctagtccaggtccaagttcaaaggcaggagaaggccagtgtcccagcttgaaagacaggcaaagagagaattctttcttactcagccatttttctattcaggacctcagtgaattggatgaggaccaccacattggagagggcaatccgttatacttaagtctgctgattcaagtgttaatctcatccagaaacatgctcatagacacaccacataatgtttaaccaaatatctgggcaccccaaggcccagtcatgttgacgtaagactaaccgttacactaggcaaaggc

SEQ ID NO: 119367 - DNA, 1033 bp, Homo sapiens
attactcatatgaatagtggcatggaagaacacagctagttaaaattcacagtaattcagaaactcatttaagcctattctcttctaagaagtaacaaaattaattgctctttctgtacatgcccactcagaagttggtgcttcaagagatgcgaaatgacaggcaggtgatttagagggagaaggagaactgccttggataatatatggactgttgtctaacttcgccattggaatagatttgggtgtcagttaaatgctttgcttggtgtttcaagtttaatgagacagctgtagaataaactaaaatcattttctagaacatactaagcctttcccatctgactaccttgatacttcagtttctttatctggaaactgtctttttgaatggcttatctttttaatcttgatttaaagtttacttcctcagataggccttccccagccattctttttttttttaatcaaaaaataacgtctcctgtcctatttttaggtttctaatgattcctacttgagttgttaggccttcgcagcctcagaaagtatgtaggtttacagtaaattatacactgtgtataattcatttttcaatatattgtaggtatattttaaggtttagttaagaagtatgtaggggtagaagatcttatgtttttagtgacattttatgatttactattggcattgtattttccttccatttttaatttttgatttatattattttaattgtattctgtcagattggctggagctatcctggactttagtttgagggatgacactttggggagtaaagattgggtttactttgtactcgagtcttccacaatttcctttgtagggctaaccgttgtcagcaagtatttatgcaactgttgtcttatgactacatagcatgtattggtcatagagtctaaaagcttcttaaacaaagcatgggatttaagaaagaagaattagcagattaagccttaataatatataaatactttacaagtgaaggtaagacttaaaaagatttaat

SEQ ID NO: 119368 - DNA, 1338 bp, Homo sapiens
aggtggtaaaatggactgtcttgagtatgtgcttgatactccaaactttaccagtctgcactgagaaggcaaaaagaatcagtaactgttatgtaatatttttaatacttcctagcttgtcagtataatgccattgtgaatgctgtgcaaccatgcaaaataagtacattgaaatgtagggattcagatggctttttagtcatttaatgagcaataggaatttttggaatttcaaggaaagtgttaccttgccagaggacttgctctgtattgctagggagtctcactgctcaggagactgaggaacagagcagggcatgcagcctatcattgccgtggctgcttagaaggaagcagcagcaagcaggcatgagaggcagcctatttcaggggttgcaaaagaaacacatggtccatggcgcttaggggagggagcattcacatcccaggcggacaccaggggaagcgcctgaggttggtggtggtttcagtaggtgctgaaggccacgagccattttagccggtgcatatggggaagggagacaatcatgacatgggcattcctgataaaggaggccaccggagttgagggttagtggtagggaaaaaaagagcagctgttcgagttttgatcagctggagtgtgcgatttagtccctggaagagaaaggggcttgggcccgtgtggagcactttgataggctaagtggaaccctgattttgtgaaacttaataaactggtgctttagaaaggtgggtccaggaatggtgcctagcgtcaatcagagaagataagttatttaaaagggaaagtggttaaaggctgttttaattctccaggaggaagatgctgagggtctctacattatgtccattgtgatgagggtggaaaggagggccaaatggcagagatattgtccagacagaggctggctgaacagcagggataaaggagagagtggccataaagcctagtggcttgcaatgcatatagtataacattcaagggccaggcacggtggcttacacctgtaatcccagcagtttgggaggctgaggcaggtggatcatttgaggtcaggagttcaagaccagactggctgacatggtgaaaccctgtctcgactaaaaattcaaaaaaaatgcaggatatggtggcccacacctgtaatcccagcattttgggaggctgagacaggcagatcacctaaggtcagaagtttgagaccagcctgaccaatatgaagaaaccccatctctactaaaaatacaaaaattagctgggcatgttggcatgcgcctgtaatcccagctactcaggaggctgagataggagaa

SEQ ID NO: 119369 - DNA, 1191 bp, Homo sapiens
ccacataggatgtgagcaggaaagatggatgctgatgcaattaaggttgcatgcatgctaggaggggaggaggtggggatggagggattattacttgaccattctgtatatctacattataaaagatggcatttaaaaccacaacactgggccatgtgatttttgtggtgaagagactagcttcactacaagaaatttggatgatttataaatctctaaaccccaatgggagaaaagttattatttaataatatcatagatattcacttttatttaaagagtcttgttagaaaacaaattagaaactccatgtacgattttttttgttgtcgttgttcatcaatgagaaggtttgtttaaattatatccctgtcattggcattttggaacttgaggacaacagaactgttacaacaggaattttagagccaattttgaccacagtgaagtggctgtgaaggctgaaggccaagagcatgattgattgggtgattagaattctttttaaagcaaattagaggtggcaggtctgccacaggtgagaagtactgcaaagaaatgaatctcattatcagataaaacttcttagatcatcaaaaaagaagtttaatgtttaaacttaaacacacacacacatacacacacagcacgaatgacctgcatgtgaattcctgtttgtgattattatacaacctagcatctagcctgatgttctgtatagttataaataataaagaggtatgttttatagttaattcaggaacaggtgccctatttgtgaaatacatttatcagttcagtttagccacttattgtatttggggtcttcttgatgatttaatttgtgactaggcatttgagtttcggatccttggtgtaaaaggaggtggaggggaaggaaggaagccaggaccagtgtttagaaagggaaaagaggagtagaggacaaagaatggagaatgatgtgtatgtggtggtgtgtaggggaaactctctaactgcgtttttcctctactcttcacactacaacaatcatcaacacagaagaaggcttctgtggccaaatgtgtgggttttttccccatacaccaagtggcaggcaccggttggatgtcctctaattcagttctgacactctctacccagagatagtgtcagatcccacaggttgagggcccagtccccatgact

SEQ ID NO: 119370 - DNA, 1030 bp, Homo sapiens
cgcactgcagcctgggcaacagagcaaaactccatctcaaaaaaaaaaaaaaaaaaaaagatacaaaaatgtcttgtcttttcttagggtgtccttattagctgagattgctgaaatttattcctcacatatgaagggaatttcttctattttgttaatttgtggtggaagatcatttttatgtctttatagagtatgtttttatattgaaatgatatagtgtgggttgctaaaatatagatctagtttattctgcagagccttgcgttttggaagataaagagcaactgtttgcttgcctagatttcagtacaagctttagctcactttgggttttgatggcagtttcattttataaactgaagactatactatgtagacatctgtgctgatatttctgatagttcctgaaggtttctcatttagactgtcatctcctctggcgaacatagttataatgcttcctacactcctgtgtatttaaacacttacccttattattaaattagaaaatctaggtgtatctttgaaccatacagtcaatctgagggttttttggtttcaaggaatgctttgtctgagccccttctgggcccctgggatttgtttaaaattacagagctgtatcggtataatcttttcttctataacagcaatggctgtcttggactgtggctttaagcttattcggttgaaagttcatcaaagtttggagatgacacttggggttcaggggaaacaagtattctcttggccttgcttttgtttaaaagatgagtttagatgtgccatgttggtttgctgcactcatcaactcgtcatttacattgtgtatgtctcctaatgctatccctcccccagccccccaccctccaagaagccctgttgtgtgatgttccccaccctgtatccaagtgatctcattgttcatttcccacctatgagtgagaacatgcggtgtttggttttctgtccttgtgatagtttgctgagaatgatggtttccagctaaaggacatgaactcatcct

SEQ ID NO: 119371 - DNA, 1011 bp, Homo sapiens
tgtaaaaaacttgttggcgcgtttgtgtattgatttaagcccagggacaccatgcattgcctttgttaataggaatgtactaggtgtctaaggataacataatggtcatccattagtatttaaaatagatgtgtgcttgatatggattaaagcaagggtataggtgtttcctctttccctagaattcggacttttaaaaagattggcaaaggtgagttgacaagagtgttcagccagtgtgactaggttcttagtggctcccttctttttgggaatacctagtgatttggaggcgaaggtggaagtcaaaggagcttggtaggagcagtagtgggagggcactggaagtagctgggcatgcgctcagaagagtgcctattgtggactgcacaaagcacctcacctcacctggtgaggacagtcttttgggtgctgaatggagtgcttgtgtggagaaggattttgaggtcacacctaggctcagtgggaaagatactgtgattaattagcaatttgttctagatctttgtcattgcagttttcttcaatttgttatccagttggattataaacattacatgccttcatgtaggaactgtaccttttaaaattacaattttctacccatttcctaaaatgtctagcacattgtattgtatatgatgtacgtgtatggtagttttgtgtctgctgattgaatgaatgagggaaaatactactttatcctcatagtcccaggcattttatcaaagccttgtgttgaagtagtgggatcccacagtttgcctgcccacatgtgaaacctccagcagacctcacagggataaaggaaaggaaatttcaactgagaaacttagggaaagtaatgccagcagagacctttgactcatttatataaccacccaaaacattgaatgagacctccttgttttatagaggaatcaattcagacaaagaagagcaaatagcttccccacgatcacacagatggtgggtgactggggaccccaa

SEQ ID NO: 119372 - DNA, 1054 bp, Homo sapiens
ctgccatttagaccacagcaggaagctggctgaattttgcaagagaaagttacataagattcatctctcaactatattggaaatgtcagggttaccaatgagggcaggtcatttagaaaggatctgaccttctcttagacatcgaagcaataaaaaaagttatagatttctccaattccataaaggctttgttcttgggtcacttgtacaaagtgatcattgccccagttactctcctgatgtcactatgtaccttccaggtgttaatttcagtaagtatttgacttgtgtttttcatgatgcttagacttctaaaatcctatgggtaaaaagatctttacacatgatggcagatggtgcattgggcttgatgtgttcttgcactgtttgtagacgtagcctttaaggtagatctagaaggatgggtggggcttctgcatgaagaggggaggaaacagtgtgagcagaggatggagtgtcgcctgtgggatgtgttgggggaaacctgcctgtgtttatttatctttccctcttgtcataatttgagtgtggcctctgtgccttgtaggagacaaggttaggactgtgcaggggtgaagaggtaagagtgttcagacagggatatttgcactaagctttgttgtatctacttcatccccattcggtaggtgtcttctatgttttaattcatatcctagcgtcatttttcatccatatagaaatgtaccatataaagtgcttaaaagattgtctctacaatcaaatctggttaaatgtgggaacctccagatgctaccttttccttcttcatccactaaatctgccttatatattgattgcttttaggaagtcaagtagccgtttcccggaatctttagtaaagattaactagatacttgatcacctgctttcatatgggtgttatgacacacacagagtagagctattcacaatttatggtgtggtgggacataagttatgtcttacattattttcaaccagctcttggtgctaaaaccttttgtagatgaggctggtttgaagcaagaattga

SEQ ID NO: 119373 - DNA, 1404 bp, Homo sapiens
tatatcgtagggcccagtaatcttcctacagctgaagcagcaggctcctaaacaagtctcaggtagaattacttgcatccattatcaagctagccatgaaaaaatggtgtacttgtttatgaacatgcttcaatttatcctttttgatgaaaattttaaatgatttttttctattattaagtttcataaggaagcatgaaagagaaattaccaaatatttgcaatatatatgatggataaattgataagaaaacaacatggtagtagtaaaatgtcaaggataggctgttaacaaaaagtaagtaccaaagttgaataaaaaaattttaagcatcactaatattataaataaatatgaaagcatacatttttaagcatcagattggcagagatggaaaatctcacaatataccatgtcaggaaggaactgggaaaagtaccttctcatatattgttaatgggggcatttatagggacaatgtttatgacaatgtttggcaatgtgtgatgacagtttagaatatgcacactcaatttctgacgtaagaatttcttcttaactcatcctaagataaatggacaaaccccaaaggagactggcccaatatggctgaatgcagcgttatttatttcctgtgctgtcagtggagagcctgctttgcctcctgttccctctgatgtgcaactcactggatttagggcttattcatagccccagagcaagctcaaggtacctggctagtgactgaaaggacatttcttctgttctgagtagaacagtcacagattctagtgcaggggccctgacacttggtgaggaacatccactttgtctttccctgaagcaaatcattaacgtccagcacacagcagttgtgtcagctctgcagacagaggctggcccatgtggctgctgtccccagggcttggtgtgcctgctccgagatccacctacaggtatttagccagggcaggtctggtctcccgccctgactggcaccagccaggattagagactgagtggcctggggctccctcctgtgtcaccttcgttaaagcttcgagttccaggagcagcagccttctccttccacccccttcaggaacaccactggagcctggtggccatctgggtgacctgatgccctcagagcagcagggtttgctccgtcatcatgaatggcatctccatgtgccagtgtcatcagatggtcatcacagtgggttgtggggagcatgaggtagttgtgctgtggatttttttttctagaggcaatatttggaattagaaacctatttacatacacttagcattaatttacatataatcctcaaataacttcaaatactcttctattcaactaattagtgcagctaaccagtgttgtagcccacctcagcatt

SEQ ID NO: 119374 - DNA, 1040 bp, Homo sapiens
ccttcataggttttttggagagtaggaagaccggttgtcaaacagtaaaagagtacctgcaattcatgtcattctttgcattcaccttaaaatactgatcttaatagatttttgataactaaatgtataccttttgtttttgttgcttttaagtcatttattcatttagaatctacatgttagctttggtttatttttaaggaattaggaaaatattttaattttagcaagagaatgctcagtctccctccttgtttacccttacccccaaagcactattgcccctgttggttgagaatgttggtctagggaataattttatattctttataattttacggttatgctctcccatgagttttaagcatgagtgatacaaagttagggggttttgtttgtttttttgtttttaacactaagaccttgaaataggctcctcattagcagtgtcatgtcatgaaagatgaacagcttgagattcagaagacgcaggttctggctgagctctgtgcccctgagctcccatatgatgggggccaatctctgcctctgtttcctaagctgatccctctggtccatcatgtctccgacatccactaaggctacatcttttcattggtgttactgtatggtttgaaggaggactgatggcagcgtatttatggtatctcggtgactcctaccttaaccctgttgacttttaagatttcaaggcaaattgagttaggaatctcttcctagcaagaaggccttgtaagtaagaggtccttaaaaataaaagaaaaaaacctaacatgtagactttttctctgcagccccatgtcctggaaccttctgcttttaacctgttaataatggagttatttcgtattgcagtttgcccagttttgtgccaaagagctcgtttttcatactccttccccagacatgaccttgtaaatctttgccggaggtaaaggattagcgtggctgagcagttcgagggagtgaagtgtcttatctctataactttccaaagtggtcctcttctgtgtggtggg

SEQ ID NO: 119375 - DNA, 1051 bp, Homo sapiens
ttaaaaaaaaaaaaaaaaaaagattgatggtcttattctacatatttttttgagtctatttctatgatattttcagtattttacttagatgggctttaacagatttaattttctcttttattttgcttggctgtcttaatcatggcctttttcattttaatgttacctcattcaaagagtttttgcctgactaatgagttgtagttttaaagtgctatgtgtttagatcttcataatgagagattaaccggagccgtggatcacatctctgggagcattcacatgtcccatgtccagcctgccaagttataccccttgggattccctggccacagggagggatttgaatcacagtgttctggtggctgggattttctcctatctgatcacataagttaacttacctggtgtcttgttcacatttgtctctagttcccctggtgctattattgccaatagtgcaataacaaaggtttgatatgaagatggacatgtgtaagggagagctggggattagccagcccagtttcacctcagctggtattgttactgggtcagagtggggttgagtctgaaaggcagagcgaggtcaacactgacagaatgggactaaaaacaatgtgtgggaaataattcagcattatcaaagtgaatttcagagagcatcagctgctgcttggggcctggggtcacacctctatagtcgctggtcttggagagagggttttacccctgaacctactgccctactctgaacctattgcccgacattgctgagatcatttatgatttccaagagaacttgagtgaggatatgtgcatggtttagtgaattggctcccatttcctgagccctaatatgccatggcacagctgctctagtagtcacggtaaatatgttatttcattgagttttcacagaaagtcaatgaaatagatattcctgatcccctttagtttcagacaggaaactaaatccctgagaggtcacatgatttgcccaagcctcaggttaaatttgggaagtaccagcgctgagattcagacccag

SEQ ID NO: 119376 - DNA, 1058 bp, Homo sapiens
acttcaccccgaggtacagtaaattaagagcagcatcttgattacagcaaaagttcagttctaggtctcctttacggggcactttacccacagcttctcaggcgcatgtgtaaaacgaagtccacgtgctgtctgttcagaatagaacggagatgagtggtaagagatttagagagcagagtaatttcaggttagtgtttgaatttggtgtttgagagtagcccacaattaaatgctgtaaagtggcacaggaaagtggcttgaactttaagaatgttccctttccaccattctcccattttatcctgagattttccatttgtattaattatctccacagctcctgttgggttatacagtagaatttgaatttctaataaatgtcaaaatcagaaaataggcctataatctttcacaggcagttatgaagagaatggactttttgtttctgaagcattttgtcctataaagcacagaccttatttttcaaatgccttgtcaccagaaaccacgagccattctcattaaaagactctggaggagtactggggatggtggcagggcatggcggtgtgggagagcaggcctggagcagcagtgctcactggccggggcgtcctgtccacctcaccctgactatcagggacgtgcagtcacctagaagtctcttccctcgcaggacccaactttctcatccgtaaagtcaagatattaaaccagctgatctttaatgttctttcctgagttccatttctttgggcatatcatatgaaaaaccactctgcatattataatcaaccattcttgaagaagacatgagtacgtttttattcactgaggcccatagtacttgggtgaataaaattcatcatcacctccagcggtgattttctgtgtatttgggtgtaattgcatcattggagtcattaaaattattttatatgaagggccagtttatacaataaataaagtagaattgctgtggtttcctcagggactgagccctatgtgcctgtttcactttcagcccctgagcatcccctgaggtatccatagag

SEQ ID NO: 119377 - DNA, 1015 bp, Homo sapiens
tcgatctcctgacctcgtgatccacctgcctcggcctcccaaagtgctgggattacaggtgtgagccaccgcgcccggcctatgctagtggttttcaagccgtagctggcatgagaatcaccctgaagggttattaaggtacagactgatgtgccctgccccagagttcctattttttgggtctagggtagggcttgagaatctaacatcttctctggtgatgtcaatgtcactggtcttgggactgtattttgagaactactgttgtattcaaaattattttaaatgttatttaaaataagtttaaatttcctgggaaacataacttgtgtgtaaaacgtagtccttactaagtaattatttttaaaatattttaattttgtatcctacttcctgtagctcccacctcctttggtgtgaattgagagtcatgggattctttgcttttaaataattctctgtgtgattcttccaccatgggagtctgccctcggtttcctcaatttagagactgtaaatatttgtgatttttccatttttgaatttacttctttctattttcatatttttaattttattttgcttcccttttactgtttgaacccaaaggataattttactttttttaggttttcctttttgttttttttttttttttgagacagtctcactctgtcacccaggcgtgatctcaactcactgcaacctctgcctgctgggttcaagcagttctcctgcctcagcctcctgagtagctaggactacaggtgcgtgccaccatgcccggctaatttttttgtaattttagtagagatggggtttcaccatgctggccaggctggtcttgaactcctgaccttgtgatccgtacgcctcggcctcccaaagtgctgggattacaggtgtgagccaccatgcccagcctttttagatttataatgctgttttctgagcagtggtcataatattcacatacacacacacacacagacacacatgcacacacacggtataa

SEQ ID NO: 119378 - DNA, 1079 bp, Homo sapiens
tcacttacttgctccagaatcaatcagaaaaacataccctgatgaaccaccacagaaaagaggttattcacttcttcaaggctgttaaagtgcctagtctagaagcaacgtcattgtatcagggcctgcaatcagttctagaaattaggtacaccaaattctctaaaaattaataattgagtctaaatggatgaaactcaggaaaagggtgtgagatgctctcggtacaactgtatattaacattttctcccaggcatttcatgttacttcaaattaacgatttcaaaatgcactgttcatttgtccttgtattggttgaatggtactatgcaacttgttttttcttgagctcactagaaacaattgtagcagtgtggtaagggagccattcattcatttttttcattcattcattcatggaagaagcagtttctttgggcacttacttcctgtgcctgaccatcttatagaaacaatcaaatgaatggctcctgccctcaaagtcttattttctagtgggagaggtatacatgtctacaggtaattactgcctgggtcatttggcatgaaaaatgtatttctattttaaacatccagcttatttatattgatttcaacaaagctaatgggagataggtttgcccggtgcagagttagttccagaatttgtagacccagcatattctgttcttctgtgcatccaagctggcttcctggtgatcttattatttgcgtattacacaaagtccctgtaagaataacccccaagtattctccaaggtagatatctagataatgtgtgaccttgtccctgataattgatttcatttgcccatgaactttaaaaaattttatcctccctctcagaaagaaggtctggataggataaccaggatcaggagctgagcttgtacagtttaaaatttatgatgttatgttagtagaaggagaatgttctgaatttagaaaaattgatgtcagtattcaagacatttttagtgaaacagagaagatcaggctagagaatgcttatattacctgaaccaaagaagccacagaaactaagcacagttgaaac

SEQ ID NO: 119379 - DNA, 1039 bp, Homo sapiens
gtctgcacaccagtgggacttgctgcacgcgggactggatgccttcctggtggtgggtgatgtctacaggcgtgaccagatcgactcccagcactaccctattttccaccagctggaggccgtgcggctcttctccaagcatgaggtgagtcttgagatgtttctcatcgctgaaggatgtcatagacattttatgttgaggtcactaacatttagctcgatgagaccagcatagtcatccttgcttgccttattttgccttagtgaatcatccatacttaatgacatcttgtgtataggtgtgccccagtactttttgaccgctttgttgtgttagtaactacagaaattggtaagccttagtttccagttgtctgtccttatcctttctctcaatactgacccgccattctctgggttacttcttatgaatggagaatagtctgtggctcaaattcacctttaatccaggatggctgaaggtgcaacatggaaacctgtggtcaggtcattcttaattctgttaggagaagtaaattatattttcttgctgttagagagaaatgaatttcttaggtaccttaggggcctgatgatttattggcttgggctgtaaactgtgtcttgtccccaggcactttcctcaccctccctggctttgcatgttgctgtgagatgtcttaattgctgtgggatgtcttaattgctgctattcttgaagcatgtgttaggatgatgcatggagccttttcccaactccttgcgtctgttagatgttatcctaatatgttgtgtgcatctgttagatgttatcctaatacgttgtgtgcatctttttttgttgtttttttttttgcaaattctgaaatccctaaaagcttgattccatttcctaaaaacttgccataccacttgtccctcactcatgttttaaaaaccatctctgtttttatataagaaacaaatgcgttaaactaagcacagggtgtatttcattttacttccttagcaatgtcccttccagacatgttcactggaa

SEQ ID NO: 119380 - DNA, 1351 bp, Homo sapiens
tcttcaaaacaatgtgggaaggtggattaggcatttggagatggatgtaagaggattaataattgttaattattgaaactgggtgttggatgcagagaaatcatcatcctttctattcgtgcatacgtttgaaaatttccaaataaaaggctaagggaaaagactgaaggaaaacactgggatccgtcagtcagtcaaaaacattggctgaatatgtactgggattcaagactgtaagaagatatcagacagtcatgagatggtccctgctttcatggggaagacaactattaatataaaaaaagagtgcaggataaattaaagataaaagcattcattacatgtaatagaaaactgaaagcaattaactctaaaattaatagcctttcctccatcagcctcagatgattttacacaagtttttaccaaatcatgaattacttgtacaatctgtttcagaacatagaaaagagagtcctaccaagctcattttatgaggttagacatgttaatatcccaactagataagaaagaaaacttttgaagtttcatcattatgaacatagattattcctttttaatgaacagatatagaattattaaatgaaatatttgaaaattcaattcattgatttattgtgtcctaccacattattattgcatatacattacattgtactgtattaactgatataaggagaaaaagcatgtgatcatctcaatagatatagaaaaatgattgcatttaatgtctcatgacattaaaaaagcatttgatgacattaatgactcatgataaaaacttttagcaaattagaaatagagggaaacttccttgactttacaaatgaaatccatgaagctcttacagcaaacataattaatggtgcatcattctaaatatttctatccaaattagccacaattcaggattccttcctatcactgttcatcattatgtggtaaattctagcttatgcagtaagccagaaagagaaatagaaggcataagcattggaaaacatagataaaactgctttatttgtagaggatttgatgctttacctagaaaaagaatatacagatcaactattagaacttacaagacaattcaacaaagttgttggattcagggacaatatagaaaaattaatgtttttatccataagtaagaaccaattaccaaatataataacacattttatttgtagtatcaactaaaatatttcagtacctaggtataaatcttgcatcagatatttgagatatttatggataaaattattaaatattattaaaagacatagaagaacataaggagagatttaccatatttgtagattcatagata

SEQ ID NO: 119381 - DNA, 1045 bp, Homo sapiens
ataatttacaaatattcacacagaaataaagggaaatcttttcggaaaagaggatgagtgaaggtgtacagagaagtaagctttttgtataattttgaccacaacccattactggaatggcccttcatcaagaggtgtgtgttcagttcatataccacccacccctttaaacataatcatgctcattcgccatttcctcatggagggattttaggagcgtagaaggatgttgagacttacacgtttgagaaccactgtcctcaaaccactgtcctcaaccactgtgggtgaggggctccttccacggaggctgctcctgccctcacgattccttcccgctggagtgaggcgcttctttttgaacacccctttggcatcctttgtggttcatccttgtcagaaaaaaccgctgtcatttatcattagaaaatctcacttttgctgcctttgatattctctcccactttccagatggttcactggaaccctcctgttcttgggcttctctttccaagcttccccgctgttactcttgtagtgagcccatggttgtctctttattcctgctttctgctctgaatcacttttctgtctttcagtgagtgacagggttttattctccaccgtgtggttattgggtttccttaatagcctcatgtggaggggctttgttgaaggcatttttattcggctttgacagattatagtccccatgtttccctaatctcttctttaaaatattttaggaagcattgtccctgtcaaagacacacttaaattcaaacagcttttcctttttaaaattatttttctctgttcacatgtttacgtagtcctctgtcttgacagttaagtgagaggcaactggtcatagtgaggagtccatggatttgggaaataccccattattggagggcaaagcatgatttggaggaccgtttggagagagacccctttttctgtggcacagggcttttgcagataattagtctttggctacgacaagatggaaactattaggctcttagtctgagactcatcactg

SEQ ID NO: 119382 - DNA, 1041 bp, Homo sapiens
cctaaagcagtagaagtgtgtggagctattgcagctcagctctgttcatgagtgttttatgtccagttctaaatcctattcatctgaccctattgccccttttaatactgaagctgaagagagtgatagtatatattccatcacggaaataaccacagagcctggaagatggggtcatgacttggagattttgggttgaattcaggctccaccatttactatgtcatggtacatgttattgaacctcactaagcctcagggttcttagttgagaaatggggaaataataaggattgtgaagattaaagaaaaccatatagtatgtaagataagcactcagcaaggtagcaaaggtactaaacggtgtgtaactattaaccgttagtactgcaagtggcagtgaagtgtgttataggatcatgttatcagtcacaggaactcagagtcaggatagataagtgtttagcattaatttgtaaggcagattgtatagatgaaactggtggtcaatagttattttttttttaatggctggtataaaaatgactactttgggagccacagaccagtcctcaatatctccttgaaaatctactatcatccaagcctcattttcactttgccacttgtaggattttgcaaagaagcaaattcttcttctgtccgttttcttttttctgtgccctttaaatgtgtgtttaaaatctagaccttttgggaaaatcttgttggctttctaaattttaaatttaattggcttttgcaatctacttttattcttaaatctgattagaagtaattccttgctcagtaattcctcagtagttctgaactactttctgtggcttttgtaagcagttgtagttggggttgaatttgtattctgggtcatttggatttgcacaaggacagttaggaaaatgtcagagaaatagaagcagtcctagtggaaaataaattatacaaactgttgggtgcgattaatggaaattaatttaatttcaatactgtggtatctcccaaacataaaggtaagtgaga

SEQ ID NO: 119383 - DNA, 1108 bp, Homo sapiens
acacgtgttgattcccttcagataacgtgcttgccagcccaacctgcatagggacctatacatggtcccatccagcagaaacattctagggccctgtgttgtgagtgatgtcctggtcaggagtgaaatcacttgatcatgtgtaataaggaatcacgtcttccataccttttcatatttttttatccatgaggctctattagtataaatgaagtgaaagggatcaagagtaagaattagatttataattaattgttagtgctacattcttcctaaatggaatcacatcaaaaattgtaagtgtgtatcactttattaatttttaaatcagctcttttgggctggctgctgttgcctggcttggggagtgttatccttctcagagtactcctagacagcgaagtagccaaggcagttgttgcattcaagcaattttgacttgtctgtactcgcctcgccgtagcttagatgtagtctagagcaggttgctctttccgataaaaacgggccaacaccttcaacctctgagacttgggatcattaactgtgaaaagtgaagtgcctcgctttaagccagtggagggactcagtggaaataagacaccaccctaggaatcaggtggagagaggcctaagacacacttttccttagatgtctagtgaagtgggaaaatatatactagggttgatctgttggggctaaggaattggtacaagggaacctctttagagaaaggttgagatagcaatagttgagctgaactataatacttttaaggagcccagaaaccttcctgattctatggcagttgggcagaggataacagagaggttcactaatctagggaaataataaattgaaattgtttggggttttatgttaattaaaataaaattattggatcttaaggtacagagaaaaaggcactgaaaattttagggctgctgtaatgaaaaccatcagtgtgcctggaactacacccattgcaaactatttttactggtactaataactctcaggtggttggtatacaggtgacctagaaaccattaagatttagggagagagggaagattctccttctactctttaggttcatagaaagct

SEQ ID NO: 119384 - DNA, 1085 bp, Homo sapiens
tgctcccttagaaggacatttgctgcttggccttggagggcagctctgagtcagggttcaccgcccagcctcctgtagcagaatgaagagaggtccttcttggtaactaagaaatgtgaatagaccatgggtaaggatatgatatctggtcatgggcttggaaaatgaggatgagcagagagtgacgagacagggtgcatgaagtgcaggagcttgtgttacctcggctgggagactggaggcctggccttcccttcttacttttaggtactctccatctgcaggggcctggactccacaagctcccagattcttcttcatcctgctgaggaagcctcaggagaaagcccagcacagggctggaagcttcgtgggcagttttaaaataggtgaagagctgtcctagaggagagggagcacagaggttgacatcaggacctgggaggagaagttgtgaggcctgggcttgggtgtctggaaacccagggtttctgttaattaacagctgtgtctctttaggcagggttcatcaccccacgagccttggctttctcatgcttaagatgggtgcaaggatacaccctcagagttccattatggggatagattgaggggattcctctcaagtgcttagcaaagggtctggcacacagcaagcattcagtaaaaattaactgctgatgttgttgtacttaaaatttttctaatggctagagccatgtgtcaacagagggtccccttagtaggaaatatttaaacagaagttgttcctgcctgtgatagaaacaatttctaaccaagtgtaatttgttacctctttgacctgtagtcatgtctgtgtctgccattttatgctgagtgagtgattttacagggaaaaagaaaagtaagagtaataaacaggaagaaaaggaaaatcagcctaacagttgtatgtgcatctcaacagaaaacataaaatactgggcgtgaatatgaaagatttaatctctccttgagtaggagctgacttcaaatacctctgtgatgatttgatagttttgttttttagaaaaagacttcaatgactactaggcttcctccca

SEQ ID NO: 119385 - DNA, 1114 bp, Homo sapiens
ggttgcctttccaagtgttgactctcctgtataatttttctgtttttttacttttcagagtcctctgttagttgtttagagattttggtcgtaatcagagagagggatagactggtgggctcatgcccccatagtggacctgaactgtagtttgggttgtgaatgcactccaggtgaaaggataattgcgtgacacacatatgtggtactggaaacgtggtggtattggctccacttgtctatttactctgtcaactttattaatcagaattaagcctggtacatttttgaggccagttagttgagattgtctaagatctgtgaaactctggctcgcttccttcctcctgccctcccttccttctccgttcctttctttcaccttcttaactttcctctcttcctttaagtcagtcttgccccttttagtgcccattcagaaaagcaaacaaatacacgtcagccttatgtgtaggttttgcctcaagttcctcctagtgacatattttcaagctgccagaatggagatgtctgttcaaatatttacttagcctttttcccttttcaaaacagctaagatggtgagactttttttctgatataaaagcaatctgtaatcattgaaaaattaagaaaataaaatataaaaatgaaaatgaaagtaattccatgatcctacataaaatagattctttataaaatttaattcctatataaaactgtaaatctttatgcatatttataattgtcagatatacctacatatagaagttatatatatattttataaaaagtagaatcatactttgaatattttttgtattaattttttctgcaagaaatgtgacacaagtgtcctttgatgttaccaaatatttatctacatcatcattgtcagtggctgcacagccactgtggatggatctttctggccacccccatgttgatgggttgttgacaataacatttttatccatgtgtcctgtgcacttgtcttaatattttcctgggataagtttataaaagtggaattactggttttttcctccctaggtttatgatgcatattcataggcacactggaaaaaaagtacctgcagtatttgaaagagtt

SEQ ID NO: 119386 - DNA, 1487 bp, Homo sapiens
tctttgttgaagtcctctgtgtatccctccctgtcagtttcttcactccttccctctctccctcccttctataagcaatcacattctgaattttgtattattaccttgattttcattagagttttactatttatattgtaaaacaagttgactttcatgtgcttttatgttttaacaaatgaaatcacagtatagctcctttcatgactttaggttttcatgcattagtgtgaagttcatctgtgttgtcataagtagagttttagttcttttgttttttgcagcttatattctactggatgaatgttccatagttcattcatccattctttaatgaatatttgcttggttacgattttctttttgctattacaaatgctactgctgaacattcttgcacctctgaatgtataggtgtaagagtctcactgagctatgttttacctagcggtagaattgctaaaagtcagcacttacgagcatctttgggtatcatcaaattgtttcccaaagtggttggcccaatttatattgtcttgagcctttctaaagttccctggtgttttacatcctctttaacacttgacgttgttcaacttattttggcagtctgatacgtttaaaatagtatctctagctgagcttggtggtgcacctgtagtcctagcctagaggctgaagtgggaggatcacttgagcccaggagatcagggctgcactgagccatagagtagccgccactccactccagcctgggtggtagagtgagaccctctctcaaaaattaaataaataaataataaattaaatcaaatggtatattgtggtttttatttgaatttacctggttattactgttaagtttgaacacaattttatatatttatttaacatttattgtttttcttttgttcatttttgggtgaggctcatttctgtcttctaaaactggcaggaattctacatttatatcggttactaatcatttgtcatttctatgtattgcaattatattcttcaggtttgtggcttttctttttctgttctttttttaagttgctctttcataaatggaatgtgtatatatatatatatacacacacacacacatttcttttttttgagtagctttaggtttctttatataacatcattctccaaaaaagtcacttcaccggggattgtgtgtgggtgtaagttggcaagtttcatgaagataacccttttgcttgtcatgcttgattctgtagtttaagtctctcatgttactgccttatcattcatattttcagcattgggattctaaatatttaatgactttcaagcatttaccctctctttcctagtgttctgtcagatttagtcccaccctcggtgacagtttcccttggctgggaagtcgtactctaggatgtgcttctttgactaggaaatgtagctcagagcttgcctgggagccccagtgatgcccttttcactgaattgga

SEQ ID NO: 119387 - DNA, 1395 bp, Homo sapiens
gcttctctgagaacctcttcttaggggtctccttgcctccagggtttccctcctccagtctgccctgcttggaatccctggatacatgccttgggctgtctctttcattattgccgtgcctctctggaaaatcttccgtgattctccatgaaggtattcagggtcctcccctcatcttctgctttgtttgcctcagcctcctttcatgaagatttgggaaaaatcctgctccactgacaggaatctagtattttagatacgattggaggtgctgtaaacacttcagggttttctaggccactgctcattcctatgtatgcacacatagtttgctttcattctgaactttttgtatatttcctggaaaagttactttgggattaatttacatataaaagtcctatattttcatcttatttttatcctgccacttcaggtatagggaaataaatgaaaaagtcttcaaatgttgacttctaaggctttattacctcagacagcttcattaggtttgtggaaatctagtgtgctttgaaggaattaatctagccttacttgcaatctgtatgtgtttacatagaatgaacaaacattgcattacgtttcatgaaaattcaattattcttgtctccaggaaacatgttctgcttagtatttaattctcaagtatgtcaaggtgatggttcttgaactgtcgtaagaattggggagctggggctcactgctcatttccataatcaatggagaaatagccagtggagactttttaatcactaaggtcctcatgtaacccatgtctgaggttacaggggacattggggacatcagtctcagtggcataaggctaatataaaatcctctctagatttttgttagaatgaagagaagtaacattaaggatgatactctacataattaatactttcttttggagtttattatgcatatgtatggtttattcagcaggcattttttgagattctattgttaacgaggtacagcaagagatggaaaggtaacaatcagctggtattagtgtctgttgtgattggttggaccctatttaactggcaaggatcagtttaaatgcttttattcttgaaacattccttgcaaagtccgacaactcatttcccactgtattgttactacagtgaagtgattttttggaaacacctatcacatatcatcaccatgtcttttatagttacacgatagttaactaaacttatccttttcttccacaagagtctaacctccttgaaggtaggaccatgcttaattcctactggttagtggctgcagtattatactgaagaaacggtaagtccggtttcagcaggccgagatgtggaggagacggtttggggtccagagtggcctaagggaattatt

SEQ ID NO: 119388 - DNA, 1033 bp, Homo sapiens
tgccatttggggttactaagttctccctccatttttttttttttagacccatggacatgcctttctgctgtcacttgtgaatgctgtcaaataatccttacatcctaatttacatttgcttatttcaaactgtttgtactgttctgaaaatatcaacacttgtttttttaaaatttatttatttatttatttagagatggagtctcactctgtcgcccaggctggagtgcagtggcgtgatctcggctcactgcaacctccacctcccaggttcaagcgattctcctgcctcagcctccccccgagtagctgggattacaggtgcatgctaccatgcccggctaattttttgtatttttagtagatatggggtttcaccgtgttagccaggatggtctcaatctcctgaccttgtgacccacccacctcagcctctcaaagtgctgggattgcaggcgtgagccactgagcctggccttgttttttaaggaataatcttttaacagttaactctcggtcccgataatctccgtataatctttggattctcattgctctgagggtaaaggtccaaatctgtagtgaatgtgtcctccaaggcaatgcctactctgctttgctctgaccagctctctggccatgcggacccgccttcaccgtcattccagctgagcaagcctttcggttctcccttcctttgctgggactgcctgggcacatctgatgaccctgtgacccactccagtagcacctgcatgtcttgttcacagcaggcatcaccactgtagtaaaccaattgtgattatgtctttatttaatgtcattgattctagcttccccttcccaagactgcaagtgccctgaggacaaggaccttgttggtcatagactgctgacccaccagcatctagcacgatacctggcacagagcgggtggtcacgtgtacttgtttttgatgtcattgtgaggagatttccttttccggttttcattcaaaaccgtcttggttattgcttatttgtttcttaccct

SEQ ID NO: 119389 - DNA, 1020 bp, Homo sapiens
agccgagatggcattattgcactccagcctgggcaacacagcgagactccatctcaaaaaaaaaaaaaaaaaagagatgggcagggtcattagcaggcaggattgaaaagattggaaagtgaggctccatcttaccttggctggtgaaaatggctccctcagggcattgctcatgacccccaaaccgtccacagaaggaaaggatattcctgtccctagccctgtccagctaccaaaacaacagcagggaaagggaggccgagggtagcccacttacctcgccttggtaagggtctcccctgctgttggatttagcttccagttgtgtcatttcaaatgcccgtgatcctctactgtgtgcaagacaaaagtacgaatacttgcttgtccagccaggccccgagccaccctcctccctttcccctacatatgtccacgtcagtgggcaagctggcagcccggtgtctccagcacatggggtgcaccctgtctcatctgcaggccattgtgtgtgtgttcacagttcagaagctgactcactatctctgcctgccaacatcctccaccacacccacctcccacccctatggtcagggggcatgggtattgaatggcagtgccatcagagcttgccagcaccctgtcacccaattctcggccactgggatcagagattatttcttcctccctgaatctctcagtccctgctgcaccatccacagctgcgggggaagggctggccgacgtttttgatcttgttttccgtgcctatcacaatgcctgtcacataccagatcccctgaaattgtttgttgagcagactgttatcataatctcctgtgatatttaccacattttaccttttgacatggttatttgagaatatttttaaactttctaggtctgagctctttgatagcagggcctgtgttttatttattttttaatctcctaaagcacctggttcttggactccatgaatatttaatagcctgaaataaacagaatttaattcctgga

SEQ ID NO: 119390 - DNA, 1049 bp, Homo sapiens
agaaaaataagtaactcacaagctgatgtgtcaaccaaggctataaatccagggagaaattcagcaatagaagagcattgtaatattagaaagcttccagatctccccactcaggagtatttcctacctgtaacacacagatccgtcgtacaaattatgctttgtttgctgaaaagcctcctgaagctgaatgggtttactttggcatcagcggaggccatgattgagggcggagatgagacattggatcgctcttgtgtggcttccgcatggccgtcgtggttcctctgcccagccctctcctgcgagggactcgatcagctccagggcgcagcttgtgtgtctgctcccatggccaagtccccttggctcccttccccttggctctggtttggcttgactctgccttctgctcctcaggtctgtctaggtttagtcctgtgtaatcatttgcagcaaagcctgcccatgactggaaatgcagtcctggcttggcaggaaaggggtttgtgcaagagctggctgtacctgtgtctgaaacacctgaggcccttccagggctagggatgcaagaagcctaggctggcaaagctggccttcctgccagggctgaggagcactggagccctagaaggggactgctgtccagccccttggccagccagagcaagggccactgtagtcaaacatgaattcacaaatgggaagagcaggaggtgactcagatccacctcccccataactgctaatcatagtgaattattaagagcataaaatcaggatcttgtttcccacatagagatcaggcccatcagccctgagcagttatataatccacctcatacacgtggataatattgagactggcacttccaagcagaagcctgctaaataaggacatgtttgttgtttcttctacctcatcaaaatgtctgtttcttattcctaagaatggcagggagtaaaggattatttatttcccttgatatttttcatttcaagaatcaacatgggcaggtttacagtgttcacaaacatgctggtagcaa

SEQ ID NO: 119391 - DNA, 1131 bp, Homo sapiens
tgttggctcagtgacccagccacctttgtgggcggtggtggaatgtgctccggttgcctgctgcccatgtcggtgtgcccagagcgggagggacatcattttgaccacagcactttggccttagaatgatgcagagactccatgtcactgcctgttcctcttgctttactctttttaaaaaaagacttctattctttccattaaagtttactccctttctagcttaaggagtcaaatcattctgcaaagtttagtgccaagccccagcagtctcctgtatgcctttcccttttccccacctccctccaccttcctatttcttcctccttagaggctgccagtttcaactgtttgacatctgagtctttggaatcattctctgtatctctaagtaacatgttcgtattgctgctccttgatttctttccgctttaaatattctcctttgaccatgcaacgtgaaatatgaggacttagccatgtcttccctaccctaacaccaaaccaaccaaaaggcagccttttcattcatctaacttctctgcagttagagcgtgttttgggatagatcggtgctctgcattaggttattttgactgatgctatccacaggtaaaatatttagtaaactgtaattaccttttctctttcacataactttttcttcagtctttttttgtctgcttagttttctgtatgcttttcaataatgcaaacacatactctctgcaaattgcctgaactgactctcaatacattcacatacatcgctctttttgtttgatcttttggagatgtctgtcccagagcctctgacctgcccctgcctaggcaggctgttcttttatcgtataggtatactgcttcctgtgtcttcctgtgtattatgtttttcaggcgttcagttggagggccagaaaccacactagctattttaaacagaaagagacttaaaacagatattaggtgctttctaaattattggaagggctggaggagtgggcttgagactaggtttccagcaatgctccagaaccacacagctgccctggcctgccaggggtgttgctttatctgccactttgggatgggagggagtcaggaggccgcctctgtgactattcacttcaa

SEQ ID NO: 119392 - DNA, 1028 bp, Homo sapiens
ttctgaaagggctaggtagtgaagaattatttttgtaagccctgcagtctctgccacagctattcaactcggctattgtggtgagaaagtagtgtggacaatgggctgtgttccagtaactatttacgaaagctggaggccggaccctgggcctctgacttgatcatctttaattcctttcagcagtgttttatagtttttagagtacaagtcttgcacttctttaatgaaatttatttctaagtattttattcttcttaacgatattgtgaatgggattgctttttaaatttcattttcagattgtttattcctagtacatataaatatgattgattttcatatgacgatcttgtatcttgtggccttgctaaagttgtttattagttctagaaggctttcaggaacctttcctttgtccttgtgcgttctgaaacctcacattgtgtaccttggtgtggatctactttcatccattgcatgggctgactttcttgtcatctgtaaaaaaactaacagtaaaattcctttcttgagtttagggcatttgttttgtggcctcgtctttgtaaggaaggagaaagagcattgttatgttattatacctgtattgaaactatcataggaaaaattttcaacaataataggtgtgttaaaactttaataatacaaattatctgtggatttcatttcttatgcctgtggcataaatatatcaacagcattatgagcagatttgttttcttaaaaaaaaaaaagtgggattaaagcacatagcacatgtcatttttctgttgccctgtgcatgaaaattgcttggtggattctgcatagtgagtcccttaacagcatgtttcaaccctgcatttctttcattttccttctggtttacattactgatttcctctctccccttctcccagtaatagccagctgggaaaggccttgttaaagtgaaggaatggaagagtctttagtaaggtaatgtagtcgtgctaataacttcaggcacagcaggtttcataagg

SEQ ID NO: 119393 - DNA, 1050 bp, Homo sapiens
taacaacattttactgcagttggagaatgactttcaaagcttcagaagccctaatctaggggccatttcatttctaaggaggttcatgatcattgcccaagtaatttctcattgtaatatctagagtcctacaagcttatgagctaacaacatttgcccatgaggttttagatgctgaaataagatacaataggtctgaaatgttaataaaatattcttcagtgatctcctttcttagtcaacgttgctatatcctcttcctgtgtcaactcctcagaatgtgggctttccatactgacagtacccccaccatgctacatgttataggtgaacaatctaattttttccagtagcttccactctcttctgtggataaatgttagtttgatgatgataatgatagtcataagttttattatcatcattactgttcttattcttcttctctggacctctgtgtttcctatcagtaaaataaatgtggtcagaccaaaagatgatttctaagatgacttatgccttaccattttatggttctatgattctagatatacattttgatgattatagatgctcattaccttaagaaagttatcagaagggaatgatgaactatgtttcaaaacatttattttcttaataacatggctaacttcagaatgtcattaaatagaatatatattggtgcaacgtttattattcattttcctgactgagaggctgaggccagtagtaaaaacttatagccaccaaatatcagagttggaagggacctgagagagcatcttgtctgtccctgctttcagaaagtggtgatattctcaacccaagagttatggtgacatgttatatacatcaagataaactcttttaagagcttcagtgtcatggaaactctttgtgtcagcaacatcaaagcccatgattttctaagtggcatttctcattctacgatgcactgcaaaataatattgccaaaccgtgaaagattacacatctgtagtaccagggttagctcaagatttcagagcatgccaattagatattttt

SEQ ID NO: 119394 - DNA, 1079 bp, Homo sapiens
tcacagcagaaccggcctgtctcccattgtgcggagccccgccccacacttcatatccctgctgtgtgtccttcagcgggtgacagtagctaatccctccgctggataccttcttgattttctctctaaacagctgcagagagctgagaaaactccttctcccactgcagcatgtcatgatccagtacttagctgttagttgccaccccagcaagtctcagaccctctgccaggctctggaatttagttgtgtagaatgttctgtacactgccctcggcatctcttaaaggaactgggtttctgtcagtcaggatgactcgcttcaagtgtcaatggataatgtctcatgaaaaaattaaaggcgatggaaaaatatgcggtcattgcttctaaaaagataaggtttggatttggagtaggaaatatataagaatgaacagagcttttacaacttttctttttcctttaagggagctagatttctaatcagtgtttttcaatatagtttaatggcttactttgtgggtttaggattttgaggttctgcatctgaattctagttttgtcatttgtcatttgtgtgcccttacacaagatacttacctctctgagtctcattcttctcatctcaaaaataggaataatactggtactgaccttgaagagttgtaaaaattaaaaagtgatggatgcagagcacttagaatagtttctgacacaataaaacttcaatgagtagtagacttcattattatctattttattattaatattattgttcacaacaccattccaaaaggagttaatttttgataaagaagcagaatttctttaatacagttggccctccatacctgcaggttctgcatccgcagactcaaccaagtgtggatcaaaaatattcaggaaaaaaaatgcaagtaaaaaacaatacagtatagcaactatttacatagcatttacatggtattatgttttataagtagacgtagagatgatttaaagtgtacaagagaatgcgcatagattatatgcaaatactatgccattttatatgagggacttgagcatcttcagg

SEQ ID NO: 119395 - DNA, 1259 bp, Homo sapiens
ggtgattagagctgggcttcaatcagctggatgattccccaaggcagggtcttgtcccaccagtgcacatggtgcgccccgtctgacaccagggcgacttgagaattgagcccagggaagctgcagtgtggtgcagcagatgcgtactggtggttgccatggagatcgctaatactgctgaaacccaaagaaagggcatttgccacagctcaggagcctgcctgaaaatgaatgagaaacaagtggaattcagaatagtcccccagctccttatcccacatggagttttaatttccttttctcctcctcttcctcttcctttttcaaagaatagattgaaaacaaggctgtgttataaagcatgctcagccccctccgacctcattgctgcctgacatatccctggaatagatgtatattaatgacgacgcatgactaataggattggggctgggggctggtgtagtggtgcttctggagcctgtgggccgcatgtcactggggtttagcaggcacgctgggatttgtctgcagcatatgcgctgctgttaatgattgaaaaattaccacaacaattagtcatggatcgctgaaggcagggcccccaaatgtgatggacaatgtgattaaatccatgtatgtgacaattaactctcctgcaggtttatccaccaaggagggtgccctaggggtgagagcaaaggggaatgagaaggaggaaaaatgggaaaacaaaaaggagcaggagagaataatgctgcagaatggatcagatacagctggcactattggttttaatctgatcctgaattaatcacggtttgattaatcctggttttattgcacctttctgttgcccatttatttatatcttccttaattttatagaagcatgactgattaaattctgcccattctgtgttttttaaattttaaaatcaggtctctccatttaatgtgatgtcctaggtggtccaaggtgcaattatctcgtaagagcttagcaggcaccagacatagcatgtcatgaatccccttatgtatcacagctgagtaacccagaataaatatttgtttgctcaatattctgcctaagtaaaaagaagccttgtgatgtcagtctgcttgtttatttgggtggaagaaataagaatacacacccccgcaactttgttaaatacagagagcacacattcagtatatgtcacacacaaaattttgtgcataaagaaaaagtgtgttaatatttggatgaagta

SEQ ID NO: 119396 - DNA, 1033 bp, Homo sapiens
cagtgattggttcattcatggcatgtgacccagtgagggaccaatgagacatgatgggggaaaagtgtcttcccttctgagaaaatgtcactaaagagatgttgcctcttccttccctccaagttgaagatcaggaggtgaggtctgggtctgctgagtaaggacagttgacactcagaagaaggcagcccccggcgaacgggagagaaccaggatatggatggaacatgcccacacctagacttcttgttttgtgagatgttatctccttctcaagtccctttgagtcgtgttttctattacctgagtgggaagcatactaattgatgttttcttttatatcactctgctttattttcttcatggcatttgtcagttggtgaattatcctgtttatttattctcatgtttattgcctgtcttccttactatcagtgaagcttcatttggacaggaacttacctgtcttgttaactgaattcacaactcctagaactgtgtgaagagtatcggtaggtgaccaataaatagttattggatgaatgaatgaatgaatgaatggagtgagggagggatgaacaaatgaaagaatgaagtgagggagggagattaatgttgcccttgtatattttataaaatatcatggggaggggttggagagggcttatggaaggccgttgccatgccgaggagttcacagctaggtattgagagcctgccccttggttgttgcagtgcagtggggaagggccagacaaaagggatgtgacaaacctaacaggacttggaactgcggccagagtggaaatggggagaggtgggcttaactcctgaggctgcaccagggggttattgggaggaataggatgtaggaggaatagcagttgcaatactggaaaacaaggaagtgtattttggaagtgtaggatattaagtgccagttaggcatcagtgtggagctctagctggtagttgagaatgtagaaatgaagacagactacttttataatcagaagaaaatatccctctttct

SEQ ID NO: 119397 - DNA, 1051 bp, Homo sapiens
agttctactttgctttagtgttcatgcgtttgaccaggggacagtcttttcttgaaaacccaggacagcaaagtctccagatagtcatctagttttaactcccagcaggataaaagcatttctaatacacagttgtttatcttttaaattttgtcatctttctgatccataacttctacttttacattatatatccacagaagttataacttcttataacaaatgctgttacagctcaaatctctgcataataaagcaattgctaaagccctgtgcagtgacccagttcaggcggtatcgtgtatataaaattccacagcgatttaaaaaaatcattctggtttgaattattttattaactccacattacaacttaattgtatggttaggtaacaactttaaagcagttaagccaaaacccacacagccacacctgaatataccagtctcagggagataccagctagctatattgatgcaccctgttctagcacaaccctctgctcctcaggagaaggagaagggcaggaccattggaagagttagggacctacggcccccttctgtcatgtctgtgtctgcacagatctttccaaagagtagattattggcttagtgttaacctggaggaatatttctagttggggtgatgcagagccctgtcctcagaactgtctggttcacgatttttatcaacgactttgatgaagacatgtttatcaaactggcagttgacgcaaggctgggaggatagctaatgtgattagtgacttgatcttgagtcaagaaaatcatgatcgtctaaacggatgcgccagaaataacagggtgaaaaatagtaaagttaaatatgaagccttcaaattaggtttaaaaaattaattgcacaactccagagtggaaagaagtggaggatgtaatttgtcacagattcaatatgagttaacttataataaggctgttgaaaaatgcaggcaatattatagaagtacatatacagctcaaaaaaagtaagaacatggcgcagaacgcatctggtttattgtatccg

SEQ ID NO: 119398 - DNA, 1060 bp, Homo sapiens
cactcagtaaatgttagctattaatagagaaacagatgcatttctgttactactcattttagtaaagcttaactttttatatattatatatttttatatttggaaaagggattatcatcctcactacaggacacctgggaagtcagagatgaggttttggttttagtctcagtagttgaccagagaaagggaagtgtttccctgagccccaaaccctgtttccacgcagaacaggtctgttcttgttatgacttgtttttattttagccttctattcaggtgagttctcactctgtggtaatttcatgaaaaatttgtggtaaatctttgttcagcttagtggtggggttagagataaaagttatctcacaggggagaagtctccaccgtcagaacttctgagtaaatgattgctttccctttgcttgtgaggagggatagccagtgctgtattgataagcttctctttcaatactagtatattttgttgctgaacaacaggacttttaaaatatattgttaatgagccaaatgtgatgccaggaggtcagcatgttgaggtgtggacttaagctttgcattgctttccttcatcccccgtggtcagctgtcagccacgtttccatcatgggaatgcatgcacaggccacaaggagttaatccttctgtccttccaagcaaaatgatctacctctgtcttctgtgaagagagatcatggtttttaaaagctaatatgataatggcagtattattagcaatctcaaatgaatctttgatcagttgaattgtttgatttacctactcattcatcagattttttgtgccgtgaacatcacacagaatcctagaagggcaccgtcactgacagaaatgaagctggttggatattggctgctcatgtccaggggtattgatgattctttcaaataaatctcaaagtaaggtatgcataaaaagataacactcagctgatataacattgcttatacagagaaggtttttcatttgtttgtctttcagtttccacatccaggtgttgtgctgtttccctggacctcc

SEQ ID NO: 119399 - DNA, 1023 bp, Homo sapiens
atcagacccctcagtggctttacttgcttacgtcacctggtctccatgaggacacatgctccatgtgtgtggcatgtggaaaggctcagtaagcattgatgagcagactgacttccatattatcctgtgttgtaggggcatggaagctggactctggggcttattctggagaatattctctccttgaagcagtgttctttgcttgaagattatttcttttggattttactcttcatcagaaagtagatgttatgatcagctgtgtccttggataaatgtgttttctcctgtgccctggagttcatcttttgctttcgtgttaagcctagacccttttttacctctgtctctctgaatcttccctaacttgatcccaactttcccctaacagtagtgattggaatgctcaaacttcaaggaaaaaagtacagacatacattagtgataatgttcaaaaggctatcgttagtcagattgtaattctgttccttgtggagaactttttcactggttctatatatatgaagtactcaggcttccaccagttctatcagagctgaaggatttagtagggtcaatatctactattgcactgcctaaatatttctaatctaatgtacttatatttgattccatggacagaattatttgctctgtactaatatttggccatatatgaagtcatcattacaatgtgttcatattcacctgttcatgctcaaatgaataattttacagtacagtgctgaagaaaatattgtagatttttgtttatttgctgtagatctcttttgtgaaagagaatgggtttaatggagcataagagtttagttgggacttgttgaatttgaggtgcctcttagaaatctcgtgtctttgcagaacttcagccattatctttggtaaaatcacccacctaacttctctttcagtctctggcttttatttggcttttaaatacttcatactccgcatatctaaatctgaatccatcatttcttcctgctttcctcagacacacac

SEQ ID NO: 119400 - DNA, 1034 bp, Homo sapiens
ttctgttgtttccttcacatctcatccttctttatcattcccatgtctcccttgctgtattgcctgcacaagttcacatgtttgaggaacgaaacttcaaacatagtctgtaccaagaggctttattattttctttttcctctctcccccttttcccctagagctagttcaaggtgtcctaatggtctaaaatgtcaaaagaaaactagatgaggaaaaagcaatcgaaaataactctattacaagcttccttatagttcagattcatccctttctttttgacccctttaaacaaatgaacatgttggcctatttcaggggtaattgctcttctcttcagaatacacctcctaaaatgactgctgtgtgaggttgaacattgtgggtgacgaatgtctgccagagcagagaactttgttgttttccctccttccctctcattgccttcattttcttcccttttagataataaaatccttttccaattatagaaactgtagaggtcaaaatgtgactcaggttaaaccctgtgaaaactgtagccgcctgaaattataatgcacatttttgcttttgagccaaggtagtgtgccagctggaagatgtaaatttgtcatcattttctgcctttgtttcatcttttctttccttttctacatcgtcgtaattctcaaactttattgtttttctctgttattctctccccttggtaaacccctgtgctcccagtggagccagaagaaattgtacatggggctttgatattttgccaactgttttctataattaaaagtgaattggaaatgggaacacttcctctgttccaccgatgcttctggggtctagtctaatagaaacatggaaaggtgcaaaaaaagaatctggagctaggaagggaaaatggaagcttgcaactcaggctaaggagttcctaatggaacatcagccctttaagccttcgggttttctgttctaaatttgctcttttctttgtgtcagatcattagaaagttttatccaaaattaaaccagta

SEQ ID NO: 119401 - DNA, 1055 bp, Homo sapiens
tgaacttcaggatcattgtctcccaatttgcttcctttggcttggtgatatcattgcctgcagaaatagaaaactggtacaaagccatttatctagttctgtgtgccagaatatctttgatgagatcataagtcgttcttttactttttaaaactaagtgactcaaatagtagtcactaactacttaaactttgggtacagcaatggcctacatttcctgtttcttttgtgttggttttcaactgtccctgtatggttgctgccttttcaatgccttctttcttctctctgcatacattaatacaaggggcatctgaaatttcagcagaagcaaatgtcaactgtaccaagctgaggtagcaattctaggggtggtgtcctttccaaatgtgttgttttatgaagatataagttttacatgattcttcgtgtcagcagttttgccacttgccatcgtttaagaagtctattgggtatctgatcctgttctctattatttcattgtgctgcctccctctcgccctccctccctctctccctagaaaactttattttctctagcttgggaaaatgtgtgtggtacagtgagaaattctggtaacttgggtactgcgttttcttcagcttcttgagaaaaggctgctgtggaggctgggaaagtactcatagaaatgcagcttttctcccaggctgcaaagagctgcccatatggttctgtcgaagcagaatggagaccaaataagacttgaggaggaagacaccacattagtaagcatctctcctggatgactgaagggaaatcaaggccagccacaccagcggagggtggggcaaggccaggcgcctcagatgcagcttgcagaggagaggcctgtgcagttaccttcagtgtttttcatcagagcaggtaaactgcaggcctgtctggtaccaggtgctggctaaggaacataccagggtaccatggttaaggcacggactctggagttagacaaacctaggtttaattgctaagggagtcagagtgctttggttgtaagctgtagcaccaattt

SEQ ID NO: 119402 - DNA, 1089 bp, Homo sapiens
cttataactccaaagttttaaaatttctttattcaactcaagctctgaccataggtatcatgttataaggaggctctatattgaaagagaacctataaaagagctgtgtatctttgcaatataactttgcattttttaattaaccaaggatataatatgtttactcaggaacccccccaatttaagttttcaattccagcttcagtggtgtgcatgctactctgaatcttgtgaattcagtgaagacgtatctgtccactgctatgtataagcattttgcaagatgcttggggtataaaaatgagtagatctggtaggatgttgttctggagaaactagtcttctagcctgagagacaaaagtttagatagatgcattcattgtgccctgggaggtactgtggtggtatggaatatgagcatggaaggaagaagagtgtctgcgtttcgcacagtttgggagatgggaagggctgtctgagctgaatttcaaagaatgatatgagtaagtttggaaaaaagaacaaaggtgtaaaaaagcacagtctatgaggaagaacatcaagcattttattagtgctagagctacgttgtccatagccactggccacatgtggctagtgaacacttgaaatatggcttgttccaacagatatgtgctttaagtataaatatacactgaggtcaaggcatggtggctcattgcctgtaattccagcactttgggaggccgaggcaggcagatccacttgagttcaggagtttgaaaccagcctggccaatatggagaagccctgtctctactaaaaatacaaaaattagccttgtgtggtggcacacgcttgtaatcccagctaccgggaggctgaggcaggagaatcgcttgaacctgggaggtggaggttgcagggagccaagatcacaccactccactccagcctgggagacaagagtgagactcagtctcaaaaaaaaaaaaagtatagacatatatatacacacacatacacacatactgggtttcaaagacttagttcaaaaaaaggaatgtaaaatatctcataattttccaaattaaatacatggtgaa

SEQ ID NO: 119403 - DNA, 1028 bp, Homo sapiens
catgtttccaagaacatgatgaattcttagtttttaccaatatagcataaaggagagtgatgagaagactggtctcactgtttcacagtctgcccagcctctattctttttagcctttggaacctctactgacaatagataatgaatgtaccacttgacattctactcctattcacatctttagagatagcagtgttacctatgggaaggaaatattaaggcgagcaatccataagacactaaaagtagtgagacccataggagagagggaacttggaagaggatgtgtgctgggtttcaaggatgaagggcatatgtgggaaagaggaactgtgagggcactgagtgcctgactacagagtgagctggtcatgtagaggcccttggtttcctgggcagaggaagctacagggaatcctagaatccctaagcagaataaaagctactgtgtgaacatgagaggatttagagaagatgtattaacgtaggatatgagtgatttgttcacagtgaagattcataagacaaatcccaagttaaaagcagagcatgttcattgctacttgacgtgttggcatctacacagagctgtctgatgataatacttacaagtacctttgtaatccttcctttgcaccaggtcctcttctgagccctttccctgtaataactgatttaggccttacagtagctctaggaggtaagtactgccaattattcttgctttacacatggcgaagttgaatcagagagagattcaataacttgtccaagatcaccagccagtaaatggtgtagccaggattagtctggctgcagggtctgtgctcttaactcgtctactctttcgataggtgaatagtgtgtgattaagctaactgtatggctatgcttataggacaggaagaggctgcagcttagctagagcccagttttcctctgagaaggaaagcaaaccctggtgactctacagtagctttttgtcactggcctgagaccactgtgttctactttctactaaagagctg

SEQ ID NO: 119404 - DNA, 1013 bp, Homo sapiens
attacacttagtggcctaacatagcacgaattgactatatcataatatccttgcatgaggagcctggctatggattgatagggtcccctgatcaggatcttaccaggttgaaatcaaggcagaggcagggctgtgtactctgaagctggggtgctatcatcagctcactccagctattgggagaatttgttccgtcccactgtagaagtgaagttcccattttctccctggctgctggtgcctctctgagctcctttaggacttctcaagggcccgagccatgtggcctcttcacagccaggaggtggatctctctccaatcggccaagatggagtcctagataaaaagtaaagcagtcacaggcttaaattcccattgtgttcctagatcccacccatactcaacgggaggagtttacacaaggcatgtgcatgcggggtgggagtctccgaggccatctcagcctaccacaggatcctactcatctgttagtgtccagttggaattatatcctttcatgagctcatttcataagctttcctgcagtgtgaactgctcctttgcctgccttcattctgcagtttctatcttcccttttacactgcctcagtttgtgaagtaaacccttctaatttatggcactgacacaatctgagcaggacactgtacctttggagtaggtggtgctagttatacccctcgtctgggcctgcttgtgttctctgcaatgctgaagtggctgttggtaagaataagcattatggtgtttaataaaactgaggttcttaaaggcatgacgtatgtactttcttcatgtaagttcgttctaaacatgttatggccactatggcatgttttgaatgtatctcattatctactacacttaaggacagagaccgtcttttctttccactctgtaacctatattcagtgggctaaatgtttgaatcagagcaagcaaagactacagaaaaatcataactcagttcaggaaccagtgcttcagaaagcc

SEQ ID NO: 119405 - DNA, 1895 bp, Homo sapiens
cccagcactttgggaggctgaagcgggaagatcgcttgagcccaagcatttgagaccagcctgggcaacatagagagaccccgtctttacagagcaaataaaaataaattagctggacatggtggtgcacctgtggtaccagctgcttggttggccaggcaggaatattgcttgagccggggaggtcgaggctgcagtgagctgtgatcatgccactgcattccagcctgggcaacagagtgagaccctatctcaaagcaaacaaacaaaaaaacagtaaaaacattagaaatgcagttgaaacacctacgtctccctgatttcattctgcttcccagtctccccagaggtcaccactagctacagtttgatatttacctttctcatgttcttatccatttgtatgtgtccaaaaaacattctgtaggattgcttcaaaatttatgttatatggtaaaagtcactaaaatatagaaatccagagaagttttttggaaatttgttgagcaaattctaaaatgtatatggaaatgtagagggccaagaatagctaaataacaatgttgaaggatttgcttaatcttatgtcatctttttgaaaagtgatagtaattgtgagaatgtggaactgatgcaaggatcaacacaaaggcccatggaatgcaatgaggagcttggaaacacacctgcgcactatgctagatttatggcagcactagcactatggaacagaggcaggaggacaaggcttctgtgtaaatggagcagggataattgggtgtccacatggaaaaaaaatgaaacttgaccccatatttataattgttcaaaaatgaattccagggggtttgtagatctaaatgtgaaaagcaatttattagcttaccgcctttgaaaaagccattttaccatgagtgattctttcattctttttggagtaaattgaattgaggagatcgaactaaatgaactatggtgatataaaattaaaacgtaattaaatgtctgctcttcaaagttttgaaatgagtgtttacttaaagtgcttcttgtaagttttttgtaaagcattttatcaaattaggggtgtttccttctactttgagtttgcttcaagttgttgctacaaatgaatgctaaaatttattaaatctgtctatatatttcgagatgatcttatgatttctggctttattctgttaatcttgtgacatttagtgattgttttttgaatgttaaaccaatattttattcctgaaatatatataatttgactgcaaaatattaccattttatatacttgtagattttgtttgttaatatttctttaggatttctgactttgtgttcaggggtgaactaggcctttaatttcctgtgtttgttacgatcttctcaggttttgatgttaagattatgatatcctcataaaactagtttagaagtatttccattttctagcctctggaataatattttgaagatttatgttatttctttcttaagtgtttgatccaatttactagtgaagtcacttggggctggagtttcttttgtggaaagtttttaaattacaattaaatttttaaatagttattaggctattcacattttctgttttactttgtatcagttttgattaattgtggttttttctagggaattgtctgtttttaaattttcatatgtattggcacagctgggcgctgtggctcacgcctgtaatcccaacactctgggggacagaggcaggcagatcacttgaggccaggagtttgagaccagcctggccaacatggtgaaaccctgtctctactaaaaatacaaaaaaaatagctgggtgcactggctcatgcctgtaatcccagctacttgggaggctgaggcacaaaagt

SEQ ID NO: 119406 - DNA, 1409 bp, Homo sapiens
aattattaatattttatcaaattttacacacactgttttttttggcatatcaaacctcttagagtttgcttttcttcttaatgaagtatattgtttgagtatttgtttctgtgaggggttatgagtggtacattcttttggtctttgtatgtctgagaatgtcttcatgttactcccattcttgaatggcagtttaacaaggcataacattctggaaaggtagtcattctcccttagctctttgaagatgctatttctgccttctggaaaagtctaatattaatcaaagtgttgtttctttgtagataataatgccttttattttgagtgatgtttcagaatttctgtttaaatttgacattccctaattttaatatgatgcattttggtttggatttgttttggtttatcctgcttagtatttggagggtatttttgttccgggattcatatctttactcaactctagaaaagtctgagttattactctccttgaatagtggctctcctagattctctctattaccttctctaggtttcctgttgtatattggagcttcttagttatcagttatcttaactattttttggtatttcttatttctttgtcttgtattggtgaatttgtcagtactttctaccagtttaataatttcctctctaattttttaacttaataatgtttactttttatttctaaaatgagcttcttttcttctccattttcttgtttaatttctgtctgattttgtttcctaatttcttgcttttaaaaatggttgttactttgtttagtaatttgaatatcttcagtatacttgttttaaagcctttagctattctgtattattttttatctaaaatgagttcatattcttgttgttgatttaattggttgtgtttcttcatattataatttttcgatgtttcaaagtctgactttgcaagcttattttgaatacatgctcatttccccccatttttgattatcaccacttgtccatcttgtctaccaactttttacggcatcctcttgtccctagggtgcccagttaagaagtggtcttttaacggcgttatagagtgcttgccttctgattatattgtcaccaggttagtgggggttttggctcaatacctgatcaagagtattgagtatctcttctttctgtggcttcctataaagcagtaggtgattcaaagcatgaactcatagcagcatcatgacaggatgttgaaatgaggccccaaggaaataatctccttaacattcaggttttcggatgagtgttcatcagaaagcaagttatatggcatgtgtctgtgtttgttacatctgccttttccctgccctgacatttattggcacagcccattcccacagatgtatattttatgtaagtcagtca

SEQ ID NO: 119407 - DNA, 1038 bp, Homo sapiens
tattgctgcaaacaaattgctgccagtacagattacattgttaagcatgatggttgaaaatatatatcacatttagaccattactggccacaaggaactgatattatttgatgtggtttttgaggttcgttctttgtcttgctgttactcttctagatacatatctatttgttgagtatagcctggtgtcatcaccctaggtcctacatgttaagattcctaaggttcagacaatagatggaggataaagagttgattctaagagtcttttaaaattctgcccatgtttatgcatatatacgacatacagtcaaatccatccccaacatcatctttgagtgtatgatgagacagaagagatctgaaatttagaggccttggaattatttagctagtcgctagctattttcccctgggtcactcacctgactgttctgtcactacattttctcactggtaaaataagttcagatactctcaaaggccactccttattctaggatgctatgaaagtgagtaggattttcctatctcctcttctgtgtacctcagattgcattgttactcctgacattcatcttgacttaatcttgccagcttaaaaaagttgttgtgaaaagagatgagtgtttctctgttgacttgtgattatgtgaacagtgcagagtgcaagccctctctctgcttctgtctggtctgtctctgtccttccccctttctgtctgtgtctcttgctgtttttctctatgtggcattttctttcactctgtctcttgtcactcttgtaatatgcggttctgattcacgttcaactgtcaacatagcaagggggaaatggtcccaggctgcataaatccacaatgggagtgatttctctgctctttattaagatttttgttgatgtatgtgacattcaacaggatttatcccaaacacaagagcgttattaattatttataaaacatttctgagcatctgctcttgtgccaggcaccgtgcttgaccctggggacacaggaagtatagtttcctgccttc

SEQ ID NO: 119408 - DNA, 1015 bp, Homo sapiens
ggtgaagtcagggcatattgttatgggggagaggtagttgctgagcaagcactggcatgggttgatgcttgggaatggctgtcaagaggacagagtgcaaaggtcaacaggtaagataaaggaaagcttcctccagaaaagaggactgcattaacaggggttggggagagaggtagaagacggatgtcagggtcaggcatacagtgtttcttccctgcctgcccaacatgctggactctttaaggatccttcaattcttgaaccttgcttaaggacaggttatgtaaatgctagtcatcagcaaaagccaaactcacattgttatttctttttaatcatagctgtattaagcttttggaggtctgttctcccaaatgtttctgtctgttaagcagaaaatatttcttccttgaccaaggactgaaaagtgaaagaaaaaagatagaataaaatgttctatctagaaagtgctatctagatttgaatagttggaacatcttcctaaggtgtttattttggtggatatgtgaggaaatgagaagagacgatgatattgaaagttgacttgcattatttgtttaaagttttgacaattttgagtattatggtgtgcactttgcattctggtgcagtgataaaaaccacaacatcttctctttatttcactcttctgggcttaaatttgcatctttaatattgtattaccataatttttgcatattgtaaggtaattcagttgccctcttcctgcatggttcagatttccagttttgtatgagtttcttattattctcacccagtttcccaattagcaccttgttaactacacacctgctgcacagaaaattgtattacgccatttagcctttttaaagaaaaaaagagagaatggaagacactctgttaataggttatttcaacctcaaaaagtgatgcctctgggcacagaaccacaacatgattgctgacggggagaacctgattgtttaatagatgctagaactggaacaagaaa

SEQ ID NO: 119409 - DNA, 1041 bp, Homo sapiens
gcatctgcttggcttctcaggaggcctcaggaagcttacagccatggcggaaggtgaagggacagcagacacgtcctatagtgaaggcaggagcaagtgagagagacagttgggggtggggaggtgccacacacttttaaatgaccagatctcacaagaattcactcacttttacaagacagcaccaagccatgaaggatccacccccatgatccaaacacctcgcaccaggacccacctccagcactggggatgcaattcagcatgagatttgggcggggacaaatatctaaactatatcaatgcctaaaaaacaaatagtaagaaagagatcgatgactgcctcccatacaaatgtacgatctcctcttgggagttctaggtttgtgccacagcttccttgcccacctccccaccccaagcccgtaacaagtagcctcattttattccaggaaaagaacttagaccatctgacatgaaatcccccatcttttctcttctccacttctgatttttttcagggtgcttctatccatcctagatctacttaatcaaaatctttggggatggaatccagaaatctgcttttttaaaatgctcccagtgattcttctgtgccttaaagtttgggcacttctgaccaacgctatagtaataaccaatggactggttccactaacttggttcttcctatttctggccatcatccacatatcatggtactgtctcatgttaatagtttaatgctgtcttgtttcaatagttcctcattacttaaggaatagatcttgagttccttagcacaatatcgaaaatatttgttcactaaatgtttcttcctatccagtctgcctcgccccctgctcccttatacctgctttttggcagtcacataggacttctattttctgaagtcagtagaaatttatttgttgattcactgattcaataactctctgttgagtctctgttgtgatacagactctgtgctcagccattgagttcatgaccaagacatagccccttccctcactgagatta

SEQ ID NO: 119410 - DNA, 1004 bp, Homo sapiens
aacataatgactacaaataatgacttacctatgttaagtacttatggacccacggtggctatgctgaatactttgcatgtatttcctagaatctttacaataacaccataaagaaagtacgaagagtgtcccattttgcagatgagggaactgacatttagagaatttagacatctgtcctacggtacacaactatcaggtggcccatacgaaattgcttttttaggtatcaaaagccagtcacttattaaaaatttcatgtagttcatgctgacaatttctggcagagccattgctaccagataactctaagtttgtgtgtatatactgatgtaaaactctccatggctccatggctgggcttttagtcagatttcaccaaattaaaaagatgaacttctacaaagttaaaaaatttttgtttgcactttcagcaaaatagctctttatgttaaactctgagacatggaatactgaagtttatgatatcattgtggttgcaacagtgttcaacttgcaggttccatgatggttgatttttgactgcttgagtgtgtttccctgcaggcctgcagggtgagctgtgaagctcacatagagacatttgagttgtattaaaatgggttagccaaggcctaatgggctgtaaaaaataatgtgctgtggtggtgtgtctgatgatttccagccctcattctttcatcattagaccagtgacaccctctaaacaaacatcttaccagtcaatggataagtggtccctgtgtccaatacataattctcatgcttaaaattaaaaagttattgtaaaaacaaaatggtcactatgcctaatatatcactgttcttccttagcaattagaacctctaaaatgagtgaaattagaataaagaagaacatttctatcttgtttgcatgagcagataggtcttggacctctggaagttcagctcagtccaccagtgtttattgagcacctgcagccaggtgagaggcattctgc

SEQ ID NO: 119411 - DNA, 1056 bp, Homo sapiens
tggaatacacacacatatatacttatatttacatataaacacttatatacacatatatatgtcaatttctttattcatttatcaatgatacttaggctgtttccacatattagctagtataactaatgctgcaatgaacatggggtacagatctctcttctaaatactgatttcattttctttgaatatatgcctagaaatgagattgctagatcatatggtagttctgttttcaatttatggatttatggaggaagcagcgtactattttccataatgattttttttcaggtagtttattattagtatatagaaacacaactgatatttgttgatttttgtatcctgcaactatactgaatttgtctattagttctaacagatttttggtgactctttagagttttctatatgtgagctcatattatcttcaaacagacaatttatcttcctgccatatttggatacctttgacttctttttcctgcttaattgctctggctagcacctctagtattatgttgaatagaagtggcaagagtaggcatctgtatcttttccttaatcttagaggaaaagctttcagcttttcaactttgagtgtgatgtttactgtgggcttgtcatatatggtttttattgtgtctaatttattgattgtatttatcatgaaagggttgcatgttgtcaaatcctttttctacctcttttgagatgattgcatgatttttatctgcattctgttaatgtggtgaatcacatttattgatttgtgtatgttcaaccatccttgtatcccagggagaaattccacttgatcatggtgtatggtctttttaatgtgcaactgaatttaatgtactagtattttgctgaggatttttgcatccatgttcattagaaatatttgtctgtacttttctttctttctttctttcttttgtagtacccttgcctaatttaggaatgagataatgcttgtctcataaaatgagtttggaagtgctccttcctctttaaatttttgggatagtttgagaagggttgttgttaatt

SEQ ID NO: 119412 - DNA, 1107 bp, Homo sapiens
ccagattccaaatagttaatattcttaaaccagcaagaagcccacggtcattttgagaaacaggaatagtgatttgggtggaggtgagatgtgagataccctgcaagtcggatgtgaatgcccctgccaggttctcttctggcctctagtaaccagtggaatccaaaatttgggttgcacttggtcttttcagtttacaatgtaggaaggacaaactcacttataatctttgttaggtttcccctgcctaacttggttaaatccagcatgtctcagaggtacttgacaatggcccagggttttcacagtccccctcgtgacaccctgtgggatagttttggtcaggtgacaatgtgtgaggtgctgagcacccgcttttgcagatgaggaaacctggatgcagaaagctggcagtttgtgcctggtcagggagaagaaggcctggcgctggcactgctgccctggacggaaagcagctgctccagaaagcactcagtaccttcttcttctccctactaagtttggcatttgacccaacagatggccaaaaacttgtaaatattcacccatgttttgttatttgaatggactgatcttactgagacttttgcttgctggatggaaggtgtggctgtctttgggaaggggagagtgacctgaccccttgaggactttgggccatgtttgccaagacagctgggtctgcttctgctcctggtgcacagtgccacattttgcacttgacacctctaaaattccctttcccctctggcctatgagctcttgggaagcagggaggaagtctgagtggctgaagcagccattgcaggcaagacacagagcggcgcctgatgttcttttctctggtctgatgtttgagttctgcaggccaccgcctgagctcagagccggccatttctccagcagcactccaaactcacagcactctgctaaccaaggcattgcagggacccgctgtgaactttggcgtaggctttgttggactcatttgaatttggcccaaaagaaaataacatttcacatttctccctaacgtggagaaattgaactcattgtcttttttgttgaagtctactctaatattaa

SEQ ID NO: 119413 - DNA, 1038 bp, Homo sapiens
aaatgttttcagaagtaatcaactcagcataaccactttccctgggtatttctgtcaccaaaaggggtacaaaacaatgcttccaacacaggcataaggtgaatgtctactggggggctggggtcactgcagagaaaaaacagaaacagtgttaattctttagcactatggaggtcaggaagaaatcgaaaacatgtagtatcaaagcatctggccccaaaggaccactagaccaggacatgggggtaggggtagggtgaggaagaaaggaggaaggtcagattcaagggggtccagtctgtaaaaggccttccttctgtgagatttggatgtttgacatttgctccaattttgaacaagccactggaaatcacgtcttaagttctttgggttcatttcaatttgctccttttcctctgtacactggaacagtcagaaggccagctttgtgtggattcaggcaaattcaagtgacttcgctagctgggcctcagttttaccttgcagcatatagagtccctatcagaatgggggccttgcagagactgagatgatgtgaaattaacaagaaactgtgagccagctctgagagttcatcctctaagtatatttgaggttaaattcaaggttaggggttcgcagacctagcttctcattatgtgtgttttcacctagcatctccactcattttaaatgaggcagatggaaggcttatatctgtctcacagtaagcatgattaactgggagaaattataaccaaaaccatacgtgagttcacttaaagtacatgatggcacaagaccatgacgatacagaaaagaaatgctatggaagatctacacagatgggcaaacctcctgcaaatattttacgtctgagaggaaaaatagagtgtgacggtaatgccgcctccagaaagactagttatttaaccgaaaaaaatgaacgtaaaagattaagtgtttggtaagttctgaagatgagatagagacagaatagaaaagagaagttctctgtatttcttctgtcaatatatt

SEQ ID NO: 119414 - DNA, 1052 bp, Homo sapiens
acttgatgagtctcgtgtggtttcttaatgaagtaacagaacaaaagttgcctgagtaggaactgtgcctaactctggccaacacagtatgctcctggtactcagtgaaagtaagaataaaaacaaaaattggaacaaagtgagaaaatctgtaaatatcaaagcagcatgaaatcataagttaaaacaacctgaattcataaagtaccaaactcaccagccaaatttgataagcagtttttattacaaaatgaatagatggaattaaaagtaagggccatcaaacatttcgatggaaaacaaagtaactgatagtgcatgctattttttataggtaaagctgatttttaagtgaatttagataagaacacgatcgcatgggctataaacagactggaagtgcttatgactcaagataattaatctaaaagctaaattaatcattcgaaaaggaaatgtcatggaaggcaccatagggataaatgttggatttggtgttatttacataattgttaattaggctgaatagactacttctggaaacagtagtagaaacttggactaaatgtttgtgtccctcccaaattcgtactttgagatccaaccactagggtattaggaagtggagctttagaggggtaattagttcatgagggtagatctctcaggaatgggattagtgccattagaggaagagacagcagaacttgcagctctctctttctctccccctgccatgtgaagattcagcaagaaagccgccatctctaaaccaggaagagggccttcaagcacccaaccatgctggcaccctgtggcctccagaacagtgagaagtaaatgtttgttgttcaagccaccgagtctgtggtatttttgttacagcagcccaagctacatcagagcccttagttttaaatgggaggccttggggccgggctcggtggttcacgcctgtaatcccagcactttgggaggccaaggcaggtggatcacccaaggtcgggagttcgagaccagcctgaccaacatggagaaaccctgtctctact

SEQ ID NO: 119415 - DNA, 1074 bp, Homo sapiens
ttccggtcattgaatgactttattgggtttgtaaatcctaaaagttctacatgaaaatctgtatttaagaagatatatacatttctggaacaagaatttgaatctgttttcatatcctcggggagacctttgtcctcctccctgacaaagttaagaaccattgtgtgaggaaacagagtcatgtcgtggctgctttgtaggctgcactttgcctgctccaaacacacagcagtgacagatcaaaatctaaaaagcgaaaatgaaaaagtcataatcgtgccccctactcccctaaaaaagatatatcactacagaccagagacaaacgcaaagcagagtgtgaaaccagacactgtgggctgcaggatcgctagccgggaggtggaaacagaggcttagctctggtggcagtaagactaaatgtgccaggccagagcattactctgcttgaaagcgggcagggtagtggtcctgtcctctgatctagaagggaggcccgaatcactgcctgccctaacctctagcctatagaaagctttgatcctgggaagagcacaggacagagacaaggcctccttctcaggaactgagctaagcaccccatgtcatcatcagccgtatcaccattgggcaagaacccagaccaccaagtcaactccattctgtgtgaggggttcgagcagaggaaccataaaaacctctgagcagggagggtgatcagcaagagaacattcacaattatctcccatgcaggccaagcctgcccacccaaattccatgccacgtgaggaactctgaccttggggtgtcagccatccaaatcagcaatcagaatgtgaattcactggagactaaagtaaaataaaaaagctatcttggaaaaaaaaaatgcctgatgccctcaaagagaccattggagaaataataaccattaaacaaaaaaggaaaattctgaataagaggcaaaaactggcagaaatgaagggtaagtagataaggaaaaaaattagaatctcagaaatgagtgatagattcattaaaataaagaaggaaaagcagatgagactactagac

SEQ ID NO: 119416 - DNA, 1035 bp, Homo sapiens
gtgcaagagaaggatagggtgcagtaatgggattgatggagtctgtgaggataccaagtgaacagggtggctgagggccagaagtgaggtagggagggtgggaaattttatatggagaaagccacttagtgtgtttaagaaacccagtaggctgggctggcctgaacctacagaacgtcggaaagaggtagaagcttttaggaattggaggctttctcctggggcagtggggagccacaggatggtttttaccaccaccgctggttaagcacctaaaagaaagcccacatctcagtaaccatgatctgtagttagcctcttatttcccaacaaaatcgtatgtctcccattcaaaaaaacaaaggccactagtagatatcccatgtccgatacctacctattagtggattaaatgctttcttttccgttaaaccattaaactttttatattttttagcttgaaataggcttgcaatataataagctgtctgggtttttcttttaaactgcatggattttaaactgtatttaccacaatgtatattttaataatgtcttggggcatgtgttctggctgcctgcgttattatcatattgactgttgtccatgaattgttgacacgtgtttcattgggacaccttctgccatttctctgtcaccgtgcctggcatcagaactcaggaagtgtggtacctcagcttggattaattgaagaggagattccatgctaattcttggcaatctcagtctcttatctccctaaatttccattttccataaggaacaaaagggaaaacaacctgtgtaaccaccaaactcctgtcatctattgttacattaactcatgggtcatttgtcacagcagtgtgacttcaggagagaaaacaaaacgcttctcaggaaccaatatattttgtcaacagcacccggatgctaactatcgtgtttgtatgaaatgtgtgttctaaactgatgcatttgtttgacaactttattgatatttcaagttggataatcatttatgtttgagcatt

SEQ ID NO: 119417 - DNA, 1072 bp, Homo sapiens
ttgttagcctcttagcaaatatccggctgtgatcaatgatatttcattctggttgccctctgagaattacgcagaaaatgatttctatgacttagtccgaacaattggaggagacctggtggaaaaggttgatctcatagacaagtttgtacatccaaagtaagtgaaaagctttctgattttacccttgactatctctgtgtgataaatgtcatgtggaagcatatcataaaatttgctgaaacccagggtatctgagacaaaatgtcttctgaatttgtagtgaatgtatagcttatcagaaaactctttgatatcagtcgtctctgaaaatctttccaagatgcattttccatctttcctgccttagtaaagaaaatatatgaaacagaatcttttaaaagtcctgcagcttttcagtattgtttttggaagtgacttcttaccttagcatgttccaggtgcagaggaaatgggcagaaagagcagtttgtggagtagaagctgttttgatagtctctcagcaaatatttgttaagcacttaccacacgccaagatctatattacgtcctaggaattaaatgtgttccaaacagacttagctctgccttcttggaacttatagtcttgtgagagaggcagacgttaaatacataattatgaaagcatgctattatgagggaaaaatgcattgggtgtcatcaaaaaactaatttcatgtggggagtcagggcaggccactttgagacatggaagctgagaacagaaggatgatgggcagtgaagaaagaagaaggagcatcgcagatagcacatgggagtcctggggggaaaagggcacatgagatgcagaaggcagccaagaacacggcagctcaaggaccaagggggaggctgtgtaaagtgatgattgttgggtagtgatgtgtttccagggccaggtgggcctggaacctgcaaggtctcagacttggaattttaccctaattgtagtgggaagctatagaaggataggagcagagagataagtgacgtgatttgatttgcatttctgactggtcacctttaaat

SEQ ID NO: 119418 - DNA, 1106 bp, Homo sapiens
cagaagtttctttaaaagttgaattgagggtattcttttttcttcctgctacttcattgtgactgtgatggctagtattcttgcagccattttgggccatggtgcggacttggcaatggagactgtatggagtggagcaacaacatagaagaaatagcctggggcttgaatctgtgtcacttcagccctggacttgtagctgagagagaaataccttgtttaggccacttattttttagatctcattattgacagccaaagcaaaacctagctattacagtactgggaaatatacctgaggaaaaggacacattatttagtaatgatggcttactgtgcagtgatcctcaataagtatctagggcaagggctgaccagattgtgaatatttttgacgttgtgggtcataagatttctctcgtaactactcaagtctgcaagtgcaaaagcagtcacagataaaatataaacaaaggagcctggttgtgttccaatgaagctttgactacaatatcagacagtggaatgtgaatttggcccatgggctgtaggttgctaacccttgatttgggggagggggatacatgaagttttttttgaagactctgactcccaaattccaaaaccctctactgggagatcatccttccttgagcaccctgtgcccatcctccccatctccccaccaagtccctgactacttaggtgataggaagtgaatggtctcctgaccttgaaccttgacctcaagatttattttattccataaacatataaatgaaatatagcctgatagtgcaaaagagcgccgaccctttctttgcctaacatcaaagcatgcttaagtgtgagacgtgataggactgagtgaaagacaaagtcgttagacacgttgcatgttattttctgaacaaaaacagatcccaagatgtttcagggagacataaactgccgaagaagagcctaatttcataatattagacaaatggagaaattttttcttgattacaaataacagcttgtgccctgaaggaggatagatgttcaggttagaagaaaatggcgttttgttccagccagtcatttagaaccttctcccagagggt

SEQ ID NO: 119419 - DNA, 1077 bp, Homo sapiens
gagacttgagaaggcaatcatgtatgtcagtatatgaacttgatatcccctccatcacatttgtaatatgaatacattgatcatcttcagtctccaagttcatgcaccttaaggaattatggtgttgttttttgttttattctgtaacaccagttgctcagaatatttcttagcaaaatggggtatgaggaagagtgaagagtatcccaggggaacttagccattgcctttagctgccaacacttcatttggagatgccagctgattatttatgaactgtggagatggactgtaagacaaagtagaccttaataggtcagatttggtctggctttaagacagacctttttgagagtgggaattggggagtaaaattttttttttactaccatccctttcctttgattgcaaggaggggtttggtggtgaaaaatgccccaggtatctgcagcaagggcaggtttgaaagggtggattcactgatgcccctaacccgattctgctcatagactcactccttgttccggggactgctggcctgccacttcctgctcacagtcgcagatggggcttcctgagtctgtgcactgtcagtcagagctgagatgctagaggtgagctcctccctcaaccccaggtcactaaaggggcctctcagttctcttcatccctacttgaacttcctcatggttatattcccttttgtgatctatcacttgccattttttataatttggcttaagtgggtagactagaacacttgtgaccatgtctgacagaattctcaagagggtcttcaccatgagaggcaccttctcggtgtggctggcctggcttcccagtgtgcatgagtcatggacgttgacctggtcaaagctcttcctcctgcagtactggagcagtgcattctccttcctgtctccctctcttcattcttttttccatatgttcattcattttcactttgtcaaattacacccaataaaaatgccaatgcatacaaatttgaaaatagaaaagatgagattcacccatcatctcaacacccgaacacaacagctcttacacttttacatt

SEQ ID NO: 119420 - DNA, 1068 bp, Homo sapiens
atgagtagtcttctagtagtcagttcaatggtagaaaaatactttggatgatcatgtttctttaaatatcccacccgttgtgtctttacttgtatttattccacaaatgttcataactagagaatacttgatttaatggatttatgcaaagggttggtgtctcatggagcaagcaaaacgtcctgactctggaaaccagacctgcctcttcatacttatgtgtctggtaataggcatttgaaataatactgcagggaagtttcacgttgctgtcatttacccgttctgattttccttcctcgtatagctcacttgaagggtgggataagatggctgaaagcgctcctgtcagccctctctgagaagggagaattacacagacgtgatgattggctatcagagttccccagcactggggtggcccacttaagacaagcctcattaaattcacttcatcaagtaaagccggtgtgtctaacttaagaaagaatgtggcatgcaaattaagacctgaaaatatgaatggagtctgagcgatgctttgatcagcatttcttaatatggcacatgggggagaaaacttcttaaagttgcatttacttcccctcagttttgtatggcaggggaatctgttcacctgctacctagaattgcctcctccaaaggagaaacccactccttgggaagcaaagtgcaatacaataccaagtatgcacaatttgaaattagacttgacctccactcacctcacaaactaaaaacagcctccccaaaataagagaaagaaagctgggaaaggaaggtgtgaggaacatattgctgggaaaacagataagagttgattatatttagaatttttttcaacccagattgaatcaatgaatacctatgcattgaacatcttagttttgggattcctactgcaggagaatctatttaaatatgaatcccaaataaatttatatcatgtctgatataggaataaatctggcaatattaaacagatcaaattctcaagacaactagtctgaatggaagctattcttagcatagtttaagtaaaggaga

SEQ ID NO: 119421 - DNA, 1076 bp, Homo sapiens
agtgtagccagaagtaactggaatgcaaagcctctgtgtgcccttcgacccagctaaatcattccacgggcagattgatcaatttcctgagctttcatcatgatttctggagttcagttgtcttgcagttgctatacaatgtagtttttgtcatattccctcttatttcttaatgtgtcctggaaggaatggaatatgaagtctttgtagagtagtggctacagcactggctttagaggccgccctgagtgcaagtcttggctttgccacttgttggccgtggaaccattcgagcaagttactcacctctctaagcgtcaatttcttatctttgggtttaacagtgaaccgaccttagaaggttattttgcactgcctggtgcataacaagtgtccagtaagtgttattgttgatggtgctggttacatcctaatggtgagtttcctctgggaaaaactaattgtaattaagtacaagcattaaatacaaacaaagaacagccaagtttctaatgagcaaactttgtgttttatgtttactctagttaagcccatgctcaaaataggcacctagttgctgatgataatttactccaaacaataaaattactttcttaaggtctaattgtttttgatagaaaaaagaggaaaaaataataaagcaggttgaagatgtcacaagctgggaataaaagtttggtgggtttttaagatctgaaaaagaaatttttttaacaccttaaggaaaaaagttgcaatatacttttgtttctttttttatgcacagtaagtgttataggatgcaggtgacacatgtgctggtggggaagtgaggtagaggaaatgagaaggacgccccatgtagaaaatggcagaatcggaacacgcacccagcccctctgtgtgcagggtggcgttggatgagacgtgcagcctggccaggcctcatgtcgttgtttccccaggttttgatttaggcccgaagcccaccccatggagtctacatggcaaagggagcctgcagaaggcatgtgacattttgtatttgcatttggaattcagtgagctgctgattt

SEQ ID NO: 119422 - DNA, 1362 bp, Homo sapiens
atttctctaaaatgcatgtacggtgaaattgattgatgtagtagaaagagacctgtgttctgaccccagcttctctctcatctggacaagttacttagcctctctgagccactgatgtaataaccctaccttaaaagcagtattataagtctaaaatgagttgaagtgcttaaacgtacatccacatatttcaaagcaaggtactggatttttcattttgacatgtgtttcttcagcctttcggtggccagcatattcccagtgccagggcccagtctctctgcctttgcatttcaagtcccatcatgggagttaccacttaaccagaagccatattgttctcagtgattatttgaaatttgcatatgaaatgttaccatgtttacaccctgtacttaaaagaactcctaaagataggcactcatctgggaatcatgacagatatcttcaggatacctttggggattttcaagaatgagaagtagatttctcttgcttaagtagaggggtgtgtttccatggggtcctttgcataaatgccctatgggaaactctggtgcctgggaaaggccatattctgttgtaaactggggaatcagacctaccttcctctcttcttctatccacatttgttctttatttgcaaatgagtcagctaagaacagtgccaagcgaggctcttgagtgtaagcgcttgaaaagtgtcctattgtacttacaacacttcgttgatgaccagtggctgcttaccactgaagatggggtcagtgcctctgtgctggggtccctgttgctgcctgtcacatcctgggcattggctggaacccagaggtctttgaagagtgacctgctttattccactcacttcagagcattagtgccccaagtgggtcccctgcttttcctcagtggtctctttagtaaattctcagctcatctggtgggtttcggaaaaacgtttttttaacatcgggatccattttgccatatctgttccgttattgcactgagcttgtaaaagttgtattcccaagataatgtttaacttttgggggagtgtgtgtgtttcaagtccctttttcctttaatcatttgagggaacttttgtcaggtgtgtgtgtgtgtgtgtgtgtgtgtacctgagaaaacgcgcacacatgcctggatgcacacgtgtacacacgtacttgcacatgccattgagtgcccattctgtatgaggtcccgtattatgtactggtactgtgggaggaccaaggctcagagcgtctgacttacgggtttaaggtctcacggccattaagcagtcatggcaggattaaaggagatgcagcagatctgaattggcttcatatcacggca

SEQ ID NO: 119423 - DNA, 2055 bp, Homo sapiens
ccctgttctccacggtcatcatccttggtggtcaccgtacctacatgtaggtccatcggaaagctgctgtttgacacttactgactttatgtccctctcactagactgttaactccttgagggtaggaaatctgttgatgttatccttggtacttaccataatgcttgcacaattagaatattcactgaatgaataagatctccttagccaaggactcacactaatactacataggtgcatacatacatatatgtatgtgtatatttgtgtgtgtctgtatgtgtgtgtgtatgtctgtatgtgtgtattataacacatgcatatgtgtatatgtatctgcatacacaatacatattttagacgcatgtagcttatcattttgggaggaataggtttatttctctagggcactataaaggtagagtgatagacttaagcttgagctacattgatccaggacaatccatgggaagtgctcttctgagcactgtaaatccccaataggacttttttgttaagtttcttgtctaagctttctgattgcttggattaaggactaatgataccttatgccaaggtaaaaatgttactaaaaaaaaattgtaattttaaaaccttttggaatgtcttgagttattctttctccatctaaagcagtcattgagacttgacatcagagcatgccctgtcttccctcttgcatatggaatctaacccagcatctcaggaagaagaatggaagatgattttttaaatgtcaaaaaaaaaaattgaacttcctcctgtgcttttcacctcagcttctgctgcagaccttagatgcctgctttccagtattcgataagagaatgatgtatacagctgtaaacaacttcaaagaaggacacacttgaaatgccttgtgtgctgtagttgctcgttattttgagttcagtccactcttagggcaggcacagaaagacaggacctgtaagtaaactcgctggattcatcaaatctccacagaccatttgatgtcttcgaagagcccactggatcctgataccccagtcccctgcagccttgaagcgtgttcacgctggctgtggttgggtctggccctgcaatgcaggacatctggacgtgaacacagcctcttcccagagagatgagcttaaagagaacgacattatgggttcagagcatgagtttcaggaaaaagcttgattagtaatttattttaaagaaatatttacttacgattacttaaagaaataaatagcttcattctaaaaaaattcctgtctcccttaggatctgtcttcacacgcacaaattttctttcaggaggagggagcaaatgtacgtgggtgaggcaaagaactgaaataataatccacctttgatcaaaactccttgttatagtgttccctgtgaaaacgatttctaatcaatgagcgctgccacagcacactgaggagtaattaccttacacgtgcttcactctgagctgtgattagaaacaagatgtgggctcagaagggcagacgacgaatataaggagaaaaacctcagataggagccaaaacgtgcaggctgtgagatactgaataagcatggaggtctgctccagggagtgatgccgacattcgttcattcactcggtaaacatttcctcactgtgttgggcatcagtggtggtattagcagccacgttaaggtaacttatcacatgctacccttatatacaaagataaggcaactggctggctctcactgaagtatgaggttgacttcagaggtgctctgtactggaggggggtttgggttgctaagactacaccttctgaccagacttcccagtggtttggagccaatttccaagggtaaactgcttgatccacagtctaccagcctgagcattcattgtacctgggcttcatgagacactagggcctggaaaagggaaagaaagacttggaataattctacctagaagaaaaactcgaggaggggctagggtcaagtgtgtggcagacttattgagaaggtgaaggccatttggtctctgtaga

SEQ ID NO: 119424 - DNA, 1672 bp, Homo sapiens
gcgcaccaccacgcctggctattttttcttttgcattttgtagtaatggagtttcaccatgttgctcagactggtcttgaactgagctcaagcaatctgcccaccttggcctcccaaagtgctgggattacaagagtcagccaccgtgcctggcctgttgtttccttttaacccttgttttcagacagctgcaagaatgccagcagatctactctcatgaccttaaaaacatactcagcatctttagcccaccttggccacccaaagtgctggattacaggcgtgagtcacctcgaaaacattcttgttaggtgatgtgccccagaggaaagcttggacattctgaagtttgacctacctgttctaaactatcattggctgcttacttattgtgccatgttcctaaggctcagcctgcattcctacccctagtaggtaatgatccagtttttaaaattcttaccctctccaaaaggattgagagaaactagaatgagtggcaggcttattagagcagttgttctctggatacgtttacaaatgggaatagctgcacactcaggatcattgaagactcacctaaacataacctagaaaagagactgaacaaactctcagagccgactcagcacttatgattctgaagaagtgatatgcaggcacagaatagtaccttattaaacatctttgtgtgaaaggccagctaaccaacttggatgagaatattctccccaccttcaagggtgcttaagtttttattgggttacttctgcaaagcttctacccatcagtaaatattagccaccttggaaacagtacacagaatgacagtcattctccctctggtgtaaaattaggcactggacaagagtgcatttacctgcttgcaggcagaattaaaacagccagaatgtgctttaagtgtctaaggaaaaatttggccaaggctctgggccagtgcgtctgttgttattttagatttattcaattagagtcacaagcaaagtaaattgagctgtgtggttgatttgaatattaccttggaagacagtgtaaagagattaacaaaccctaagggatgagggacgagtgccaagctcctcctctgtccccacacacagtcgggccaggtttcacagattcatttaggaatgacgaaaatgcatgcagaagagcagatgtgccttttgttcagggccacgtagccattttcccgcttctccatcctctgaaacttcctctgtgtgcatgaactgctgcaaaaatgaagctggtgcatgtggaggctgtcagatttaagaaggtggcctgccctgagaactgggggagcttgggtccagtcgaatcctgcttttgtcttggcaaatgtattgtctggcacagccggctgcattcagttgacgtggtgctttgacagattggcatgggtgaaatattaaaagtaattgcacgggcctcatatgttttcagaggctataggataaataagccatgcatttcaacaaagaaccttttcagtgttaccatttttagtgccatgtggcaattggttgtctcacactcccttcaaagagtgaggcatttttacatgttttttacttagtttaacggaggtagggactagaatgatgccaggaagccatcctgtttttaggactgaaggggcattttt

SEQ ID NO: 119425 - DNA, 1073 bp, Homo sapiens
taaagtagcttgcatcacttcactcttttaaacttttacataaccaaagtttctgtccccagtacacattgtttggaagatttgagtggttgggggcaaccctggaaccctgaggcaagcttctggtgacccttgaggtttacatgcagggccaggagctgagggtgcaggctgctgggggcttcattcccaggaacaccgtgaaggatactgtggtgttcgccctacctggcaccagaccagatattatacttaatgcttaatatacgatatctcatttaaactgatggcaactcaataaagtgaatactgcagctattaccattttatagatgagaaaaccaaggcttagagaactgagtaacttgtcctcagtccacacaagtaggtaagtggcaaagctgggattgaacccccagtccatgtgattctagagcccgtactcttatccgctaggctgtgtaggatagactgatggggacccacaggccaagtttggcagatgtggtctagggttgctcatgagttgaaagcagtaattgttggtgagtgaggcctaaaaatatccttctcattgcctttttgataaaaagaccccagactttttctgagaaggggcttcttagatttcctacaggtactttgatcattgggaaaggttcaggtgacaatcgtattatagggcaagcaagggaaagggccccactgccggacccattttctttcctgttaggaaacctttctaactaaggtcagaggaccgagcctggggttttaaaagaattcacggagcaaaagtgcaggggcattcaggagggggacatggaatgtggcacggtaccagcagtaggccgagagatgtcacctgaatcttcaaggtctaatggtagttatcctggtaccgatgtcaaagtgggccacatttcttttttttttttttttttttgagacagagtctcaaaagcacccaaagaaatgttccttaaaatatatgtacatcatggaagagagatatatgcacagaacaaacagatgctaactatataccttttcacatcagccataattctgca

SEQ ID NO: 119426 - DNA, 1030 bp, Homo sapiens
attaaagatggcagattgaacataagctttaacctcagttgcctctcaatacagtaatagtaaagggtttggttttttccctctcaggtataaagtaattagagactaagtgacggggagaggagacatcagcaacataattttggaagctgaaaagcagatggagaagtggagcagttaggtttcagtagacccaagaaagctgaaatccaagttggcaggggaacaatcaagaagcaatccagcttgaactacaaaaccccccaaaagattcaggagttagtagtacaagcttcctcttgaagtagggctaacacaggactgtcgattgaaaatgtgtttgaggagcagaaccctcgattttctcctcactgacgtgtagcaaaaggaccactctgccaatcaccaacaggccttcatcttggtagaagtctggagatttattctctggagatgataaaagcaaggtgtttccaccaaaacgagaagtaagctaagacaagatccacgaagtaagagttgcaacaaaaaaagcaaggcaagaaccatcccaaagcctcagctgcgcggtcatcatcagagggggatctgttcagactggagcagagctgaaggcttcagggacacttcaagaggattaagtaattgcaaacctaataacaaccattgcctcttctatttattgagtgttcattgtgtgtcagacacagttctaagcatgtgtgtattaacgattaaatcctgatagtagccctattagatggtagtcattatcctccttttatcagtgagggaattgaggcactcagtgcttaatcattagtctaaaatggcatagctggttagtggcaaaactgagatttgaacccaggctgtccacactcatagccagcataccacgcctcacccccttgacaacaggagaaaccaagctgatgacaagttaacacagctgggaaagctgggggaaacagaacgttgcacagagaagaagtcatcttagtttactgtggagctcagtagtgacctg

SEQ ID NO: 119427 - DNA, 1067 bp, Homo sapiens
tctactgtaatctgctcagtaatacaagtgagcttttctatgcaaaccctattgctccaaaaagaattgaagaaaaaatgttttaccaattcagacccacaagtatttattgtgcacctactacatggaaggcgttggaccagctgcagtgggtataatgacgagtaaagcaggctcagcccttagctttttgcattttattttgaaaaggaaaatcctaagaactaagtgaccacaatacaagtctgacgagactggtgtatgagaggaacaagcaggcccctcctgggggatcggaggggaagacatctcatttcagggatcaggaagagatagacatgagttgagggatttgcactattggaattataaaataacacatccccaaccttcattcattgattcatttacccattcaacaattgtgagtgcctgttacctgtcagatgctcctctggaccctggggatgcaccaaagcaaagctcaccttcatggagtgcagggaagagaatagtggagaagggcaggctgcatcttcgtggagtgcggggaagaggatagtggagaagggcaggctgcctttccctgctctgactctaccctggtttctgtgaacattcagaagtttcctacgtaatgctgggcagtccttggcagtcttggagtttggctggcatgggtgctgtgtgtaagtatagtatcagtggcaccctgggttctctgacagcatcaggacatcactagtagagtcagcagtgtttctcagaagcttctgccctgaccctttgaccatggaatccccagtcacattagggccctacgtccacagaggagcagcaggagcagagaccttctgtggaaaccacggctgccccatcccagccgggtcataggtcagtgtggtctgctttaatgggacataacatcctttctggaccaccctacttgccacatccatgggtttcctcctggcagactgtggggtcggatgcctcttctccaattatctctgttacagtattcactgataaccatcttagagggattaaatcagaacttacaaatg

SEQ ID NO: 119428 - DNA, 2127 bp, Homo sapiens
tgacctcaagtgatccaccctcctcggcctcccaaagtgctgggattacgggtgtgagccactgtgtccggccaaccttgttctttgacacaggtgttttaagcatacatgtggtgtgtcctaatgagaatgaaaattgtgtgggtggctaaccataccgtatatgtcttagtgctccagtgagtatcacttgagtggcttttgatctgtatttgacagatactttaataatgttatacagatattttacagatactaaaatattttatattttacatatccttatgtaatgcatatatgtatatacattgtgtatatatacatatgtatcacaatatgtgaaaatatatataaaggccttgtgaattcttttcaactattatctctttatcccctttttgtgggatgtgtatttagaaaaaataataatagaaagtaccctttattattgttcagcttccacccccctcacagttcagaagactgatccttgtatctttcaagctggaagcctttatctaaacgagggcctgtgagtttaaatttctctggacaaacccagatgaaagatggcttgttgaaatgaaggcatctcttccactgtgctgcactgattagattgaccaatcaagcttagaataggaaatgacatggaagatcagatgcgggaaatcattgaaatatttgccctcctgttacaggatcactgaagtccacttattatgagacccagaggtttcccctctgaagatgcgggaaggcagtgactatgaaactggtcctggaagtctgttgttctggcatcctctgccctggctaaatgaggttctggcttcagaggggtcttggtttataagtgctccagggagatgtatatgcatttagctacacaaaacctgggctgcattaacggttcttaaaagcagagaatatgaaagggaggacagaggcattttcaaaaattgatgttcaattttataactctcagtttccagtaaaactttccgttatggtcagtagtttataaaggagcagttctgagtcattgttaagagtggaggctcgcaggcagattgcctagattcaaattttggttctacccctcaccagccatgttggttagaaggttactcaacttcaatttcctcttctgtgacatggggaatagtcataaaaatgccttcctcataattgttgtgaagattagaaataagataacatattaaaagcacttagattgggaggccgaggtgggcggatcacctgaggtggggaattcaagaccagtctgatgaacatggaggaaccccttctctactaaaagtacaaagtttgctgggcgtggtggtgcatgtctgtaatcccagctactcaggaggctgaggcaggagaattgcttgaacccggaaggtggagtttgtggtgagccgagatcgtgccattgctctccagcctgagcaacaagagtgaaactctgtctcaaaaaaaaaaaaaaaagagaacttagaacagtgcctggcacaaaataattgctcaatatacattggtggttgttactgttattaagttattgttattacttagcagagattggaagcattaacacataatctttccaagactttttatctccagtaactaaactccaaaaacatatgggtacttcaagggggtgaccactgagctattcaaatgtacccttctattcccaagagtacaccagtgtgcactctaatatacacaagaataccctaactacataaactacattacatgtctactcatacattgcctctttaagaaatgtatatggcacagcattttattgtcatagccatgatggcatttatgttttataaactggagggaagttataagaatttttcatcaaagaactaatcttttctagaattagatagatggttagcaaaatgtatgactggatttctgtcatagaaattttcaaggagatgaattctaggagaaattaagcatcttccccccaccccaataacacaagttattggataattttaaatttgtgtcaaatggcttaatatcctttccacagaccctgaaaatacaaacatttgatatgtgctcgtatccaatttcaagttctgctta

SEQ ID NO: 119429 - DNA, 1014 bp, Homo sapiens
tcactgtggaaagcaaaggcagacgtggctgatgttctcaaagagcaatagtctagactagaggggaaattaactttcatggaataatcacacatgtagatgtgagtgacagctgaaataagcatctgcaacttgatgctttaagagcagtgagcaggctgggcgccatggctcacaggcccgtaattccaatactttgggagactgagattggaggataacttgggcccaggaatttgagaccagcctgggcaatatagtgagacccccatctctacaaaaaattaaaaaattggctgggcatgattggtgcatgcctttagtcccagctacttgggaggctgaggtggggggatcccctgagcccaggaggtcaaggactgcagtgaggcataatcacaccactgcactctggcccagacaatagagtgagaccctgtctcagaaaaaaaaaaaaaaaaaaagtaacagtgagcagtggagtcaaggttgagtgtgaggccagggagagaagagcattattcaaagccaaggagctgcctaagcaaagctccctggcaggaaaagaaatctatggatcagagctctggaaagaaggccagtgtggctggaaaagtgggggacatggtgttgaggctgaaacggggctgaggccagaccacactgggcctctttgaccatgtagggatctctcactttaccaagagcaatagaagcccctggaatgttttaagcaaggaatgtcacacgatcagatttggttttcaaaaacatgactctggctgctttgtggagggggactgaaagggaagagtgtggctgcagaaccagcgggaggctacagcacagctacacaagcaacaagttgttccaactgaggttgtggcgaggggatagagataactcagcagatcccaaaataaataaaacccaaaatttctacagcttgctacttagttgaacacgagggaagagggatgatgctgattatggaaccagatggatgatgctgcc

SEQ ID NO: 119430 - DNA, 1047 bp, Homo sapiens
atgtccagtttttcacaatgtctaaaataatatggttcacagtaataagattttatagcaggtgaatgtttacattctcatttcccagatatataataatcagtagccactccctttgcattaaaaacaagcccccctggctactgaatggctcttcaatgtagggagtatcttagccagcttggcacaaataaaacctctttccttttcagctgttttaaacatttagcagtcagatcagatgattgaactttcaaaaaaattcttcccaatatctgtttggatggaatcatttgccgtaaagatctggcattattcaaagctgctctgtgctcccttaattgaaaagccctgacattgacattggacagggcttgcctttggggccaccagcagacagctttcttcagtgcctcgtattgttaatgactcagagaatgtgtttcgatgagatcagaagcaatccactaaagaaaaagtggagaggacttgagagcttaaaagagcggagaggagagatgtgagaaaacctaaaaaaagacaaaagttggtgtggaagaaggggtggcgcgggctccatggcagatttgtcattcgtcccagtccagctatttagaatcatttttccagtgggaagagagatgaagagaaatcctgtccaaaagaacaaggaagatgtctttgaaatgatatgaggggagccagagacagacatggaggtgagcaggaccaggtcttgctccttagatctccagggaagatgtactcagcactactgtgcgcacctgggctgcactggtgtctttactgcaggcagaaaggatggatgcacgctggccagggccatggactgcaggtgcttaagtggccccacagtagatggctgtgttcacagctcagatctgtggcccccctggcctcctcagcccctctgaacagtatcccactgttagcagctctgcagtgaaagtgcaatctgaacacaaattaagtggcagctttggggttttaaagaaaaaggaaaactttttcattttagaaacagaa

SEQ ID NO: 119431 - DNA, 1035 bp, Homo sapiens
ggaagtcaaagactatccaagtggctgagaatcaagtggacccccttgactcatttccacttagaaaatgctttcaaggcagccagtgttacaccgagggtcctgccaggggagccgaggcctttgcctgtcaccctgggagctggcttccaggccttgggcatggatccctcgcccagagtctgcttggtcttgcaccaatgatttcacaggttatatccagacctcatgcttgataataaggtagtaagctgacttcccttggtttcctccacttctgttttaaatgaataattaatccattaaaagcatcatctcaaaagcacaaaatatcctataatctatgactataagttcttagaataagaagtggacattgtgttatgcttacttgtagactggtctgtctctcttagtaggacatgagatgttgaggatggatctcatcctagtcctagtccttaagagcaccaacatggacgcttcctcagcgtaggcatataactgtgatctctgaagattcctatgggtctatcattcagtagctcaagggcagctggacggagaagagattagaagtcttgttcctgcttcttaacttgttcacaaagatacttcatttttattattttggtcctgccagttctcttcatctggtttcctgtatcctttcatatacagtgatgctgaggcattttttcatttgtttgttttatttgttgttttaaagagaaaagggagtatacttgttgcttcagggcaaaacaaagaccagtgggaagaaagttatcaaaggttgatttcagctcctcacaaagagctttctaaggacaggctatttgtgaagggactaaatgtgtttaagtagagctgggcggtcacatgagaccattgtcctgaggaagctcacccaaaaaccccgatggccaggatgttgactgatggctcaccctggagagttgacatctggagcctccgctgacaagcagcatggtccgctggcaggtgaataggggccatggttctgcgggctct

SEQ ID NO: 119432 - DNA, 1055 bp, Homo sapiens
tctttgttgaatataacaaagtgaatataaacaaaatgaaaatttgggggaaaagtaaaatatcatttggcattaaagataaccccttaagaaaatcactatcagtaccaaacatggagccatccagccaaacccatagaattctagaacatcagagctggataagcccttagaacaatctgtccaaatctgttattttgcagagggggaagtggagacccagccatgcaaaggtattagcaacagttagtttacatttctttctggctgcatttacagtgggtaaatacatcttaactttagtgggttgaaaaagacaggtgctatttcctcaaacaatattttggctgctggtgatcgactcttagagcaagagaaacactttctaacatcgatgtgggattttgtgtgtgatgtgtgggtttcctgagctgctgagcttttccacaatctcctgctctattacttcgtagcccactttcctttaatacccaccgtcagagaggttctctttaccattcctctgctcagctccttcagaagtctgtgtacaccgacaataaatggtaggtctgaaaacagatgagaggtttttaaatttgaaaacagatgagaggctttcttccctcaagggatgatgtggggtttagtagcttcagctatgttgaattttacttataaatggtgatgacttgcttataatgtgaggtttattttctgttttatatgtatcttataagcagccacatgagcaaatatttaatttattgtcactcttgtactgttggacagcagcagctcatgtgaatgatactataccaattcaagctcgggaatgactattggacacccagcacactgttagggttatctgcgtgtgtccatgtgatactgaaatggctggtcccctggtcaaatagccagagaaaccagagggaaagtgaattcctgaacttcattcaattaaatgaattgaggtttagatgttttttactgtttaattcaggcgaaacatttgttattctttatgtagaaacagctgaggcaaaaatgga

SEQ ID NO: 119433 - DNA, 1024 bp, Homo sapiens
tcctgccctgctagtcatttggcctcctgatggcaaacagaggtcctgagattcggagagtgaagcggagtggctgccggcaccaccttctcacctgcaagagcacccagagccttgtccggagttgggcttattggaggagctggtgaaggagaagaggctgagttggcttaagcaccccttctgcctgcctctaaccccacaccttcagatccctttagctgcttgcacagctcatgacctatgaacgggggtggggaagaagtaggcagaatggagtctgacatgagaaaagtgtcaataacatcccatttcttgtgttgattcttgatttctgttcatattcaaacattattttgttgtatattttctttcgtaggcctccttaaaattctcgtagaatgaggcaagatataaacacttacatagaagttaacagcagtgtgttaatgatatatgcagccaagcataggcgcttatgcccagagtgcgcaagtatacagaggacattcagtggccaaagttggctagagttgctttggtccttgatcaagtcctgtttagatttctccacccaaataagttacatcaatactgactagataatacatattcaacaggcagtacaccccctgatcattgtggatatcacaattcaggaaatcatttacttactaaacatttttacttactaaacatttacttactaaacttttgtgtcccctactaaacttttagcttctagagagtagaaaccatgtcctgttgttctttatgcttatagtacttggcccacaactgatgcacaatggatcacgaggggtgactagataaatgagaattttttaatggcaagatgattcagagcaaatgaaatgtagaatatcataatattttataaggaatggcattttgggcaagttattacttgtacgtacttttagaaacagtctcttcctctaaccaaatgcttctgagtaggatcctgctttaatggatagaaaaacatgagttctcattagta

SEQ ID NO: 119434 - DNA, 1048 bp, Homo sapiens
attgcagttttgacagtttatcagtgattcatcaccataatctcttactctccatccttgccctgtgaatagattcatacctggaagcagccgtctctttagaaaagcttctatcctttcctggtttttcctgagtgcctggtcctcccaaaactcctatcttttttgtcctgactcagaggaaccctcacttcccccacccccaccccccaacgcacacatttccttcataacaacaccctagagtgagatccttttactttccgttttacttcccggttcctgagggcattacttttcataagaaaattcatcaaagtgttttcctaaagagttgttctccctctaaagttgaatttcatcctccaacccaatatggaaacagctattgccaggtatatgtccacagcaatctttccttcttgctacataatcacagttattttaatgattatttgattttctacagaatgtagcgtagctctgatgctgttagggtcttgatgaaggcattagaaacaatgcttatgctcagagcacttgtgtgtgcttggacgttgtgtgaatgtgagcaaagttgtacttcagtgaaggtgcccaaccaacactgagacacataaccaggaaaacaaggctgcagctgatggtcagagtagccacgggttaggcatgagtagccatgggttacgcataagcatccacaccaccagcttgggcagctgtcacctgccattgtttatccacagggccagctagaaaaggatttctggtaggcatctctatcaacaacacaggtgaacatagggaaaacgctaaatgagaattatgatcaactagaaataaaaggaaaatcagtcctccctgtatttcccatacagctgccccatcggtcctgccatcagcaccacatgaggcgtatatggaagatggtttattgttacctttttattaggctgcttctagaaaattcagcaagtacccacagtcctaccacctaatccataacccctggtcaacattttggtatatttccttctaattttgtttt

SEQ ID NO: 119435 - DNA, 1001 bp, Homo sapiens
gcttggctaggctgggatgaggcatctttacttacacatctggcactggacgctggctggctgctgggacttgctggggtgatggctggagaacatttcacctctccaagcggcctggccttccttactgcagtgtcttctgaattgttagcttccttatatggtagcaagtgtgcaagtcagcaggtggaagctccgctatctttgtcacctagcctcagaagtcacatagcatcatttccaccgccctctactagcgggagcagtcataaaagcccacccattttcaaggcaagaggtcatagcctgcgcctctcaaagggaggattgtcaaagccgcactggaagatcatgtaagttggatgatagcattgctgctgtatttgagagattgtgctgtgctctatgtagaggtttctgtaggaaataaacaagttgagttctctggtgaaaacacatctgaaaacatgttaataggaatatagctaatccttagcatttcttatagtagctaaggtcagtgtatgctaggcctggtacctgagcagcagtcttgatgctaagttaacaacaggtagccaacaggagtgttttctagctatttggaaattgaaattcaaccaaaaaagctactgccactctgaatcagttacatcatgataccttagatctaggctaccttttttcctgaataatagaaggttacattgattagaaattatggggaaagtagattccttcatataagaattggttaaagtttgactctgttctctgttaaagtaagcagctttttaaataattgagttctttggaggagtttttatattttatatattttttacctatttagccatgataaatagaatcagataagagaccgagtgtgaatattcagcacgaccttcaaccaggtgtatatatttctctctatgttctaaaggactcagcaatgtgtagtgcctatgagttctcatttgaaaaaggaggaatcctatatg

SEQ ID NO: 119436 - DNA, 1454 bp, Homo sapiens
gggtttcaccatgttggccaggctggtctcgaactccggactttgtgatgcacccgcctcggcctcccaaagtgctgggattacaggcgtggccacaactgcttttcattactctcactgcttcacctccacctgtgatcagtgacacacgtttgagagacacctggctttggagacagaaatcaggatccttgacctctttattacctttcctaatggaatgaggttgcacacgtgggccgcgctctgctgcacaccagcagttcagagagtcctgtcgtttgggggagcactcctctgtcactacagcacctattgttgtaaaaccttacccactattttttccaaacgacctcagataaatactttacttgatgtttttattcgcgcaaggtgttaatttctaacaagacttttatgagcacagcaagcagcagttgctttttcatgtgaacattaaataagactcaaggtatgaaaagcctgctgcaaagggtccagaaggatctatgggatttggtgggctgcagcagacaaatggcctgccagtctgtgacaagtgtgcagtcaccgtgggcgccagccttgggaggcacaggatccgctaagtcgtcgggattaccgggctctgcccctagcagcccccggagagttagggccccgtgtgcacatctctgcaaaggctgttggtcaaacacatgaaaagccggtgttagtggtgtctgcctgagccaccgtaaatcacctctccctctgggctgccactgcaccttgtctgtgcacagtctggaggcgtggggcgtgtgtcattgggggaagcatgcagttcagggtcctgttatgtccatatgaatgtgaacgtgaaagcatttcctggcgcctctgtgctgggctattattgggaccaaggactcacacacaacagtgacatcatccaggcgcagaatagattgtactgaaacgtcagaagccagataccaggttctctctcacaaacagttgttttaagtgccaatatcaaggcttgacagtgttagtgctggcaggacttttgtttttcattatccccatcttcatccctaaacgaacagtagcaatgcagagaaatagtcattagaatgaactaaattaaaatcaggaagcagttaactttatgtcgactctaagataatgttagtaaataaaaaggctaattggaattctcagtattctaataagaactttttattagtaggttatttgtgctttaatgggctgctcgtggcatgtggttgagtcgtgatgcttttcattactcatttttattaacatatacggtaaatattaaaatagatctcggcagcaataacataggtagaaaatgatgggtggcttgtcagatacaaaatacagcagcatacttacagatgtgttctcatgattttcaaatttatgttggctattttttaactttg

SEQ ID NO: 119437 - DNA, 1070 bp, Homo sapiens
tctccagggcccctttataaagacaccaatcccttcataagggctctgccctcctgacctaatcacttcccaaaggccccacctcctcagaccatcatcttgggggttaggattttaacatgaatttggagggaacataaacactcacttcagagtaatgataaagtatattgcccatatgctacaaggactgtcttggtcacttttcagctgacatttaagtaaaagagtataattctctgcaactatgttttgtctcattcacgtgtcaatatatacatatgctagatttccctttgcaacaatggttggatcagttcaaagtggttcattgacgtccaaaaaaagtgaaaataatgcgtaaatcctagaactcaagacatacgcaagaggtaataattaagcttctactgtgcctgtggattgtgaatctacaagagtcatgattttataaaagcagccccaaaaggaaaatacaaataggaaatataataaggaacatctgaagattcgaacttatttgcactgcagaggcactgaactctggcctttggtagttgtctgttaacggaattctgttaaatagtttcctcatttgtaaatgcagatgataatagaacttgcttcagggtggttgtgaggcataaatgaggtaatacatgtggcatgcttgtgtacatgttgatgtgctgtctgggctgtcattattatagttctcaaaattattattattaatataaaacacagccatctctctaagcctatcaggtttttccagaatgaattaaaataacagtgctttgttacggaaatgctacatttggtcattcaagatggagaaatggccaaaattgtggcagtaccatgaatagttgtaaaagttggtccaagttacaatctgaccaaataagccataaagtaaatagaaaatatagtttgaatcatgaaattgccgttttttaatagtcccaggtagcgaaatattagaaaatccccatgtttcttctcgacttcatgctcagaggaaaagcagagtgagctgctggcaaaattcctctgctaagtggcag

SEQ ID NO: 119438 - DNA, 1017 bp, Homo sapiens
tgtgcagtcacaaacctttaatggtcctggcaatttggcattatggtggagctgctgatttgtgattttgtctttaaacttttactctctttaacttgacctggaaatggatacatttgacagggaagaaggcaagttatacacagtgtatgtcaggttacactatgtacctagaggtggtagcgttttggttgtaaaacatcagtgtcaatgttgtatctgggcaaagtaatacagtacccagttctatttcaatttccaaaccaggggaatacaaagagcttatgcaagtcaattgtaaaatcactacttattttggcaaatgcttaaaaatgtgtgaattctggatattatcacagaaaaatgaagtttatttctggctcattcttttgtaggacagacctgctcaccttacaaaaggaatagaggtctggagacgttgacgcttaggaaaataaatttaattaacaccacctttatttttcactataaatgacaacctcttactcttgtagcatagcaaatgcaggcacccacagaaattcaggactccggattgctttgctaatcctggtgtgtccatgggcaggtcttgcatgtgagtgagcattgctcaaggtgcaaagagcaccgctaagcagcaccgcagagctttcaaaggggcttttgcatatttgcacaggccattgttgcagacaggagggtggcgctttgagcaggagccccaggatgattcggcccaggtgtaacacggcccctccccagccaagtggcagccccagagaacagtggaaaagcatattgccgtcttgctctactgtgttctccaaagacatgaaatttagtccatatgtttaaatctctctttggctgattgccttgtgcagttgatacatatagtacaacaaaataaaattaaaaaataaatcagtttggaagcaaacttgaaggggagaaaatgctgcagccctgtgcagagagcacatgtgagcatcttaaacacgccattgtgtgtgt

SEQ ID NO: 119439 - DNA, 1865 bp, Homo sapiens
cccatggtgggatcttgctaagtagttgttgagtaaatgaatcaggtacttgttactgtataccctttttgaagatttcctgtgatacaagtgttggcggcatttttgctgatagcttttcaacaacttccctattttcagacgatgccactgttcaacagtaaaccgggtgaaacaggctgtaacttacatatacacacaagagacatttgaaatatcaaatttaagcctggcaattcagaatgcaagctcattttttttttaaaccaaagcctcttttacctaattgagccagaaaatatgtggcccttttccctcccaatttgcagcttcagttctccttgactgagtagctaatggaagatggggcctgttcctgctctgcttgtgaaatctgactctcagcccgaggctgtgtggcttcatattttggatctgaaaataaaatgcttttatttgatcctggcgtattaaattcaggttaggtgtgttgcaaaacagggaaatgttatctagaatcttcctgctaatactgaatctttggttcttctgagccactgtgtcttaccagtcttcctgtggaagatggcgggaatgtttctaatcccactttgagcctgagtgcttgcaccttatgcagaacaaatcacaattcgtatcatagtcaggatctgagatttgtctctcacctcactccctctcctacggatttagttatgctcatctgaagtaaaggctgcctgactgggtgcagtagctcatgcctataatcccagcactttgggaggctgaggcaagaggatagcttgagcccaggagttcaagaccagcccgggcaacaaggtgagatcccctctctacaggaaatttaaaaattagctgggtctggaggcacacacctatggtcccagctacttgggaggctgaggtgggaggatctcttgggctgaatggtcaaggctacagtgagctgtgatcacaccactacactgcagcctgggtgacagagtgaggcaagaccctgtctcaaaaaaaattaaaaaaaaaaaaaaaggaagaagaaagaaaaagaaaggaaagaaagagagaaagagataaagaaaagagaagaaaagaaaaaagagctgcctgctgtagctgaaagatagcacttagatgctaatgtgggattttgaaagcgggagacctttcttcagaaatctcaggtaaggcagttgcgagggcacaactcaatgccctcgtgaggcctcaactctctggggcctcacacaaagatgagctttatgtggactttaccagaagttccagggatgcggccagccaggagctgtggctgtcaccagtttgtcattggtgtgacactaacagagagaaggtacatcttaccaagacaaggtagttcaagttcaggttctgtagcatcattcagctcatctgaaagcttgtagttgattttatgtattgcagcccattcaaaaataatcttgtaaagcatagtgtttgcttaaacttgagacagcttgcaatgtggcttccgtttagtgtgacacaaacctgttgtggactctctattataccacagaaattgttataaccaccacgtctattgtcttccagaaggacacttgagagtcacttgtaaaagttggcctgtgctttcctattaaaaactgctgtttaaatggtagttagtctcctgtttagtatgcggtgtagctagatcaccctgcattcacaatgctctacataaaaaaaaaaacaacactgctgcaataccaatagttaaaagcaattccattaaatacattgcgaactagttttaaatttttatcttgatgtaggcacttaagaaaaaggaagggata

SEQ ID NO: 119440 - DNA, 1028 bp, Homo sapiens
actctagcctgggtgacatagtgaaacctgtctctttaaaaagaaataaagtttaaatgttttaagtaaaacattttaaaagattttattatttaaacatatcaataataaaaccattgcatattaacctaatataattctatgaaaaataactataaaaatttttgtgaaaagaatgacattgatttatatttttgcaaatctttttcgggtctggtctaagaagacaactagcttcttataccagcttctgtattcagtctgatgctcttaagttgttttggttaccccagatattttgttagaaaagggaaaagtgtgttaatagacttttgagaaaattgtggctattcattctttgacactctaccaaaaccggaaaagtagtagttttttaaaagttagttgcattgtgaaatctgaaattatatcaatgactgatataatttttcacttgttacattgaaatcgattagtctatcttgcaattttgaatggatcattcactctttcatgattgtgtgaaatcgtgcatcattcaattagaaatattggttcagtgagttatgtaactcttttaagcgtcgacacatttcattatctaagatcaaaaaatcacattcattagtatcatcaccaatcctatcaggaatgccttaagtattgggaaatatggagacacattttccaacgttgacaattttccaaatttgcttgaattttatcattggccaaaaacactgtcagttcttgaagtggcaggctcattgcatttattatctctgccatcattggtctgtcagtacttcttccatgtaaaaataatgttccatgaaaaagagttgctggttcagctcacagttgaatctcagatgcacatttccttgagacaaccttgtgcttcagcgtgtaccacgggttctctgtgtgtgtttcccactgagtcacacagaatataaaaaaggcatatcaagggttgaaacttaataaaggtaataatttgtagtgctttttaaggacgttttaaa

SEQ ID NO: 119441 - DNA, 1062 bp, Homo sapiens
tgtggtcaggacttggctctgtgagtctgcagccttgttcagccctccctgcagctgttactgtatccctgtcttcctactgaggccatgcttgggccattgtggcacctatacatctttaatacacgccccaattaatgagttaagtccagataaagtgggtctgaggagttcacagattggagtgccacagggatcatattttcaggtgcattttcttccaatgcactctgacagctcaaaacacttcctcgagcttctatacattctgctcgttgccatgtgtccccagcacttggatatgtaatgcgagggataccaacagactgatttctaaatgagcttcctgcctcaaggcaaaggttgagttgcccgtgcagctgggagggccaccaggtgaatgacgctgttagaggggaagtgttggggtgaaaggtccctgggagcttcgcttaccaccgtgggcacttaatggatgctaaataattgaaagaataaagtgagagatgagtggatgccgccttgatggcccctcgatgaactaacagggtccgagaacatttgcaaattggtcattaatgtttcatcaacagtgtctgcctcctttgttcatctcaaagggtagccagggtttccgatcacagggatagtttcctgagaaacttaaatggaggaattaggccgggcctgcaattccacccaataatttgggtttgtttcaaaatagcctaatagctgggaatgggctggtttggcttgctaatgtgcttagaagggtcttgagtgctttcactcagtgacatttggagggggattatggattttggagcattaaagctttattgtttttgttttttgttttgctttgcctgtttttggagtgaggtttgctgacgctaaaatgactgtttattcatgacagggagggggtgaggaggtatagggaataattctactcatggaaaaaggatgccttcttcaaaatgatttttgctgttggcaaagctgagaacacactcacatgattctctgcctgcagtaagtgacaggaaaaacacattg

SEQ ID NO: 119442 - DNA, 1049 bp, Homo sapiens
cacactctgcccttcatggcctgttctccttaccaggagccttattgaggcagaatatgcatgacagcttactggatctactaaagggaaaatggactcacttctgactgccacactgttcaaacaagtcagtgctaacacagactgcggcagggtccccaagggcctctctggaaatgcctgcccttcctcccacaccaacctccgcatcccgagagagttggtgcacatccagatcttaaagcatcctgagagttggtgaactaattcctgttaaaaccaacagtcactttaagtttgaggaagaaaggtttaaccaagtactagtaagattcacatttttagcttttgttcttccagctgactctgtatactgggcccacagttgtacagagagttaccctatgctgactgcacgggagatgcacagggcgtgtggatgctatgggaatggagagcattggtcatgcaacagcttcgcctatgatgccgtgtctttccctgcccttctatatgttcttcatgtatttccaggtctcctattgattcatccacactatgtacaggattagaatgcccagcagctgggggagcctttccagggtatggttcagcgggtgttaccagtgacccttgctcactcctgtacctttgcttccacgggaccactcccatggggtctataacccctgtgggtatgcaccagcagccaggcttgcacaacagcctcctggcctggctgcgctgaaggacttctttttgttttttcctgttgtttgtttttttctgatagagtctggctctgtcgcccaggctggagtgcagtggcacgatctcggctcactgcaacctctgcctcctgggttcaagccattttcctgcctcagcctcctgagcagctgggattacaggcacatgccaccacccccagttaatttttgtattttttagtagagacagggtttcgccatgttggccaggctggtctcgaactcctgacctcaagtgatccgcccgcctcagcctcccaaagtgctgggattacaggc

SEQ ID NO: 119443 - DNA, 1030 bp, Homo sapiens
atgaaatcaaaaaattaactagatgtggtggtgcatgcctgtggtcccagcttttcaggaggctgaggtggaaggattgcttgagcccagaaggtcgaggctgcagtgagccatcattgtgccactgccactgcactccagcctgggtgacagagcaagaccatgtctcaaataaataaataaataaaaggatctcttctgtcttctgaggtgactcctaggattctagagccagaaggagcctcagagcacatttattccactcctgtcactgggggcaaaaatgaggccagtagaggttaaatgactcgcccagattcacacagtcatcacaggagcttgggctggcacccaggcctcctgcctccaggcctgtgtcctcttcttgcattaagcccagagcagttcattaggaaaaccgtatagagtcatgagaccctaagtctcatgatcagaatttcatcttctcttcccttttggttttttttttttttttttaacatagagaaggtaaagggggaaaatgatttacttagtttccagaccacttatttaaatcctgcccaatctgacttccactcctcacttcactgttgcagccaaagctaactaatgcatccgtgctccaggggaaggaatctcttcccatcctcagtccaaagtcagagtccaaactctgaggagggtaaaagaaacacaggaaatacaagtccctcacccccacagcctcattacactctccaataagccacaggagtaaaggaggaagatggggcggatgcgtaggtatggagcgcctactctgggtggctggctctgtattaacactctacacgccccctcattcagtcctcacaaaccctggaaagcaagttttgttcgcctcactctgcagatggagttattgaggcgagaagggtgatgtaagctgcccagagtcgcacagctagcaaagggcagagcaggaattagaaccaagtttctctagctgcaaagtctggttctccactccaccatgcccattcacttc

SEQ ID NO: 119444 - DNA, 1140 bp, Homo sapiens
ttcctggacagccaacaggggtgccgagggagtgagtccctcagccttgcctggagccttgctgatacttcagtttgcctcacaaacacggttaccttccatgacatgaaggaggcacacgcgggttgacccctgaccctgtctgcttgttagaatcacgtcgggaaccggggacaggcttagaagcccaggtcccacctcccacctgctgaatccaaatctccagagcgtggcctgggaaatcaaatttgtcagcttccttcccaggggactttgatacatccaccccagtggaaaccagcagcctcctttagtcaagcgaatgtttccctgactgtcaccttctccccctgtataagatgcagattgttagcggtaaatggtacctggattccaacctcagttctccactgcagttggggagatctggccagggcaagccacactgctccttcaggcacagccttgttcatcccgcactcacctgtgttctcttcctctctgtaggacgcacaagaccagccactgctaccgcatcacgtaccgccacatggaacggactctgtcccagagagaggtcaggcacatccaccaggccttgcaggaggctgcagtccagctgttgggtgtggagggcaggttctgatgtcaccacttcactcaggctgcagccctcttggggctccaggatttgctgaaagagaaaaagatatggtttgtgaactggggcatcaatcatcttttgataaatggatcagttttaggactttcagaaaataaaagatcgctcttgaaaagctgttgacatagcatttgtcttttatttggggaaaggaggaaggtcttttcctattccttttagaagtgctttgcccactggcattggtgcttagtatggttaattggtccctgggttccattaagcaccaggcatgatttcttgcctgacaggctcttccactcaggtaatgagtgaagccacacagagggacatcagaaattccagatacaatacaggaagctttttgaatcagcttccattccttcctcccttctcttctttttcagttttgcaaagggcaggcttcaaagagggcactaatgaaatgccagggctctcgtccaatgtgaagggaggtg

SEQ ID NO: 119445 - DNA, 1112 bp, Homo sapiens
cacagctggaaggaagcttagcaacggttaagtcagcccctctgtggcagagaaggggacacccacggtcacaaggtctgagctgtctgtggcagaatcaagactctcagacccagagtcccaggagacagccaaggacgtgttctcaatgctttgatgaccttctcgtcaccaagacactcatgtctgatttctctccccgcggaccccatgttttaaaagattttcattcaccaaaacaactgcatttattaagtaataatttattcattttcccatttttaaaattaatcaaagatacacataactgccagcctgagagccagagtctctgatcagcaggcaataacccttattaccaccatgggttgatttaatttctgccaaaagcaaagacacttgacattttagacagcctgaacagcttcattgtgcgaaagtggaggttttccattacacttagtgaaatattcaaaatagctcccagaccctggtcaataattcatggcacccttggcctccagggatccctgctgggaaccaccgcaccatatcatttgtgcaggaggtaagatgcaaagggaatctcactgtcctagagtctcagcagcaaactgttaagggatttgtagcctggatccagtcagaagccttggacaaaccactcagtcttccctgagcctcaggtttcccatcagtaaggtgggaataagatatcagtcagggttcctagttgcaaacaacagaaataaactctgcttatattaaggataaaataatgtattaaaaggatactgggaaaaatagcttggcagttcctccacaagttaaacatagaatcactatatgacccagcaattccattcctaggtctatatccgacagaatggaaaataggtctccacacaaaaactagtacatgaatattcatagcagctctattcacaatcaccaaaagctggacacaacccactgtccatcaacaaatgaatgggtaaaaaaaatgtaatatatccatgcagtgggatattgtttggccatagaaaggactgaagctctgacacatgttacaacatgcatgggccttgaaaacattcaaggaaagaagtcag

SEQ ID NO: 119446 - DNA, 1095 bp, Homo sapiens
gctccttttccttctcttgggctgggaagttgcagaaactcgacttggacccatcaaattgttctttaagctctggtgtgttattgcatagatggaaaaaccatgttctatttttgtatcagagttctatgtaagatgctttactctgatttaaccatgatgaactatgacactcatgctagttactatgtgcctggcaccattgcacttactttacaaataccaattcagttaattcttacaatgattctatttggtagctgatattaaagttattaacagacaaatgtctataagtgtgtttgacttgcatcagcttttatttcagaaaaaggcttgggcttgtgaactaatgcttggggaagacaaatgattctttttcaaattatctatgaaatgttgaattttctaattatttctctctttggaaaataatcccttttaagtgtagatattatataaaatacatgcctattcttgaccattctgggaccaattaccaaggttttaaaatagcccaggctcattgcctctttcccttctccctctcctgcccaccttctggcgttcctctgttcatagacacgtcccttgcaagtggaagaggagatgagcagaaattcaaacctgtcagacatggttggctgttacctgctctgctaaagaccaggggactaagagctggaagctaatgggatgccttgtcaggggctctttctatactagccttgtccctcctgccatcgtggtctgggacccccagaccactgagcaacaggagagccttgtttatatgacgattttattccatgttgtgagcttttccttcaatttaccaccaaaagttgctggcaagacaccaatttagtgcagtttgagtaagcgaacatgtttgctgttttccactgtgtatttttaacctatccttgtttactggccaccttctactatatggtatcactttgtgttgaatactaaaaaggcataagtcccaaactctgccagagaggaatgattagacagaacaaaacaaaacaaaaccacaagtggatacagtaaggaataaatgcttttattataactttttttgataaa

SEQ ID NO: 119447 - DNA, 2161 bp, Homo sapiens
aagaaagctaatttatgttttaaaaaatatattttccttaagaaaaactagagcagagataaatgaactggaaaatagaaaaataatacgaaaaatcaaaaaaatcaaaaaaagttggttatttgaaaagatcaacataattgacaaacctttagctacatgaattaaggaaaaaagaccactcaaatttctataattagaaatgaaagtgggcacagctgctgcacatcccggggctcctgacctctctgcgtttgcagcgtagcccaagtcggtcagcactggaggacctcagaagccatgttgaagccccatagtgaagccagggctgccttcattcagacccagcagctgcacgcagccatggctgacacattcttggagcacatgtgctgcctggacactgactcgccacccatcacagcctggagcactggcatcatctgtactatgggcccagcttctccattgctagagatgctgaagaaaacgattaagtctggaattaatgtggctcatctgaactctcatggagcccatgagtaccatacagagaccatcaagaacgtgcgcacagccacggaaagctttgcttctgactccatcctctaccagcccattgctgtggctccagacactaaaggacctgagatcccaactgggcccgtcaagggcagcggcactgcagaggtggagctgaagaagggagccactctcaagttcacgctggataatacctacatggaaaagggtaagagaacatcctgtggcgggactacaagaacatctgcaaggtggtggaagtgggctgcaagatctacgtggatgatgggctaatttctctccaagtgaagcagaaggatgctcactttctggtgacagaggtggaaaatggtggctccttgggcagcaagaagagtgtgaaccttcctggggctgccgtggacctgtctgccatgttggagaaggacatccaggacctgaagtttgggggcgagcaagatgtcgatatgatgttttcatcattcatctgcaagacatctgatgtccatgaagttaggaaggtcttgggagagaaaggaaagaacagcaagataaccagcaaaattgagaatcatgatgggggttggaggtttgatgaaatcctggaggccagcgatgggattatggtagctcgtggtgatccaccacaagccgtcgagatgagattcctgcagggaaggtctgccttgctcagaggatgatgattgggtggtgcaaccaagctgggaagcctgtcatcttgccactcagatgctagaggatgtgatcaagaagctccaccccacttgggctgagggcagtggtgtggccaatgcagttctggtggaagctgactgcatcatgctgtctggagaaacagccaaagggaactatcctctggaggctgtgcacatgcagcacctgattgcctgtgaggcagaggccaccatctaccacttgcaattatttgaggagttctgccacctggcacccattaccagtgaccccgcagaagctactgccatgggcactgtggaggcctccttcaagtgctgcagtggggccataatcgtcctcaccaagtctgcaggtgtgcccaccaggtggccagatactgcccacgtgcccccatgattgttgtgacatggcatccccaggcagctcgccaggcccacctgtaccgtggtatcttccctgtgctgtgtaaggaccccatccaggagccctaggctgaggatgtggacctccgagtgaacttggccatgaatgttggtaaggcctgaggcttcttcaagaaggatgatgtggtcattgtgctgacctggtgacaccctggccctggcttctccaccaccctgtgtgttattcctgtgctgtgatggactccagagctcttcctccagcccctgtcccacccccttcccccaatgcatccattaggccagcaatgcttatagagctcactctgggctgtagtgtggcactggtgggctggaacaccagggaagaagatttatgcctcgctgaaacgtggctgtttttagagcctgctgtggcgggagagcccggagcctggctgcccatcatgtggccccacccaagcaagagaagaaggaggaatgcagaacagaggccccca

SEQ ID NO: 119448 - DNA, 1043 bp, Homo sapiens
tgtgacagggcttgctggggaagtgttgggagacgaaggagggagcgaggagaaagagaaataaaagggatgagggaggtgagaagagggggcgatggaaacagaaaaagatacggagcgagatgcgggagggagctggaggaaaggaatggactcacctacctcccacccacccacacctgctcacacaccgacaatttgcactagacgcagcgttagctgcaggtcgggcattcctgggtcacgtctttcattcacctttaacactggcgagccccgaggctgggcgctgggagaggccgcccgatgcgatgaggccgcgcggagccagggtctcgcaggaaagggcagtgggcggcagggcggggtcgtggcgctgctgaccggtgttccctcctccccgcagcgtatctggtgcaggccgtgagagcagcgggcaagtgcgatgcggtcttcaagggcttttcggactgtttgctcaagctgggcgacagcatggccaactacccgcagggcctggacgacaagacgaacatcaagaccgtgtgcacgtaagtgtcctctctggccggctggacttcggttttgggggcgctactgaggtcggagagtgccgagcctccccgcctgcgctcagcgttcagcgccagcgcgaatccgcatcggctcactcttgccttctggctccaacccccaggcctaggaccaggcccccgggttagaacctgcgcttcccaaggggatcccacagcccggggtgggatatggaggaggatccttcaatatagacccagtcccagctctacgcggcctctcaggcttgcacagaggtgcgcatgctcgacatgctgggagccagggcaaggggcatgaaggattgctacaaaatcttggtgctgcaagatctctctgccttgtagcaatcttgatcattctttgctcttgcgtgaacgagtgacctgccaggtgttctctgaagaacagttagtttggatttgaggagtgtttggggtaatactacatttgcctaaagggaaagtcac

SEQ ID NO: 119449 - DNA, 1045 bp, Homo sapiens
ttcggtcaccttcctcttcggcgtctggcccggcgctcgcggacaggcgcccgcgttgggggccgggggattgaggtgtccggtcctcccgggacacattcacacacaagcgcagccgccagaaagctgccgaggaccaggccggcgcccagggtcgtgggcgccagtgcggatttcgattctgagattcaccctttcttccccgccctaacgctgtgcttctctggcgccctcccggcgcccgggctgctttgggccgctaggcactcagcttccagccgggttcgtcggcctcagggcggaaagagatggccacagccgcgcgcccgcagcctggtacctgtccttccagtcccgcgcctcggggtttggccgtccagaggccgggggcttgggggcttggggcttggaccttcgtgcggcctgtgtttcctcctcctcctcctcctcccgccgctcagcttttatccctgcctgctctctgcagggagtcctgagctggggccaggagccccgggccgcggcgagctcactttcagcagcagggctggcacctggagaagaacagcctctccccgctgccgtccggagtgtaggcgggctttttggcgggcgggtgggttgttaagggtgtctggggagccgagtggcggacaggggaggaggagagaaagaggcccgaggttcgtggatttggcctttgcggaggtgacccaggcagactcatccgtgaccccgcccggcctctggccttctcctctccagaccactcatcatccgcgccaggtctcaggacgtccaggctgccctctttccagcggggcgggagagggtgcatccgagggtctcactcggaatacagagtccacggtaggcaatcggttttataatgaaacaatccatttcggtaactgctggtggcttccagggactatattcgttcattcattcagcagtgtttgctgagcgcccaccaaggacagagcgccaagcctgaggcttattctcgtgatgtggcgttgggttcagctgcgtgaccccacgc

SEQ ID NO: 119450 - DNA, 1480 bp, Homo sapiens
tgactttaaaaattaaacagtatggtggcaacattcattatgtaaatttctaaaatgttgcatcttaggtttagttggcaaagaccatatttagaaataaggatgagcttagtcttccaggtagaaatcagatacactaaactgtacaaaaatagtagtttcctattgtttgaaaataccagtttaagattgtaaaaatgcatagatctttaataaaagaattggctgtgcaagagttctcccctttcacagtattcctttttatttcaaatgctagttattggttatgctgtaggatttaactattacaacaagaaaaggcaactatttagggaagaggcagatacaggagaaaggaatgtatataagtcatttttttaaggtacaataagcttaatagtgttttaggaagacaagataaaaattatttaaagatagcttggttctcactgaatgaaaacagtagactaaatactgagttcttttctgtgaatctagtgatcaatgccttggtcgccatattggtaatctctagggcagtcaccttggtactcgccatgttagtcatctgggtattctgtgtgataatcactatcactgattttcaaaccatttgtttctgttgtgaatgatagtttctgtcagagcagcacagtatttgcgaccatatacttgccccccaagcccgtgcacacccattcttttctgggaagccactttgttggtacccatctgtagagaaattgtcaagtggtctactggctgtaatgttagcttctgatagtagatggcccttctggtgcctggtgctaacatccctgcctggctgtctgctttgttagtgaccatctgcagacaaactgtggtctggtcaaaacgtttgtcagtttgcatgttgggatcataaagatgcctgtagtcccgtaagctgacatacctgcctggctggcacttcgttggttcccatccgcaatccaattacagtttcagcagcttttaattttccttcatcctaacgtcgtgtttgtttttctgtatatttaaccctgatgtccgtggttgtatccttttgtgcttgccaacctactagggccaccagagtagcctgaacttgggtcacgtttccatcctaaaaagatcacttacttcaaatatgtcacgtggcttcacaccataagcctgaatagctttaataaagttgccaatattctccgctgaggccagtttaatgaggactcattgactttcttcattgggcctgcctgcagcttgttgatgagttcacagaggaggatgccctcctttaagcccagctgacctgtgctatccagttgtgaagatcttttgtttgataatcctatttggaagcaatcttgatcctgacttcggccaagagcccgtaggaagggccctagttgaagtcagccatgatggttcgggtggtgggaagaggctgcactcgggggtcctgatctctcgc

SEQ ID NO: 119451 - DNA, 1072 bp, Homo sapiens
aagccagtccaaattgagatgggctgtaaggattaaatacagactggattttgaagtcttagagaaaaacaagaatgtaaaatgtcttactaataattttaaaaattatttattacatattgaaatgataacattttagataattgaaataaaatgtactattacaattaatttcacctttttctttttttttaaatgtgactactagaaaattaaaaatttcctctgtggcttgcacatcaggtatttttgggataaggtctagacagacagatggggcaggggtggtaaagtgaactaggaaatcatggtttactttatcagtatctggtggttattagggggtcagaagaaggaggcagaagtttgggggaggaaatcgatttcccaagggtattgtggatcctgatataattgaactccacagatgctgagtgaggtcgggggtggtcatgtgtgggagcagcactcagtcacacgagtctgaagaaaggatgaaaatctggtggttcacacaatggaagtttagagcagtacaagtgtcattaacctggatccaaggtggagtttaagatccagcatggagcatattgttgatgaataaccaatggcaggttgttttcatggacctgagaaaggaggcagaagtagaggggtagaaaatccccttccagaggcactgctggtacccaaattcaattccacagaccttgattgagaacctactatgttccagaacctctgttagaaactggtgaagaccagtaccatgctgttttggttactgtagccttgcaatatagtttgaagtcaggtagcgtgatgcctccagctttgttcttttggcttaggattgacttggcaatgcgggctcttctttggttccatatgaaccttaaagcagttttttccaattctgtgaagaaagtctttggtagcttgatggggatggcattgaatctataaattgccttgggcagtatggccattttcatgatattgattcttccaacccatgagcatggaatgttcttccatttgcttgtatcctcttttatttccttgagcagtg

SEQ ID NO: 119452 - DNA, 1041 bp, Homo sapiens
cccaaacagactccatacccgtggcataaagtggttatgcttgctggttggcaaagcataggccaccgcatattcactccgtttgtgttttatctgggcctgttgctcattgttgcccacctcatgcgtttcactgctcattcactccatagaggttgagtaagcagaattcaaactagctgcattcattttgtcatccgcttgtgttaaggagacagagttgcagctgttggagaatgaggttcaggagcagccctgtggctctaatgcgtggctcctaccctagccctgtctgtgtcatcatgggccgactgctggaatcttggcctgtaaagatgaacagatgtcaaaggccaagtgacgcctgggaattcccagtcctctgacccatgggtgcagcctggcctgcctgcctccatggtccctatttttttttttttttttttttttttaaagactatcagcaagagactgttctctaagtccactgggtgtgctgggtgctgtctcactgagatccagaacaacagtcctgattttcagaagtggaaatccttaaagctgaaaatgagagccttgttctgcagaagaggaagagtaccttccgtgtcgcttggagctggcctaatccacttaatgcctttcagcttggtcatatggagggactagccacaaagttagggctacagccccagccccgggtcccaggcagctgcccagtgtgctcatgcagttagaatgttcagagagtaggacactgggccaagcacatggactattctgtccaccgaccagcacagattaaaccctttgtagactccgagagctgtgcttctcagggaattaaaggatagcttttgaaaactatttttctttcctctttctctcattttatttacttgaaacagtatacacaatgtcctttttaaatgaggtgaagcccagaatctagggatctgttttaaagtgcagtgaggttttccagatcactcatgaggactctgcttaatcttgccagtctcctggctctcattagaacac

SEQ ID NO: 119453 - DNA, 1013 bp, Homo sapiens
ctccctatcagattcccaggacagctgctccaaatcttttccactctcctccagccctaactgaccctgctcgttcccctctccagaacagacctcttcactgcattggctaagcaaaccacccctccccactacggagattgctgacttttttttttttttaatggggataatttctcattctctttttctttcattttgttttgggggagaaatgttccttattctttctaaggctaaagcccccacccttgctgctaaccttctctttatttatttatttatttttatttttgagacagggtctcactgtcacccaggctggagtgaagtggtgcaatcatagctctctgcagccttgacctcccaggctcaaatgatcctcctgccccagcctcctgagtagctgggactacaggcgtgagccacggtgcctggtctctcttctttctctgcgatcctgctcagctgtcacttcttctcatcttaaacctccttttcctctgagccctgaatcttgagactttctctagtttccttcatcttacaaaacaaccagcagcaaagctcttatcttgttttcctcctgcctccctcctttctctgtcatcttcctcattttctcaaccccttaccatccgagttcccctgtccccatgaactagccacacggagctaatgtccctaaactatgccttgccatctccccctcccagggaggcagccggcgaagtggagaaagtcctggcattggagtcagccttgcaggggttcacatctgggctttgccccgtatgcgttatatactcctgaccctcatttgatacatttttaatctttccgaagtccagttccctcctctgaaaaatggaagcagtgatacctaatttatttggttgttgtgagtataaatgaatttatacttctaaagtgtccaacatacagttggtgtaaaattttaaaaaatgattcccatttatcccttgctttagctaatgctgattccttcatgc

SEQ ID NO: 119454 - DNA, 1022 bp, Homo sapiens
ggtatttcaaatgagagttctctctaaaggcttgatttggaagtcatagttatttttaataaggccgggcatgaaggcttacgcctataatcccagcacttttggaggccgaaatggaaggatcacttgaggccaggagttcgagaccagcctggtcaacacagtgagaccacatctcaatttttttaaaaaagttgtttaaaaaataaggtacagtcactctagcaatttgaaaggtatgaatcaactattttatattgcagttctagaatatgtttgtccttcccagtgcagtatagtcacgagtttcagtggaattgctgaaggaaaggggcagctgattcatatttctgcatcacaaatctatatagaaaagacaagttgagatggctctgagagtccagcatatcttaattttaacttttattataaagctgagatcttacattttaattgaaaaatgctctcatttaaaatcaaaatatttatcaatctgtggaagcctatttttacagtgaaattctgtgatcacaaacaggaaatttaagtattgcatgctggtacagaaatacattgttctacagtggcggccctttgctttgtcatggctgtgtttaacaggactttctgcctcctgaaatgtcagcgtagccctcaaactcatgtctattctacttttgattaccttggtcctcagccagcctcatatttgacactttcagcacgggcagtgtaggtccttcttgatgttgagctgttaatctttttattatttcctgtcacttttcaccatgattgatgctcttgagccagaggagggaaaagtgatgaaaatgactttgaaaacagctttgaaaaggagtattttaagttggacttgggtcttacctgagaccataaagcgactgaaaaagcgcacggtatgttttgtaaggcactacctgggcccttgcagtgagggagcaagtgtgctaataacgagtgcttgggactaggagtgctgagggctctcctggtgtttg

SEQ ID NO: 119455 - DNA, 1030 bp, Homo sapiens
gcattccccacagggcccttcctctgccctcattggaacacattacaacttagaaacacaagacacctattctatgatggcaatgtgaactattattcctgtctagagacctgcccatctcctccacgactggcctgtcttcaaaaaagcatttgataatacatttgggggcggcggggttgggggaggctcagaaaaatgcaaccgctaaaatttctctggatggagttttcttcagtaaacagtagaccctgggaaacataacaggttccgaaaacttaattttgatgactgaaagtcagagaaacagccagctgaatcagctccttcttgggcagtggtttagcctacttatctcatatcagacctaagggtccagctgcttttccttggttctaaagagttctattctggccaggacccatcccgagacagacacttctgtctgcagccctgaaaactagaggtcaatggaagggctcaaattaaaggcccacagttgggcttacaactctccatggtgttcaagccttctcagaggagctggtgtggtggagccagggtcaaaggtcatagtaaatagaaagtagccagctttctgcctgcataacatcatcttgcctaaccagactcaaacgcttaattctactgtagtattctttggacattcttctttagaactacgggggcgggggggggggggcgtgtttattttcaacaaccacaatcatccttatctttctgaagatgtttccaaaggctgagaacagacccctttcagaacctcggtaggagaagtattaacagttggaaacatgtcagctgctttatggaggaagcacagcccaggcctggtttctctgggctccgtgataacttggggcaaggcagccagtgcgaagcgtggtggcaggagctggagagatggagagcggctcggagaagggcccctgcttttcagagttgaaacaggagccctctgagagaaagagatactgcgtgtggcttctctgaagccttggagggcgac

SEQ ID NO: 119456 - DNA, 1031 bp, Homo sapiens
gcgaggggctgcaggggagggggcgcggtggccgaataaggtggcccgcgagcaacgggacgattgggatcgcagccagtcgcggcctcccggacccttcccctcgggcagcccggccctcccatggcccggggcgccttgggagggcgtagggcaaacctggggctgcggtggggggtggggaggggactccacctccatccatcccgggatggcaactgcggtcaccctgctaaagtcggggcgggggcggcggtcctccccctcaccccccccagtccgagcgccgccgccgccgccgccgccgccgccgcggccgctcagtaacacgtccccaggagactcgcaggagcaacacgtgatgtgtctacttatcagggtgagagggggagagcgagactccgagcgtgcgggcgaggaagctgggcggggggccgagacgggggccgggacgacggctggggcgccggggtcgccagctcctcgcccacctccctccctgtgggagaagaggaggaggggaagtgactgcggagttgatgaactttgcacatccagaaacgccattttgattccttttccggaacaagtttgcatctctcctcggtctctccctgaagcccaccggtccccaacgcatcatgccagggagccaagcgtcctgcccggccgtaagtacgtgccccggattccgactcgcggtacgccggcggcagcgagaagtctggggcacagccggagcgaccttttaaagaactttggggatggggagggtgaagtctgcagagcgcgttgtacttttgaaactcggtgtgtcccggagccggggacccgcacgccccactccgcgcagcgtgcgctcgggccggcggggcggccagggatgagcggggcagccctctcccctcgggctgcgcgccgggccattcctcctcctcctcctcctcctccccttcctccgctcttttccctttcccgagccgccggctctgccaaccagctcccagcgcgagccgccgcagcgccccgcc

SEQ ID NO: 119457 - DNA, 1062 bp, Homo sapiens
tttttaaagaggatttgctggatgtgtaatactcttaagaaatgctgccgatgcttaccgttttgtggaatatcattctctgggtttttctagatactgctttatttctcatcagaaaatcagactctaagcccttatggcagacaagtatttgttatgtgatggggaacatgcgtcttattgagctggtacaggtagtgcatccattcctaactagttacatcatccaacaagcgaccttttgattgaagggtcttttaaatttcttcgggcagactcccaaggccttatttgtatccaacacaggtacagcgtgttgaaggaagaaaataaacctacacgtattagtccagcatctgatcaacagcagtttattggttacctgctgtgtgccaggcactgtacagtgtagctgccttaggtcgtttttgctcttcaattttgaactgttgcgttattccacttctgaggtcagttaggaagtctttgcttgctatcttatgcttgcttgctaacatcatttatcaccttcagctaaggaaatgtcctagttaatgaagttttaaaatgctacccttttaggattttgctcagcataattaatataaatttaactcctataagaattggttaaatatattctttggaaacagaagtgaattcttttgatgtttctgttcattatccttctgaaaagtaggtggtgcttagaaggtcataggataagggttgctaagcagctaaacagaaggatgctaaaattaaccaaagcatttttgaaagggagtcattccctgttttacattatttactaggtttagttaatttctgaatcttctatgtcctttgacctgggaaggtaggatgttaaagtttgttttggttttgttattatatttaaataatctctttcttttgtaagtgtctttaattgaagttcagtactctatgaccagccttgtggtgtcagatggcagcttgtctggtggacttcttgactattaccagtgtgttcaggttgaaccttcctgaggatttgtgtgtatagtaccctcttatttc

SEQ ID NO: 119458 - DNA, 1035 bp, Homo sapiens
agtatgttcaagtatcttgaagtttttcattgagataaaatggttgaaatctaattgaagccatgatgagtaactatcatctcttggttgaatggtaagcctgttgtaagccaaaagtttccctgcttcaaggttaatttctgtacatctgacctattgaacaggcagtgttgagtcatattttttatgtccaaatataattaagaaattgataaatgtattttctttctgtttcttttctctctttctttcctgatttagacagtgatttttgagtagaagtagccatggcagttttcaaagagcaagggtcagacagtgatttccacaggggggtgagggttgcagggttgcaggtaccttatatcaaaggtaaaaggtacaccgtatgaaacccagagggaggcatacggtgtgctctctgaaatgcatcacttatttttcatttcccccactcccatagaaggcagaatacagaaaagaaaactactgttgttttcattactacggaggtaaaagaatgaggaaggtggagaggggtttttccttttttgttagcagtcctgtcggcaatgtcatcgactgtgctccgcccaatttctcttgtcacgttctctggtgttcagcgtggtctgaactgcagccgagtgtagctggggattgcactctgccgttggcagtggcgggttggggtgaagcggatggggaggaggagactgggagcgatcggtgcatcttatttctggtgggacttcaagggtactgaagttagccagtctgcccatcagtagaggtggctgactgtgagtaggtgcttcagacgaaagcatgggagagggtggagattgtttgttcagtgtgattcaagccagtaaagctaagagaattcgaaaacctctgtgaagtccggggactggggactgggtcctgactgctcctgcagggattcacctgagggcttgcagacatcatgagggtgggtggagaaagagaatgaaaacccccacaggcattgtcagacagccagagtgaaga

SEQ ID NO: 119459 - DNA, 1094 bp, Homo sapiens
acctcttcagttatttgggaaacttgctctggtgctgtcatctgcagcctccttcatgttctaagttatgtggagtatacctttttttttttttaagtgtttgaactagcccttacttgcttaacagttaatgtttttgcattcgtagtctcccttgttttattttctcaagtttttgcaaaattcttacataaccgtctgccgtttttatagggcagtgtttctgagccgggtgctctgtccatacatctcctcttgagagggtggatggctgccagctgctgtggttgggagggatagggagggagtaaggggatgcagggtaggaggcggtgattatttttatgttaagggaccccaggcctcagaccagaaatgtctaatatagtgtcaggagtgatcttttagccagcaagtgttaactgatctgacccttggccttcccccccaccccccagcctatcacacagacaggaggtaaggaaaccatagaggggagaagaaaacagggagacagagatcgaattccagaaaaggaagggctgccagtggtaggcagagtcacccctagagtggcctgggctcccactttatagacatgtgcaatacttgaagatagctctttttacatctaaaccagcggttagtcagtgtcccattggtgtcagtcgcactgatggtgctcagggccattgctctgcagccacctttgcagtcccatacgtggtaacgagtcctgttcctgcagaacgcactctgcgttctggtgcttttctgtcttctcgtctaacctataaactgccaactcccaactctatatctccatttacaacttctcccaagcttgaaccttttgtcaccctgatcaccctgcaagtaccttaccctgcaggtacttgtaaaaatgaaagtcctctcccttccttctggaaggtgatcaccatccacccagccttctaggccaggagtcttactgccgtcctgacgtatgtctgtcctgccccaatgttcgatcagtcaccaggccctctgcaaaaccacactccagtctggccctggcattggctgttctatcgtttctgacctaaggccct

SEQ ID NO: 119460 - DNA, 1051 bp, Homo sapiens
gtgggaaagaattttgaattacagaaattctaaaataaaagttggctcagcttaatgtaaaagtgaaaaaaactccttgttaatgcctggttgcactaaaagctgtcacactggggcctttactaattataaccatttttcatggctcttgatttgaagtttacattaaataggagagatgggcacacagatcaaagaccaaaatcatttcagagctccaatgtgtgggcccattttctctgcttagttagagttttgtttcattagtggtatgagttaataggagtgttggtctgtgtataatttagcttctcttttttccattactcgtaggattcaaaacagaataccaagccagaaatctacagggtataaatcttgctttatgtgtttgtatgtgtctgtgtatgtgcagtatacacgtggtaatagttgattttagatcatatttataaaaataatcattttcactgttttaagggagctccctttattctgacacttcagtgtaaaaaacaaaacatttctctgaatatacaaaatcaaaatcttaattttctcataaaagaggtagatatgtcttcagaaataggggagataaccaggaagatggggtgggtgttctgaaacacaaaggtgaaccatgtgaataggtttcctgtttttttttttttttttttttttttttttttttttttgagacgaagtgttttactcttgtcaccgaggctggagtgcaatggcgcagtcttggctcactgcaacctccgcctcccaggttcaagcgattctcttagcctcccgagtagctgggattacaggcgcctaccaccacacccagctaatttttgtattttttttagtagagatggggtttcaccatgttggccaggctggtcttgaactcctgacctcaggtgatctgcccaccttggactcccagagtgctgggattacaggcatgagccaccgcgccccaccagatttcctttttaaacaatgaatttttattttttatttttttggagacagggtctctctatgttgctca

SEQ ID NO: 119461 - DNA, 1011 bp, Homo sapiens
cggtggtggagtctgttgtgagccatcaaatgctttggagcaggactgtgatgtgagcagctctgtggttcagagaactgctaaccctttagaaaatttaagtcggagagaagacaaggtgtttagcaaactgcagtgtgaacttggaatttggtattctctttaacagaataacttcttccctttttttttacaagagatttttcaacccaggatatgtgggctgccttctgaagccttgttaaatgataggggaaaggtgggaacatttattttcagcaaatataattcaacaatgtttagacttccctaattgtgttgtactagttggtacttacttaaggtcattagagattggaattctttagaggagagggactcatttctcaaaaatattgaggatggacactgggagctgaactgggacaatgtattcctcgtaaccacgagtttggtgtgtcagttgggagtgactgcagggtgggataggtgtgagcagagggccagctaatttgctgtcttgatgactctgtgggtgatggctttaggggctggcagcgtctggtggaaatagaatctgttcaaaaggtggagctgccttacagcaattgccagctcgctgctcacctgcagagcatgtgccctcatctgggtcacgactctgcccctcagatgttcctggtcctctgcttggatccacccccttcactgcagctgaaacagccaacaaaggagcatcatgtgcccgaggcctgaaaagttagagtggatgtgaaggaagtcagactgcaggccccaaagacaattaatggtgtagtaattattgtagaggcacaacattgccttgtactctcaggttttcagagtcctctggggaagaaatacgaattttttatagcctgactttatacatttcaaagcttgtactcatggactaagggacttggatgggagggttgtgcaaaatgggggtaggcctcctgtaaacttggtgggttggacagaacacat

SEQ ID NO: 119462 - DNA, 1021 bp, Homo sapiens
atggcacacccgggaagtcccagccacttgggaggctgaggcaggaggatcgcttgaacctgggagtttgaaatcagcctgggcaacattgtgagactccatctctaaataagtaaatgaatgaatgaatgaatgttcttattcattgtacataataagaaggaatatgaagaaaaaacaagttatcctaaattaagattataaatagtcctaaggattaaaaattattttttcatcagaattttaattatttcactgcacctatgcccataatagaagaattataaatgaacccaaaggaaaaaacatctaatgatgcaaaaaggaaaaaggaaagtaaaattgtttatgcccacaagtcagagataaatcattgttgatactttactatttccttttaggtggttttctatggatatatacacatattacaaaaatgggatttattgtggacaataaaacccatttttgtacatgtctttataccatatgttttacaattttaatatgatatgacaagtcttttttggtgtattcaaatattcttgaacatgaaaatcacattttgatgtggcataattttggggggcagggtcataggctaatgttataattattttgcattccctgggcactcattgtgtgagtgaaggaacctatcttctaggttacatgaaaccaacatagtattaaactttttatggtaaattgtgaatatgtagttcatcagaaatttattttaaagagaaaaatactgaactgacaaaatgtgtgtgtttatttttggatagcatgtgatctgtcttattaccccaaacccgtgagggttactgatgaaaaacaaattgagcagttcaaaaagtcctttcgctagagggttggcctctcttgagaggaaggtgtttgttctcttacatagggcactgtgttgtgaatgttaggaatgatgtgatgtgtcctttatctgtggttgtatttttactggatgtttttctttaatcaatgtcatgttatttggaca

SEQ ID NO: 119463 - DNA, 1055 bp, Homo sapiens
atacttaatgactctcccttggcccttttaattaatctactgtgatctattagagagaggactgggtttgttagctaggagactaacgtaaggtcctgaatgcaagcccaaccttgattatgattaaaacagaaaaagatatacttcacaccttggtttttccatctctaaaatgggtagaattatcttccttgtgccttcttaggaggtgacacaatgatacccatgggcagcattttctttctttttaatcagtaaacgtaaacaaaaacctttgtaaggatggaagctattggaaagtaccatataaaggattaggaccgtaaatccagggaaattctaagcattctgaaagctgcttttaggcagggcagcagccaaaagaccagctggtagattgagacctttctgaaaaacctgacttcattctcttgtggttccattttcctttttttcaaatggggtctagtggcttagctgtggttattccacagctgatgcctctttcattgctgttcttctggttctgacaacaacagcattcttgcaccacttaactctccaagatgcaggcaggggaggtgactgcctcatttctgatgtgcttgttagctacaggaaaagcatcttagtattctacctttgtctaggacttgggactgggagcaggtattccgtttaagttttatgtgccatctgtatattttcaaaaacatttaacatgatctttatttcaagcttttatagccctttcaagttgctctaggggacttagcaaaacaggtagacagtaagtatggatcaactgagcacaggaaagaatgggatttgggaagatcacattgtttggattttctgctgatactaaagctggatttttactacacaggcagggagaaattactgtcctgtggtggacctggtgagagaggtggcatatgactaagcaagtcagctgacctcaattaaagggctgtgaccatctgtacaatgggaccagtacctcctccaactgttggtctcagctgagtgagattcccatgtctgaggaggtg

SEQ ID NO: 119464 - DNA, 2162 bp, Homo sapiens
cctttagtctggaggtgatagaaaatgccagttactgtggtatttaactgacatcaaactcctgtccaaataattcagttgggcccagccttctctcttaattggtgggaaggaaaacttcggcacacacccagaatagggaggaaactgttacgttgaacattttgaagtttcattctgaaggatctgaaagacacttgaatattttttaaattaactatccagttgagctttttaaaaacagtaacaaaagaatctcccctcaaacttgagctaccccaaatgattagcttttgtaagtcttcagaaaatgaaagtttagtcattgtaatccaaggtcaaagtggtggttgttatccaaagctcttatagatttatgtatctgtttggccctgttttaaacagtgctctgaaaattgacagttttctagctcacactcgtatttctttattaataccagaaattcacaagtgggttaaggcacccaccagtatacacatttaaaaatcaatatatgctagcatattgggacaaaagtgacatgaatatgattgtttcatgggagcaattagatgacactttttttgttttgtttttaaaagtaacttgttcctagttgctggagaaggtaatcctccgtaataagagtatagtttaccttattcatgagttacgtaaaacaattacaaaaataatgaaaagattttttttctaacttagtaggtagccttatttgactctaaaccttactcacttttgtgtatggtttctagccaaaggttcacacatgtgagaacatttcacttttagtactgaactactttttcgtgcactgaatgaatacaatatgttaacactcctgtaaggcccagaattgcttggctgccccttgccctgcctgcctggtactggctgaaaaggtaccattgtttgttctgcaaacactgagtgatgtttgtttccaaggtgactggttctattgctgccctttaagcaaaggtgggaggggggatgggggagagagaaagttggcttcagacacctgagagcatcctgttctgggtacagtgtgtgtatgtatatgtttgtaagttgaaattttattttaactgaggtaattggagaaaaagggatagtgtagaaatgggaggaaaagacagtatcagtaagttaaaaatatcagtaggttctgatgtttaactcaatatactttgagtgaatgtaatggtaaatgttaaaattaaagatctggtttgactgaagttaactttacatttggagttaaggggagaaaaatagataactgttgaaatgttaaatttatttttgcataaaatagttctgctataacctatgtgtagctattcaaacaaataaatattcgacaatataactgaattggttattgatcaggtagttgggccttcaaaaaaaagtatgagaatatgaaatataaacagatttaagttctgtaaaaacaaaatctgtaaaatcattcaggtatatttgtgttcaaaattttccaaaaagattagattaaaagtatcttttaattggtgatatatattgactccattagactttggaaatttatattttatcagtcagaacttttagattcagactagaaaaaaaattccttcttggtcctttcccccacccaccctttttattgtacatagatgctgttaacagaactttgcctttttcattcctatcaggtttagtacagttcatgcgcaggtttcagtaaacattaactacttttatcagagcttgcagtgtgctgaatggttagcaaagagagtgtactgcaagagacagatgaaaatgagagagtccaaggtcacatggattttgaattttttttaattattgagaatttaggggaaagaccatcaggcttcacactttaaatctctttatgtgggcctgccacacggcgtctttgccagcttttgtatgtactgaagctaaaacatttgttcagatgctgattggcaaggcaagtgactttaaaacatggtttttttttctttcaattaaaaaaagttttattcagggctgccttctaggatgaaagattctcaaggccctatcaaagacgtaatgcaacacttatcgtggtgattcttaagactcctttgaattttatagggat

SEQ ID NO: 119465 - DNA, 1035 bp, Homo sapiens
aactctgacagttttcagggatgctgagtagctggtaccagatgtttcttttgttaagggcatggagaggcagtgtcacaggtaatcaggctatggtcgttcactcccttggtctgagactatgcgttttgtggtgctgaatgttttcttaaaccaagaagggtgtggggaggtgcatgttctggtttctagttgggctttcccccgacactggctcttgcagtattatcttaggtagaggtgttgactcaattatcattagacccagctcctgttggaagagagtaaatggtgcttggggcctctttatctagaccgttttgccaccgctgaagtgacagcctgtgcttctaactgaattcagtccttttttttcactccctttctgtggaacaacagcaaagtcggctgctcatcattcgggtgcagactttacagcctctgaacagcctctgcttttgcagtttatgaatgcaccatttgttgttttgagcacaactgttagatacaactggcctctgcagcccactctgccggcgaccagtgtgcatcactgcagcctttttttctttctttttttttttttttttttgcataggccaaatttttgctttaaataccaccattttgtccacactagaatttctttgacccaacttacattttttcaaatgtaagtttcagaaataaggttttaatttgctcaaactgttggtctagggatcctgaataagtgcaagtattttactttattaaagggggaattgtttttgtggcttggttttgcacacttttttttttatattctcaaacatgtgacttccaaattttcctttaaattgggttgaagttagaaagttttattatttcctaagtcattatattttttctttttgagctttatgcacaaataatgttttcagtttagaacttaagatcttaaatgttctcataacaaaaaataaatatatgaggttatagatatgttagcttgatttaaccatttcacaatgtatacatgtatcaaaacctcac

SEQ ID NO: 119466 - DNA, 1029 bp, Homo sapiens
gagatgggaggggaggaggcgaggtggggacggagaaggaagtgtgtgcacacgcagacagcctgggagggcagtgaggtggagtcactgcaactcggtgccagcaagtcaggagacattactgctggaagtatccacagttagctctgacttaggggacgtcttgtggccataaatgtggaggaaccgagctctttaaaagccagtttgggtctgatataagttctgcttcgtgtttgtgtccattcactccgtaaacataccatatatagtcatgtttgagctcactataacacacattgcaagggagccgctcatagtgcacacatcctttggctgttagaagcagactcacataggctatttctggtgtgtcgtggctttcttctttctttttttttttttggtggggaggaggtggtgggggagggagaggaaaaggagctctttttccttccatcttcacactggttggaagatgtttctgattctagtttgtctggcactctgaaagctaaggaactgtattgtcatggcagaagaaacaattctctgtgtgcatctgttttagaatgaaaccgtacttttcttagtatcttaacatcacatgcattttgtagtttatggtctccagtctccagctgtttttggagcaccttctaactttgagagggtgagctctagcctgtaaaatggactgtgggtggctcgtggagaaggtgccctggtgtgcttttctgtgtcctctctggattctccctgagctgtccacctctgaagcctgcttcaccttcagactgccagggcaagacatgcagcttctgcagaactcatggcagccgttttccacttggccgagctgggtctgtgaagcagagaggaatcagtaataggaaagaaatgtagttgtttttttcccccttagaatacctaccatactgcatttcagcttggagtgcgcagcatgaggcatttgtggttcagaaaagaggtcttcctttttcctcctcctgttttcttttccttcct

SEQ ID NO: 119467 - DNA, 1003 bp, Homo sapiens
ttattcattaacagattcagatgatgtccaaataccataccaggttgtctgtattccctttattttttgagacagagtcttgctctgttgcccagaatggagtgcaatggcatgatttcggctcactgcaacctctgcctcccaggttcaagcaattctcctgtctcagcctcccgagtagctgggactagaggcgcgtgctaccacacccagctaatttttgtatttttagtagagtcggggtttcaccatattggtcaggctggtctcaaactcctgacctcaggtgatctgcccgccttggcctcccaaagtgctggaattacagttgtgagccaccacgcctggccatttgtctgtattcctaatgtgaattgtgcatatttatcaccaaaagaatatataaaatgtcatggatttttaaaagcaaatgataccaaagatccctaggtaccagagaagtcatagacatcctggaaaacatagtctctgtagaaaaggaatactgaacttaaaggaagtctcaagttaaatttaaaccatcaaatggtgaattggaaggaaggagtgccctcaactaagacttactgtaaaaaaccatagaattttagagctggaatggacttgagaggtgacttgttctgtttttatgagtttgtcttcattttacccagtgttcttccacaattcatgtctgtgcccagaattgaacaactcacctggaatagtgtccacatggctttttggccatgaggaataatcctaacttggaaaataataggtatttactcagcagaaattattaggttttgggttttgtttgttttttgttgagacagagtttcgctctggtcgcctaggctggagtccagtggcgcaatctcggctcactgcaacctggcgcctcccaggttcaagcgattctcctgcctcagcctcctgagtagctgggattacaggtgtgcaccaccacgcctggctaatttttgtatttttagtagag

SEQ ID NO: 119468 - DNA, 1858 bp, Homo sapiens
aaaactccccagagttgctaatacctgctactggttctcaagtggtttgatattatatacataagtgtggagcattgctggacccaggttttaataatcagattaatagatacatttgaaacattgtcatattagcttttaatactactgaatttaagtcttctgtgcacttaggtttgctgtaacgcatggttaacatatataggttggtataaatttttctgttcctgattcagatagggtttttgtgtgttttgggttttttctccataagagaaattgttccctttgaaattttaattagttttgaaattaaactatagttgtgcatatgcatggcagctatacctcctgattgctatgctgaaggtagaaagtattctcttgttgtatagacattggtcatactgtcaggcaagggaaatgccactaatttctgtttcttgaattgcataccagaaataggaattcgttgtctgactgttagatgctcagggcagatggaaaagtaagaaaaaccaggacttcccaggaagcaagtggcagatctgtgtgctgactgtttcagggtggggatggcacagagggggcttgcaggagagatgtggccgagggtggaagagcttgtcttcggtgccttgtgataagcgacctgcagcctgttgcaatggcgactgcatttgagatggtgtgcttgtaacatccgccgggtaggcggagcctcaaggacacatgttgagaggttggggtggtggagccaggaggtgcagtgagcgaagcatccaggcgtggatttgaacagctgctggccgcccggagatcagcctccatgcatcagtcataggcacagagaactcatccgtgcggctggaggctgaacatggagaaggagggaagggagctgctttttcagttaatactcttgatgcttccagagcagtttaaagatactgcggaaatttgttgggtggttcattgtttgttttaaaagctttgcccccttcacgtaatcctatcttttatttaatataaatgcaatcagtctgctttaaacactgactaaaattgcttttactagatattgtattatgtataaggggggagctgaggcccaaagagaagaatttgatcaattgatttaaggttgttggaggattgaaatgttacttgattgctggtcttatccaggatttcaagatttcaaggaaaagtggacaatgcctgcttttatctaagggatttcagcagtcatatgatctacaaaccagcccccaggagcagcaggccctggcaacctctgtgctatggagtccacgcagaacagggacttcaaagtgcttggggtgtgctggcttgggagtcatttcgctgagaactggttttggtcatggccttaacatctgcatagatgttgcacattgcaggcacatgacacttgaatgggctgagatttaggtgcaagttggtagagcttaaaggggaggtaacattagtgaggccaatgggcagcagccccactgctgagcacacactgcagttccctgcagggtcagggagaaggtggccttgccaggttgaggctaggagcagagatcatcttgttaagttctcacaaatcaattactgacacgggaacagtgtgtaaaagtctgaaaccacaaatctttttggacattttggctgtataaagcatatcatttataagctcccaggaatttacttatagtttgagtgtctcttgtgatgaacaggactatgggggagaaataaaccaagcaagtgaaatcacagaaactatgtgaaatcacttttagatggctttcgttttcaaaacgttggatattctcactatatttcc

SEQ ID NO: 119469 - DNA, 1075 bp, Homo sapiens
ccttttccatttcatctccataaggttctctatgcacataaactagatgaagcttaggcctgaagcctagaacataatgacactttggttctcaaagtgtggtccccagacaagcagcattagcatcacctgggaacttgttagaaacacagattcctaggccccactccagccctgctgaatcagaaatgtggaggtggggcccagaaatctgttatcataagctctccaggtgcatactaaagtttgaaaatgactgcccagtgggagtacaatgtttgtagcacctgttgaactcatcactggggacgtgaaggactaatagacacttgctaatgtgaacgtacagtatgtgtgctcaggtgtgagcatgtatatgataataaaaagcactgagggatggtatcatgtgtgccagacaggttttagcactttatagatttgactaatctatttctcagaacagtcatatgatttcagtattattattgtctccatctcacagatgaggaaattgcagaactgagaggttccctaactgtctaagggtcaggccacttaccactgctggcaagtggtagaggcaggatttgcgatgtggttccagagcctactccttaactaccatgcaattccgcttgttcatctttgggtggttacccaccgggccttaaggtagtcttttcattttttcttgaatggagacagtctgtcagagttcgcaggaagtgtggtgtgctggtgacagttcacattccaagttaagcccccttaccacgagcttcattcgttggtggtttacgtgtggggggtgctggtgacagtgttggtcaatactagaggggcatggctaggcagcagctgcccagtcatttaaaactgaacaataaatagaacggggttgttaggggcggaacgaaggggcctagtgggaagtggtttctcagagggagatagttcagtcgcactagaagaatattttcttcagttaacctatgtgtaattttcaggcttatgagaagaaaggccctgttctcatcaccctcccttttgattcttctttggtctttttcca

SEQ ID NO: 119470 - DNA, 1029 bp, Homo sapiens
aagtaaattacgggtggtgagcaagacatgcctcatttttatgatcacaagcgtgttgaagaattctgagaagcaggacttggtttcaaaagtatgccaaaacaatttcatgtcatgaaaatactggtagaggtaggcttttgattgagaatgttcccattacatactgggttacattaaataggcatcagcttggatttacaaatctgtgtgctacagagattttccctgttaaggtgtgtctgacccatggggactgggtgggcgtgtccagctgcccttggactgggcagatgagcaggcagggcggctgtgcttctctgaagtgtgcgcatctcctcttagttgtgcttctggtgttgacccaattattgcccgggtatgaaagagtttgaaggaagagactgtcctgctggtgtctatctccccttttcagttttccttcctgttctttgtaacatttggggggagtttgggggcttgcaaaggggttatctgtttctcagggtggggcttgtaaacatgaacccacacttaagagcctgggcatgttcagtgccctgtgtgagctcaatccaaagcaagtgaacaagtgtgcttcagggacatgatgcttgtttcaggccccgctgggccgtggaggggcggtggccctttgtgcagttagaccccccagggagtgcagttgtgaactaatcaccgcctggagagcctgtgtgcctcacacttcctccaggactgcactaatccccactcccacccccaactgccagcccctggccttggccccctccttccaaggtgcctctgctggtccaggaacatgccacctcctctcccagctgcacatgggctttccaaaaaggcccatcctgcctgctagtcatttttggtttgctcagtttactttaagaaaacccatttgcttgccagtgtttttggttggctagcttgtgataaacacttatcaaccacttatatctcagagcatttgttttccttcatatgcacagtagtaaatacttttct

SEQ ID NO: 119471 - DNA, 1026 bp, Homo sapiens
attcttttctgttttcaaattcctcaaccaaggtgtgttgtggaggcctcttcctaccctttcttgcacctgggtctacctgataagccaggagagcagatcttagggtgggacagggcaggggagctgctcaacttaattccctgtgggacatctttagccttggcccaggaaaccctgccttgccctgggggtaggtgagggtgccctgtgggccctctgcccctgtggtccagcatgggtgcttccttattagagcatagtccaccttgggcacccagagtagagacgatacatgtttctgctaagttaggcaagaaagtgatgaaataccagggtcctggcaggcaggctgaaaaacaatgtttaggaaaagtctggcttttttggggaaagggccagggactcaactcttcccacagctgagtgccgagggctgctgtgtcccctcccaggggagccgggtgctgtgtgacaaatggctgccatttagcagctgtgtcttggccttgcaaatctggcagtagttagatcctggcaggaagacatgctccctggagaagagctacaagaagtggagtcagcttcttcatagtcctcatgtactagcaggaaagcttatcactgggactgtgccccatttccttcctttaaagaagcacagagccttgcagagaggtgcaggaagaagaatggggtaccacaggatggttttatctggcattgtccagaaaatctccctagctctcccgtggatcatgttttaaatactcaatctgactgacgtagataaatttggtaggcagggaccctgtctccccagtcaatgtgtgcctccctgctgaagttatatttaatgtaataatttaaatgtccaagtgatttttaagagaagctgcttcctgcatggaacctattactctgcattaagctgctccttcccccacactttacaaaatattgaagttttcctttacctaagaacaaccgacattgcttttgaaaaggagcatcagtagcttgtgt

SEQ ID NO: 119472 - DNA, 1423 bp, Homo sapiens
aaaagaactctcaggtttttgcctataatcccagcactttgggaggctgaggcgggtagatcacttgaggccaggagttcaagacccacctgggcaacatggcaaaaccctaaaaacccaattttagtctcaactaaaaatgcaaaaattaaagttagccgggtgtggtggcacacacgcctgtaatcccagctacccgggaggcttgaggcacaagaatcgcctgaaccagggaggcagaggttacaggctttcagccttggcgacagaaaaaaaaaaagggaaagaaagaaaaaaaaggaaagaaaccctcgggtttttcagaagctgggatgcagcccttatctttcatctcttcattgctgtctccttagacctggagacctgccccttaatcttctgtttctggctttacatagcattgtcccgtatctcccccggggcttgggggctggcctttccctcctcccacagagggacttccgccctctcttagtcctcctgcctccgttgactttgcgtaaatcttgtgggagtgcaaatccagaaattcagcagcctccaccaacaaccagacccaggctttctgtcacacttcacctacaggagtcatctttagggtgctactagtctttcctttttttttttttttttctgaagcattgttgatggaggtaaggggtgtcttagagtttcttctaataactcttttgtacttttccgctcttcaagctctgtgactccctcaggcctaatagaacccaaaacaaacagcctcgtgaactctggctttatattgcaagacattctcaatattcaaatcatttacacccaagggcaagaggatggaagtttcaaggtcaagtctctcagcctagccctctttctctaaaaccatcctctccttgctgtcctgtgtgcttccaggacgctacccggtggacctttttttaaggtgtctttttaaaatgaagggaaataaaataaaatgaaatgaaggggaggcagcagatctaaattttaatggaagtcttagctacatgctagaaaatcttaattctagacacttgtttagactctgaagtgtgtttatttattgtatttatttatttttttgagacagactctctgtcgtccaggctggagtgcagaggcacaatctcagctcactgcaacctccgccttccgggttcaagtgattctcctgcctcagtctcccaggtagctgggattacaggtgtgcaccatgatgttcagctaatttttgtatttttagtagagatggggttttgccatgttggccaggctggtcacaaactcctgacctcaggtgatccacctgcctcagtgtccctaagtgctgggattatagatgtgagccaccgcgcctggcctatttatttatttatttattttaattttt

SEQ ID NO: 119473 - DNA, 1053 bp, Homo sapiens
ttacaggtgtaagccactgtgcccggccccggctgatttttattttgtataggtggggtcttgctgtgtttcctaggcttgtctcaaattcctggcctcaagccatcctcccacctcaggcttccaaagtgctgggattacaggtgtgagccaccacacctggccttattttataataataacatatattattactaatattggagtgatgtcagggagaagaaatgttgcagaagaaagaatgaaaagtctaggattgtaaatatccagaaagaaaaaaatgctttgtgaatagaccataaaaatgttagtaatggtcttttattccccgagattgagtatcagagggtttaggttggttagtttgggctgttgttccaaaattgtccaggatgtggttatagggtagataggaccaactaatactggccagcttgctctggttcgatgatcttgtagaagagcccgcatgttatggtgggttttttctaacgtagaacaatgagctccattgtgccttgcaccagcttcttccccttcttccctgctctgtggtcctgaaggaagaactcaaatagaagacataagaacaaactgaagtacaatcttgtcacagcccaaggggctggttgttggttccttctggaacagattctcagggatgaggccagtgactcttttctttttttcaaacagtgtagctatgagtttcattttattaattacgctttcagattagagatgagtctctatttttttttaattgttatttacttaaaataggaaaaggaagtaaatgtaagtgatcttggtgtcatcagtgggtagtgtcacactttatactttatccccaaggaagaaacatgtttagcaaatatcttcctgtccagacaaaatggcaaacaacaaggcttttctccttttcaagtgggataagcttttgcaattttcagcccttacattggttaactatactgactgttgctaggctttctgtgtttaagacacttaggtagtttgcaagaatgtatctttgataacatgactgaaaag

SEQ ID NO: 119474 - DNA, 1032 bp, Homo sapiens
cagctcagttgctgagcagaagagtaggttaccatcaagtacaaaacatgtagcacggaaacatcactgtggatccagcttttaacttcccagaactctttatcagttgctcccacgttgaaaatttggattgagtggtgctcgtcttccaaaacaaacttgggaaactgagccagagcacgcctctgggagagctcaatgtaggaaaaagggcattgagctttgcagtttgcaaagcttgttccaggaagtgctgagctgcaaagctgtgaagaaatgatacttgaaacagaggatagaaatgtgcctcatttggaataaagcctgtctctaaaactggtattttccttttaaaattgccttgggaaaataggaaattaattttcactttgctccttattttacagactgtagacttttaattctaaagagttgtggagcatgtcttacatttaagggcatgcttaagaccctggcaggggcaagctttcatgactaacttcactgattctttgaagagtagggatgtgttctgatttcagctgtcattagaatggtgaagatgggccagtactttgggaggccaaggtgagtggatcacttgaggacaggagtttgagaacagcctggccaacatggcaaaaccccatctctactaaaaaaacaaaaattagccagattacccataatcccagctactcaggaagttgagttcacttgaactcatgaggcggaggctgcagtgagctgagatcacgccgctgcactccagcctgggcaacaaagcaagactttgcctcaaaaagaagggtgaagatgaagaagggaaatccttggaacatcatctagttgtttcgttgcaggcttttttcctgcagccataggcacgattttttctgttgccaagtatgggagacataggccctgaggatgcccctggacatcaggataggcttcaggaagaggcttatatgttcctattatgcttgaagaaaatattagctgcgcagaaatgtgacctgctccatgaca

SEQ ID NO: 119475 - DNA, 1085 bp, Homo sapiens
ttgttgaggtatttcagcagctcagtcttaccgggtaaaactggtggatggcagcagaatctggaacatcgtgcttgcccacacttgaacagcaggcagtggtgagagtgagaaattaggttagggaaggttagggatgggcttgctgggggtaggatgactagcagagagctggcctctgctccggaatgcaacatgcccaggtgtcctctcccaccatgcccctcgtctgatgcactgagaactttgaacaggtcctgagtgtgtgtccggtttagtttcataactcgaaagtagcaaagtcaagagggagcctgacttccagcattagatcacaaaatgaaacctgcagggagctggcagcatttccaccgtagcacttcacagggctttataccttacatttttccgcctttgtttaaatatccaacctgtccgacctgttcgggctgaacaagctggtgctagcaaacactgaagcgtgcccactcactgtcaacctttttctgatgtgttaaggaaggtgattagtggcaacattgtcccccccccccaacccccatcccaccctccccactgaaacatgaacaggaagcactgaagtcttagcctgtgtattcatgacacggatcctcatctcacctttggcatgtctgtgtgcctgtgggccatcctcagcttctcttggggctctgggatgcttagtggaaaggttgttggccttcagtggagacagattttgtatttccttaaaccggagattcagttgcataatgggttcattggtcctgtggtgtcagcacttaattcttccttttcatgcttatataacccagcttgctcaagaggactgctgttccaagtttatgggtgggaaaactgaggtctgccatgctgcaggttcttctggggccctcctctccagtttctgttggtagatggtgtactgttcctccctcgacatctctggagaacagaggccatgtgtgcaccatgtccatccgttttagataaaagtggctatagacggccttggtcatacagaagggctctgtcgcctggttggtcttgggaggtgacatttc

SEQ ID NO: 119476 - DNA, 1016 bp, Homo sapiens
cacttcccttgtgggcgcatggccgaccatctgggatggccccacccgtgcatttcttgttcctcttttggaactggctgaggagtagcagtgacttagcactgccctatcatgaagatagtcatctcttcctcctgcacagaaagtgagtaagtaactaggtcctgccttcttgaagacacctcaagtgatcgcctttcaagctgaagtgggaaatggcccgtgacttcagcacttccctcctcctacagagcttaggtgtggggattggggtgtatgattttagtcgttgccctgggaagctggtctctggtggccggcgatggcttccctcagaggggacagctctgggctcttgagatcactttgggaatgatgacttcagttggggcaccatcacctcagactgtaatatggggatattcagcatccctgctgggagaggccagccatgagtgtggggatttggaccccaggctgcatgtaaatgttgaggaaactgagggaggttagcctggggaagaagaagaggccatggcaacacagcagctgccctgaggtatctaaggcctgtccgtgggaaatgagagccttccactgatgtctctggactcacccaggaaggtcctagctggccgattatagctctatgttaatgagagttctctttgggtgagaggaacatcaattcatccaacttctgaggtcttttgtttgtttttaagaatgtctgactttgtatggacatattactatgtatttttgtggattttgtaaatagatatggggaccaaataacatgaaaatttattttagcaaaacacaagcaggcaagggaaaaagacaagcacaggaggatgtagggtgttactgattcaagggtagggcagttaggaatcatgtctagagtaaaagatttttaaaaggttagtgctggttcatgtggactgccaacacctctctaccccctactggatctgaaagtcaggagaggaggaaggagctgtagaagcagc

SEQ ID NO: 119477 - DNA, 1743 bp, Homo sapiens
atgaatccttatatatggatctttgcacatttgttcagttattagaccttaagacagatttctaggagtagaattactgaggcaaagagcatacatatttaaaattcatatctctagtgctcagccactttgcagaaaggcagtcactcatttctactctcaccaacgatgggagagtaccagtcttctgaaccacaccaacaccgcatattgttaatgtaagactttctcaccctcgccagtctggaaggtgaaaagatgcactgctcaggtgcagaatggaggagatgtggtttgatagcagtaaatgaaggaatcgtggggattgtgattgacaacaaacttggtaggaactgagggtataaacacacccaatggaacccacccaggctccctttatgtaccttctggaggtcatagtgccagccatgtgccctgagctgtcagatcacatccagactggagtttgcatctggatccagcatttcatgaaggatacctgtacgctggagagcattccaaggttacttaggaccagtataattccacagacttgcaagcagagcttgaggggggctgttcacttttgaaaagagaacgcattacagaaacgcagtagtcctcttacactatttgaagagctgccacgcagatgagaacatggactgatgttataacacagcatctcccttgaggacagatagacagaatttctgactcaatgtgagggagatggttttaacaattagaacagccagtgaaaatggagaagtccttgttggtggaagtgtccaagcagaactaaatggtgatgcctccagtctgctgtggagagggactttctatgcagagtagagggctgaatcccatcccagctcccttccagttcatgggctccttgtcatttattgactctcaggatgcgtggaaattagacaaattagcccttgaaatcaaccctgagagaaagacaagacccaagccttctaaggattggaatactctctttcccaccacccctaatttgttttggccacagcttgagggaaggggtcattagtgtctcatcatgatgatcctggctgcacttcctgtgagcttttgggaggaaatgaacagctccagttgccactcctgttgttggaggctagggaagcagagcaggggtcagagcagtggggagaatctctcactacatcaaatccatcgtcagacctggccggacccctccaaccctgcagttcacccgtgggctgaattgaggttgtcagtgcagcttttgctcatcaagcggctggaaggacaaagcaggaacttcccatgttgtacccggtagctggggatttcaccctgaaatggagcggtgcttgtgcttttgcacctggggctccggggctcagtgggagaactggagtgagccgctgtctgtcagactgccttggcctgctttggtcactctgccacttctaggagtgatgcagttcaagggcagccctggttttccagactaagccagaggctctgcagtccttgagcaaaactggaggtgggaatgttctatgcctgagctgtgggctcctcaccctcttcactttggtagtaactgtgccaccttgggccacagtccaccagagaggaagtgtccaggttcaggttatatccttaagattccagctggtgatccagaacagagttaactgactggcgtggtcttgggagataggctgggtttgggggaagagc

SEQ ID NO: 119478 - DNA, 1184 bp, Homo sapiens
taatgcttcatcgagtataccagtatcatcaaaatataatgtcaacacataatcaatagaaaaatggtgagtgatgtggttcacattcttgcttccatgtactgactctttgaaatctggtgtgtgtgacgtgaccccagcccgtcttggctgcaccacaccagccacatttcaggtgcttaacagcccacagagaggtttcagatgagccacctacggcagggagggctgcagctttgacgcggagccatgtcttgtgtgtgaagaaggcccaagggcggcagctggatggtcaccctgttggcacagccactgctgagggtgaaactcggccaaagttattgtgtaatcttagatggccccctgatgaaaggagttcgggtaataagtaacgttaacatcatttcagttaaaatgtacccagcaaatgattgagtttgtactgtgtgccaggcacttgcccaggcttgaaggaaagagtgatgtttgagacagggtacgggctaggcacaaaacaagctggttggttataaaacaaagttcaggggtgagttcagggcccaggagggcacatttccctcagattccaggcaggcagagggatctggtggatgcaaaacttctccttgggattttacatcagaggctgtggtgcttcacttaatttcctctgggtcagggcccaaccgggtctggtacttcattgaccctggtcatctctgagttcaaggtgatgacattaaatctctgttgggaattggtacatagggagcccaagggggctctgacaggaacctcggctccatgagtagtgagggcagctgagaccacccccttcctgtatcttagtagtggggccaccaaagggaaatgccttctttttcctgcattctccactgttccaaggaatgtttatctcccttcaccacacgcctaccacctacagagaccccaagactcctcatgtacccgggattgatcccacccttgtcaaatgtcatcctaaaaacagggaaaagataaaatatttgtcagcatcttctgttgaagagtctgtgagtctgaggcttgggcaggcagaaacagattttaaacacttccgggggctatgaacagaggtccctcaaggaggggaagactgcccccacccctcacctgacaggtacagaagccttggtcaggac

SEQ ID NO: 119479 - DNA, 2198 bp, Homo sapiens
gctaggacacaggcatgtaccaccacatctggctaattttcttatttttttttatagagacaaggtcttgctatgttgcccaggctagtcacaaactcctggcctcaagtgatcctcccgcctcagtctctggagtagctgggactagaggcatgagccaacacacctggctaatttttttttattttttgtagagatacgggatcttgctatattgcccaggctgggaactctttatgttatggggaaaggctgtgtactgggataaatgtacaacaaatactttgtgcatctccgtttagtgattattttttcaatcttcacatgtgttcccttgcttttaccggtgggttctatataggcctggtgcgaaacaaacctgcggaggtgcatcagcgagcaacaccgttttgtctgcgacacctgtgacaaggcgttccccatgctctgctcactggctctgcacaagcagacccatgtggcggcagaccagggtcaagaaaagccgcaggccacgcccctgcctggtgacgccctggaccagaagggcttcctggccttgcttggcctgcagcacaccaaagacgtcaggcctgcccccgccgaggagcccctgccggatgacaaccaggcaattcagctccagacactcaagtgtcagctacctcaggaccccggctgcaccaacctgctgagcctgtcacctttcgaagctgcttccctaggcggttctctcacagttctccccgcgaccaaggacagcataaagcacctgtccctgcagcccttccagaagggcttcatcatccagcctgacagcagcattgtggtcaagcccatctctggcgagtcggccatcgagctggcagacatccagcaaattctgaagatggcagcctcggctccccctcagatcagtcttccgcccttctccaaggcccctgccgccccactgcaggcgatcttcaagcacatgccccctctgaagccaaagcccctggtcacaccacggacggtggtggccacctccacgcccccgcctctcatcaacgcccagcaggcttccccgggctgtatcagccccagcctgccgccaccgcccctgaagctcctcaaaggctcagtggaggcggcctccaacgcccacctgctgcagtccaagtccgggacccagccccacgcggccacgcggctctccctgcagcagccgcgggcggagctgccgggccagcctgagatgaagacgcagctggagcaggacagcatcatcgaggccctgctgccgctgagcatggaggccaagatcaagcaggagatcacagagggggaactcaaggccttcatgacagcgcccggcggcaagaagacgcccgccatgcgcaaggtgctctacccctgccgcttctgcaaccaggtgtttgccttctcgggggtcttgcgtgcccacgtgcgctcccacctgggcatctcgccataccagtgcaacatctgcgactacatcgccgccgacaaggccgcgctcatccgccacctgcgcacgcacagtggggagcggccctacatttgcaagatctgccactaccccttcactgtcaaagccaactgcgagcggcacctgcgcaagaagcacctcaaggccacccgcaaggatatcgagaagaacatcgagtatgtgagtagcagcgcggccgagctggtggacgccttctgcgccccggacaccgtgtgccggctgtgcggcgaggacctcaagcactatcgtgccctgcgcatccacatgcgcacgcactgcggccgcggcctgggcgggggccacaagggccgcaagcccttcgagtgcaaggagtgcagcgccgcgttcgcggccaagcgcaactgcatccaccacatcctcaagcagcacctgcacgtgcccgagcaggacatcgagagctacgtgctggccgccgacggcctgggccccgcagaggcgccggccgctgaggcgtcggggcgcggggaggacagtggctgcgctgcccttggtgactgcaagcccctcactgccttcctggaaccccagaacggctttcttcacaggggccccacccagcctccacctccccatgtctcgatcaagttggagcccgccagtagctttgcggtggacttcaatgagcccctggacttctcgcagaagggcctggccctggtccaag

SEQ ID NO: 119480 - DNA, 1056 bp, Homo sapiens
gtggtgagccaagatcacgccactgcactccagcctgagctacagagcaagaatttgtctcaaaaaataaaaaaattagccaggcatggtgatgtgcacttgtagtcccagctacttgggaagctgaggcaggaggatcacttgaactcagccaggagttcaaggctgcagtgagctgtgatcatgccactgtactctagccagggtgcacacaggcactctagcttgggtgacagggtgagagcttgtctcaaaaaaaaaaaaaaaaaaaaaaaaacctccaaaaacaaacaaaaaaaattagccagtgtttactctcccagaacagtcaagaaacgaagaaggacattggggcaagagaagagtgaacagtgagaatagtttgatgaggagattggggccttggcctccaagataaaaaaaaaaaaaaacagaactgaaaacatttctgttcatttttcaaagacaatcagggttagaaaggtggggtctaactagcatagaaaaccttgcagttgcttttctttttgtaacaagatgacagcctgagcagcccagccttctctccattgctcctccacccctgcaggcaggtttctttcttttggtattttctctctgtatttggcagaagtgtacacaggactgggtacaaacggccaaagctgtcttttaagaaagctaaaaggagccaaatacaagtggtgtcccaggtgctttccacacccaggtttggatgactcactgaccgaagctctgaccctcactgccagatagaagcagggaggaaagggtgtggggggaaagcctgagccggctcaaaaaaggcgctcaaagcacccatgagaaagtaagcaagccagggaagcccggaatggacaccccatagtcccaagcccatcactgtgggacaaggaactggagcaaagggaagggggaagaaaatgaggacagaggctagaacagactggctgtgtttcctggcaccctctcctccacctgtggcctaaaaacacacgagatgctcccgaggggtaaaggcaggaacagtgcact

SEQ ID NO: 119481 - DNA, 1065 bp, Homo sapiens
taggattacaggtgtgagcctccgtgccggccttttttttttattattatttgttatagagacaaggtctcactgtgttgcccaagttggtcttaaactcctgggctcaagcgatccacctccgttggcctcccaaagtgctgggattataggcatgagccactctgcccagctggctgatggtttaagcgctcgcgttggggcttgcagaatgctgtaggtcctgagtgcgcaggtaactcactgtggttacaggtgcttttacaaatccccttctaaagcagttattcgtggcagctaccaaataaatagaatcatttgctactttctatatagatggctggccaacaagtgtttttgaaacctgcgttattataaaatactaaacgggcccgttttcctgcatccctgcaatccagagagcccaccactatgtaaaaatgtcagacttacgcagtgaaatgtgagcttctaatgactcatgtgagttgttatgtcactttgggagcctttgtagtttgatgcaatactttcacatcatggattgttttctgaatttagcattaatagggaccttctcatggggacgtcagcctggcagtcctaaccaactgtaaaggtgacgcacttaccagtgtgaaaattacagagtaaaccatgtgacaggggggagcgagaagccgattgttttctttgaaatcaagaatcctatcatagtagcttcttacttgttttcctcttggcccagttcttttctcaatctggccagactcagagaagcagcagtgttaccttttgacaataaaatgttaaaagtactttatttttacttgaaattattaaatactgtgttcaattttaaatgaaaaacaataagtaatttttttcattttattttatttttgagacagagtctgtctgtcgcccaggctagagtgcagtggcacaatctctgctcactgccacctccgcctcccaggctcaagcaatcctcccacctcagcctccccagtagctgggattaaggtgtgcaccaccatgcctagctaatttttgtatttttag

SEQ ID NO: 119482 - DNA, 1638 bp, Homo sapiens
ggcggccctggggcaggacctgctggagccgcgcagcaagaggcctgcccacccaatcctggccacagctgatggcgcctcccagctcgtggggatggagtgacagcctcagtccccctcagcacagacaaaagccagcagagcaaagcgtctatacttcatggggtttcctcagtgccctttggctgttgaggagtgagagagagagagagagagagagagagagagagagagagagacaagcaggagcgtggctgctcgctcagtgccatagccttaccgcagcctgcgcgggaggccacagcccgtgccgattccagtgccttaactacttaccggatccctccatattatcatgggtgttgtatttttccaaaatgacttcttaaacaaaacaaatattataatgaattgtctggagaggacctcttcatttgagcattagcgttattttgtattggtgtgtgtgagcttgttcttgtgaatctgtgatagcaccgtttgttctgtgagctggaaacagaaggaaaaaacatacccttgggtacccatagccaataactggaagaaaatgatgtgaatttcatgtaaatgaccagaggaaagatggataagatgataatttcttaaatagacattttccttttttctttgtgcttcatggtggagctgtcatctggtccttggtattacaggatgtggttgatgaaggtttccaatatggtttcaggccaaaaccagggaagattctagcttcagcctcatgtccatttccagtctgtcagcattagacatggtcactgttcaagtttcaagacatccattcttaactatagagaagagttactcccctggcgtcttaacctatggaaaacatgcacggataggatatatttgattgcctcctcttccctttcagtatatgtattattaatattattattattattattattattagttcatcagtttgctgttctctgcagtgagcagaatcaaatgggcaatatttgtcctgggagacctgtgccgcacccaggtccccgtgttaacgtgtgcctgcggttgtggttggcaccctcgggtggtagctcttctactgtaatgagacaagcctttcttctgtcactgcagaatttagaaggggccgtgagcagtcttcccaagcatggtccaggagcagctcagagagggtggagtgaggatgcatgcatccagggaacaggcatcaagaagccagggccgtgcctggagcactgcagagatgactttggagaaagcaaagcagtgacccagtgaccaggcacattactcgtgagcgaggtattcccagtcttcctgctaagcctaatccaagccttacccagctgtgctactgtcatttgcaaagcaaggaaatactactactggtaataaaactacacatgcaagatgtcagataagaaataggtttatatttaccttcctgcgatgtggggttggtgcttgaagataaatgtgctgtttctagtttcttaaatagcccacacccctggatgcaaaaaggcagggttatttttacccatgagcatcctgtgcaggcaatagacttccctcactgtctccgcctgcagggaggagaatgtaccccactgcacc

SEQ ID NO: 119483 - DNA, 1113 bp, Homo sapiens
agaggttgcagtaagctgagatcacgccactgcacttcagcctgggtgcttccgtctcaaaaaaaaaaaagttcacacatttttagacatttcagtgatgttttagaataaaggtgatttaagattggttttacaggcactcttgggctgtcagctagttggcttttcagatgatgatcataaagacactccccctcacgcaggtatatgagtaagtaaggtctaccccatccacactcccatactgactttccattcccaataattgcacagactgcatactctgatcgcttattaaacatttctaaggaagccgagatggatctttgatgtaattttctcatctgtatacccagccagtaagtcagtagcacctaagatttctttcccttcaagattgtattctaagcagtagaattaaagtgttcttcatagaaaaagtaacttttaattagaggctgtgcaaactctggagaatcagtctttgttaccagataataatgtttttagctttttctgctgagaggaaaaaatgctttgaagaataaaaaatactagagcataacaagcttggggagttaggaaaaaatatattagggcagtaagaaccagcattacgtcttctctgcaatgcttgaaacattcagtattaaactttggattaatccaaagtctgaagagaaatacaccaaaatgctaaagccgtttttggttaggatagtggactttttttttcttcttcagaatgtttgtaatgagcctatattttataatggaagcaataaatgcaaatgtgaaatttatctgagcctcctacaatgagtataataaatccagtggttgtggatagcttatttgtggccccaaaagaaacggagccactttttaaaacttggatgcattgtcactacatagtgaaagaaaatcaagatattcttttttttttttttttaaacggtgtctcactctgttgcgcagctggagtgcaatggcgcaatcttggctcactgcaacctccgcctcccgggttcaagcgattattctgcctcagcttccttagtagctggtattacaggaatgtgccaccacgcccagctaatttttgtattttta

SEQ ID NO: 119484 - DNA, 1505 bp, Homo sapiens
gcatttgatatgtcatccagttcataatcaagttgcctttttctggctaaaacataatgattatgtatttttctcatttggtcctacaagctgctggccctttgtccctccactgtgggaatcagatctagaggaggctgagcctgcagacacagcagtggccaaaaggtcactctaagtgttttgtcttgactccttacttgaagtccacccagctagcacacatctggtttatactgaagccccctgcctagaaatactcatttcaggaaccaccagtaagcatctgtgaccacacaggctttttgactgatggcttcccggatctggtttcaagggataaccccgtctgtgtgcatctatggtcttctctctacagcgaggactttgcagtgctgcttgtggtccacacaaggggctcagagctgagtctgaactgcttcatggtcaccagctcctgtcccttccagtcttgagaggcttttttctccagatggaacctttccttcccgccgttttctcggtctctggctgtttttctcttgtgcccgtctaattggacacctcctggcttccatctctgtggttctcctgcctcacttcctgttctgttgtttttccgttttgtcaaaatatctcctatgttcttggcttccttttcgtcgccaggttttcagctttcctttagctcttcttctaatatggcttctgcccacaaaagcctgctctgtcaggatctcatggttctccacttgccagaaccttcttcagcctcagttcctcggcctcaacttgtacgtttaacccattgaccaccaccccccaaattcaccttcatttctttgaccctgctcctcactccttttctgttgaggaatctgttgactaactccaggctcactcaggctcaccgtcctgctctctgcaccagcctttccagagcgtgccagttctcatggcttcatctgttaactgttgatcacttcagtcctgatttttagacctaaatggtttccttaacgccattctaactgcctgtgactcattttcacttacagtgtttattgtaacgccaaaccaacaaatcacaggtgcttgcttctctccataaatctccccagtctaactttttgtcattcaacatgactcgtttatccaacctgaaatcgcatatagccccaagtatggtgttttgtacacaggtatttaataagtgacttccagttttggctctgctatgaataaaaagagatttcagttctcttcactttgaaatctaacaactcagagaacattgaagaaattggaatttagttgggatgaaatacttgtggtttaaaatatttctgttcatattttctaatttgttgccggaggtcttgggttttctatttgagtgcttgcaaactcaatgtgatttctgtcagcatatcttaggtttgtttgttatgaaacttatgcagtgtgaggttctatctgaaaatgttatttagctatcttctggg

SEQ ID NO: 119485 - DNA, 1142 bp, Homo sapiens
gagttagtatggttcgtaagtattcctggtgatacgctagtattggcaattctgtgaggttgaacaaaggggtggtatggtgtgctagcgtgggaattaggagacctctgggtcttgacagtgccctggccactaagcaaaggcagttcatccttggagtctcaatgtgcttttttgttaattgagatatgcttgaagtatcagccctaaatagtctgattctgtgacctacaaacccttacttaattcagtgttactataaatgattcttcccttaaacctactttttacttagcaaaagagaaaaaaaaaaaaaggaaacgctcatgtcaggctgcctgggtttgaaccccagatcccctcttagttggaggcaagttgtatgatgcttcagcttttggttcctgcctcctaaggttgttaggagttactgtgtgtagctgcttagaacattgcctgggtctcagtaagccgcttaagtgactgctctcattttcgctgtaaagcaccatactgtaataacatcccatgaagcatggggcggggaagagtatatggtaccttatggactttgatgtggtggggtagtaggtaaattctgaatatgtaagctacatagtattctttttgtaactaaaggataaaagttttaagatgggcatgtaatatggctagcactggattttaatgatgagccagagtaataaggctggcaaggggagtttttgttttgtaataaatctcttacacctgcacatccagttctttttaaaaacacgtttgaagaggctccatatttctcagtgaagctgttggggttcatgttatttttgaaaatcatcttgcaatttatttcagcatcagactgaaccacccaaagaaaattagtctatttctgaacagttttttcagaaaccatattggtctgatcacccaacatttatagaaataggcgcttaaggcctagaggcatttcagaaaggagaatgagaaatactgtggtcaagagtagtgttcagatggagaacatcaagcatctgctctgcccttccacacacatcctcatttcatcttcacaactgccctaggtaaccttgttatctgtaatgaaacagcctcaaggagcacagaggcactcactc

SEQ ID NO: 119486 - DNA, 1034 bp, Homo sapiens
tgtacttaagtacttccatagtacttttttttttttttttttttttgccccctgagacggagtctctgtgtcacccaggctggagtgcagtggtgcgatctcggctcactgcaacttctgcctcttgggttcaagcagttctccctgtctcagcctcctgagtagcttggattacaggcgcccgtcaccgcacctgcctaatttttgcatttttagtagagacggggtttcgtcatttggccaggctggtcttgaactcctgaccacaggtgatacgcctgccttggcctcccaaagtgtgctgggattacaggcgtgagccactgtgcccggcccactgttcactttttgaatggcatcattttatagctgtagaactaaaatcaatgtttgccccaattttcttaagtaaaactctactttgagctcttacctccaacttagtaaaaagcagcttcacacacaaacaagattcttactggtggaatgttaggtttcgttgttaagttaatctgtctataagctcatccttagaggatatttgaggaggaagaacaccttgcagctgacttgcaaacatctaaataatttatttcgggtgcttatgaatgttactaatggattttgtatgaatttttatcccttttcatttatacaaaaacctgggcttttatgttaattatatcatctgaggttctaaggttttttttttagattttgaaatttagggataatagctcttaggtttgggtaccactttgctgcagtttaagaaagggggaagggaactcatttattaaacatcaatcacgtgctgtgttctgtttgttttctagtcatcatatcacacacctttacgacagctcactgaaggaaggtgatactgttcccattttgtagatggaatagacaaaacctgaatttaagtagcttgctcaaggttccatattgaatatggaaagttcaaatcatctcagtaatgaatataccatatatacttgctgtattgtatctatgataattcagttacccac

SEQ ID NO: 119487 - DNA, 3388 bp, Homo sapiens
gtgcatagaattgttttagcattgaaatactgatttcctttattctgctgcttattccaggtaaatttatgaaattgaaaaattatgcaaactgcatgactgcatttgtaaatacaaaatcagcagtttttaagcgtttacttatgcatgtataaacttggttaagttatagaattgaagattttgcatggtgtcttcagcagtacaataaccaagtttaaatctcttacccaccctaattgcaaaacactttcattttaattggggttacctcttgaaggattatgttaaagattgtttttaaaacctagagctagataggaggcattcattattagatggtgttcacccatgtgtgtgtgtaacttagtggtaaagttgaaggtaaatactttttaacatgtcttttgaattcaatatacttataataggcaagcttaaaactttctcttttcttccagataaagcttcaccaagaaggttgcccaggaaacgggcacagaagagatcagtgggatctgatgagtaaatgttcctttgtgcaacaattcggtctttacttaacctgccctaatatttttcggcctgatgggaattagtgcagagaagccatgtcaccatagaaggcaactcctacttgtgtgtggactgagcaatcagagtctgtggcgataatattgctgaaaatgcactgcattcatttttctaaagtaacaaatttggtttttttttaaaccattaaaatctatgtgtgtgcgtgtgtatgtatgtgagcagttggtcttaccagaatcattgttgaactacctgaaacaagtctttagaatactaaatataatgctgttgtctcttcctttttgacattttctgattttttcccccaaaactcagttaatatttacccactatgattattgatgtcctgccttgaacagttttaaagaaaacaatttttggaatagctcaaatttcaattgatggcacaaatcagcattttgttgttgttactgtattacaattagtattctaaaggcagaagcagaagtagctgctttttagcaatagaattgtttcagtattttgctgctgtttaatgcgcatcttcagaaaacttcccagtggcttcaaggaatttggggatctctctggcaacaaattgtgaaacatgaaatttctgctgactttaatatatgaaacctaatcctacccccttttttaacaaaaagaaactagtacatttgtgaaaattgtgttgtgttgtccattgttgctctagttctgacccagaggtagctctggagtgattttagacctactcactcagttgtgtgtaggtttttttgttttgttttgagagagaatttttctctccttaatagaagcatcctttttaaagagaagttgccttggtccacacactaagcagaaaaccaagttatcaggacagagatatttcccagttactcctaatcaatgaagaaagtgagttggatatttttaaagcagttaactaattttttcttacctaatcttttgggagttttgcttgttgatataacctttttagttaacctgaaagattccaaaaattgttcttaagtgcttgagactggaaccaaaattaaattgtacttcataaaatcctcttatagagttactcttgccctagattgtaaattaagtttggcattattgtcagactggatggagggtgaagtaaaatagtatgaacaattaagaggctctccccctcttgtctttaagccatattctcctacatgtattttataagaaaatgttaagtcaaattttagtggctctttaattcctgacctcttcattctccttttcagtataacctcccctatgctcatgcccacacagacaaaaaaacaaaacgaaatacacacagaaaaaagtctttccaaactgtttaagtatttaaacatctgagccaaagcagatagaagttattgtataattgttaatcactttgcaaataggggctatcaaattacctatattggcattgctggattataaactctatatctgtaatataaagtgtttgagtttttaattgggctgttatgatcagtagttgattttgagaaagctctatgagctctaagtaactgcatggttttttgtttaatgtaatataggagacccttcacattcccaaggaatatattccaaaacatttttgtgaatatctaagtttgtgaaactactagggcatgatacagtaaggtgtaattacagaatttacgaaatgtaaatggcctctacagagttttatggaatacctggtactaacgtaggcagctgcaaaaccacactgagttacagctgtcagccctcctcattcctaaataacttgccttacatatcagccctcccacttctgaagttcaaattagtgcctcggaaatgtagaatttattatttgtcatttttttttttttagcatagattgagaacagttgaactcttaaatcctcagatgccaggggtctgctctagcatcagtaagtatttagcagaaactaactccgtaatgaatggaattcaattccacacatggtttgttcaagcacacttaataagtagcctattttttaaatgtctttttaaaatgtaaatatttggatgaagtttttctttgttttgatatattcatttgctacaccaactatgttttcagaattcatcttttgaacaacttggtttcagaatatgtaaaatgactttaaggatcttgtgtatcaaacctatccccggatgtgtgagaataatgtgttcataaagcatggatctcgctttggttgtatagcttcctcatttacttcatggtcttacatagctggtgactttcagggctaatctgccctctaaagcattgtcccaggagaggaaaaggaaatgggacctcagaagtagaagcctcagggaaggagtaaagtagaaatcagaagaaaagaagcttcacttgatagtaataaggtttttaacttcaagtaccttcagaaaatgtgattttgataagaggaaagggcaaatttagaccttaaaaaatatggaagaactactgccttaaaagtgcatttgtggcacatcagcctagaactgtatcatggctgtgctggggagaagtaaatggtggtaatgtaacattgccacctttacttaatgatgtgttattttcgaggtacagtagatcaatatagtaataggcgagcctcatatatagcattcatcttgtacaatgatatccatacccttgatatgaaggaaaattgacttggtttgtgcatttgaatactgaaataattttttaaaactcagtgacacataccatctcttgccaagactagaccctgtattt

SEQ ID NO: 119488 - DNA, 1051 bp, Homo sapiens
taaagggaaataaagtcattgtataaatagatactcttatgtggtccaccagtggtacataacatgaacctttatagcaaggggaaaggtctttaaagcctgaaaataaatgtgatgaagatttattctttatcatcagtactagacatgattttctccttccctttaataaagtatttgagtagaagtatgttctaggaagactagaagagaatataacttgtttaccaagatatttaaattaagtaatttgataggtgttttaaaaattagagtaaacagctggtcatgatagtatgtgcctatagtcccagctacttgggaggctcaggcaggaggattgcttgagcccaggagttccaggcagcctgggcaacatagcaagacctcaactcttttttaaaaaatattaagtaaatggtgtaacggaactcctttaaaatatgtctttatgttcttttagcgtaagagacccatacagaaagtagaaatgggtacatcaagtcagaatgatgttgacatgagttggattcctcaggaaacattgaatcaaatcagtaagtagtcttacagacttggctgggaagtttttctcttaagtggaaattaaataccttagatttagtttaaaaaaaaaactttttcagtactatttaacattcatcttttccattacttgtgtagaatctagtatagtgattaattaagaccttaaaggtttattcagtgtgtagtcttcttatgctttaatttggaaattcttccagatctgcagcttatttatgaatgtgtgaattttctgtgttcctaatccatttcctgtctcttttctttctgttgcttcagtgcagagtagaagaggtgaggcatttaatttttttaatggtttttgctagagaattgggggctctcaaatagcacgtaaatattttacgtcaagtttaatgagtaatggaacaatttttcttactacattttattagaaaaactacccagtataacttgaaagaataaacctaaaatattacccgacaatttattttacagatac

SEQ ID NO: 119489 - DNA, 2023 bp, Homo sapiens
ctgagttaaatttctagtgctgcaatcaagttttcttttttctgattacttagtagagaaaaggaagtattttcatcctgtcctcaaaataataacttacagttattacttaactctatagttaagtagcttaaagaattactgattttagcttgtttttgagtagaataaaatttaatccaacaggtatatatgaagttttagttccttcttttaaattcacctgtaccactttttttttaatctgtgtattattcctgaaattatcaatagaggaatgcaaattgaaggatcttgaagtaaaacttacataattacagtttagcaataagtgacagttttgacaatgtactacctttgtgaagaatagctgtgtattgccccagtgagtctaatgcatttgaaaactgaaattgtgaactgataaaattatttcaagaccacaacataaaaatattttcatacctaaagtgaccatcccatttattatgaagaaattggtttccagcccactgtctttttttttttttttgaggtgggagtttcgctcttgttgctcaggctggagtgatctcggctcatcacaacctctgccttctgggcacaagtgattctcctgcctcagccacctgagtagctgtgattacaggcatgcgcaaccatacccggctaattttgtatttttagtagagagggggtttctccatgttggccaggctggtcttgaactcctgatctcaggtgatctgcctcggttggcctgccaaagtgctgagattacaggtgtgagccaccgcacccggcaccactgtcattttagaacatgaatttaacttttgttccgatctagttcttaaaatgacctgcttctgcagctgccgctgtactcttccttccttgttttgaaggattgcaaacaacagaaggtaaagcttgttggcgtaagaatgctgtgagctttgtttctttctgcacgttttatctcatttttattttactctctgggtcctcacaccaccacccctaccccagaagaaaattcaggggacaactttggcaaagtcggtgactttttttaaaggggtgtggatctcgctatgtttgctaggctggactcacaagtcctgggttcaagcagtcctcctgcctcagcccccgagtacctgggaccacaggcatacgccatctcacctggcccagagactttatttcatgtgagaaaataacaatgttgagtccctgccacagaatattgcagttacatatgaatttgttgagtcttctaagtgatgggaaggctatattcaatctgttagagtaactgttttaagtaatgttacatgttttacttcctttattgcatttagatttttctgattattttattttcttaaacagggcaatgtattccaagatgcagtcttcaatcaaacagttacagttattgaaagagaggatgggttagatggagaaacgtaagtgaaagttgtagtatgtagatcttgattttgctcgtaaagtaagactggaaagcttgctctgtttcagcattgttttagatgttgacgatggaatgaactgtatagatttggtgaaatccttacgatattcattcatacttcagatgattcttataactataaaagtcaaattaggaaagatagttgaaactgatggaagaatctctttaaaagttagtattggctttctgtccttcctctcatctaaattttctacctcatgcttataaactgttcaccagcctaaactaagtctcgtgcctctgaaattactattgaaaacataagttagaagattttatcttgaaaaatgtaagtgttctttctgaatgatgaatctttttttactctaaacttatatataattcacttaaggtaatttttaaattggattgtgcaaaataatgtaatattccagggagatgaaagctaatgcaattattttataaaccaagcttttgaatagagcataaattgtaattctattttcaatcatagagttt

SEQ ID NO: 119490 - DNA, 1260 bp, Homo sapiens
tcttcattcttctatttacctgcacagataacactaagctggaggtgaaggtgacttcaccaacacacgtaaccctgctgcttgattatttcactgccaaaaatacgcaactcttttttaccacatgatttggatgtgatctggtctgaaattgagacgcttattgaatgcttatgtgggagtgctagcgtacagacaaaagggtttcagcctatacagcaacttgaaccaatttctcgttagtaggtgactggagtgctctattggaagggattctgacaccaaagtccacaggaaagggtgccagaatccattagtaatgcctttttaaatattttgtgctctttccatgtgttctaatttttttgtctctattttgtttctcagattttccagcaaataacattgtgaagttcctggtaggctttaccaacaagggtacagaagattttattgttgaatccttagatgcctcattccgttatcctcaggactaccagttttatatccagaatttcacagctcttcctctgaacactgtagtgccaccccagagacaggcaacttttgagtactctttcattcctgcagagcccatgggcggacgaccatttggtttggtcatcaatctgaactacaaagatttgaacgtaagatcctctaaaccttctttttgtttaagttagagatggatgggggcggtgacgttgtttaatagaatatatctgttcattcagttgcctgttttgtggttgaacctgtgatagccaccagggaagcaaagataaattgcacgtttcttcttcaagtctaatccagtgggggaggcatatgaaaacaggcactagaacatgctgataagtgatgcatactagagataaggggaataaggtgctattgtgtgggagtggaagtgaaaatggagatgtaagtaaagctatgagccggatcttaatgggaaaaggagcagtaagacacacaatggagtctacagcttattcagatgttaagatctgttgctgggtacagtggctcacacctgtaatctcagcactttgggaagctgaggtgggtggatcacctgaggtcgggagttcgagaccagcctggccaacctggtgaaaccctgtctctactaaaaatacaaaaattagctgggcatggtggcagtcgcctgtaatcccagctactcgggaggctgaggcaggagaatcacttgaacctgggaggcggaggttgcagtgagctgagatcgcacca

SEQ ID NO: 119491 - DNA, 1005 bp, Homo sapiens
gatctgcaacatccccaaagaattggtaggcacattactgttcaagaggcactgctccaaaagttctgttttaattaatgaggtatgatgaaattcttattgctaatcccagcaaagctgtagagaagcaatatttcttcctaacataaagtgaagtctttatttcttttttttgagtcggagtcttgcattggggcattctcagctcatacaacctctacctcccggattcaagcgattctcctgccttagccttccgagtagctgggattacaggcatgtgccaccacacctggctaatttttgtatttttagtagagaacggggtttcgccatgttggccaggctggtctcgagctcctgacttcaggtgatctgcctgcctcggccaagtgctgagattataagtgtgagccaccgtgcccggccaaatctttatttttaaataatgatttttttttctcccatagtaatctcctcttaattgttctttttcttaggtagaagataaagaggaagaagatgtgtctggtgaacctgaagcttcaccgagtgcagatacaactatactgtttgtaaaaggagaaggtaatacagaagtattagttttaattcagatgtaggcattttaaaacgatgagcttgttcatatatatctgaatacccatatctgtaaagtaatattgttggcatttaaagggaatacgtaggtgatatagacacaataaaaaataaaccaaggggaaaaaataaaataaatactacctagtttaactagaaattgactgtccttttcaaagattttgtttttgagacagggtctggctctgtcacccaggctggagagcagtggccccctctcgactcactgcaaccttcacctcccaggtttaatcgattttcctgcctcagcctcctgagaaagatgatgttttaaaacttctttaaactgccacagcaaagtaactttgtcttttttttttttttttttttttttttaagatg

SEQ ID NO: 119492 - DNA, 1532 bp, Homo sapiens
aatttaaaatcccaacttttagaggtttgttaatgtgatcaaagtgaattgaagttgggagaataggcaccagtcattgagaacagagcataagtattttctggaacagggaaggagacatgaaatagttaacaattcaggatcgtggtgacatgagtctagaagggtaacaacatagtagaaatagcactggacctcatggtttcatagatttggaatacctgctgcttccttttctgacttatctctgtgggtctcagtttctttttcgcttgcttgcttttactctgtttttattctttttgcttgcttgttgtatttctgaatccttatgtgccaggcactgttcttggtgctgggtgggcaaaccagatattttctctgctctttcagacttttttttggggcagttatatgtgttttaatggcagggggtgagaagcagacaacaaacagtatgtaaaatatatctggtgaagaataagggggttagagaagatctcttaaaagttgttcagctctgaaatgtttactatgtaatacaacagtaagaatattgggctggaattgggatcattgcagcatgcatctagttaattttatttcctctctggaacgactataatccatcctacacagctttttttctttctattttcgtgtcatacttgaacctggaacctctcatgattccagattttgtcatttccttcaaaattaaaccactagttccctattttcttatttcagtatcaaaatatttattcttatatatagatttctgcttcttttttgacttactttcatttttatggaatatgtcttccaactaagcaaatctgttgctattttattggtgtttttgagttatcatttttatgcttctgcacctactgttttatctggataggatgtccctagtaatttgtgaactctcctaatttccccctctttaggaactccttactgattatctgtgagtcaagcctttcatatgtatgtatacacatacctttagggtttatgttaagactccacgtcttcaacccagcctgcattaagtgaatagctttaactagattaatacatttctgctgcattgttgttaataaatatttgactagttgtggtaagataacttagagtgatggttggaagggaatccatctaggaatttaggattaaagatggtatttggggcactgaaatttgggcatgtactgaaatttattgatgaattatatcgttgttaccaattatatgaaattacttgtgctctctggcactagaatgtacttattgtggaggaagagggtagaagagagatgctgaacgccatgaggcacgcctgtaatcccagcactttgggaggccaggacaggaggatcacttgagtccaggagtttgagaccgcctggccaaaatagtgtgacaccatctctactaaaaaaattagctgagtctggtggcttgcgcctgtaatcctaactgttgaggcaggaggatcacttgagcccagaagttcagtgtta

SEQ ID NO: 119493 - DNA, 1105 bp, Homo sapiens
atttgcttaacaaagttgcttgaagttctttgtgcttcaaggcatctttagtttgtgccattcatttttccatctgttgggcactttttgaagttaaaccacatttcccattaaaaataacatggaaggcagggaacagtggttcacgcctctagtcctagctacccaggaagctgaggtggaaggatcacttgggcccaggagtttgaggctgcagtgagctatgactgcacaactgtactcccaacctaggcatcagagcaagaccctgactcttaaaaaaaaaaaaaaaaaattgatatgcagttgttaagactactagtaaactaaaatataaatattcttcggtgcattgtaattggcatcattcaggtgaactgggagattctgttagtccaagggaagttttttttgcctatacctgatgttaaaaaaagaaattagtatttcagagtaaagggtaactgctttttctgtattttatcattaggcttgttagcagtggcacaagatcttacagaggatgaagaaacagtagaagattccataattgaggatgaagatgatgaagccgaggtagaagaagatgaacccacagatttggttagtgttacatactatttaatatatgtaaaatgtatgtaattgtattcatctgttctcatgctgctaataaagacatacccaagactgggtaatttataaaggaaaaaggtttcattgacccacagttcagcatgactggggaggcctcaggaaacttaccatcatggcagaaattgaagcaaacatgtccttcttcacaaggtgacagcaaggagaagtgcagagcaaagggtggggaaagccccttataaaaaccatcagatcttgtgagaactcactttcacgagaacagcatggaggtaaccgtccccgtgattcatttacctcccaccaggttcctcccacgatgtgcagattatgggaactacacttcaagatgagatttggttggggacacagcaaaaccgttatcaatagtacatctagaatttatccttacttatttatttttagagacagagacttgctctgttccccaggctggagtgcagtggcacga

SEQ ID NO: 119494 - DNA, 1154 bp, Homo sapiens
gggaggcggaggttgcggtgaacagagatggtgccactgaactctggcctgggcgacagagcaagacttcgtctcaaaaataataatttaagaattgtcattacttaaccatgggagagggtgtgggcagacaggggacaaagattttccactgtgtattttcatggtttttcctttgaacaatgtcctctcttccaacaaaattttttgcttttaagtgccacataaaggcagctcatgttccttacatcgccgttatcaagaggatcgtcattcaaataaagtaaccactgacaatgctaattaattggaagtaaagaactgggcggaaagaacggctaaccgcaagctgccgggtcgcaactgcggcggaaggcggactctcgcgggagccacaaagaggcagcagccggccacgtgacttcccggtggcctgctctccccacctctccgcgctgagcagccacgtcggcggcggtccctggtccagggaggggcgtggcaaaggcccgtgcgcggtacgtgtcccgcccctcgctgcccggagcccggatgaagagtaacgccattaccgccggagccgccgagagccttagccgacggaaactggacactggaccggcagcgccatgagactcctcccccgcttgctgctgcttctcttactcgtgttccctgccactgtcttgttccgaggcggccccagaggtgaggctgggggagtgtgcggaggggatggccaggaaggagatgccagtgatggcaagtttgaagttggaggcggtggccgctccgggtcctggggtccgcgtccaccccgctggcctctctccgccctctccccaagcctaggctcgtagcagcaggggtccccgcgggcgctggagaccccgctgcggcctgccccttgcacgcggagcgcggggccgtgcccgggcgaccttgcttcgtggccggccgagggctgggcttgctcctcttgccctggaccctcgcctgcaggagcggccagaactggagggtcctcggctgcaggaggaggcgctggacacggctgcgctccgagcgcgccgcagccgggctgtttcttttggccacctccggctccgctccacccccagcccctcgcgctcagggctgacgtgtctttagct

SEQ ID NO: 119495 - DNA, 1611 bp, Homo sapiens
atcttgatgtaacttcttttattgcaaagtgttatcgagttcaaagtaagactgccttagacttattcccaaattttttgtcagaaagcttttttttttttttaattacaattttttttagagacagggttgcccaagctggagtacagtggcacgatcatgactcactgcagccgtgaactcctgggctcaagcaatcctatggcctcagcctcccgagtagctgggatcaaaggtgtgaaccgctgcaccagccttttttccccctttcttttttcttgttttacagaaagattttcctagagattttctaaagcagctctgcgaatgattttcctagagtcaagtctggtatactggtctgagttgtttattcagcagagaagataacaatataatttctaactttaacaaggcagaagcagatttaacttgatgtgcttcttgaatagtaggctttgggcatggagaatgagcaaacaactgcaacagaactggaaaacaggagaacatggttttaaggagatggagcttatcggaaggtgtattttatataaatatataatcttttagatttatcaatattttaatatcttacatcataaatatgtgagatcagttagggtatgtggaaatattgttatgaaataataaaacattgttatttctagtgaaaacagagacttgaagacagtcaaagagaaggatgacattctgtttgaagaccttcaagacaatgtgaatgagaatggtgaaggtgaaatagaagatgaggaggaggagggttatgacgatgatgatgatgactgggactgggatgaaggagttggaaaactcgccaagggttatgtctggaatggaggaagcaacccacaggtattttataaaggatcctgcacatctttatgtagtctgcttatgtctacttttttaaaaggctgttttgtgattctgaaattgaataactaaaagattttcttcatgttatattgtcctgtagcctcagcctttactgattttcacttttcatcctttctgtatttctgataatttcctgggtgtggattctttccagaatctgtaaatttaaaaagagttataaagattgtgagcttaaaatcttcatgggaaagggcatggattggcagtttactacaaatagttaagaaacatggtaaaaaagttcagcctcattggtaattaaagaaatgcagattaaatttgtagagatgccgttttttcacctgtgaaactgttaaagacaaaacatatcattgatggtcaagtaaataggtgcacttacttgtaggataagctggtatgtgataaaaactttaaaagcttcaaaatactttgacttagcgattctgtgagtgtgccaagacttagttacaagaatgatcctccaggattgtttatggtagaggaacattggaagcaaccttgaacgggattaaacctgctatgggactgattcgcacaatgaggcattatacagccataaaagatgttgtaatggaagactgtattaatgagataggaatatgtttgtgattatttaccatgtacaaaaaaaagttaccaaaccacgtacagctgctgctcatactg

SEQ ID NO: 119496 - DNA, 3542 bp, Homo sapiens
tttccctctcttgagacattgggcccaaaatgaaattctgaaccagcttaatgctggtcttagctctttattatatactttgggggtaaatgaacattctcaaattttaagtctataaaccagtcaaattagaaaactacacttaattttaatctgttacttataataagaggaatcatagagaagttaaaaaaacggattatgcagactcttttagtcagtaattttaaccttctgtttcaaatgctctttaaaaaattttttgagccaatttgattgactcttacctttccttaagatactcctctaagtattgatgctttaatagctaagtatgaactaaggaaatgtgatgatgaatcttaggtttgtttttacagctagtgccttagactctggaattcccttctaggcaaatcgacagacctccgacagcagttcagccaaaatgtctactccagcagacaaggtcttacggaaatttgagaataaaattaatttaggtgagtttacaaaatacatcactgggctaagaggacatttttcaaaaaccatggagtgttgtataattttattagatcaagaaatgaaggctggccgtggtggctcacgcctgtaatcccggcactttgggaggctgaagtgggtggatcacctgaggtcaggagtttgagaccagcctgaccaacatagtgaaaccctatctctactaaaaatacaaaattagctgggcgtggtggcacatgcctgtaatcccagctacttgggaggctgaggcaggagaatcccttgaacctgggaggtggaggttgtgatgagccgagattgtgccgttgcactccaacctggacaataagggcaaaattccatctcaaaaaaaaaaaaaaagaaaaaaggaatgaatgtattcaagtgttactaactcaataatgtttagagaaaataaaaatcgtaatttaaaaacataactttaggaaaagacttaagcttatgctattttggttgttttcccacttgccataggaatgtaatgttacaaaaacccatttaagtattgtctgttcggttttaggttttttttttttttgagacagggtctcactctgtcacccaggctagagtgcagtggcacgatcttggctcactccaaccctgatttctggggttcagacgatcctcccaccttagcctcccaagtagctaggaccacaggtgcacaccaccacacccggccaatttttattttctgtagagacggggtttctccatgttgaccaggctggttttgaactcctgagctcaagtgatctgtccgcctcagcctcccaaaatgttgggattacaggtgtgagccactgcgcctggcctgttttagattttgtaatagggttatctcatagtaggatgttgaaaatactagagtattgaatatagttacatacggtttcactagaggttttttgtgtaggtgttaattatttagtgacctgttcgatgccaggcatcagaatgttaatttgaatcatcatctcatagaaaatgtaagagggatggagggaaggaaggaaggccatctttctattcttgtggatcttcactctaaacctaacacagtgtttctcatataagctgtcaatacatgctaaattaatataagtattttagggccttctttgcctatcatagacttataacttgaagtgaaacaagtttttagaattaaacttgaaattcaggcagttttattagtcatgtggagtactagcaagtgtctgaaatttattatgcaaattattatctttgaagaatttctgcatctagaattctgtggctcaaatattatagctgtagtgatgaaagtgacacttacgaaggaaacgcagtttagtgcctacttttaaaaacattacattgttttcattactaaactgtattctatttacaataaaacatttagaaagtgtagaagagaaggaagaggggagaaataccctgttcagcaactctgttaatgtcttttcgtcttacatattgtttacattgtgggtttcttgtattttagataagctaaatgttactgattccgtcataaataaagtcaccgaaaagtctagacaaaaggaagcagatatgtaagtaatattttaataatatgcatgggtgataaggactaatctagattaagcagcaccttgatcataattcttttacagaggatgttcatttgtatacttaaaccaatcattattttggtgtgtgtgtgtgtgtgtgtgtgtgtgttttccttagcttaaattaggataacctatgcctttgtgaattaaaaatattaatgaatcttggctgggtgtggtggctcatgcctgtaatcccatcacttcagaaggccgagctgtggggatcacttgaggccaggagtttgagaccagcctggccaacatggtgaaaccatgtctgtacaaaaaatacaaaaattagccagacatggtggtgcacgcctgtaatcccagctactcaggaggctgaggtgtgagaatctcttgaacctgggaggtggaggttgcagtgagccaagatcgtgccactgcactccagcctgggccacagagcgagactccatctcaaaaataaatacataaaataaaaattaatgaattttaagaaatacatggtaaaagtgtaatctcatgaaatttacaaatgtgttcttatgaggggaacagtgtttgtagatttcagtttaaactaaaatgtgcaaaaatgttcccttaaaatttattaagaattattctttcccatgaagtatttttaaaaatttaagggaagactatgaactaatgatataactgagaactgtttctgtttacacttctgttctcaaagccaattgtttaagatctgaataacttctcttatatgctaataactctaaagtattatcactatattatagaaaacgacactaagatcatacaactaactgtgagaattgaacgtaaaagccagctttcttccaatttattgctatgtccaagaggtatcagctttttgagatacaccatagttatttgttatttcactggtatctgtttgaatctttgtgtttaaacctttattagtttaggttagtgtgctaggtggagtcactcagtgtataagcagaagcaaatcagagtctgcatttgaatactgtcttgaaacgattttaaaaaacaaaactgccaggtgcagtggctcacgcctgtaatcccagcactttgggaggcagaggcgggcggatcacaaggtcaggagatcgagaccatcttggctaacaaggtgaaatcctgtctctactaaaaatacaaaaaaattagccgggcttggcggcgggcgcctgtagtcccagctactcgggaggctgaggcaggagaatggcgtgaacccgggaggcagagcttgcagtgagccgagatcgtgccactgcactccagcctgggcgacagagcgagactccatctcaaaacaaacaaacaaaaacaaaaacaaaaaaacttgtatct

SEQ ID NO: 119497 - DNA, 1038 bp, Homo sapiens
tatgtggaggctggggcaggaggaatacttgagcccaggagtctatgcctagcctgggcaacatagtaagatgctgtctctttaaaaaaaaaaaagaagacaagactttaattgtgtgctaacagaatcattaaagatgtgaaggacagtacaaatatactcaatgttttctctttttcagcatagttcactttaccctggcggctctttgatgcttctgaaataggaatagatttttctttttactgtatacatactccttttgccaaaatacagaattgaattttggtattcaggggaaatgaagaaagtttcactgagtaatgaaaaatctacaatcatatcataaaatctgttatttagagaaactacctacttaggaattttcatgaaattatctacatttagaagattttggcttctcactgaattttgaatgtgtcaactatacgtttttgtttttggttaggtatcgcatcaaagataaggcagacagagcaactgtagaacaggtacaatttaaatgtgttgcaaactcttctttttaattagcatttcttctctctttgaattgtagtttgcttttatcctttttgcttaatgctaatgttacctaaaattactcctatataaaattattcctttttatagtttcgagtttagagacctacatcttgcttttataggactattggatgaattagagtcatggtccttcagtggccttgcagagccaccatgcgatgctttcccttcttggagagattatcagaccagcaatcttttagaaaaggtccgtaggaattttgtgagctttcccagaagataggtagggtatctgccacaaagcaggaagtgtgggtgtaaaagagagaggggcagataatgtcttcaaatttccagttaggaatcctttgtttagaaattatgcttgttttattctttctattcaagaatggggaaaaattggcccctaattttcccacattccgaagaatgtgattggatattagccttggcccagatttttgatgtgaa

SEQ ID NO: 119498 - DNA, 1180 bp, Homo sapiens
cattatgcgaagaacattatagagcatactcatacaaacctagatagtatagcctactgcactctcaggctatacggtagttccgaatctgtacaacaggtttctgtactgaatactgtaacaattgtaagacaatggtaaatatttatctatctaaacatagaaaaagtacagtaaaaatacctgttatagtcttacggaatcacctcatatatgcggtctgtcacctgtcagtaactaaaacgttatgtggcacgtgactgtatttgtatattggagctatgtttactgtccttttgatgtaatgttttacattttaattcacatattcaaaagacagtggtattccttatgcatgttatttcagttcacttgacttttgaggttagaatcaaatagattgaaaaagtggttatttaacataaacttcattttcttttttttttgacttaatataggctaatgtataccatgctagcacagcaaatggagagagcagagcaatcaaaatttataaaacttctattttggtgttcaaagatcgggataaatatgtaagtggagaattcaggtaagttcagatttttccctccagttggtttaatttctatttcctaaaacattaaaataataatggaatgattgaaataataaacatttttcttattcaagatttcgtcatggctattgtaaaggaaaccctaggaaaatggtgaaaacttgggcagaaaaagaaatgaggaacttaatcaggtgactgtctgggatgtgtgtatgtctgtcctatgccctgtacatgaacatcagcccttcctcccagcagatcccagtgtggttctgcccaaatgtagggacttgttagggcctttatttctattaggtctgctgaagtaagcagaagaaacacatgtctggacaaatagagattgtttcctattctgttgttttctattctgagaatccatttcaaaagaatactgccacaattcatatttattccacgaagctagatcatttggaaggccttgtaagccattgaaaatgtttagaatttatactgaggataataaggaactgctaaaggattttaatcaggaaagtgacacaatcagatggttataatgctctgtcatgttttcgtaggtattggagttttcgactaatcttgttaggtcgtgaa

SEQ ID NO: 119499 - DNA, 1051 bp, Homo sapiens
cgtctcaaaaaaaaaaaaaaacaactaccaggtggctggttggatttggccagtagatctggtagacagaaataatatcaatattataaacttcctgtgttacagtgagattaattttagatacctttttataatcataggagacattatttaacccacattgttcttaatagtgcaatatgcatatttcattgtctagttttatgttgatccttattttttttttttcattttggttataagattctataccagactgttacaggattgaagaaagatttgtcaggagttcagaaggtatgaagaacatgtgttactgtttgtttatgtgaaaacagttttaaaggatataaactctagtcatactgttttttattattatttaatattattagaactaaatgttattttatattgttaaaatgttataattgctttcaaagtctgtggacatcttcagaaatgccatttttgtgttctttctaaacacagcactgaaatttggaaattaatttatttttctttctgtctctgaattgttcagtgattgcaggtgaggtatttatctttttgtatcctggtcgtcatttgtggagctcttaatgatagccattgtgcttcttgatggttttacaaccagcttaggagaactttggaatgtagtctcctaccagggtattacttgttaaagaacaatctcatgagttcagcaagtcctgctgtgctggattcctgtgatgttcttttttcttaaaacaatcttgttttgttttacattttagaagggcagggattaagtaattctaacttaggcagtcataaaagcagtctttatttttttaaatcttcctaattgaagacttaaataaaggatcacagtttgctttcttaaaatcatgtcttttctgtggaaagaattgaattaggggaattctggtattttgcatttctgagttataataacaggtgtcataaggaagttatgctttggattccagagcatgaagattttattgcagcaagctagaaaatcttgttgtacaattgactt

SEQ ID NO: 119500 - DNA, 1055 bp, Homo sapiens
tggggatacagcagaaaacaaactagacaaaaattactacctttgagtagtttacattttgataggaagataagacattaaccaaagtaagtaaaaagcagtgtatcagcaggtgataaattctatggagagaaataatgcagagatgagagggcgcctatagatgaaagagtttgcagtttaaaatagggttcttggaaaggccttactgagggctgatatttgagcaaatacttgaagaaggtgaattgtttgcataacaagaaggaagaacatgccaggcagaacaaccagcagttgcaaagccctgaggcaggagtgtacgtgacatcttccagaaacagggctgagacatcatcatcaagggagaaagtagtagatgcaatcagatagtgtacggctgtgggagggttttggcaggggagtgatatgatctgacttctgttttaaaaggattactctggcctctgtggagaattgatcaggaagcaagggtgggagaccagtgggtatgttcattgaagtaaacccaagcaagagacgctgatggcttggtataggatggtggcagacatgagagaagtggttgcacattctaagggaagagatgagattgcgtggagtgaagggtgacttcagggtttctgacctgagcagcaactgagatgactggagttgccacttactgtgatgggaaagactggacgggagcaggtttggggagggtaggagggtgagataaaaccttacatcacaacatagtacagatactaaaagaaattaccaatttaatttttttaatgatatactttatgttggaagtgactcttgtagtcattgcatttagaaataatttctataaatcaacccctagttttcacttaaactgaagcttgcccctgcttatttgacagtgggttatagggggaaatcatttgagctctttatgtttattttgactataaagttcaaaatatgaaatataatttcaatgaaacacaaaaataatccctctaaaatagtctacagttagcacaacaaaagaaaaagcaaaa

SEQ ID NO: 119501 - DNA, 1067 bp, Homo sapiens
tggaaatctatagccttgaaaggagtgtaggcccttccaaggaagataagtacacgaagactagcacgcaaaagcggaatgcacaggaggggtgtacgtgacttcagagacttcacaaggaggtgagagaacatctgtcgtgggggcactgggaagactttataaaggaagtggtgtcgaactagactttggagtatttcagctgtgtcaggatgggtgggcagagagccttccagagggagagaagagcatgagaaaagtctgcgaagcctgtggagtgatctccttttagagcattctctctgagcagggaggcagtaagatgaaaggaagaagcatccttttttgaccaaggcattggagaccttgaatgccccggagagggatttggataggcagagggaagctggtgcaggttttcactgaagccattgaaagtctcctccattggaggagcagggaagtgagacgatcataactgagcttctggactgtttaggcgttggcttaaggaagccattgcaccagtgaaggagggagggaatgaaagtctgaaccagggtgagggcagtggatggaaaagtaggtattgccaaggtggagtgacagcttcagctaagaattggatgcgagagacaagggagagtctgagaaaacaggcccagagctcgagtgactcatagcgtagatagtctaaacacttttctgggaaattattgcaaagcaagatttagtttagcttaatatacggcaggtaacatttacatggttattaaatttaacttgtatattttataaaaatatcaggtctgtggttaataatagttaccattacccagcaaatacctgtgatgtgccttgtataggatgtttgttatctcaagcctcataacaaacttcccagtttacagatgggaagctgaggttaaaatatttaaatggcttgcctaaggtcacacagctagttaagttgttaagctagatttgaatccagtataccacaatgacgcaagagaagattaaacctgcagtgtgagaattcaccttttctacttgtaaaccctttt

SEQ ID NO: 119502 - DNA, 1776 bp, Homo sapiens
tagtgcagtccaataatttatggctcaccaccgacaccttgggctggaagggctcatgaatgtgaaatctacatttcatgaaaatgaagacagtttagtgagaagctgcagcaaacagatcaaaggttctgcttggaattacattttgtttgtttgtttgtttgttttgagatggggtgttgctctgtggctcaggctggagtgcagtggcatgatcatagctcactgcagtcttgaccactcaggcttaagtgactctcccacctcagcctctcgagtagcttgggaccacaggcgtgcgccaccatacacaactaattaaaattttttttttttttttgtagagacaaggtctcgctatcttgcccaggctggtcttgaactcctgggctcaagtgatcctcccaccttggccttccaaagtgctagaattacaggcaagagccagtgcacctggcctttgaattttcttaccctcaataagtttctttcatgctgctaaagtgtatcactctctgtgaattgtctcagttatttttgagtcttgtagggaacctgaggaactcctgaaatgcctcacacttaatacccaatccatttcttccttttcctctttctcttttttttcttatcaccccgcctccattttgctgcaggacatccttaaagttatggactggggcaaagacaaaacacaaaaacgaaatttctgccgggcgcggtggctcacgcctgtaatccagcactttgggaggccgaggtgggcggatcacaaggtcaggagttccagcccagcctagccaatatggtgaaaccccgtctctactaaaaatacaaaaattagctgggcgtggtggcgggctcctgtagtcgcaactgctcaggaggctgaggcagaagaatcgcttgaacccgggaggcagaggttgcagcgagctgagatcatgccactgcactccagcctgggcaacagagcgagactccgtgaaaaaaaaaaagaaagaaagaaatttcagaaccataacaacagcagcagcctccgcaagtaagagctatcactaagtgaggtctccgcctctgcagtgcccctctgagcctcacctcagccccaggaggggggtgttctacctgtcacagaggcagaagctccaggcactgccagtggatgtcactttaagttgctcaaggtcacaggctgtataactggaagtggctgagctgggcgtggactccaactgtgccctacttcaaagtccttctgaagttaatgatatgtgatcagttttccactatcccacaaacacaatctgccaaacacacagtgtgaaaatcgagaaaaccgcctggaaaagaagcagaacttttattagagtactgtttctgtagctgctgggcgaagacaaaatgcaggatcaaaggaggctgtctttctaaaatctatagagacaaaaaatccaccatgtttgctcactgctggagtgggaatggggaggggagagctgtgctctctggttgagcttttgaaatcagggtaatgagatgagccataataccctcagatgggtcttttgtttgcctttgtttttcttccactttactaagccaaacaaacattcattaagtaccttctgtgtgccgaaccttatttatgttgttaggttaagtgtttgtaggagtccaagatgactaagacatgggactttgctctccaggagcaggtagccaggtgtgtttaaactaatgcaagagaggagaggatgcagaggtgtgatatgg

SEQ ID NO: 119503 - DNA, 1052 bp, Homo sapiens
gagatgtgtgtcttcttaacctatttgtaatgttggtttaacaatgagaaccagctttcagacagttccccgtccccctcccaacaaatgtttacactacagattgccacctttttggaaataaagcaatttatgatttacgtgactttttgatactttcccttctgagaaatgcaacctggcatgtttctgttcctgggttgggatggatcttcatgtgcaccatcaatttagtatgattttttttttcagagaaaatgactatattgagataacaattctatctgagaaacagaaaaatggggaaaaataggcaatggaaaattgaggagaaatggtaacatttctgagaaccttgcgatgtttcttaagataactgagacatcctaggatctcatcgaatccagattagaaatcatggagttcgtggtatttgctgtgtgaagtcttcattttaaaacactagcattcacctttgctccgagtttgctaaaaacagaatagagaatggtggggccgtagccatcttttctatccctttcctgagtcactgaatcttttcagcgaagtctccctaatgccgacactggtatcaaggttacatctggcatctgcctcttcacaaagtaccccttctaaatagcctacatttgaaacagattttaaccagatgaatttacgggctctgtttagataacattttaatattctaatttcttaatttagatattgtgtgggttctagttctgaatttcttcatccagttaaaaaaagaatgtcacgttagtccatgttcagagatatttggggctcagcaaactagcttggctccagttctagttgtttcgagtgtctgatttgaaacatactccttgaaatgttcctcgcagtggcccgattcctttacacaaaacaaaatagcagacaccagtgacttaatagtgaacatacacacacacacgtcatttgtagtgactatggatacgttttacatgtagctctgaaaattttgcatggcctcatgttctcagtttatttttgcttatatgcat

SEQ ID NO: 119504 - DNA, 1154 bp, Homo sapiens
caccacagtcaatgtctttgatctatgaaatcagcagctatggaacaaaagcagcagctctgttctgaatcatatggtagttgtcaataacaaggacagtagttatttttagaacttttaaaaattcgcaaggcttaatacttttcttctagtatgtcaaagttgtctgtgatcactctcatctttaaatttctgataaaagaaatgagaaatgatgcttttatgttgcatataaagtgaatgtctctcactatgggtgacacagtgagaccaaataaataaataaaatgtagctcacttcatgtataccttttaggctcacatgtattatttaaagcatcggtattgttgggttgtatgatgatcagcttcatttgaggggaaaaacgtaaaagctttaataattcgcatgtgttcatctctgtttccatcattgagaaaaaaaataaaaacacatacttatgaataaagccaaaccctggggttgcttgccttacagaaaatcgtgcataagggggatgagtgtatcctgaaggacaacaacgagcgcagcaagtggtacgtgacgggcccgggaggcgttgacatgcttgttccctctgtggggctgatcatccctcctccgaacccactggccgtggacctctcttgcaagtaagtcatccaagttcccaaagccacgcatgcacgcatgaatgtgagggcagaggaagagggcaggtgtttatacctgaagcttagacacacgatgccttgccataataaacaccttctaaaaaaaggaaccttgtgaaggtcaccttcactttgtcttgcaattttatgttgaatagacagtcgttattgaagaataaaagggaatatctggccgggtgtggtggcttatgcctgtaatcccagcacttggggagaccgaggtgggcggatcacctgaggttaggagtttgagaccagcctgaccaacatggagaaactctgtctctactaaaaatataaaattagccaggtgtggtggtacatgcctgtaatcccagctactcgggaggttgaggcaggagaattgcttgaacctgggagggggaggttgcagtgagctgagatcgtgccactgcactccagcctgggcaacgagagcaaaactccatctcaaaaaa

SEQ ID NO: 119505 - DNA, 1022 bp, Homo sapiens
cagttgttatacatgtagctacaaatataaaatgcctttaatatcaatattcactcattgtaggaagaacattcgtttaacaggttgtccatggcagattcctttaaaccatttagtatcgaaatcttcaaccacacactgaatagggagagtagtgtagtaagctgctgtgtgctcatgaccaagctttgggtcattggcatctaatgcacctgccatcctgccttagacctctgtcaattacaaagttgccgaaaaacaagacaacaacaaaaagttgtagtatatatgtcagccaataatgtagataattcagaatgtacttttggggagtaaatgaatccaaatccatgaactgttttcaaagttatacctctacctgttactttatcagtgactgttgtaggtttttgtgcagtggtgtgagcgtgtccaggtttcccatttgggatgaagtgtgaaagcctggctctagcatgttttccctttgtgcctcttaggattgagcagtactacgaagccatcttggctctgtggaaccagctctacatcaacatgaagagcctggtgtcctggcactactgcatgattgacatagagaagatcagggccatgacaatcgccaaggtatgtcctcagggccacttaggctgcctggagggagggcagcgctgccccccgcagtgcctgtgtccaacagttcaaccttcttgctgtgtagcagtgcttttgtgtctcgtcaagcaagtcagctcagccctccttagaggttctggtctgtccaatagagaacaggagggattagcatatggctgattatgagagaaagaagcaatactaattcaggtggcctgacaagcaagccagaagtgcctgtggaaaagtcatgcactcctgtaagattctggaccctatgctcctttgatgtaatggaaagttaggtcataaaggattaactgggtatcacaaaagtaaaaggtgggatagaattcttggaagagcacccaaagcattacttactc

SEQ ID NO: 119506 - DNA, 1059 bp, Homo sapiens
gaatgtgggggacattatgctaagtgaaatacaccagacacaaatactgcttgatttcacttatgtgtaaattctaagaaaaaagttgaatgcagggaaacagagagtaggatggtgattaccggggtggggagggaggaggaaatgggaagatgtaaaggatacaaacttgcatttgtgtgggatgaataaatctagagatctaaattcagcgcaagactacaggtagtaatcttgtagtgtatattgaaattttgctgagagtagattttaggtgctcttaccacacatacaaaaaaagataaccatggaagttgactgatgtgttaatttacttacctgatgtaatcatttcactgtgtctatgtgtattaaaacagcatattgtacaccttaaatatatacagtaataaaaagaatcagctaaatcaaaagagctttccttcatttttgacagagtgtgcagaatgattcacaagcaattgctgaggttctcaaccagcttaaagatatgcttgccaacttcagaggttctgaaaagtactgctatttacagaatgaagtatttggactatttcagaaactggaaaatatcaatggtgttacagatggctacttaaataggtaaactcagctaacactaatctcatattttccttttctcaagcttctttttctgggtcttcatttgctttagatgcttgccttacagtttctctgttactagagatttacttacatccttctgtggtttggagagcatgttaattccgctagcctcgcatgttaattccactattctgaactataatgttatcttagaactaagttatgctctaagggccagaacttgagaattcttcagcgaatacaaaatgttggtctgaatcacaatagaccaaaaaacagacaaaataaatttttatctgctttgacgttgttccctttcattactagctgtgagaggcaaatcttcacagactaattatgtcactggcaattttatgtgcttcttttgctctttccagcttatgcacagtaagggcactgctccaggct

SEQ ID NO: 119507 - DNA, 1868 bp, Homo sapiens
tagctgttttgagattaattgggtgtaattcatgttttcctctggtttttgtatcagtgcctaggtttgaaatgatgaatatttaatattactaacccattttgtgaaggcttaaagaatgcccagaggaaaagcaactgagatgtttacaaggaaatgcaaattatgaacatagaaataacgtgatattgttctcttcatgttatcataaattatctttataaattgaggggataggcccagaaaacaggctgactagaaagtaacctcttacagatagtaagttaaagggcttgcttctcttctctgaatggaaaaaatgctcatctcctaagctgtaactataaaaatatgagacaagtacatgtagtaataaactgaaaaaagggtacaaataacagtggtaaaagagtgaaatcacatttatttaaaaatatttgtatgcattaacattggtaaatatttcactttttgtatagaacttgcacagtgaaatatctggcaaacgagacaaatcagaggaagtacaaaaaattgctgaactttgcgccaattcaattaaggtatgttggtttcataaagaatgttggtatttcaccaagattattattaactgcatgacttgctgatttgttgtaaagcgtatacacttcctgaggatagcaattacggtctgtatatattcttttctgaacaaaccataaaaattaaaaatctattagcttgaattcattccacattggcagtatccatttgaatggctggtttctattctttgactggtggtaggtgctgcattctccatttagcatacaaagatgtactgcttggtttaataatggtgtttgtttgtttgtttgtttgtttggagagagtttcgctcttgctgcccaggctggagtgcagtggtgtgatctcggctcaccgcaacctctgcctcctgggttcaagtgattctcccgcctcagcttcctgagtagctgggattacaggcatgcaccaccatgcccggctaattttatatttttagtagagacagggtttctccgtgttggtcaggctggttttgaactcccgatctcaggggatctgcccggctcggcctcccaaagtgccaggattatgggtgtgagccaccacgctaatgtagtattagttgcttggccactagtggcgcaaagtctttggagtgggcaattagacgtgcagcccaatgatttaaaactgtggaactgtagctgttagtgatgctttttaagtctatgaaggacacttttcttaaacttcattatgctgcaggattatgagctccagctggcctcatacacctcaggactggaaactctgctgaacatacctatcaagaggaccatgattcagtccccttctggggtgattctgcaagaggtatatatgtcatcacatatctcttaaaacctgcccctccttctgcttcttcccttttccctgtctcctgcctcttcccttttccctgtctcctgcctgtcttccttaccattgctgatttcatcccattacagggtaccactttaagaggtttaatagcaggttatgtgccctccagtgtgagtcattgatgtatgatacattttcagaaatgatcaggaatgtgttatttagagtctttgtagaaattgggcttaaatttctgggtttgatgagagagacttctaaaaagtggaaaatacagaaatttctaaaagacagcctcttctcaaagatgtcagagactatcgtacctgtcagatggtttaggggaaacagcctggagagatgagaatgggatacatttttggccctttgttttgctgtactttcttttgctgattttggaatgaacacactaa

SEQ ID NO: 119508 - DNA, 1757 bp, Homo sapiens
ggtatatttgaattttttatattcagtgattgttccctttattcctcatttatgatacttaaattgagattatatgtaaacttattttaatgtaaacttgaaataaagggaatataatttatgaaatcataagcttttgattttgaaagaaattacctcattttacagatgaggtagctcagactcaaagataatatatcatttgctaagagcatatgagcagctggtgcaagaattatgatgagaatccagatttcttgaatatttgcctagtcactctttgcatgtatgtccatgtgtgtaaagagaaataagaatgcacattggtctgggaggggaaaagtactgcttctttcttggaatgtgaggtgtttttcttttgacataatctctgatttcattccacagctgaaaaataccaagatcgaagttttggaagaggagctcagactggcccgagatgccaactcggaaaactgtaataagaacaaattcctggatcagaacctgcagaaataccaggcagagtgttcccagttcaaagcgaagcttgcgagcctggaggagctgaagagacaggctgagctggatgggaagtcggctaagcaaaatctagacaagtgctacggccaaataaaagaactcaatgagaagatcacccgactgacttatgagattgaagatgaaaagagaagaagaaaatctgtggaagacagatttgaccaacagaagaatgactatgaccaactgcagaaagcaaggcaatgtgaaaaggagaaccttggttggcagaaattagagtctgagaaagccatcaaggagaaggagtacgagattgaaaggttgagggttctactgcaggaagaaggcacccggaagagagaatatgaaaatgagctggcaaaggtaagaaaccactataatgaggagatgagtaatttaaggaacaagtatgaaacagagattaacattacgaagaccaccatcaaggagatatccatgcaaaaagaggatgattccaaaaatcttagaaaccagcttgatagactttcaagggaaaatcgagatctgaaggatgaaattgtcaggctcaatgacagcatcttgcaggccactgagcagcgaaggcgagctgaagaaaacgcccttcagcaaaaggcctgtggctctgagataatgcagaagaagcagcatctggagatagaactgaagcaggtcatgcagcagcgctctgaggacaatgcccggcacaagcagtccctggaggaggctgccaagaccattcaggacaaaaataaggagatcgagagactcaaagctgagtttcaggaggaggccaagcgccgctgggaatatgaaaatgaactgagtaaggtaagaaacaattatgatgaggagatcattagcttaaaaaatcagtttgagaccgagatcaacatcaccaagaccaccatccaccagctcaccatgcagaaggaagaggataccagtggctaccgggctcagatagacaatctcacccgagaaaacaggagcttatctgaagaaataaagaggctgaagaacactctaacccagaccacagagaatctcaggagggtggaagaagacatccaacagcaaaaggccactggctctgaggtgtctcagaggaaacagcagctggaggttgagctgagacaagtcactcagatgcgaacagaggagagcgtaagatataagcaatctcttgatgatgctgccaaaaccatccagga

SEQ ID NO: 119509 - DNA, 1060 bp, Homo sapiens
gggtagcctgtgtttggccctgcttttaagaacactaatacatgtataacttcctccgaatgttccattctacttcttagaagttagctcttatttagtgagctatgacatacatttgtaatgaaaattttcttaaatagaagccatactaaagtgtttccctatgcaatttttaaaacactttttcttttgcctgcttagatgatttttttgcatggattatttagtgttcgcttttgatcatggccctagtgtgtttccttttgtttgactttccttctcctaacccttaatttaaaaataacttatttaacttctacagacaatatttgtgtgtggctgggttggtgtgtgtgtgtgtgtgtgtgtgtgtgtatatctatatattatatatataattatataattacataatatatatttatctataatatatattttatataatatatatcttcatatatttgtattgcttcattaagtatgttcatctagctgtaacaggtgagatgtaggtgtagcaggtatgataacctgaaacaaaactccccacattttttcaaagcataattattgttaagagtaagacaggtctgcaacttacagttccttctatagaaaaaaatagtaagtatgaagccatttattgaagtggcaacatatacagaatttttcccacaaatttgtaaaataacaagctcacagtgtatccagggacaatatagaaagaaaaaataagcaaggcttttttttttaaagatagatacacaaaagaaagttaagtcgtgatagtaatatgatatgattcaaaacattattttttcccatttctttcttcttcaattccaggcatctaataggattcaggaatcaaagaatcagtgtactcaggtggtacaggaaagagagagccttctggtgaaaatcaaagtcctggagcaagacaaggcaaggctgcagaggctggaggatgagctgaatcgtgcaaaatcaactctagaggcagaaaccagggtgaaacagcgcctggagtgtgagaaacagcaaattcagaatgacc

SEQ ID NO: 119510 - DNA, 1027 bp, Homo sapiens
gaagaagtcagtggaagaagttgcttctgaaatccagccattccttcggggtgcaggatctatcgctggagcatctgcttctcctaaggaaaaatactctttggtagaggccaagagaaagaaattaatcagcccagaatccacagtcatgcttctggaggcccaggcagctacaggtggtataattgatccccatcggaatgagaagctgactgtcgacagtgccatagctcgggacctcattgacttcgatgaccgtcagcagatatatgcagcagaaaaagctatcactggttttgatgatccattttcaggcaagacagtatctgtttcagaagccatcaagaaaaatttgattgatagagaaaccggaatgcgcctgctggaagcccagattgcttcagggggtgtagtagaccctgtgaacagtgtctttttgccaaaagatgtcgccttggcccgggggctgattgatagagatttgtatcgatccctgaatgatccccgagatagtcagaaaaactttgtggatccagtcaccaaaaagaaggtcagttacgtgcagctgaaggaacggtgcagaatcgaaccacatactggtctgctcttgctttcagtacagaagagaagcatgtccttccaaggaatcagacaacctgtgaccgtcactgagctagtagattctggtatattgagaccgtccactgtcaatgaactggaatctggtcagatttcttatgacgaggttggtgagagaattaaggacttcctccagggttcaagctgcatagcaggcatatacaatgagaccacaaaacagaagcttggcatttatgaggccatgaaaattggcttagtccgacctggtactgctctggagttgctggaagcccaagcagctactggctttatagtggatcctgttagcaacttgaggttaccagtggaggaagcctacaagagaggtctggtgggcattgagttcaaagagaagctcctgtctgcagaacgagctgtcactgggtat

SEQ ID NO: 119511 - DNA, 1039 bp, Homo sapiens
aatcctagcactttgagaggccaaggcgggaggatcccttgagcccaggagttccagactagcctgggcaacatggtgaaacctcttctctaccaaaagtacaaaaattagccgggtgtggtggtgtgagcctgtggccccagctatttgggaggctggggtggaaggatagcttgagcccaggaggtcgaggctgcagtgagccgagatcgctccactgcattccagcctgggcgacagagcaagaccctgtctcaaaaaacaaacaaacaaaatccaggaaggtgtgttgagtgaggagggaatggcagatttggtatttatttagaaaataagtgaacgtgtctcagagcgctgcagagggattggcggtttgcattgtcatctgtcatacggattccgcagttgcaccagattcggtgtcaggagagctgggagtttgccagttcgcctttctgtgccttaaaattggacacttctgactgggacagcaccaattctaggattattaaaggttgtcaccaagaggtggtaactggcaactcctgtggacattagaattgcttttttaaaaatgtaggcaagtgtatttagagtgaacattcgtgatttttgtttttttgtggggtattttcggtggaatgagaggaagggaagtgctccaatgtggggtaattcattatctttactattacttctgggtttaccatgctgtgataatttctcctgggtttaagttacatgactgattcctcagaggcatttaaaatatatttgatttctgtatataccattcattgtttattgtattaaaagcacagaggaaattaaaaaatctttaatattcatttagaggggtatttgaagctgggaattccactgagtggggcttaccagacccttccatacattgtttactcagcattgcggtaacattggattccttgtattaacgtttaaatagcactttgtttgccacttacattacttcatttaatactcaaaataaccctatgaggtaggtatctttggccacatt

SEQ ID NO: 119512 - DNA, 1853 bp, Homo sapiens
atcatgaaagatgtgactttcagcgaggtaattaacctgtttgttgcctaaatttctttataaaatggagatggttataatagcactttgcgaagattaagtgatatatatatataatattcttagaatagtgtcaggcacttagctggagtcagctagagggtcacagagttgtgaccattacagcacaggcttcaagaatgttagctattattggtcagtaaaatttgtcgctgctactgctgcgtgcctaattataggcatgaactgcttgaagtctgattacttactgggctgtagataaatctgaaaggattctgtgttcagatttcatagacagggatgtggatgtttcttaagattctggaaggtttgtccacgtgcccaaagggcttggatcagaaaccagttaataatttaattgtggtcactgatgattcatattgtatttatggatttttttttttttgacagataaggactcacaattccagataattaaacaagctagaactgcagttgggaaagacagtgattgttataatcaaagtaagtggcattacagtttaagtgaattaaagaatgaaattattatttttctcataagcatgttactaattttcttcaagaaaaacctgtgaaaactgttacatgggaaaggtaaagttttacatttaacattgggctaatttgcttcgtttcaacttcatttgttagatatttcctgttgagatacaccagagtctcactaagacactatcttagctaggggttcatcctttggaattacctggcgatttataggtgagattgtcttgtggctaattaaaaaaattattatttagtaaatacagatggtcccaacttaatgatgatttaatttaggattttttcaattttatggtgttgtgaaaacaatacacaatcacaaggttttagactttaagtactagtgattcttttatcagacgctgggctgcattttcaacttaacggtattttcagtttatgatgggtttatcgggatgtaaccccatgtaagtcaaggaacatctataaatgccactgagtgaggctcttttactcttgagatttcctctctttagagtgttgaaatgcagtgtaaagaaaaggcttaggctaaaagagattagtctccacagctaccctcagattgcttgctacccagtaagtgagttggtttgaggtgatgaatgcttgggatccccttctcagaaaaaaagtacaaacacaaaagttttacatataatttcagaggattcatattaatagatcctttcatgcccagctttagagctgggttaaagagtttctccctgggaacctcagcagagagtaggttagaagttttaagcataagcttttaggaaattgaaagaaaacttcatccatcaaaaacatagacataggccagacacggtggctcatgcctgtcatcccagcactttgggaggccgaggcaggtggatcatctgaggtcagaagttcaagaccaccctggccaacatggcgaaaccctgtctttactaaaaaatgcaaaaattagccgggcatggtggcaagcacctgtaatcccagctactcaggagaccgaggcaggaagaattgcttgaacccaggaggcggaggtttcattgagccaagattgcaccattgcactccagcctgggcaacagagcgagactccatctcaaaaaaaaaaacacacatagacaaacgagttaataaaagtttaaatttctaatgaatgtagatatgacatctagccaaaacctgaacagcttctcttgtaaggatttctgcattgtcttctttgaaccttctgtaggtag

SEQ ID NO: 119513 - DNA, 1012 bp, Homo sapiens
gacagttgactctcattttatttattcggagagattactgagctatgactagtcaagccttttttggcctctgctattggttctgctcatatcccctggtagtgtacccataaaaaagttgaggtttttggtttttgaaagggttaataatacttaaaggactttatttgagtcttaagtggttagatttactgaattttagagttgaaagagaacttggagatcatctaatccagtgtctgcattttacagataagaaaaaccctgtctgatagagacatgataaagttctagtgtgtttgttctaaaggttctccgtatttttattttttaaaaggttatttttttaaagctcttttatgaattacatttctctttcacaacaaacttgtgataagttgaacgatattttcccctccataataggtgaagaaacaggcacacaaaagtgaagtaactcacctctgctagataatatcaaagtggatccagaactaagttctgaattttgacacaaactctgaactgagttgtttgattttctgttagaaaccctacatttagtaaaatttgtggaccaggattctagatattgctcaaatttatttatgatgtctttcatgattaagtggaagaatatcacaaacttcatatctctgcatactaatcgtgactatcagtgctgttcattgtttattctgctttgtgtaaacctgttttaaagaaataaaagtagctgcttggccatatattaatgatgataactgagtttttgtttccttatctgtaatacaaaactctcatagagttgttgagaggaacagagataatggatgctaaacaagccttagctccaaaaattggtagcttctatggtctaagtgaaaattaatatacagaaagtaatattaagataatgaaatggatgagttttatatatatgagtaatttagaaaatgttctgctttttaatttttataatagtaataagggagatttggacattgagctt

SEQ ID NO: 119514 - DNA, 3228 bp, Homo sapiens
ttatatgtatgttttcatttcatctgtcatgtcaggcctaaactcagtgtacagaattctcaatcttaaactttatgaaagctcatacagctattcaatctatatacttattttcagatatagttacttcggttaattttttaaccaagatatttcaatcataaacaatcattttatgtttagtggtttatctttttctttcaatattaaatattcaggttgtatacttcagtattgtgaagtgtgtttgagtcatggccatgatatgaagatcagtgtactatcaaagaaacttaaaaagacagcataggatgggctttagatccagtctgttcctatcacttgtgagactttgggcaagtcatgttacttctatgacacttaatttctttatctgtaacgttaaggaattgactctgaatgaattctccctaaaattctgaatttgtatctttgtgacaacacctactagtactatttaatgttgaatgttatatgtttaagatcccctttgatgacaaaagtaacaagaatgagaattggcattattaaaacaatagattagagtttcaatttggggtgacgaaaaagttctagagatggatagaggttgcacaacgtgaatgcacttcatgtctctgaacagtacactgaaaaaatggttagaatgttaaattttatgttatatatattttgccacaaaaaacctgcaaaaacaggcagccaaagggtcttagagttattataattacagcacattcatatgtacctttaaatcatttaaaaacatgcattttgaaaatttacattttatgtaaatgtaagtttatttaagtatgtttatcctttttgttgtcagaaatatctatgttccgaatgaattgaatgcagtttgttgcttaacctttcctgtactttttctttttcagtaattggggtgagtataaagaggaattaggaacctgaatgtactccttatttaaagatatgcagtatcctttttgcaaatgatatccttttaaaagtaaaatttctaaactttatcttaatacctgtcacatattatagtcttgaattggaattttggttgaattacaaggaatttaagtatcagtcttcatcataaagaaatttaagatgaataaattgaagaaaaggctaaaataatttaagaaggaaattatatttctttgtttaaaaataacaggcaaaggtttatatgaagcttgtttgtaatacatcattattttctaatctgtgttttcctcccaaatttttatagcctaattcaaaggaattaggcttatcaaagctgtttttataattttgtattatgaaatgcctactataattagaataaaattgattgacttgaaagggaacccttttttccccattaattcaaaaccctttgacgagtaaaaatggccatatattgttatgtatagccgtgttaaaccatggcctcagattcactgcagctctcctcttaatatgtagacaagtagtacctcttttttgttgtaatgcttagttcatagtatgctcttatttgaattctttttgcctctacctaggaacttaatgaggttagactttatcaaatataagtatctggaaagagctactgattttatgttgttctatgaaccagttactactttagaataagttagcaaacaataaaaggattcctttagtagctcatgttctttgtttgcattagtgagtaatgaagtctagaaagaattgttttaaattgctttttttacagttccaatcatttttttatttgagaaaatttgaatctcaaaacaaaaattttcttcaatgtttaatacatcatatcaaggtattgtatttactttttttcactaatgagcagattttagaaaattctgtaactaccggggggcactgctattaacttttttcaattaatttggttaagccactatgcttcctcctcaggaaattaaaatgagtttaatttaatctgtgctttcctggcgtgaggaggtgtgggatttctgctacttaattattttgtggcccctagctctaagtccttgcacaagtgggatatattttgaatattgaccatctagcttgatgtctcatacaaaaagatattttttacacagtttttaatatttccatagtttattttcaaagggactgtaatgcatattacttattaaaagcattttttcccccaactttgatggggaaaagcatatcaacagatacctacttttgtagatggctataaaaattgttacccaaaaggctttcttagagcaaattgtctcttatgattattcctgcctgcctccatgggatctgtctttatattgttggagagaatagcaaacatccataatacattttttttttttttgtggatataacattcaggatagaattgtttgtcatttattgcttagattgatattttgtatacttagggattatgaaaaaagtttgtgttaatattgcattattaaagcacatgtttaaagataattattagattttaagttcacaatgcttcatgtattgtttattcttgtgattttatttttactttaggaatttattcttcattgcctgttgaagttcctttgaatcacaaacggtttgtttgtgatctaactcaagctgatcgtcttgccctctatgatttcgtagttgaggagacaaagaaaaagcgctctgattctcaaattattgaaaatgacagcgatctctttgtagacttggctgccaaaatcaatcaaggtttgagatgcacatcatggctttacatttcttcattatcattttattctatgagtgttattaagatgatttaattcttgggccactttgagttagagtaaaatggttttgtatcatttaatattgacatgaagttggccctctgtgtctgtgggttccatatccatcaatttgaccaacggtggattgaaaatatttggaaaaaataaaagtgtgtggttgcctctgtactatacatgtagagactttttattcttgtcataattccataaacaatatattaacaactattcatgcagcatttacatcgtatcaggtttttggtgttttttttgttttgtttttttgagactgagtcttactctgtcacccgggctggaatgcagtagcgcgatctcagttcgttgcaatctctgcctcccaagctgaagcaattctcgtgcctca

SEQ ID NO: 119515 - DNA, 2528 bp, Homo sapiens
ttaagggccaccatttccatgaggtgctagttgactaatctatcactagtttattgtactaatactctgtaccacacagcttagctctaaattttatgctgttctttttacagttaaaatctgtgttttagacttaacttagcaagtagagacctgggtccctgtcatactaccttggtgattctcatagtccctaagatacttggctcatcagttatttcttctctcgtctcataacccttgtaatcaagcttaaatgttgctgctagcattctttacggttttatagttgatattttattgtggaaatattcaaacatatactaaagtggatagcatcgtctaaggaatgtacccatcacccagcttcaaaaattgaaataaaagattggcaagggcttcatagagaaaagcatttgagggaaagggagaagcaaggaggaataaaggaatgtctgctattgactcttgcctatgtggtggagcctgagctaggtggattctgtgcaaatagcaggcttcaaggcgcttacatagagctgctgacagggaggcttgtaggcctgccagggaagtgcgagagctggaacttgagataggtgtgtgtgactcatgtcactccgctaggttggaccttggcatatcttaggttttccatgggagaatatagtggaggaggagaagtggtggataaggattttccgggtggaagaactagcattctgaaaagcagatagaagtataggagtttttcagagactcattagtaacccagggtggctagagcttagggcttctctgttgagagatgaggctaagttctatcttatgtaggaaaatcctggagggctctgaaggcttcattaaggagtttggatattgttcgattttactttgagagccattgaaagtttctttaaggtggggagaaatgcagtcaggcctgaatgaatagtgtttctgagattgccccgtgtcccctataccttttttctgaaaacattttctatttaatcatgagggaagtgtaaactcctattttagttttgtctttgcctctgcagtgactaaccctgtgcttggtggcatgggtaaataggaaaggaaaaactttcaagtggtttttacctatttgaaagtttctttatagagtcattcagaaagtatctgtgaagtgactgtatgtttcatattttgtcttattaagtcatatgattaagtcaagatgacttaattataaggttttaaaaaaatcatttgtaaataagctctaatagagagataaattgcaaaactaaaaatagtaccaagaactcccatattgtctttacccagatcacccattgttagcattttgccacatagcttctcattggcactctctctctctctctctgcacatttttcactctctcgatctcgatctgtacatatttttttcccctgaattctttaagggttaaattacatacctcataaccctttatccccagtatgtatttcctaagaacagagatattttctcacataaaggtagtacagttatagcaacttcaaatttaatattgctgtaaaacttttatctactattcatattccagtttgaccattgccttttctgtgttctctaaactgcacaagtcccacagtcaattatgtcatagcacttagtaaatatttgattgttagcactgatttttctagcgttacagtcttaattttttgagcagttttcttacctgaagttcggtgcttacctctcccaaggtgattcgagatgtgataaatgtgcacatggaagaactcagcaatcattggcaagaagagcaagagaaggcagaggatgatgccgaaaagtacgtcattatctttattggtgaaaatactctctctttgataacagataacaattaacttataattgttaaattttagcatttccaaaacccttgatagcacacagtaaactcgtgaaaatgctttttgtttttcgttgtcagtgcccagggttattgtaccagagttgttctgacattaccctttgacagttttcaggggatagccatattagtgaaatattcaaatagcaaaacatactaacatttatgcctagtattccattatgggaacaccaagcatgtgggagttatttatgtcctactgctcaaggtcatcgccaaggtctcattgcaaaaattaaaaaaattgcaacctcaggcataaatgggttaagagctgtgtttatttgtccttttatatgggttataagattgtgcatatttagaccatatctaccattggtttgatatagaatattacactttagactggtgtgtctgtgtacgtatactggagaccagtggtaacacaaactgattaacattcttttctgtgttttaggaatgaagaaaggcgatcagcttcagtagattcacggcagtctggtggaagctatttggatgctgagtgttcacgacatagaagggataggagtagaagcccacataaaagaaaaagaaacaaagata

SEQ ID NO: 119516 - DNA, 1037 bp, Homo sapiens
gtgaaaccctgactctactaaaaatacaaaaaatagccaggtgtggtggttcgcgcctgaaatccagctgcttgggaggctgaggcaggaatcgcttgaatccgggaggcgaaggttgcagtgagccaagatcgtgccatttgcgctccagcctgggcaacaagagtgaaactccatctcaaaaaaacagaaacaaacaaataaaaaaactaagagacgaaactgaaataggaataatcaaagtgatttttttttaattacgctttgaaattctgctttaaaattaactttgagtatatgtaaatgataaccagaaaattcttttcaaatagaatgttaaagtagcatattactgttgaaagtggtgtattactgttgaattattttaaagctctgatattaaaatgtccatcatttataaccatttttttatacctcttttatttcagggatggggaaagacaccatagtcataaaagaagaaagcaaaaaatataaatgaagtacttgtacctatattaattatgcttacgccatgataaccaatatacagatatattaattggaattcctttgcataggagaatgtttttatgatctgtttagtgcttattattttttttatgatctgtttagtgcttattattttccagtaaatatgcttcaaaccatgagtacactattaggccctacaactttgttttccttatattttattagatgatttgcttcctataactgatgttgttttgttcgttttgctaatatatgtatctcaaaattctttaagtcaatatttatcatatgtaaattaaacatgaatacattctcatcttataactacatcttataaataaggctaataacccttagaacaccacctgcggttctgtcctcaccccagtggtgactactgtttaccactacactggtgaattgtagtagggaaaaacaatctaaatattgaagaggaatggcctaattaaaatatgatgtagtcataggatagattattgtattggagttaaaagaaataa

SEQ ID NO: 119517 - DNA, 1045 bp, Homo sapiens
gcccagatcagttaggtcagaatcttttgagggtggggcacaggcatcattttttttaagtaccttaggtttttctaatatgctaccgtggtcaggaaacactggcacaggagatcccaatgtctgaaggaaatggatacattgtcccagtaagagatgaagagcaaagctttcaaacattgctacacattagaatcacgtgggtgttacgtgggaggtaggggggaacgccttaaaaaaacccagatgcccaggtggcactccatatcaaatcagaatgtgtggaggtggaaaccaggtagcagtatttttttgttcaaaaataaagaggatctcccaacgttgcccaggctggactcaaaactcctggcctcaagcaatccccctgcctcagcctcctgagttgctgggaagatagaagtgtgccaccatgcccagcagtgtcattgttttgtcaagatctcaggtgatgtcagtgtttggaaaccactgccttagatggtatttgaaatttcaagagctgggcctaaggcgaatttgtaaagtatagtcatatttactgtatttagtgaccctccaaattccccttattccttgcttctctgacttttcgtgggctacagggacacactgcctctgagtcacactgcttaaagctggctgtcagctaatccttgctagggtgatggtttaacatagtatctccctagggatattgacatttttcgtaaaggattttgaaagatctaaaaaaatcccctaaaaatttttaagagaactcacccagtagtgcaattccaggccccaagacaggctgacacagaactgaaagagaattctaggatgggaattctatcccaagcccctcatattcctatcactgggctccttgtacaagttatagctactgtaggtccacttctggactctatactgatagtgtgaagagaaaaccttttgcgggtaagtagaatccaagcagcaagccatgccacctgccaatgaagcaattctatttcatcttaatccatgtagcaataggaaa

SEQ ID NO: 119518 - DNA, 1048 bp, Homo sapiens
ggcaatttaaaaaactcaaattgtgttcagaaaagggaatcagtatatattagtacaagcagcaagaaacttgtgctaaaaatactggcaattttctgaacaaaattactcttgggaaacataaataagaagaaaaatggaatactccctacttgtatttgtaactagatataatgcgctatctctttctcctaaacatagcatcagtagtactgtttttcatttaagctacctgtacttaagaagatttttgttagcagaaaataaatccatgcctgcaagctactcacagcaaaaacagtttggagaatttggttgcaagagtgtgattcaaagaagcagtagatgttcttctaaagagattacaaagagtaaatttgaaattcagtggcatttcaacaaaaaaaagttgtacaaagtgttcttaaactaagatcaaagggcaagcagatactattgttcagacctcagatggtgtttcctctgggtgtccttctaagaatgggtataaatcctttttaaatgtgctgaatcatggttagttcctctatttgagagcttacctctgatcagcttggaggagggcttccctgggataagaatctgtttaaatacaaaaacaatgctcagtgcttgctttagcatataatttgttgcctctctgtgtcttcagagagtaactactttatatgttggatttcaaattgatattttacttgactatgaatactggctaaatactggctatcaaatgtagtatatcaaacgtagtatatcaaacgtagcaaactaaaagatagcagctctgctgtctttgcctcactcctatttacgaaggtgagttagacaaggaaaatgaagagggtacaatgtcttgcatcatgaagcagctttctgtaactttttcacaaaccaatccttcactttctgcttcccatcttatatcaaaaatgaactattctagggaatgatttttttttttttttaagacagtatctttttctgtcacccaggctggagtgcagtggcgagatctcggctcactgca

SEQ ID NO: 119519 - DNA, 1879 bp, Homo sapiens
ttcaccttttactacaagcattagaaatcagtaacacattgtgggtcactgaaatttatcagattttgtgttcagtcactagtgttttgaagattttgttgtctatactttttttccaatgtgaatatgtagtatttcagcaccctatgcataaagttaagggtctgaagccaggctgggaacacagctaccatccctaacatggtttttctggggacacgtatgccccagcaacagaaaacccatttggggtttattggttaaatgagtttgggataactggtgaatgtatgttcgccatagatcatagaatttagagcttgaaaagttctcgcatatcatctaatctgtttgttcgcagttaaatttgttagatgttttcaccaccattttctctttactgctgttacctcttaagattgagggacaatccatgaaaacacacagagatcctagtgcatcagagcaatagggctgttggccaggctggagtggataatgaaggagaaattacaaaagcaggcaagagcacaaccctggaagagccgaggaaacccaaatctggaattgttggggttttctcttagtggatagcatcttctccaagaactctacttttagaaaagaaaatgctatgtatatctataaatgtccaaaggactgttgactccaaagaattgttttctgctccgaaattgagttgaaaaccacgttgctctgagtggcattgttccactgatatccactgattctcttcctgcccttcccatctccattattaaggagattgggaccataatagagatgatatctaaattacatcagttaattccttgatgggtccccacggtctcgttatctcaagcacagtcccagatgactgggtcgaagaatctccttcaaacatttttgcaggatgaggttctggttccaagtgggagagccttcctgactttcagatttataggcatacgcccttgatgactgatcctcctgctggccaggtcaggattgtcctaggcctaaaatgtccttgccacacagtgccgattatatgttcagattgttttcatatcaccaaagagctcagctggccacggggggaagtggagtggagtggattcacagggcgcagaaaacagtgcccctcggaggcagagccccggagcccgctccaccctgacctccgatatccgccacgggccttattatcactctcctgccgcttgccctttcaccgtccagaacgtctgcgtttgttgattgttgttgctgtgtttacagtcctgttggtttcctgtacgtgaacatgggctggaaaaaaaattctgatttgtgtctcagcagagcatgagtgaaccatatcattggtaagagctgattaggccaggagatttcttataatattagccttgcttattctctgagaccagttattttccctccctccttttgaatctatgaattacatttaaatagtccaaagactgagttttgtaaactacaaaattaaggactaaaagtttttacttaattttgatttttattcagattttatttgtagactcccatatcggaataagttaacaacggagaagctgtacattttttagaaagagagggtttttttttaagatcagtttgaggttcacagcaaaactgagcaaaattttgcagagatttcccaggtaccccctgccccacaggtgcacagactcctccattatcacccagcagaatttggtatctttgttgcaattgatgaacttatatggacacatcattgtcacctaaagtctgtagttacatcccggttcactcgtagtgttgcagattctgtggatttggacaaatgtgtaatgatgttatccaccgctat

SEQ ID NO: 119520 - DNA, 1053 bp, Homo sapiens
atgccgaggagttgtgaaactactctgccctacaaatcctctgtggagaagctgtacattaaacaaggaaaaacaagtcaatgaaagtataaaaattcaaaatacgcagagttcggggaaagaattataaaatacctcagttgaagaatattttgtttctggggttttactaaagtggtccctaaggaagtaattttgatagtctatgacaatgtgggatttattttatagtgcttctatgtgttgacaacaaatccatcagaaatctttcttttttctttctttgtttttaagtctaggagtttaaaaatcttttttcctccgcatagtttgactgaggtgtctgtcaccatagtacctagacaatccctcaggcagagatatgagtgattaaatttctccctggcttgtgccctgtttgatccatgctaggcaggatttgggggagtaaaataaagaagcctgaagaatgaacaagaattataggaattttgtgcttgtgaattattaaaatttgggggggttattaggggagaggttaaatatttttcctttctgaaaacttacattaaaacttaatgtgactttagaattgagaaactgacaaaatatcgtactggccctaagggcaggatcagaggactttaaaaggcttcctcaggagagactatttagatcagagtaaaactaaattaacagagactccatcaattcagaggtctttgtaagtgatatatcgaataggcttatttgcctttggactgttttctatgacaaagctacacaggttaatggtaaataaatatgagaatacaataatggagacagaaatgtggtaactgaagagcagttcgtttgagggatattaggggtttgtgtttattcctttacaaatattgtgcaggtgagacatttagtgaattctctccatctctcttcacgtcagttactcattgtagtggggtattactgaattccagctaatttgcccgcccgttatctcccaccctattctgctcccttacagaggaaacctcttaaaaatggggaaga

SEQ ID NO: 119521 - DNA, 1059 bp, Homo sapiens
cctccccccaagtgcctagcatggtgcctttccttcatcgatacccaataagtgcacattgaataaatgtcagtttctcaaaaataaaactggtgtatgccgtctccttccattctctcattacaaataacatcaagcatttgaacgagagaattacaaactgtgaagcatgtgtgctattataagaaatgcttattaagttctgtatgtggcagtggttataaaaagggaaaagagaagttaccttcttgcagggtttatgttctgtgactttctaaatttttttaaaggctttgggaagaagaaatattattttccttctatctgatgtcattatgactttaataagtatgaatacaagtcagaaagacatgccgctgagtctcaatttaaatttcctggttgtgccaggcagaaagcttcgagctttcatgcatgcaaggaggcacgactcttcacgcaggtgccgttgcagaatacttatcttgtcagcttccacttcaggctggtaggcttggcatacattgtgaaggtgttagacattctgtttacataaggactgaggggtgacataatgtctattgaagcaaagtcacttagctccccgctaggcaacagggagcatttaaaaactgaaaactgatcaaagccatgggcaggattgagatacctttacccagggggcgggtggtctcttggttcgttgcccgaaacagatgtgcattattgcttcactgtatttccagaccattggtgaaatgaatcaggcagaattaaaccctgagtggccaatccggagagcctgcttaagtgggcacaagtgtgtccaaataggttggaaaaaatgtcaaatcagagtaggcgcatacaagatgtgatgtttctctttttatagactgctataaaagttgtttaaaattaaacaacccttcagtacttaaattatgtataatgagacaggtaggtcctggaacagagatctttcccccccttcttatcccacttaaattttgcactccctaccagagtatgtgagatataaacactttcatttccagg

SEQ ID NO: 119522 - DNA, 1346 bp, Homo sapiens
ataggaagctgaactcagaatcaaaacttctcctgaggtgccacctagcatcactaaccccagagatgaccggggtagccctgttaacactacacaaataaaatatgtcaccagaacatttcactgagatgaggaatttatttccatgattctctaaggttcaactatagtacatgctgctttttcctactgggcagcaaacatgttttactaaactcttacctaagtgctttctgtttacaattccacaatgaattcctgtcttccttcatgttgatttctacaaatattgtgatttacttccacacctttttgaggaagcaaattccaagttgtgatgcatcttttaacttttatcagcattttattgtgaacaaaatttcaacatatggaaaaaggggaaggttttacagcaaatatctgtataccctccacttagattctatgattaacatttactgtatctgctttatcaggtatctattctgtttatccatccattttcccattcagctgtccatcttttttcttttttgatacatttcaaagtaaagttgcagacatcaccggacacggttgctcacgcttgtaatcccagcacttggggaggccgaggggggcggatcacctgaggtcaggactttggtctcaaacatgaagccttgtctctaccaaaaatacaaaaattagcctggtgtggtggcgggtgcctgtagtcccagctactcgggaggttgaggcaggagaatcacttgaacccaggaggccgaggttgcagtgagctgagatcgcaccactgcacttcactctgggcaacagagtgagactccatctcaaaacaaaaagttgcagacatcagtacactgctttctaaataattctgcttgcctgccattaaagttcaatgtttatagatttttgaggtaaaatttctatacaatgaaatgcacatttcttaagcataccatttgatgagttttggtgtgtgtatacaccactgtaacccaaacctctgtcaagatacagaacattactagaaagttccctcaggctgcttgttatctgccctgagcatgggtggtccaggagtcacccagaatttaggaccataactctcttcatctttcctttctgaggttcccttcctttctgggatgccccagatctgttctctgattctccgggcagaaaggctgttggtttcctgttggcattcctgctggccagcctggtgcagaccaggccctccctttaagccagaagtcatgaaattgggaaatacatacagtgctgtttcccgcctccagtatcagtgcccagaatgtgcctagttttggtcaatctcc

SEQ ID NO: 119523 - DNA, 1040 bp, Homo sapiens
gatggtatctatgatagaggtgaaaaaaaaaagaggccgggtgtggtggtgcctgcctgtaatcccagctattcgggaggctgagacaggagaatcacttgaacccaggaggcggaggttgcagtgggccgagattgcgtcactacattccagcctaggtggcaagagcaaaactgtctcaagaaaaaaagagagagagagaatattgagggagcaccaaggaaggtatggttaagttcagggtacatgacattcaggctgagcgtggaaagagaatttggatttcccttggtaggtatagaggcaaaggcattcccgccggaggaatgcatcaggggcagtgttgattcgatggtgctgcgggagccctgagaggtccgaggtgcctgaatccgagcgtgagtggctactggtgctggcacagtactcggcaggggaagagattgcaaaggtaggctgacgccagatgctgagggataatgaagccagtctaaggagtttggactttattttgtaggcaatgaggaactatttacaactttttagtaagactgtggaatgactgatgtgtgctttgggagatattcctggctgcagtgtggaagaggcctgaaatgggagacgaactggggcatttttgcaattgtctaggtaacatcccccctcccgtttaatctgtatttacagcatttgagggtctttttgaaattttaaaatagtttacattttttctttcctgcaattaaatttagactgtttaaccaagaggggcaattaggtgacaaatttgtgaattgcacccaagagatgaaaacttgtggaaaaagtactaattccagtaactaaaatctgaaaggttacgatttaaatagacatttaaatagacttaacccgatcctcctggaactctttccctcattcctccttacaattaaaaacacacctttgtgagctggttgcttagaattaggagtgtcatctgccgtcacggtgcagacggtattcgcgtctttgaagctagttggcccacgggaaacttc

SEQ ID NO: 119524 - DNA, 1034 bp, Homo sapiens
cttcaggaaggtgcttttagtgttccatcattgagctttctgggatgggaggtggcaatctggaggtgagaaagatacaggtgaacaaaaatctttgccctaaaagtgtagactatttttatggttctgaatacagccctcctttcagatccgtggattataatttagatatcagcacagaatagctatctgaagcattgctcatgtgttttcccccttttctcttggctcttctgtagggctgtggtagtgccagcttattatctgctgggcataataaacacctacacctagcctccagggatcaagaaactgggtcagccaggagtcagcctatcatgctgcagaagctggtaatattaagcccagaaccagcctcattttaagattttacattatataatggtaagagcaatgctgatgttaaaaaaaaaatactggttggagtccaaagtaattttagacattaaagaaaggtttcagaacattttaagtaatgtttattaaagctagccctgacctcaatcaagcacctgctacttaattgatcaaatggtcactggtaagccctgtctcttctaaagtgacttcgccccaagtcatccactgacctttgctcagcactttctccagagacgagagagtgcacaagaggaaatgaaaaaacagatttggtgggaattgttgttcctggttgaaatgaaatgtatgtatccctgctacccaaatgtggtctgtggaccagcagcagctgccccactagggagcgtgtcagaaatgcagcatcccaggcacctttagattagaaacctgcatttacaagacccctaggtgattcataggcacagtaaggttcgagaagcactgatccaacccacagccctccttctgcacagcggtaacccagcagggccatctttgtttcagaagcacccatattacaaagagcttgagttattctggggaggtaaggtaaaggagagaagtcatacttcaatggcagtgagactttgcctagaaatctacaaaataac

SEQ ID NO: 119525 - DNA, 1047 bp, Homo sapiens
taaatgatagtttgtttgttttttttttttgagacggagtctcgctctgtcacccaggctggggtgcagtggcgcgatctcggtgcactgcaagctccacctcccgggttcacgccattctcctgcctcagctctccgagtagctgggactacaggtgccggccaccacacccggctaattttttgtatttttaggagagacggggtttcaccgcggtctcgatctcctgacctcgtgatccacccgccttggcctcccaaagtgctgggattacaagcatgagtcacagcgcctggcggaatagtataatttttaaagatgttttatgcttattgtgctttttataaaagatagcaacaatcttccaatgaggtcattcatttctgttggtacagttagaatgtgtgtctctgggttggtctctttgagtttcttttggcatagagcagtattctcaccctgcatgatcatcagagcacctgagatgcttcgtaaagtgtaggtctgagccccaccacggagatttggatacagtaggttatgaggggggagcgtcgagcttctcaggaaacctagttctcagctgtttttctccagatacaaatctgtaactttttgtatttatcttagggtgaagctttcatactgtgagctcattcaagccagagataatttcttatccaggaaccagttggcaaatcttttgtacctgcagttagtcctacttattttaatttcctgatttgataattccaacagccctgctacgtctgagtctgcttttggtgcttgctgtgtctcttgtgttttttgctcttagtgtgccttgtaatttttgttgagagctggacatgatatcctaggtgaaaggaactgctgtagctaggcctttggtgaagtggaggtaaggtgttgtggaggggaagccctctgtggtctatgattaggtctgggtctctaatgagcctgtgccctggtctcagcttttttctttaatgaccctgtgccctgggctcagtgggtctcaggtttttttctccccgctt

SEQ ID NO: 119526 - DNA, 1009 bp, Homo sapiens
tcttaattgagttcattaggcgttgattttaaaatgcaattttctgagggcaattttctcttatttccagagtcttggaggggactcttccaaggccctccaagggccctatgtgccattaacagtcaggaaaatggcagaagaaaaatgcttagatgaacgtagcagatgctctgttacgaaattttgcccaactgatgcctgatgctgtttctgtagtgctgtttcttgtacctgctcccaaatggtgcacctaacaccccagtgtgaccctccctctgcccttcatctccatgtacacacatgtatacacagcccaggagaactagttctgtagattatgccgttttaggcaaagccagatgagttcccatattccaaaaggaattagggaagggccagaagagcagagaacacctgttgttaagtgttcattcgccccggtgcattttcctagtgaaggtggttaggcagggttctagggagagactggaaggcagaggtcactgtggagagtatcctatagacaagatcagaaataggggaagggataagccagtctctatgtcatgcataaacataggctcagaaaggatatgcaaatgactcatacaatagcagaatgtgcacagtagctctgtttccattcaacgtattttctttcagaaaaagcatccaaaagttttaaaaggaaagggataaagaaaaatgtgaacaatggttaaatttaagcacaggacttaaaaatttaaatattctaagggaagccttctagcttaattgaatcatgtacatggggccttttcagaaacagctcactagattgcttgggatttccacgcgtttactacctgacttttggtcatcttgtttaggctagggttaatgggacaggttctcttcctcatttctccctcttctgagtgagcctattttcctaggctgtttggagtttttggataatggcattttatccacttggtcgttattccctgggaatgtatgaaag

SEQ ID NO: 119527 - DNA, 1118 bp, Homo sapiens
ttgcaggccttgtggaattctggtcactgttgccctccaaatgccacacatgagccctcaggatgagccctacagagtttcatccttgtagataggaagatgtgtatttgggaacgaggctaaagccatggccgatttccccaacatgctttctatttctattttcgttaatctttttaagttcaatttttaaaatcatctaaatgaatctaaacattctttagcaatttgcttaaatcatcttgtatattatatagaaatgttagatgcatttatttctagcctgcttactctgtatttcacataggaaccaaaaatagtctttccttcttcccagtttccttttgtgattgttgacatttttttacgtttcatcattaaatttatgacttatcttcttgtacctctgcccttcttattatctaagtccatcctatctatttttaaggaatatgaaagtatgaaagtaatcttcagtaccagttctttccaaatgaatcgactgtcttttcatggtgctcgatgggtctgtgtgtaggcgtctgagtgtgtgtaggcgtctgagtgtgtgtaggcatctgagtgtgtgttcggatcacgtgatagtaaagtgttcacagtgttatcacaagtgttattgcaaaataaagcttctctgtgccaggataaattttttaaaaattcatgtctcaattcagatattttttccagagttgctttaaaaaaaaattaacacatttggcaaaattcattttttcttgcaaactcctttgaactttaaatgacaatgttttatatgagcaagggggaagatcaaacacaaaagagaaggaagtgtagtaagttgatcttggaccatactttgaagtggtctgttttctcagtaggatgctaacctacagctaataggagcagctgaggaaaggagggaccagctgtccccaaggagcttggcagccttctaccttgggattgcacagtcacctcctccttgctggggctgcagagtttacgctgaggaagtgaaagaaggttgtgtgtttattacagtttgaggtgtacttttcactccaggaaggggaagcccctagaacttttcccatttggcaaggggtaac

SEQ ID NO: 119528 - DNA, 1028 bp, Homo sapiens
gcagaatgtttctttgcccttgtattaacgaatgtgcccctgaagagtcttgaaaatgcaggaggcagaagccccggcctcctagtagagggaaagcacgtacacgcgtctttggtctctaagctccatctgcaataaggaaagatttcctgatagtgaagttttctctggatttttttttccttctccgtgacttgctgtggtaaaggacagttgtgctcagtggcttccagaaaagctggacgtcccaccatgatggcacatctgggcacaccacacctctcctctctactactgggaacactggagaggactgactgcctgtggcatatgctttgtgcttggagtgttgcttatgaaagatgaggcccctttaaaacctcatgctcacacttagagaattctggtcgtgtgctacagatgttttacagtttatttccaaacagctgcttttcccttctttagtctgtttttttttttttttttttttaaataaaatccctctggaaacctttcagctcacatccttggcaatgcttccttagtacaagtccttgcattctatgccatgacattctcccaaccagcacctgttactacaggcaggccatcgacttagctgttctgtgagttagaagtactattgtgtatgtggatcagaactgtagattcaatcagcctagaacagacagcccccagtgacaagccctccctagcacttcatgagaatacacagaaagaagaaggaaaaacttgacttataatgtatgtctccctcggaacatcaggtagaaaagccccatgcaggtgactcaatccagggtcaaagcagggagggtttccctgagggcacagcaatttgacaagtttgtcccatttcaaacttccccagcagccagctgtcaataatatctttgaccttcagaggtaggaagagcaggaataattaagatccacagatgatccccgaatcctggtaatgattttcacatccttctttctcatgatccttttccccagagctgcca

SEQ ID NO: 119529 - DNA, 1021 bp, Homo sapiens
gtgttgaaggtgactcctgggcacccatcttgaatgtatgggtggatggaggcgcctctaaatgagagagtgaggagcaaaagtagatttgggggaaaacatgatgagttcagtttgacatatgttgaatttgaggtatccttgggagatagcaagtacgcagttggagtcaaatctatcatttgtaagaaaggtgatagagatttaggattggaagtctatagcctggagtaagagttaacaccatgagggcagatgagattgcccagggagagcacccagggtgaaaatgaaatagttcttgagatagacaaagaagcaagcagtgaagaggatcctggggaggaggttggacacaatcagacatctatggaatctcaaaaatggaggaggccagtgggatcagtaatgtcacattctgcagagaagtccttaaaaagaagagtgccatctggattgccagagggaacacattggtggcccaagggaggaatgttttggcagattttatgaggatgaagccaaactgccaccctcgtggccaagatggccttgatcctgtcgcaggaaagtcccttctgtgcttggtagaagaatagtacttttttcaccctgttccccacactgttgcattaagcatgctaaatagcatcacccccttcctcatctataggaatattaattttaggctttgtcttgctgtcacaatattttaactaatttttcctaagttcttatcaggtacataatggacattctaattagaaaaaaaccatccgtatgccctaaaccttacctctgagggtatcttcatagtgaagaagtttctattttgccagaaaaaaagcgatacttataaaataaatgttttctcttttactacttagtagaaccaatacataatggaattttagtttcatttcataaaatatttactctgtaagcaaattaaagtgactttttttaaacaaaagaaggttgctgtattcaccattgaatcaaatctttagatttccaaatt

SEQ ID NO: 119530 - DNA, 1037 bp, Homo sapiens
atgctgaggtccaggacagttgggtgctgccaagtcacgtttcatccacaggcttggcatcaccttgtgacctcagtgggttctgtgaaatagctcaggggctgaagaagtctgtccagataatagagtagtgtcagagaaaaaatttcccaccacttttccctcccagtctgggagatgtgtgccaaattggggtgggtgggaagctgaagtggcttgcagaatgcagcatgaacacagatgccttctgcctctttgcaaggtttatggagaactgagacatgggggtgctgctcatgatttagtgggctcctgagccacagtagacacaacagatgttgttcttgttggcagaagcaacggcctgatatcaagcaatatggggtgcagatggtcctatactacaattgatgaatccggtcagcttgctctaggtcagggagacataggcactgcccagaaattcatagaaggccccttctgtcagggagatgtggagtgcccccagccagacagagatccagagggtacattccaaatctgcttcctgaacacagaggacctgccaacaggccatttagaaggcatttggtggaatgctcaagagaaatgcagcctggatgagaaccttatgtgagccatttaatttgctacctaactcagttcatctctttgtgtctgttattaaagaaaaagctctaaagaaaagcttacagatattttggatttaagagaagagtatgattgattatataacggagcccaatgggaagagtgtcttatttgatgttttccctcattcaatcattaaatgttaattgaggacctctgttctcagcaccagctatgatggtaatgaaacaggtatgatccctcacctctcccttgaggcccattcagtcatatgatggagcagcattcagagaccaatgatgggcccaatagctgttctttattgaactgtttcccagacgttgtaatcctcacaagtaaggggtttctaataaggcagtcaaaattaatggaacaggcccacc

SEQ ID NO: 119531 - DNA, 1019 bp, Homo sapiens
aagaattggagcaagtttcacatcagtaaattaggataataattgggattgagagaaataaatcagatgtttataaaaagcttatcactgtgcttggcacataataaatgtttaataaatagtacctactgttacttttgctaagttacttttgctaagaattaacatggcagtggcaaaaccttagtcttggttgaaattacagtattatgaaaacattttggaggttaaaatgatcatagaaggatcacacagttgaattacaaattcaaaaagttttaaatactaaaatttaaaaatacaaaataccaaattttaaaaaatagagaacacacactgtaattagacccctaagaagggaagaaaatggcttaattcattcccgttataattaacagtgggcgtttaacagtaaagatgtgcttcgtgttaacattttcctttgtctccagttgctggacttcctaatacaacccatttatccaaaaatagagcaagaggaaacagaacatagtagcattgtagaaataaatagtcgttctggctggaaaccaaatggttggcaggggcattttactaatcactggtgtattgatatggcctaagctgtgcttgttggcaaaattgttacagtctgacttggtgactctttaggatggggttgtaattttattttagaatatttcacacagtaaaggactaaggaagtccggtctcctaggttgcaaagccatcagttagtaggttagaaaattgctggagaggcttgtgtgtgtacttacaccattgttcagcattaattgagtatgtattctgacaaatggattaagaagggagcaggaaatagtggaaacagagaaatacatagaagtagtggaagagaatggagtttacatttgtgtaacttgtgggctcttcgtttaatcccctccgtaatccacagaacagatatcctccctgttttaaaggtaagcagcttgggggtcaaaaaaactcttcaaggtcatgctcattgataa

SEQ ID NO: 119532 - DNA, 1114 bp, Homo sapiens
tgcttgagcctgggaggttgaggctgcagtgagctatgattgcaccactgcgctctatgctgggcaacaaagcaagaacttgtctcaaaaaattttttttaattttaaaaatcttagaaaaataaaaaaccataaaagtctggaatgtttacaagagcccctcttccttggtggactctgtactcgattttttagctcctcagcactgtgagactgccaaaccctctgctttgcttttgagcctctaaacagtttctttctacttgttttctcaactcctcgtcccatataaacacagcttaatatctggtaaatacctcaagtggaaatgttggagttcaaggaggccaggacttgaagagccagagtcctagaggaaagggactacacagaagtgacccaggcttctatgagatcacttttatgagctcatttccatgcagccccctttttttctgggactttagctcttctcacgcactagctgccttgaattttgattttctccccagctggtgatactgcgtaaagctctaggccgctaccaattgctgcttggtgtctgtgcctcgtactagaaattatcaaatgccctgaaaggaaaaggcagcagcaaacacaaggctcaccttaatgcatttcctttctccctgaggtcttgacccatctagtgttgccttgcttggttgctctaagagaacttcaaacaagtgtgttttttagttaattcagtattttttttagtgggaatgttagtttgatacatcatgaccagaagcttaagtctttgaagtatagtgtgttttatcattttcatttggaaatctttttaatgaatcccgacaaatgttgacatttgattcagtaatgaaatggcatagtcctggaaacaagatcgggacccaatgttgatccatttccaggatggaggagagtggtttctttagaaaaacattacctatggactgattgctctataaaatctgttggattttcagtgttgcctgctgaaatgaagacaaaagttcaccctttttagatacctgagacgggtttcttttttgaagagaagggcaaatttgagaaagccaggatgggagaacactatattata

SEQ ID NO: 119533 - DNA, 1057 bp, Homo sapiens
gtgtgatatttgcctatggcctttgcccgtagcatccatgttctggtttgtattggagttatttgtgtgtctgttttacaccaccccttcattcactgagttcttggagggaggaaagccatgtctgacttaccgtctattggccgtggtgccaggcagaaggcatgtcacgtaagagtcgctccagtgggcctcagtgaattggggcacccccagtgctcttgctggtgattcagttaagccaggctagtggcccctgtgctgcacagggtgggtacatgcacttcagcagagtctcctgaggaacccctggcttagtgttattgcatcagcacacaagagctcaaccctggcagtgaggtgggagtacagccagagagagcattgcccctgcgtggtgtctccctctcccccgttcctgggcctcctggtttggccccactccaccattactcttccttcaggatactcttctggcccggcagctgtcttgaaagcccctgtgcagtttcaaaatgctccctgtttggactgcagcaaatcctgcctagtagcgttgtctgatcatgtgaatgtgatgccttcccggtctggcgcctctggggtgtactgggcaagtcggcccacgcctccataggccttgcatgcagcagggctcacaacacacctctgttgcttaagggtgtccattcaagtcaccctgctcccagtactgaccccagggtagacaaaacggattccgtaagacattcaagccaacagtcaggaacctgatgtagctgttgggtgaccatacttgtatctaggaggctatcctgagcctagcacagagcctggcatgtggtaaactctctatgaaggaattaatgagttgatgggtgcatcttttgatgggtgcatcttttgatctcctccaacagattacaacagcagtgaattgaaaacagcctgcaggaagcatgagctgtatgtgagtttccaagacctgggatggcaggtgagttctctggacacgggggataaaggtcctttctcagcagtttactctcatctgaat

SEQ ID NO: 119534 - DNA, 1079 bp, Homo sapiens
ttttacagagaacagaaatcggggaagtggggggaacgcctctgttcagttcattcccagaagtccacaggacgcacagcccaggccacagccagggctccacggggcgcccttgtctcagtcattgctgttgtatgttcgtgctggagttttgttggtgtgaaaatacacttatttcagccaaaacataccatttctacacctcaatcctccatttgctgtactctttgctagtaccaaaagtagactgattacactgaggtgaggctacaaggggtgtgtaaccgtgtaacacgtgaaggcaatgctcacctcttctttaccagaacggttctttgaccagcacattaacttctggactgccggctctagtaccttttcagtaaagtggttctctgcctttttactatacagcataccacgccacagggttagaaccaacgaagaaaataaaatgagggtgcccagcttataagaatggtgttagggggatgagcatgctgtttatgaacggaaatcatgatttcccttgtagaaagtgaggctcagattaaattttagaatattttctaaatgtctttttcacaatcatgtactgggaaggcaatttcatactaaactgattaaataatacatttataatctacaactgtttgcacttacagctttttttgtaaatataaactataatttattgtctattttatatctgttttgctgtaacattgaaggaaagaccagacttttaaaaaaaaagagtttatttagaaagtatcatagtgtaaacaaacaaattgtaccactttgattttcttggaatacaagactcgtgatgcaaagctgaagttgtgtgtacaagactcttgacagttgtgcttctctaggaggttgggtttttttaaaaaaagaattatctgtgaaccatacgtgattaataaagatttcctttaaggcagaggctggtcgagatgctgctgttatcttctgcctcagacagacagtataagtggtcttgtttctaagattcctaccaccagttactttgggccaagtatccacatccccttgcgtatgggagg

SEQ ID NO: 119535 - DNA, 2032 bp, Homo sapiens
gagttgccactgaaacatgtatcctcaagaggatcttgctctcatggtctggtctgcagaccaccagggcatcgccagggaggtcattggaaatgcagactcccaggcctgctcaatccaaatctgcaccttcagcagatccgcaggtgatcgtgtgcacagtaaagactgaaagcgtctgctttagggtaaagtcgttcctttgaggctgatctttaatgatgtcattttgaattcagaagtgaacacacagccccacggctgtgctttctaaacagtagtctgctcctgttttaatggaatatacacctttaaaaattagccacagaatttttccagccacaacggtaggagtgtatctggttttatttaggaagcaatttgcatgtgatctggaccgctggtttgcaaacttttttcttttttgttttaaggtacgaggctaccccacgttattgcttttccgaggagggaagaaagtcagtgagcacagtggaggcagagaccttgactcgttacaccgctttgtcctgagccaagcgaaagacgaactttaggaacacagttggaggtcacctctcctgcccagctcccgcaccctgcgtttaggagttcagtcccacagaggccactgggttcccagtggtggctgttcagaaagcagaacatactaagcgtgaggtatcttctttgtgtgtgtgttttccaagccaacacactctacagattctttattaagttaagtttctctaagtaaatgtgtaactcatggtcactgtgtaaacattttcagtggcgatatatcccctttgaccttctcttgatgaaatttacatggtttcctttgagactaaaatagcgttgagggaaatgaaattgctggactatttgtggctcctgagttgagtgattttggtgaaagaaagcacatccaaagcatagtttacctgcccacgagttctggaaaggtggccttgtggcagtattgacgttcctctgatcttaaggtcacagttgactcaatactgtgttggtccgtagcatggagcagattgaaatgcaaaaacccacacctctggaagataccttcacggccgctgctggagcttctgttgctgtgaatacttctctcagtgtgagaggttagccgtgatgaaagcagcgttacttctgaccgtgcctgagtaagagaatgctgatgccataactttatgtgtcgatacttgtcaaatcagttactgttcaggggatccttctgtttctcacggggtgaaacatgtctttagttcctcatgttaacacgaagccagagcccacatgaactgttggatgtcttccttagaaagggtaggcatggaaaattccacgaggctcattctcagtatctcattaactcattgaaagattccagttgtatttgtcacctggggtgacaagaccagacaggctttcccaggcctgggtatccagggaggctctgcagccctgctgaagggccctaactagagttctagagtttctgattctgtttctcagtagtccttttagaggcttgctatacttggtctgcttcaaggaggtcgaccttctaatgtatgaagaatgggatgcatttgatctcaagaccaaagacagatgtcagtgggctgctctggccctggtgtgcacggctgtggcagctgttgatgccagtgtcctctaactcatgctgtccttgtgattaaacacctctatctcccttgggaataagcacatacaggcttaagctctaagatagataggtgtttgtccttttaccatcgagctacttcccataataaccactttgcatccaacactcttcacccacctcccatacgcaaggggatgtggatacttggcccaaagtaactggtggtaggaatcttagaaacaagaccacttatactgtctgtctgaggcagaagataacagcagcatctcgaccagcctctgccttaaaggaaatctttattaatcacgtatggttcacagataattctttttttaaaaa

SEQ ID NO: 119536 - DNA, 1164 bp, Homo sapiens
taaagcagactaccatgtagcacctttcccttaaattctccagccagagcttccatcagcgtttttcacattgacttagaacaggctgctttccatttttatgttcaatgtaaaacaggtatcattgcctttgctattgtaactaggttctttctgttgcatagagaggatgtcacaaagggtgctaggagaatagggtggccagtgagaaaagcggctgaggatgagacttcagtgggtatcctggagactccaggcttagaggtgcagactcaagtgtcagacacccagggctgcctggtccacaccacagcgccctggagagttttcaacctgcctcatccccaaaagacagtccccctccccaccttcatcccctgtacagtgtccagccacctcctcaccacatctcccaggcttgggacccagggacttgcattgatctctctgcccttcagaggctgccagcctccctttgtgtgtagcctatgaaatgcagattgtgtaggtatttctgtgtgaccttggagcctacgtaactgcatttttaaaaaattactgattcgtgtatctgcaatcccaaagcatggccctgctcaactttaagggatgtacttgaactgtggctttttcctcccttgaagggcactgtgttggcactcactgaaaataacttcgatgacaccattgcagaaggaataaccttcatcaagttttatgctccatggtaagtggctgtttaattagaaactactttgtccatgtgtactaagtcacatcatgtttttcagctcatctgccacccctccagactcaatgttgggcacatgttacatttatatgtaggtcatgttgtaggaaataaggaaccgttatcatgctcctatattcaaatattttaaacttcaatggccttaattatatatggagaatgaggctacagttatatcaactttgattatatatggagaatgaggctaaagttatatcaactttggagaaaacataaaaatggaggcaaattatgatggccatattcagttttgtggtatctgcacttttccaaatagatggcttttctttttggctaaacaatgagtgtcatgatgtagctttgctcctcggttcttttaagtactcggatttcttttgtagagaaatcca

SEQ ID NO: 119537 - DNA, 1030 bp, Homo sapiens
ctctctgtctaaacagaatttagattgggcacagtggctcatgcctatcatcccagcacttggggagaacaaggtgggatgactacttgagcccaggagttcgagatcagcctaagcaagaccttgtctctacagaagattaaaaaaaaaaaaaaggctgggtatggtaagcgcactcctgaagctgaggtgggaagatcacttgagcctggaaggtcaaggctgcagtgagctgtgatcatgccactgtactccagcctgggtgacagagtgagatcctgtctcagaaaacaaccaaacaaaacccagaatttaatgacaccgttataacatgaatcaaattagttactctttacacttaaaagatctttctataccacatcccattttttgcaaatggtctcctaatatcagaatgatccccataaaatttccagtgtgaatacataagtctccctttattcacacatagatgtgtttcagaaaacttggcccaacaccgaatgacttgaaagcaattttggcttcctggccggctcccattaccaaatgctaccatggagagaaatccccttagaagactgggttggaaacgtgagaaatggcttggattgcctctggccttgtgacttgtgcctgctgggagtcagagcccctcccccaccacacttactgtccacagtaacttatcgtgaggccttcagccttttcccacttttgctaaaagttatttcatccataccagcgccctgacggcagaactctagcatgctttccgctacgggaatgcattttcagctgggattgtcttgggctctgagcagggtgtgtttcccaaatcacctgttacggaccgactccggcaggacagaccgactccggcaggcctagccagcgcctccctaagtgggtcactgccacacagctgtgtcgtgtaggtaccatggtggcttcctgcccttgctggcttcccatcagtactctgattaggttcccagagagcctgtctccaccttacagtgcaggatct

SEQ ID NO: 119538 - DNA, 1030 bp, Homo sapiens; identical to SEQ ID NO: 119537

SEQ ID NO: 119539 - DNA, 1030 bp, Homo sapiens; identical to SEQ ID NO: 119537

SEQ ID NO: 119540 - DNA, 1055 bp, Homo sapiens
cccttgggcattgttttgtgtgggtatttagcactttgaaagtcttgacgcgctggcagcagaagggaaactttgtggttctttatgattccagccctgcacagctttgaactgtcagcacctttaaagcctttaacaacttagcttggatattctttttaataggaatatgaacccccagataaaagctgagtaatatacacttaatgtgtctgcagcagaacactgattccattatctttccctcatttctggttactttggttggaagccacagctgtacctggtctgaaaagttgagaaatgtaggattgtgactagacagctgcacacattgctgtctgcttgggtcctggcagaagcatcttttgaaaagcccctttccccctctttctgtatgagacttagtcatatgaattacattctttcttgaaggtgcagcttatgttcatgccatggttttctctctgttgcctttcattcacctgcattttccttctcatcacctccttttctctctgatcagtcttccacagttgtgtcttcctcacagttttccctgtcatttgtgtaaagtaaggataaccaggccttcctggtccctgagtttctcattctcagctttgtccattttgctaccctcgtgtctgtttgtgtgttttttgaggaagagtctcactctgttgcccaggcaggagtgcagtggcatgttctcagctcactgcagcctccaccccctgggatcaagtgatcctcccacctcagcctcccaagtagctgggaccacaggcgcacgtcaccatgctcaggtaaataaaattttttttttgtagcgatggggtctcactctgttgcctaggctggtcttgaactgctgggctcaagcagtcctcttgcctcagcctcccaaaatgctaggctgtcacctaggctggtcttgaactgctgggctcaagcagtcctcttgcctcagcctcccaaaatgctagggttacaggcacgagccactgcgctgggcactctggtgtctgcaagtgctgaccccttcagaatac

SEQ ID NO: 119541 - DNA, 1055 bp, Homo sapiens; identical to SEQ ID NO: 119540

SEQ ID NO: 119542 - DNA, 1055 bp, Homo sapiens; identical to SEQ ID NO: 119540

SEQ ID NO: 119543 - DNA, 1975 bp, Homo sapiens
tcacagtaactggatattcaggccttgtaagagttgaatacctgccaggtggcctggaagaataccttaattgcaaaacaacaccgtgtctgctccagtcctaatttgaacacagacaacaactgctgaagccgggaaagcataacagtagcttgcagggaaggcccgaggctgctgcagaggagcactgagtactgtagcttttgaggcctcagtcacagcagcgggctggaagttttcacctcattttagttttccttgaataaaaccagaaacttctgaaagtttaggattaactgaatgtattatctcctggaacgttatgtttgtttcctttttatcagagaggagcagatacatgcctggctgcagccccttgacagctcattttctgattgtttcactaaatgagtttgctctctgataagacaactttctttttgctctgtctaatcctttgttattctttcagcttaaagcttttcaagccaggccaagaagctgtgaagtaccagggtcctcgggacttccagacactggaaaactggatgctgcagacactgaacgaggagccagtggtgagtgtctacctccttccctccctccctccctccctccctctctccctgcctacatctttggggtaatatgtaacggggcagaggccagttgaggttaatgattaaggctgccattttaaagcaactctactttttttggagcttattggtattacaggtaaagatgaacttttacagaaactttttggtgtggaaatacctaaatgtgcacaaaagtcaagagaaggctaaaccctgagtttcagcagttaccaccattttggtgtttgtcttccccaccaccctgcgccttgtttggctgtagtcagtcttcagggaagtcacttgtgtggcctcacagataagcacttactctttgttaacactgccaccctgccactgtcacaggtaatacagttcacaactgtaccccagcatcagagactgactctggaccacctggggtcagggctgggcccagcctagaatctcctatccaagccagcactggagcctcctcccatccccccgacctttgccctccaccacctgcagccctctggctcgggcctagcccgacagctgtacccgtagggtggatccttccttttcttctcggtgctcagtccccgagtctctaatgggctttgcttataacatcattttgtaccattaatactctgtgtcttaatgcacttcccttactaaggctaatatcaggagattgtagactcttagaatattatgtactaaaaaggatttataatcctccccctccccagttgatgttggaagtcttcacttttttataaatcatcatgatcataaaccactggttaagtgttcctttgtgggtggtgccttctgattaatgccgagtgctcaggtccctggatgccgggtagacctggtgggtcatgctgctgtgttggagagggactggaaaaacactcgtgttcctacactgtaggatcctgatgagctaggaagagcatctgaagtctttgtaatttcaatttcaacaaatacctaagactaccttcttgtatcagctaagcgcccactgatttgaaggtggtctgtggtggtccttttggagctttgccgcttactgttgccagtttccagtgtgtctgtgcggctcttccgctctgccccatcttctctgatgacctaatcagaaacttggctgctgattcagtgcttccatccctcacctgcaaagactctctcaactcggctgggtgtggtggctcatgcctgtaatcctagcactttgggaggctgaggcgggtggatcacccaaggtcaagagttcaagaccagcctggccaacatggtgaaacgtcgtctctgctaaaaatacaaaaattagccaggtggtaggtgcctgtaatcccagctacttgggaggc

SEQ ID NO: 119544 - DNA, 1037 bp, Homo sapiens
agcccggggagtcagggccaacttgctagaggaagtgacacccaaactaaacctgaagggcagatagatttagctaggtggagtttagggacgaagtgtcagagagaatgtgtcccagggccaagccaagctatagtcctttgggaacactgcagatgctgcagtagggctcaggagtaggccacaagggaaggagggtggactctgggatagaagtcaagcgggaggtcagcagggccagaacaactaggatccagaacaacactttgctaagtttaatactggaacaaggccaagatttcatgctgagaacagggcagtgactctggagggatgggagcaggggagagaggtcctggagtactggtccaggagctgccatctgcaatggtgtaaagaaaggactgagagccccattgtcccctggacagagctgaagttgtgggccagctgccctgtgacctgatactcaatgtgcttgtactcttgccttgttccaggtgtggacactgccagcggctgcagccgacttggaatgacctgggagacaaatacaacagcatggaagatgccaaagtctatgtggctaaagtggactgcacggcccactccgacgtgtgctccgcccagggggtgcgaggataccccacgtaagttggaaggaagggggcacacttcctaggtggctcctggctacaaagaaagtcctagttaaacttttggtaaaggtgtgaagagatactaaatttaagcaggcagtccctgtcattagggagaaactgcatttaatgctgtgtctgttttagatggcttttatacttggataacctttaattcatcagtgttgggttttcctgtttataagagaatgtgtttgcaagagaaaaatgacggtcccgccatgctagatgttcaccggtacattttacacagtgtgcatggactgtcatcagttttggcttgcttttgctggtgacttattcgcaaacacccttcctatagttccttcccgtgtgactcccacagggctgttcctg

SEQ ID NO: 119545 - DNA, 1013 bp, Homo sapiens
cgcgggattggggcgagccgtcccatggcgggaaggcaggaggccggactcggaaggctctcccagactcggtccctcgctccagcccttccctgccggtgcgcggagccggggctcgggcgggtagcggtcgcgcgccggcgcgggcgggcggggagaggaaggggcgcggcctctccggggcggggcgcggggcgggcgctgcgaggggaccggaggccgcggcgagagcgcgcccagccccgccgcgatgcccgcgcgcccaggacgcctcctcccgctgctggcccggccggcggccctgactgcgctgctgctgctgctgctgggccatggcggcggcgggcgctggggcgcccgggcccaggaggcggcggcggcggcggcggacgggccccccgcggcagacggcgaggacggacaggacccgcacagcaagcacctgtacacggccgacatgttcacgcacgggatccagagcgccgcgcacttcgtcatgttcttcgcgccctggtaacgccgcgcaggccggcgccctgccccgcacttggcgcttcgcggggcgtggggcgcttgggcgccgcgggcggggggtcccggggccacgtggacgccgacggctctggtctgcggcgtgcgtgctacgggcgcggggctcggggctcaggggtgcggggtgtaatactgggggcgcggggccgggagcgcggggaccctgcgggttcggggctccggctggcggggagcggggggcgcgggcgccgcggctcggggccgggagccggggactgcaggggaccgagggcttggggctccgggtcgggaggcgtgagctcagcgggccgggcactggcggctgacgtggcgctcggcggccggggcggtgcgggaggagggggcggacccctaggggacagccgggaaaagcccgccctgcgccgcgctcctgaattcaaccgcctcttgcacctcggcaccgagggaggggaaggtggggtcgtcgccctttcggg

SEQ ID NO: 119546 - DNA, 1051 bp, Homo sapiens
agggacgtgtaggtggcgctggttcgttagtttatgtaacccgttttctttgttttttttcatcttgcttgttttccctattagatgttagggcttatacaggtgagagtggtgttacaggagactgggcaaaaggcttaatgtcaggacctgatggttacgtagaggtcactgcatcttgtgtggtttttcaggcagaacagtcatatgatggaagattgtaaaatattattagttatttgttatagttaatatatatgttagcaaagaagtgaggaagaggactcctacatactcctacatactctcaaaggagagtataaattgatgtaacctctttggagggcgatctgaaaatatctatcaacatttaaaatgcacatactggctggtatgtgcttaacaaggtatggcacatacttgttaagatgtgtacagaggtctttgttgtagcttttcatatgagaaaaatactagaaacaacataaatatccattaatatggaactggttaatcaattgtgtggtatatttgaatgggaatactatgcagccatgaaaaaggatgggttagcactaaacatgataatatggaatgatctccaagatgttattatgtgaaaaagaaagatacattttaaaaggagaaaatgcacacatgcttgcatttggatatttctagagtgtataccagcagctggtactgatgactgcctcagggtagggtctgaggaatcaagggtctgcaggtctgcaatgggagggatacttacttttcctttttctatttattgtagtgcctaaatctttttttttttttcgagatggagtctcgctctatcgcccaggctggagtgcagtggtgcgatctcggctcactgcaaactccatctcccaggttcacgccattcaccggcttcagcctcccgagtagctgggactacaggcacccgccaccgcgcccagctaattttttgtatttttagtagagatggggtttcactgtgttagccaggatggtctcgatctgacctcgtgatctgctagcctca

SEQ ID NO: 119547 - DNA, 1051 bp, Homo sapiens; identical to SEQ ID NO: 119546

SEQ ID NO: 119548 - DNA, 1051 bp, Homo sapiens; identical to SEQ ID NO: 119546

SEQ ID NO: 119549 - DNA, 1070 bp, Homo sapiens
gaccgtaacgttacataataccacatcaaagactatgatatgctaagcaggcagcgtatgactaaaataagtgagtcccaagtaggaactgtctttgtgagttgtggtcagggaatcatttgtagtaaagataaaacttgaatgcaataggatttgcgttatgaaaaggatggcagaatctttccagctcagtctagttcagtaagcacctgtgttccaggaactagggctaagaagctgactaaagcttggtttctgcccttgtttatcaaaaacacaggtggacatacttttgggaaatttagacaataatccatagacttctttgatgttgaagcagtagtggatcagtctggaaattggaaagtgcactggaaattggaaatgagagaagacttgcattttggtcatgcttccatcactaaatttgtacagagactttaaacacatcacatagatggttttcacatcatttccaactttaataatttgtgcttatcctgtaggtaatgggactcttactgtaagtggcacgatgaaagtgttacaggaaggttactctgtggactcagatgtatgactgataggttgaggaaattattagcctgcattaggattttttttttagaaagtagctgaaaatagcaatttctagtctagacagggcagggatagagatgaagatcttggcttggaagttaagattatgggaatttttaacatccatatatagatatgtctatggactgtttgtgttacttatgacaattactggcatggcttcagatttagataatctctatttctcttttatgtaaaattgtaattcttagcccaaagtgactgaatttttgcttttgagaacaccattactataagtaggaaatcaagaaagttattaaatggcctttgtcttttaggtaagtattttgctttttataatcagtgcgaaaatacatcaggttttattaagcagctacctctatttaaggatttcccatttcctttcccagaagactgaattattcaaggaaaagaatgttttatgctgttttatatcccatgcatag

SEQ ID NO: 119550 - DNA, 1070 bp, Homo sapiens; identical to SEQ ID NO: 119549

SEQ ID NO: 119551 - DNA, 1070 bp, Homo sapiens; identical to SEQ ID NO: 119549

SEQ ID NO: 119552 - DNA, 1055 bp, Homo sapiens
attatttatcaatttaaaaaaggagccaagcacagtggctcacacctgtaatcccagcactttgggaggctggggcaggaggatcacttgaggccaggaattcaagaccagcctgggcaacatggtgagactttgtctctaaaaaaaaaataggaaaaaagaaaaagaatataacatgaatgtaggtaagattaagatagaaagtgccaccctgggaagaggccagtaaagtgccaccctgggaagaggccagtgcatgattcaaggacatttagaacagacaacaccaagctcaagtggtgcagcatttactgatagcaagagaggagagagtgtgtacacaagatccagccgtttgcgtcagtgccctgtggccagcaggtccactctgcagaccatgtggtcagtactgtatttttttaaaacttgaaatgaatgaggatatgtgcattccatcattccttggagcaattgttttccccttttaactttaaaaaagaaaagtttggttgagacctggcaggcattgaaagttagcctccattgcaagtattatcaccatttatgagtgtgaggttttaccataatagaagtcagtgtacgaggttatctgtgttgtgcttaaaattttctctacatagacctgatttttgacttttgtgaaattgtttatattgctaacatttatcattcagagaaaatattctgtaaatgttgatttaatgtaatagtttcccttaaaatagaatttatagagaatttgaaaagaaaaccacaagttaattcactttttaaaaaacttcatgtcatctgaatacttaagctgctttgtttggaaagtgtctttttaaagaaaatagttaataaaattacagtaagataattgtcacaaaataaaaatcttaggtggccagttgtgtattacagagatttggttttaacaattatacaagttatttaagtgggaaacattaatattaaattttattaagaaaaattttgacaccaaaaaatctgtccttcacttagaatataaaatgtatagctgaacacca

SEQ ID NO: 119553 - DNA, 1055 bp, Homo sapiens; identical to SEQ ID NO: 119552

SEQ ID NO: 119554 - DNA, 1055 bp, Homo sapiens; identical to SEQ ID NO: 119552

SEQ ID NO: 119555 - DNA, 1044 bp, Homo sapiens
cctgctgctcctctgcccctagctggggccaggtagcagaacagcctctcagacgaggtcagcagtattgaggggcatctccttaatggagatgttgtaggtctccatgtctcgaagggtcttcttgtcttctgtcaccatgactttgattactttggatggaaatctttaaaaagatattctatacttttatgttatttaaaaaatttattaaatgttacagaataattttgtaggaatcaggcgttactgagaatatcagattttatattatggtgaatatggtgatgtcattagggaatgagaaagagagacactgtgctatgtttctgtaccaactgccctcagatactgtgtgttttaagtttttgtatctgcctcctcttttgctataaggctgatgcctgttattcttcccttattatcagccttttcattttctaacttgtgactttttcatagggtgtcgtcttagaaaccagttaactaagctggttagaattgtatgtaatgtaggtcaagtaggctcggaatcagaagggcttttcatgtgcagtatttgtaaatggactttgtagcatcttcttcgtttgcatgacttaaaggtcttagcacattctcaactaaggttcagataaatgttatttccaggtagctgggttttatttgtatgtaaagactgcagtattgtcaatacatgaatgtataggcgcccccccccccttttttctttactgattgttgtaaagaatgtaagaatgggccgggcgccggtggctcatgcctgtaatcccagcactttgggaggcggaggtgggcggatcacctgaggtcaggagttcaagaccagcctggccagtgtggtgaaaccttgtctttactaaaaatacaaaaattgtccaggtgtggtggtggttgcctgtaatcccagctacttgagaggctgaggcatgagaattgcttgaacccgggaggcagaggttgcagtgagctaagattgtgccattgcactccagcctgggcaacaggagggaaactccatct

SEQ ID NO: 119556 - DNA, 1044 bp, Homo sapiens; identical to SEQ ID NO: 119555

SEQ ID NO: 119557 - DNA, 1044 bp, Homo sapiens; identical to SEQ ID NO: 119555

SEQ ID NO: 119558 - DNA, 1090 bp, Homo sapiens
tttccaatgaagtaaaaaacaaattatttgacctccaaatcctcagttaatgtaaattttgcatttgttgaaaacttggtatttcgcaggaaggacatcaggttttgtactgaacataacattgaacacgaagaacctttataagtcagtgttcactgggctgaaacttttactcctatctgaatatgttggcttttgagagctcttgggggattgatgttgttgtttttcaacttctatctcctacttaagtgatattaacagttgtgcttatgtaacatctgtgttgtgtgtgtatgtttttaatctctacttaggttgacctgacagttcaagaaaaggagaaatatcttaatgtgtctcgctggttttgtcacattcagcattatccaggcatcaggcaacatctgtctagtgttgtcttcatcaagaacagactatatactaattcccactagaagctgtccatgccatacagaagatctattaaaaatgttttaaatggaaaatgtactctagaccacaggactaatgtaaattaatatacagtcattcattatttgttgaagttgatagaatttttgaagtgtaaacttgtgtctgaatgttttatttgttctttagctgaagttttgcaatttttatgtcaaaattcaattgctattaaacaagttgagatccagttataaattaaccttgtttttagtagatgacatttatttcaataaaagttgcaaatcgggcttaatcttaaaattggtggtcatttcaatggttgacatatttggctatttattaacctctctttcatattctaaaattcattttccccttatggatatttatggtagtttgttaagaactgataaattgtgccaaggaagccaaaagggaagacagatggatttgttttaaaatatttatgtgagctagtaaatgtggttgaaaaaatattttttcgttgtttctttctttctgtagtcagtactcattggggtgaaactaactactgaactgccctacgggaaactggagtaagatacattcctcttgagttaatgattcttttttgttgttgggcttattgtaa

SEQ ID NO: 119559 - DNA, 1026 bp, Homo sapiens
tttgcagctctttttattactggttgagcttttaataaatcgtacattttcttttgaagtccttgctgaggtttatatatggtaaagatttagaaaaagaacaaaatgctcttttacaaaatatttttcaaaatatttttgaaatatagactgatgctcagtttattccacagattaagtgctgcctatgaaaacacacctgacaggtagatgctcctttcagtttgaatctaccagttagcctaatgtaattctttcatgtgaaaccatgaattttcataataaaaattaaacttttacgttaaaaaagacatacttgaccagttttcttgactgatgtgttatttatctctgtgccatggactgactatgttataggtgagacagttgtagtaacatctttctaagtagacacaaccttaaacaagatgaatatgtttttataatgtgctagagcagcttgtgtgtaggacttaagtatgtatcactaaaacctgaaacttaaatttttctgaaacagaagcagtgaagattctccctggtaacaacttaagtaaatcaagccaacaaatacgagtccaaataaacatttaatgagaaaatactgcctactttttaattttattgttaatatccttttgtattctgtaataattactgcatgtggagtgatttatccttcacctttggtgatctggtaacttagcagaatgcttgtctgcagaacaggtatgtgctaaatgctgaaaagcaaaggacattcatctcactaaaaatgtctcccaacaagcaggctgctggggggtttgtagcgcttgtagggtggctgagttatttctttctgcaaacactcctgtcagcattatagagacttgcactatctgttaagtaaatgtgacttaggagaaggaacgacaccacccattcatggggtcatggctgcaagttactgccctactggttttctctttacctgataactctcaataattctaaagtttatcttagagaaaagtctttgagtca

SEQ ID NO: 119560 - DNA, 1055 bp, Homo sapiens
cagaattgcactgtggtgttaaatgacattccagttaagttgggtacaaatacatacagatgtggaataaatgatttctaggtgttaaggtagggtgggtgtgaggtgcagattggccacctgctgatatttaccaggtcttcgtgctttgtttgctttggcaatattatttatttttgtcctcgtgcattccttaatttgtttgttcacgttattcaatacggaatatgtaatcagcacagtgtacaaaacagcagtcaaggaaccttcgagtcatcagataattccactgtattttgtttcattgtgagcccaattttagtcatggctgagttattctaagatctggtctatcttaactccgtttgaggaatattatgttgcctttcctttgttatactgcctgttagtgtggctgtttattataacaccagtgactcactgctttcttaaagtgatttcactaggagatagtcatccctgtgaacagactgttactcaagattattaaaatcctttgtaatattatgtgctgcttgactgtaagattgctatcaactgaaatacttttgttctgaagtttggagcaccattggaggcatgtggttcttttataaggaaaggaaaaataaaagaattaactgcaaaatagtccaggagcactggccctaaagaatgtcccaaaggcggcaacgtggtgccagttggaaaggtagcaaagcagcgtgtcaccctgatccggaacggttcacttaaagtgtttctcacatgacttcatggaaaattagtgattcagaatattatctgcttggctttaaagttcaaagtcatgatagagtgccaatataaattaaaaggaattattaggcagaaagagccaagcaccactatagacacactggcatgcagatcaacatgaagcaggaaatggcaactagaacaattgcattgtttcctgttgtaagaaaggaaaaagaacttgagctagaaagggatggtggaaaaccagtgttgtaagtgaaatagtctgggagatcccatcagaaatgttttta

SEQ ID NO: 119561 - DNA, 3297 bp, Homo sapiens
atcccagcactttgggaggccaaggcgggcagatcacttgaggtcaggagtttgagaccagcctggccaacatggcgaaaccccatctctactaaaaatacaaaacttagctgggcgcggtggctcacgcctgtaatcccagcactttgggaggccaaggcaggtggatcacctgaggtcaggagttcgagaccagcctggccaacatggtgaaaccccatctctagtaaaactacaaaaatcagccaggcgtggtggcgcatgcctgaaatcccagctactccagaggctgaggcaggagaattgcttgaacccaggaggaagaggttgccctgagcagagatcgcaccaaggcactccagcttgggcgacaagagtgaaaccctgtcttaattcatctgactcctgcctcccttgctatcctccttcccgtcattctctcagccacaacatgtgccccagagcctgctgtatgctgggctgtttctacccagcatccttgcattactcttctcttttgttccctggtcccagcccttcccttcctctccacttcatttgcatttcccaagtatctctcggttcccactcattcctcggctgcatctctctcaggcgcctaaaccacattgaggtgctccttcctctgtgtgtgtttgtacctcatgtacacttcgggtctagctcatttcactcttactgtaattctttgaaaatctctctaaattataagctgtttgactcaatgattgtagcgacacatatttgtaacaccattgtctgaggtaattcctggcatgtgtaggtggtcacccctccataaacactgaataaatttttaaacgtatttctctatgcttttcaaggagtttcctctatactttctcactgtacctcatcactaagaaggaaataggaccagtgttattggccttcttttacagagaaagaaactaatgcttaggaaacttgagtggtttaaaggcacggcgctcagtttttggaagggccaaactttcagatcttctgactgaagtgtcttaatgtgtggggaagctctttgtcttataaactgtaaaataccgtaataattgaggtctgcgcaggccccaacctatccatggtttggggctgctatctgcctcataaagcaaagtggagggtttgtcttttggaaaaacaaagtcgttttctcctctgaaaaagcctcctacatagttggttttgccatttgccaagaataagagggcacagattgaggcctcttgagtatgggttttcagttgaggttgaagagagaagacagggattgtaaccagaaaattcagaatggaatgcagttccctccagaactcctgggcttcatgacagtcatagaagtggattccttttagtttcccctcaccccgcaaacgtaccgtaataatgcaggatacagttattagttccctactcaagctataatccctcagtttgaatttacttgactttattctgaattgttcctcaaagatccctcagtgattatgttaaattctgtaacattattgtaatggcttagaatgatccttaatttaatgtaaaactattatgagttttaaatgatttattgagagcccactgtgtatgcccactatgccatacttgagagggagacaacagaagtataaaactattttcaggggcatattaatcttattgaagaaattagactgttttacatgaaagcaattaatgaagtagagaaaatggaatccagtgctaatctctggtcagaatattatgttattaatgcatgaggcagataagtagaatacagaatcagaaaattgtcagaaaaatatctgaagatttggatggccttggctgtctaagggaattttcattgttttggaaagcttatgataagtttgattacaaatattctttgtaaatagggcgaccacatgatttctcatccaaaacacttggctgtgaaaggaggcctattaataattacattgggacaacaggagtgaagtagaatgaatattccccatacttacaaagaatatgattcaatttacacaaaataagagaccaaagaggatttgtcttatttctgttcatcccctcttggcttttaaaacagtgccttgtgcagctaaatgcttattgagattagcaatattaaggctgggcatgatggctcatgcctgtaatcccagcactttgggaagctgaggcaggtagatagcttgagcccaggagttcaagaccagcctaggcaacagggcaaaacccgtctctatttaaaaaaaaaaaaaaccattaaccaggcgtggtagctctgtgactgtagtcccagctacttgggggaatgaggtaggaggatcttctgagcccagggaggtcaaggccacagtgagtcatgattgcaccactgcattccagcctgggcaacagagtgagacctgtcttaaaaaaataaataaaagcaatatttaacaactggtacctatttatagttcctatttcagattttttatctctgtagtgaaagtgtaatataagtaatgttatttaaatgtggagaaagtttattggagctgaagtacattgattaccaccttcttttattccatgctaggttcaatatgttttagtagcttttcgaatttaaaatgatcatgaggcacaacttacctcatttcaaaacaaaaaaagcctgcaaggtaaagaggatttgctgctaaggtatctaagcatctctctcctggtggcagcctaaacacagtctttgaacttgagggagtctgtacttcattttagtgagactgtgctgctgtgagcatggctacccaacagggctccaagaacaatttctatctgaaaaccacaataacaaacttgttggctttttacgaaatatatatttaaatgtgacatatggtttgacatttaactttttaagctttatattaggaaaaatatcatcagtcgtcctttgtgatgacagccagcaggctagtgaacgtctgttcagacccacaagatcttgcttgctgtagcatcgggctgtcattaagaaggagagtatttctacatctaattaaaaataaaaaagatgatactgaagtgtaactcataaaccaagtgtttaattaaattttcttttcctctagcttatgcaggttttgcagtagggaaaagaaatactcggaaaaggagggaacttgtttggaattcctttgccagcagaatgaataaggtcataatcctatagtgcaaaatattcatagcactagctgcaaagtt

SEQ ID NO: 119562 - DNA, 1051 bp, Homo sapiens
ccagggtaagaatttaccaggacagctgtacgtaaagaaaagcagatttattagagaaagtatgaaaatatgttgcaagagtgcaacaggcaagttagtaagagaggagctaactgcaaggaaacaaaggctggctggggattttacggaatagtacttcagttgtgtgctgaagaggggtttgtgcagtactgataacaccaaggttgcagtgagctaacttgagttttctatcagccgaaggtccggtgatagctggacatggaaagattgttgagttatttgtgcagaagggctgtgtcctggaccatgaagaaaggcagacttgtagcttatcgcccttctctttttgctttcccttggtcccctcaacctgacttcttttccctaattaggactccatatggagcaaaacactgttgaggagtgtgaaaaaggaagttaattctgactataaaagtggatgtataaactcatggaagagctggcatttaagggattatgctttgaaagatgtgtaaaaccaataaattatgaaggattgggaagtttagggcagtaagtaaaccaatatgaggaatgatgcaatgcaaggtaaaccccaaattacagtttgaggcccaactgtgaagacttccgagttcagagtgtggtttttaatttaattttaattaaagcattttagcagttagcagctagtgaaagtttctgtttacttgtatggggaaagggttggccatatgtgataagattcagccattttttgagaagacagctgacagcagtgagccagcaataaggcattctctgcaacattaccaatcatagtttaaaaattgaaagcagttcagagatccttatctaggatattgattctttaaattatggtacatcaacacattgacatacagtcacgtgttatttaaagacaaggatacatttcaagaaatgcattgttaggcagtttcatcatgtgtgaacattatagagggttctgttttttttttgtgtgtgtgtgtgtgtgtgtgtgtgtgtgtgtgtgtgtgttttt

SEQ ID NO: 119563 - DNA, 1051 bp, Homo sapiens; identical to SEQ ID NO: 119562

SEQ ID NO: 119564 - DNA, 1051 bp, Homo sapiens; identical to SEQ ID NO: 119562

SEQ ID NO: 119565 - DNA, 1067 bp, Homo sapiens
ggaacatgcttcctcctctcaggcagcttgctttttggccaggtggacaaacattgcaaccatttaaattggaagagtgccacgttgcaccataaatggcagagagaacacctaaggagtcttggcccaatctaggggattcggggaaggcgtttctaaagccttggattatcagtttaagtgttacgacccacagtgaatgcgggaaacatcacaaggtatgagattgcctggttaggcactgttagaacgtttgtgttttatagttgtttgtcgtagaaggaatgtattagagaaggaaattggttgtaggaagactactttggatatatgttttttttgctcctttgagattttttccaaatgatgtttggtttttgtctttaattttttctcttcttcatttggtccatgtgaagatcttgtctagaaagtagtagtatagtttttatttaagttaacctgaagcctagaaaggttaagtgttcagcctaagatcagccctgtgattggtggcagagtaggcgttggagccaaagtggccttcttttggtgtttcctctgccccagtgataattccgtcccttcggcccctactccctagcttagtgtatatattatataatatatatgtagtataaatataatatatatggccgagtggacaaacattgcaaccgtttaaattggaagagtgccatatatatatatatatatatatatatatatatatatatatttttttttttttttttttgagacaaagtctcactgtgtcgcccaggctgtagtgccatggcatgatctcggatcactgcaacctctgcctcccgggttcaagcgattcttctgcttcagcctcccaagtagctggggttacaggtgttcgccaccacgctcagctaatttttgtatttttagtagagaccgggttgcaccatgttggccaggctggtcttgaactggtgacctcaggtgatccacatgccctggcctcctaaagtgctgggattacaggcgtgaaccactgtgcctggcctagtttatattttttagggaccattgcc

SEQ ID NO: 119566 - DNA, 1067 bp, Homo sapiens; identical to SEQ ID NO: 119565

SEQ ID NO: 119567 - DNA, 1067 bp, Homo sapiens; identical to SEQ ID NO: 119565

SEQ ID NO: 119568 - DNA, 1027 bp, Homo sapiens
tacatgataaaatctatccccagtcaggtctagaaaagctcttttaatgagcataaagtgattgtctatgcagtaagaaagcatggtgtccttgttgagttagtagtggtttttctcttagtggtatataaaacgtggcagcgtgtcacaacccacagtgtcttagattttctgaaatatggtggtccattaggcagtgataagtggctcagataaatttaaggtaaacttggaagcaaccagctggacaaattgatttgcatggtgggatgtggaactcagctggttcactgcagaaccaggagcagctgtgttttcatcctggctctcctgtgaagttcctgggtgattctggggaaatcctttaatttctcccagtcttagcttcctcatcggccaaatgatgcaatcctgcttatttggtagggggtgaaattgatggtcaggtgatttatgggtaacaaaggttacctaagatcatcctgagggtctgtgcttggtgctgggagtatagcactgaagaaggcagagatggtaccactccttcaggggataacatttgatgacataccgatccagtttctctcgtatccaggggacattttctggttctttctgctttctctgcccaactaataaaaagtagtgtgcaatgtgtcaggaagtgtgtgagcatttttcatcactcatttaagccatgtttgaaagaaataagtggacacaattaaattgatttttaagacctgagaattgtttgattcatttaacatttgtattgggccttggcaaaactgtaaaacaaaaagaagttgaccttcagaaggccaaatatcattttggataaatttcctcttagtgttgtggatataaccttttaaggaactagtgcctctaattccttcaccccgtccttttcctactctccctccatctacatatttgtgttttctttttctttttcttttcttttcttttttttttttgagatagagtcttgttctgttgcctgggttggagtgcaatgatg

SEQ ID NO: 119569 - DNA, 1085 bp, Homo sapiens
ttcaagggtagagctaatcagcggcatgttcaaatatagggttgtttccgtaattttgtagtagtctatttgcccagaaaggcaaaggaatattaattttagaaaaggctgcaccgaattctgccacctgtgcaggtagcctccctctggactccagatgccactgtgattaccccattctgacccactcttggagcttcctgtcaccagccatccattctcttctctgtcttggttcactcctgagggcttcctgtgttatcctaatgtgcaccctaatgtacacaaatcactttcacagacagtgtcatgagtatgaggtgagcaattcatcaatgtcaacatatctttgatgaacagtggtttgtctttgcaaggcctgaaagagtccagtggatttctatttgctgtggcttgctggggattgaagggattatggttgatgagaggtttgaaattcaaccagtttattattagtgggggcacatgaagtttgaaaatcttggttgtcttgatctgtcttttttccttttcttcctttaatctttccctccttaccccttccctcccctcccctacccttcccttccctttaaatgtaaggggaaaagggcacactggtcagaaatgcaatgagctagttgttggtttttgtcacaattattcatatgtccacttctattttttcccacttgatagttaaaccaaacatctagtttttactgccttctcaaagtacataattcatttaggttcagtgtacttattgagtgacttatgtgcaaagcattgtactaggtgttctagtactagtgtaaagagtaattcacattaaaatggaaagatgatgactgagtgaacaaaatttgggatgtcttgcctcttgtgtttttcacgtagatgttgcttacttcaaatgacatgaacaaaggtcctcatgtaaagctggaggaaaaacaaagtcaattgctttaagctatggttggtagttggtaattcgtaacactaattacagctgatacgaagactacaatagatttgttataagtacctataattcccctttatcaggcttgaattatatt

SEQ ID NO: 119570 - DNA, 1032 bp, Homo sapiens
actgcaacctccgcctcctgggttcacgccattctcctgcctcagcctctcgagtagctgggactacaggcgcctgccaccacacctggctaatttttttgtattttcagtagagacggggtttcaccgtgttagccaggatggtctcgatctcctgacctcgtgatccgcccgccttggcctcccagagtgctgggattacaggcgtgagccaccgcgcccagcagagggggctcaatttctaggaacactttcatctccatgattctaggtaaggaagacaggacaattaaaaataggctaattttagggtaaacttttaggctaacgatgatacccttgaatgtggcctttaaacttgggaagaattgacattgaagccatagaaatgaagactagcttgaggcatccattgggacccaggcaggtatttggtgggatcatgtttgtttgatctaaacctttgtggcagctacacaaaaacccaagactggccctaaatgtgcctgtgtgtaacttgagttgagacacaattagcctaagagcccctgggtaagggagcagtttctgaagctgccactggggcaacattagtgcggagaagcaatcactcctgaagggttactccaatgtctgaaagagctagggacattcccagcaatggctgcgtcattgctaaggagcaacttacacatgggagtgtttctctttttatttctttttaatgtgcgcagggactagctgcttgtgcctctttgaacataggggcagaaaaaggaatttcattcttttctctctttctcacaccaatctacacattccttctcctctgaggcgattccaagccaaatggaagggagaagtactgggaggccttgcccaggttttatatggttttaaagggaatgaaaggtttttctttgggtgggaatgaccagaggtttgcaggggtatgtgctcctgtgacccatcacctgctttggcttatagtcctaactagaggcaccactaaccaattctcctatctggacc

SEQ ID NO: 119571 - DNA, 1044 bp, Homo sapiens
tattctacccaactgagacaacgagttggacagctgagtttaattaccaaaatggcctttggtagatatacatgtccaaagctttaagtgtacttttacgacttttggtaggggactgtactttgaatatactgttatccccaaagttcaaatgaactatgtcatataaaattttgtaaaatatctttctttatatctactcaatgcattattaaaagatacagaattctatcaaatctcatctaagaatactatttttattttaatgctattattgtaggcttctaatagaattttacttcactgaagaattattatggacatattaacaaattctgtggttaatagtaaattgttattttgctaattttaattttttttccttatttctttctcttaggtatgtatggtctggtttgttagttgtccttggtatatttcttaatgtttacagcaaaaatatggataaaataagactaccatcactgtatgatttgataaacaaatcagtggaagcaagaaagtcaaggacgctggcacagactgtatagacagtgattgtcctatttaaaatagaattttaagggaacaatcatcaattaattaactttccaaagggactgataaaaaccaaaggatctggaggcattgctatcccatttgtggacagatttcatatgaagttgttttgcggtgtcagccttttcttcagagcatttgtttgactgacttccaaagcaatcaagagagccacgtctagcagactttacaataaaatgtcaatatgaaggactgtaattcctagcagtttattgagaatttcactggaaatggaccatgtgttgcaagactaattggctataattatatcctatcaaagaaatcgatacgtaatagcagattgttttatattcattccattttgatggtgttatttaaattgattctctgttataagagtaaactgatgagttgaagtctggagagaataacattcattataaataaaattattctgtgatcttttttcaagatgtgttaata

SEQ ID NO: 119572 - DNA, 1003 bp, Homo sapiens
tttctactttccattgtcaccttggcacctcaacagattctggcatatagtcaggtctaaatatttgctgaataagtgatttctaaaatattgtcaagataataggcacattctaaactaattttttgctcctacagtgacaacaggaagaaaagcaatgaccattgtactttcgtttatattctttgctaaaccattcacgtttcagtaagtacttcttaattaaacaatttttctcagtttttagatactgtgtttcacatttcctcttaatcttaatttcaacttttctactttttcttttttgtagtaagtgtatttatttttatataaattaatgtggttttttttcctgttatgctttataaagaaaccttttcatcttgatctcttaactatcagtgtgtcttctgctattttggaaatgttggtaatttattattttgaatttatcattttgtatacttaaattgcctaaccagagtccagtgcaaatgtgacctgtttccattatgagtgaatatgagtgatgtgtacgttgttgagattaagggattcccctttgccctactgcaaatatgtaaattatgtatttacatcacatgctttaaaaaaatactagtttatttgatgcctgtttccacaaaggatttaaggtagagaaatattctgtaagttacatcctaaagactttaaactaagcttttattttttgtgtgtgtgaaagtgtttactatcatatttactgtctttactatttgtttgacattagcaccatttaaacttatattggtcaggattgtgaagtttcaaacccagaacttaacaatctataagtttggagggaaacataaaattaatttccatcaatatattacagattattatttgtctataaactagtttttctttctgtatgtactaggtataatacataatagtgttatgtcatacataaatataattataatgattcccctactttctcagggatgtttctctt

SEQ ID NO: 119573 - DNA, 1199 bp, Homo sapiens
aagaatttcttgaacccgtgaggcagaggttgcacttagctgagatcatgccactgcactccagcctaggcaacagagcgagaccttatctcaagcaaacaacaacaaaagaagctctttttctctaacttaagatggttaagatggtttttatttgtggctagaactgctgttaaaaaaaaaaaaaaaaccttttgtcaacatttataccttcagtaaaaatctaaactcttttttacataattgagtggcctcgtttatgattgactaaataaaggtaaattgttatttttataaacttttttatacaagagcattacagtttttaaatagtgatattttttactgatatttccagaaatagtaaccagaaattagaaaagtaattagacatttacacaatgtgaacacattatcttttagtagtatgaattgggtcccaaaatgaaggttttaaaaattgtcttttacagaataccaggaaaaacctacatgataatagcttttctaactgtgggtactatggggttatcaaacacttccttgggctacctgaattaccctacccaagtcatcttcaagtgctgcaaattgattcctgttatgctaggaggagtttttattcaaggtatagtaatgatatgtttttatactatttaaaactaataggctatgttatggcatctagcattaggaaaaacattaaacttctattacattttcaatgagcattctagatattgtaacaattctgaattatgtcttaccaaaataaggtattctaaaaacactgatggccaggcacagtggctcacgcctgtaatcccagcactgtgggatgccaaggtgggcagatcacaaggtcaggagttcgagaccagcctggccaatatggtgaaaccctgtctctactaaaaatacaaaaattagctaggcatggtggtgtatccatgtagtctcagctacttgggaggctgaggcagacgaattgcttgaacccaggaggcagaggttgcagtgagccgaggtcacaccactgcactccagcctgggcgacagagcgagactccatctcaaaacaaacaaacaaacaaacaaacaaacacttatatgccttagtttctgaagtcagtaatttggacttaagaaaaagaaaagataatactttgtttttattattttattttggaatctaccac

SEQ ID NO: 119574 - DNA, 1061 bp, Homo sapiens
aggaagccacagttgggagttggaggctctaagtaacagcagagccccttacagcctgcgagatccatgctggatcttggtttgtttttcaacaaacgggtgttgttttctcaaattcactccaagaggaagctgtgattataaatcaaatgacttattcaacggctccaagcctgttaagagtggccttggtccacggaaactttctgacacataatccagggctttttttttttttttttagacggagtttcgctcttgttgcctgggctggagtgcgatggcacgatctcggctcaccgcaaccttcgcctcccggggttcaagcgattctcctgcctcagcctcctgagtagctggaattaacaggcatgcgccaccacgcccggctaattttgtattttcagtagagacagggtttctccatgttggtcaggctggtctctaactcaatccagggctctttttaaccatactatttaagccctgttgctggaagcctgtggttataacctatgcttaaaaagaaatagtgatgaggataaagcagggtaccgaacttgtcaagagaaaacacataaataagaaagagcaggcagagaggaggacaggaaaaggttgtctttttgaaaaaggacaaaatgatacaaaaattagccaggcatggtggtgcatacctgtaagcccagctacttgggaggctgaggcaggagaatcacttgaacctgggaggccgaggttgcaatgagctgagattgtgccgttgcactccagcctgagtcacaaaagcaaaactctgtcccccaccccccaaaaaaaagaaaaggaaagaaagaaaagaaaaaggacaaaatgtgttgcccttcagattaaaaaccagtttaatccaagctgttcttcctctgagactgcatcaggctttcacagacactgagaaagtttccatcggcccacccccccggtttctaatttgggcacacaggtgatgtcatggtaaaatgaatatgtgaaaagtgctttgggcatcatatggtccatgaataattaaggtgaggatgatg

SEQ ID NO: 119575 - DNA, 1007 bp, Homo sapiens
agtgagacactgtctctattttttttcaagaagttaaaacaaacaaacaaacaaaaaaaccttattgcaccttaaagatttctaggctgagcgcagtggctcacacctgtaatcccagcactttgggaggctgaagtgggcggatcacaaggtcaggagttcgagaccagcctggccaacatggtgaaaccccgtctctactaaaaataccaaaaattagccaggcgtggtggcgcatgcctgtaatcccagcttctcagaaggctgaggcagtagaatcgcttgaacccaggaggcggaggttgcagtgagccaagatcacgtcatcgcactccagcggagactctgtctcaaaaaaaaaaaaaaaaagatttctagactagtacctccattttatagatgaagaaacttcaatgtgattacatgatgtgctcaaatcccacagctagtaagcaaatgcaccaattataaaccaggtctcctaagcctgatgttctttttaggttgactttcaataaggtctcaattgttgctaaatcaattccatctctcctttggtccaagttccaaatgatttttgaataatctcaagttgtttatagtgaaccaatttagtcctgctagttcaattcaaaataagaattcatatttgcagttcaaaggaaaaagtaactggaacctgtatgaagatcacagtcctggtttctttggattgctggttcaaccctggatgcacattacgatcatctggggcttctaaaaataactaagccagggcctgtttccctccttggggcaagacctaactattgatatttgtacagcttccaagtgattctcatgtacagccaggggtgtaaaccattgcaggtgcttgttttagatattggcatacaaagcttcataggcttagaattctctttaagtctgtgattttctcagagccagaaggggaagtatagtgatcaaaagaaattagggctcaggaaagtctggtggggaaagca

SEQ ID NO: 119576 - DNA, 1441 bp, Homo sapiens
tttgggggagatccaagcttccaaaggctaaatatctcagaccctttgaggctgactcaagtttgcacatcttttatcaatggaaaaacacgtttcctgtggaaaaacaaactaatgatccatgagaagtcttcttgcaaggaatacttgacccagagccactacatcacagcccctttatctaaggaagaagctgactttcccttggcatatataatggtcatccatcatcactttgacacctttgcaaggctcttcagggctatttacatgccccaaaatatctactgtgttcatgtggatgaaaaagcaacaactgaatttaaagatgcggtagagcaactattaagctgcttcccaaacgcttttctggcttccaagatggaacccgttgtctatggagggatctccaggctccaggctgacctgaactgcatcagagatctttctgccttcgaggtctcatggaagtacgttatcaacacctgtgggcaagacttccccctgaaaaccaacaaggaaatagttcagtatctgaaaggatttaaaggtaaaaatatcaccccaggggtgctgcccccagctcatgcaattggacggactaaatatgtccaccaagagcacctgggcaaagagctttcctatgtgataagaacaacagcgttgaaaccgcctcccccccataatctcacaatttactttggctctgcctatgtggctctatcaagagagtttgccaactttgttctgcatgacccacgggctgttgatttgctccagtggtccaaggacactttcagtcctgatgagcatttctgggtgacactcaataggattccaggtacgtacaattccatatttcatgcaaaagaaatgtgtcgtatttgaaagggctttagaataaccagccactttttattaggaagtagaagatgaaaactggaacatatatagttctcaccctagtcctttctaaatgcagaaagatgttcttttttttttttgagactggatctcactctgtggcccaggctggagtgcaggggcaacatcatggctcactgaaccctggacctcctgggctccagcaatcctcccacttcagtctcctgagtagctgggactacaggtgcacaccaccatactgggctaatttttaaaaaaaattttgtgcagacagggtctcgctatgttgcccaggctggtctccaactccacagctcaagctatcctccccatcttggcctcccaaaatgctgggattatagccatgagccaccatgcctagcccagaatgatgttctttatgtgataattcacatgttctagcactactaagtaatacctttccatgctatcacttggtggtccatcaagttctttttcacacatcatcttattacatctttaccacaatagctgttagtccacactggtgttc

SEQ ID NO: 119577 - DNA, 1017 bp, Homo sapiens
cccgaattttcctatctttactaatttaccagaccgattgttttttaaagtgtataaaacatgatgggatttcttctgaagaaaacagcgtgctttggactcaatgaaaaatacaaaatggatctctgatgaactagacagcattattatagcaagagaaaagcaatcattgttctggctgttgggggattgccaagttcgaaaggctggtaggtgctctcaggctgcagggcagggcctgctgggcgataaacacgccggcattctctggaaaataccatgcctggtgtttgaatcccagggtgactttcctggtgaatgcggctcactcgtatgctgcgcacactgtttccgcacctgcctctgcctgggttcatcctctcttcacctttgatctgttgtttccaccattcgcatatcattgaggagcattaggtacttaggagctgattttcatatttaaatatttattccctttctattttcattctttccttaaaattcataaaagttgggtcccagtcaagtggttccttaagtattgtgctgagatgagggcatttcataagttaacaaaagtctaaattgttgctttttttttttttttttagaaaaacatgggttttggtttctattaaatgtaaatatctgtggttattttgccagaagcctggtcagttttatcaatgtcaaataatataagaaaatcaagggaaaaagaattccccttttttccttacccctttctgatctcttgggagaccaaaagaatgatatctggataggtgtaggagagaatgctatctagatgggtataggagagaacgacatctacatgggtagaggagagaatgctaccttttcttctcttttttaggagagagaacaccttttttgctgtaggtttatgccatggcatgctggcttctgccttctcactgcaacagtgtggccccatgtaaatcatagaacctcatgggacctcaaatctctccagctacaaaatggggaacccag

SEQ ID NO: 119578 - DNA, 1034 bp, Homo sapiens
tggttttacacttgagcattctttgtgatttaagatttggcatgtgaatctggttcttatataaccacacagccgttaatcaatatcagctcttctattttttttgagacagagtctcactctgtagcccaggctggagtgcagtggtgcgatctcggcttactgcaacctctgcctcccgggctcaagtgattcttgtgcctcagcctcctgagtagctaggattataggcccccaccatcacgcccggttaatttttttgtattttagtagagacggggtttcaccatgttgcccaggggtagtctcgaattcctgagctcaggcgatccgcccacctcggcctcccaaagtgctgggattacaggcatgagccactgcgccgggctgagctcttctattttcaatgtcatgttttaagaggaaaaattcttctgtccgtacagggtaaacatctttttgcaaacgtgcaagtgcaggtggtgctgttcatttcttccctcaaagcgaccgcctccctttctcctaaataccttaaattaaaatgtgttagcaagaccctgtgcaggcatttcaggtttcccaaaacacccccaagagcaatgtgaccgagaaaatgattagtaccttagaattagatggtttcagaaaacaaagtgaaaatcggttcgaattggcgagactgaatagaagggatattcatagaagtagcagtaaatcacagagcttcacactgccttttttttttcttggtgcctttctactgagagtgacttctcttttggttttcaaccactaggctctctctacactgttagaaatggtgatacaacaggccagaaagaggtccttaggggccccagtctctcactccttttcaggggaaccaggtaaagtggttgtccttctcttctgtgtggcttgtgcacagatggggtgtctagccccctcccttctgcttacattctcaaaggaaattctccaggaccacagatttctctgacccacgttacagagcatcaggctgtgacagc

SEQ ID NO: 119579 - DNA, 1050 bp, Homo sapiens
ggtacacccttatattttctaacatctctgagctttgtaatgattgctctaagtcactttaagaaaaacccatgtgctctagctctcccggctcttctttcagaattttcttttctttttctttttttttgagacagagtttcactcttgcccaggctagagtgcaatggcacgatcttggctcaccgcaacctccgcctcctgggttcaagcgattctcctgcctcagcctcccaagtagctgggattacaggcatgtgccaccatgcctggctaattttgtatttttagtagagacggggtttctccgtgttggtcaggctggtctcgaactcccgacctcagccgatatgcccaccttggcctcccagagtgctgggattacaggtatgaaccactgtgcctggcttttgcagcattttcatctgcctatcttccccaaggcagagcacctgaagccatttaatttttgctttacgctttgtgaaattgttcagcatctacccaagtggccgctggttgatcttcttcccagtccattcccatggctagaatgtcttcttacacttcagggtggtttcgtctctaaggaacagagctaccccactctttggcttcagctcctgtttttccctcgctgcactaagtgtgcttttggagtctttgctcattcattactctgacctttctcatgccatgatatttttcttccataagaatgttttcatttatttcgtttcctttttccattttgtatacgttttcctttttttttttcagggcccttttgtcaaattctctcaacctcagaagggatcacatgatcccatttcctcattttttaattctaaaaatatcgtgtttcctactttgatttattttgctttttaaactgtgacttttatttatatgtgcacattctttgggagggtgttaggactctttcggttgcaagtgtcagaaactcaactcaaaggagcttaaacaagcaccagaagttaccgggtcacacatctgagatgcccaagggagctcccaatcaagctggat

SEQ ID NO: 119580 - DNA, 1016 bp, Homo sapiens
attccagccctggcaacagagcaagatgctatctcaaagaaaaagaaaaaagatgaaagggaagactgaccatgttggaatgtggtgcattcctaagggatatctctagaggaatattaacttttaggcctttttccctttactcattgactctgcaacctcacctctgtgtaagatgtatagctactgtacatatttcttggatgtattgaacagctaataattgccagagccagggcacaaattgatctcttcttacttctaatccagtcctctgtctcctgtccacaatgcaatgtatagaatcgatcttttctggaagttgttactgagaaaggcagatagggttaaaagtgctagcaagagaattatcaaagacggaagccagcaaaatttatcatggagttttgactttgccctcgaactctcagccgaaacctcaagataatgaaaaggtgatcactttgccaatgataaatggattttataatccctcactgagaaagttgaatgtaaatgaagagctctgttcttttcatcttcttgcttactgactattgaaatgagacttagctatcggtggaattttggagctactattctcagtgaaattcagaattcgagaaatgttttcaggaaacatcctcctcagttcttgcctcagtttacttcgtggctcttgcagttctttccccctttgtgatctcatttacatctgcagtttctcaccaccacctcagtactgaccattcacttccctgtagtgagctcccaggccttctgccacatctccttgttttttggatatctcttctcgaagcttccacgagtgcctgctgacatctccctactccccacacacccagctttccactcacagtctctgtggtatggccatccttcaagtcagccaacttccccacttctggtaccccaggatccagccagcacattccatacgttttgtctgtgagagttttctagcaagttctacccttcctgttttcatcattact

SEQ ID NO: 119581 - DNA, 1085 bp, Homo sapiens
caaaacaaacctactgctagggccagccactcagaaggcatcacatgctagtctcagtctgttcatctaaaccactgtaaataagtcaggacaaatgatgtacatggttttggggttttgttttatgtatgtatttatttattttttattttttattttttgagatggagttttgctcttgttgcccaggctggagtgcaatggcgtgatctgggctcactgcaacctctgcctcctaggttcaagtgattctcctgcctcatcctccctcgtagctgggattacaggcatgcaccaccccacctggctaattttgtatttttagtagagacagggtttctccatgatggtcaggctggtctcgaactcccaacctcaggtgatctgccctccttggcctcccaaaatgctgggattaccggcatgaaccactgcacccggcctcatttatttatttttggatactgctgttttgaactataaatcatgctgccactcccatctgcagactgctttggctacatcatgttgaaagatttcttgagtttgttttgcattggcacttatcagagctccttattgtaggatcaaggcttgaggcaaagagaagggaaaaaaccgactgaacctgcaatagaagacctttgcctctcttttctcactccaactttccccttctgttctccacaagacctgccaaggacaaattttacagaaaagggtgtggttctagtaagaatgaagagacatgaaggcatcaaaatgggttattggattgttcccttcatacagtcacatttctagagtgtgtgtgaatatacataataaaatagtaatatatatatatacacacacttatatgtatatataaatatatttatgtgtatatatgtatatatcatatgtattatatgtatatatttaaaaatacacatgtaatatatattttaaatatgcatacaaaaatatatctcttaaagtacatataaaaaacatttataaatgcatatatgatatattcatatatgtatgtgtataaaatattttatataaaatatatttttatataatatataaaatttatt

SEQ ID NO: 119582 - DNA, 1822 bp, Homo sapiens
tgtataatatatatcatatatatttaaatatatataaactatatataaaatatttatatatttatataaatatatatattttttttcccatgggctaaaggggaggcagtgatggggaagaaaagagtggaatttaacctccgggaataaagcatttgaaaaccttaaggtaaatgctttttttttccattactaagaacagaaatcaaaatatcagttcattatgagggtcagaagtgttggatattttccaaaagagaaacaacaacaacaacaatcatagctaatgcttatggaacatctaccaggtgcccggattcttgccaaaccctcaacaagaggtatctcatttagtcttgacaaccatttgaaataagagccactgttctttatcttttcacagtgggaggacctggttgtgtaaagaggttaagtaactttacccaggcactgtgagcagctgggatttagccaaacagactggcttcagcacctggaccagggagctgtggaattaaggctctggtttctatccagctgaatgacattggggagaatatttttaaaggcctcaatgtgctcatctgtaaaaataacggggttgtgatgggtgatctcaaagatccccgccaactctctagcagctcaccaaattaatatccaaatcaatatccatcgcatccacggcactgttgccattcattcctacagttcactgtaggaagttaaggggtggagtggagcagagagggggcagggaaatggctgcattgtgaatcaaatgttttcctaacaggagcagctgttccaactggcacaagccccggcaggtacgattgctaggtgactacaggagtgagatgggagcagggcccactcttaacatgcctcgtgtggctgccacagttgatcctttagttgaccagttaatttctcccttggaagtgtccttaccgtccgcatcaatccccagtgcacttcacattggctgcgagatcgcttgcagcactgcaagcaggtgaactctgagaaccctctgtaatgcgaccagacctgtgcttttcctggttcccctgaattacactggctgatacttccaggaattctgcagcagccctggtggttttgttctttcttcagaaaaggaagttggagagggggttgggtgggaaggagaatgagaatcctttaagttctttgaaatgacctcaaatctgaggttgtcaggcttttaaagagagccagtaggtagtcactccacatattgtagataatactgtgtcaacagctcaagttatctgaagctctctttgtgaaatgggacccaacttttgctctctgggaacactatcacatttctctctggcatgcaaacttaggtgtgtttgatgaagggagcctgcctctccactcctgtgggtatttcttgcaaggtggagatgagagactgagaaaagaaataagacacagagacaaagtacagaggaagaaaagtgggccctgggggaccggcgcttagtaagtgaggaccaacaccggtgctcacttactctgagtctctgagttctctcagtatttattgatcactatttttcctatcttggcgaggggaatgtggtggggctatagggtgaaggtggggagagggtcagcagaaaaacatgtgagtaaaggaatctgtgtcataaataagtttaaggaaaagtgctgggcctaaatgtacacgtaggctagatttatatttaactttacataaacatctcagtgcagtaaagagtagtattgctgccatgatgtctcacctgtatccataaggcgattt

SEQ ID NO: 119583 - DNA, 3278 bp, Homo sapiens
ttgtgggaaaatatattaccatcacctttgcgaagtgtcccttgcaaggattacctgacccagaatcactacatcacaagtcccctgtcggaagaagaggctgcattccctttggcctatgtcatggtcatccataaggactttgacacctttgaaaggctctttagggctatctatatgccccaaaatgtctactgtgttcacgtggatgagaaagccccagctgagtataaggaatctgtgaggcagttactgagttgcttccaaaatgctttcattgcttcaaagacagagtctgtggtttatgcaggcatttccagactccaggctgacctgaactgtctgaaagaccttgtcgcctctgaggttccctggaagtacgtcatcaacacctgtggacaagacttccccctgaaaaccaaccgggagatagttcagcatctgaaaggatttaaagggaaaaatatcaccccaggggtgctgcctcctgaccatgcaattaagcgaactaaatatgtccaccaagagcatacagataaaggtggcttttttgtgaaaaatactaatattttgaaaacttcacctccacatcagctgaccatctactttggcactgcctatgtggcgcttaccagagactttgtcgactttgttctacgtgaccaaagggccattgatctactacaatggtcaaaagatacctatagtcctgatgagcatttctgggtgacacttaatagggtttcaggtaggtactaatttccattctgattgatagattgagtttgctaacattctgctcgcctagagaactgactcatttgaaattattatgaaataaatttaaatacttagaaaactattagtttggttgcttgtagcaacagtgtattgctgactgttgtcttatcaatatgtgtgatatagtgatctaagaaatgctggctgcagtcgccccagcaaaactaactttgattacatagttgctgaattttaactgttgtttgaattaatacttttcgtagtccttgataaacacagctgtaacaaacaaaattgacttttaaaataagcattctagaatttaggagttgaaataggtgatgtttctttcggacggatgttagacatcgctttcattgatgcagtctcattgctcaaagttcatggagctgttacaggggtacttactggttttagaatcttggaagctgcttcggatattcacaaatcaccattctggctgaaacatctctggtttaagatctgaacaagtagccaggtctcagctcttcttgtttctacaaatctaacctgatattttagcctggaggagtgggtaacaaagagttggaacatacggagagagaatctagctacagatgatccaaagagaattctcaatttttaagtcataggtttttattggacattccaatttgcagcttcttgtttttatatactgtgcagtctttggttgtttatgataatttgggaaagcgtccaaggtatgccaggcagctgaggcagaagatagcaccaagctccctcgttggttcaggactgggtttcttttctaaactctgtttcccataggtggtctgtgacctgcgttacgtctttcctgtgtgtccccacgtgcttgttttcaacagtgacccagcatggttgtgggtgactggtggttctcatgagcacagtgaccccgacaagcctcacatacttcctgtctacacacacacactgcacaaccacaccacacatacatacacacctgcctgccattcttgaaataactcccagctcttatgtctagtgtcattatcattggcatactttcaagtgctgtttgaagccacctcttgcctgaaagtagactcaatgcagaaaggtccccaataacacggcattcctaagagctaaactagagtggtggtcacaaaaatctacttagagagggacagaaagaggatgggcaaggtggctggagacgagagaattatgctgtctcatgcgcaatttattttcagagatgctaaactgtcaggtcacaaagacttgtaggaggggtggtgaaccaacatttatcacagtggtgagagcgttaaccctttctttacaatcacctattttaaacgcatgtaaatactgcatgcgtggcatttaatcttatttttgttggtatagttggtgatagcctacatcgttccttttaatgataggaagtcatcgtgttagcctcacgtacagatgaaaaacatgaggcttagagagactgaagcaatagtatgttcacgttgttcacatagcttttcataggcaaagctggaatctgaccctgcatttgtgtggcctgaagtgtgagccgtttctcttgcactaggaaaagaaggaatgagcatttcttttttcctgtatatctaaagcaaatttcctgcagaatcccgaaaaagggaaaggattgagggtgtttggaaaaaatgaggagggctgtggaaggaagtttcacctgatcacttagagctggagatgaggttagcagggatatggtgtgtgtgtgtgtggtgtcccaatatgcttgtgtggtgtgtgtgtggtgtgtttgtagtgtgtgtgtgatgtgtgtgtgtgtgtgtgtgtgtggtgtatgtgtgtttgcagtgtatgtgtgtggtgtgtgtgtggtgtgtatgtgtatgtgtgtggggtatgtgtgtttgtagcgtgtgtgttgtgtggtgtgtgtgtagtgtgtggtgtgtttgtagtgcggtgtgtgtgtttgtagtgtgtgtggtgtgtgtgtatgtatggtgtggttgtgtggtgtgggtgtgtgtgtggtgtgtatatgtggtgtatgtgcgtggtatgtgtatggtgtgtgtgtggtgtgtgtgtagtgtgtggcgtgtttgtagtgtggtgtgtgtgtagtgtgtgtgtggtgtgtgtgtatgtgtggtgtggttatgtggtgtgggtgtgtgtgcgtgtggtgtgtgtgtggtgtatgtgcgtcatgtgtgtatggtgtgtgtggtgtgtgtgtttgcagtgtatgtatctggtgtgtgtgtggtgtgtatgtacatgtgtggggtgtgtgtgtttctagtgtgtgtggtgtgtagtgtgtggtgtgtttgtagtgtggtgtgtttgtagtgtgtgtgtagtgtgtggtgtgtttctagtgtgtgtttgtagtgtggtgtgtgtttgtagtgtgtggtgtgggtgtatgtgtggtgtgggtgtgtgcgtgtctgtgtaga

SEQ ID NO: 119584 - DNA, 1995 bp, Homo sapiens
ctcgatctcctgacctcatgatctgcccgcctcggcctcccaaagtgctgggattacaggcatgagccaccgcgcccggcctaattttgacctatctttttatggctttttaatgacatcctctcataaagaatgtccttcgtgtttgatgcccttcctgtctaactcttcatcctttatgtctaactctgtctaactcttcatcctatatggcccaccttggaagtcacttcctctggatgccatgtctgatcaccttcctcccagatcgtgtttcaactctgggttctcctggacctaatgccactgctgccagcattgaattgtagtcacctattaactgaatagctcttctaccagacctcctcagtatttgagctccttaagcataagaaaagtgacatctgtctttgtgttctccaccactactcctacgctgcatgcatcactatgcacctgcctgatctgatgatatgcagggtgctagatggatgtggaagggtcgggaggggcaggaatgtgctggagagttctgagaagatgggcagaacctatgaaagtgtaccctgtacctaggatgggggataatttttggtagtagggattggagaaacagtaggtaaaactccacaatggccaggccaacaaatgatatcagtaaatatgagagagtcctgaaagaattagcgagccccactttattccagataaaatgttaatgggatagagtctttccttagaaaatgtggctcccacacagccaacctgggcccatgatgcagtcggattctgatgccaagagaaagtcacagcaggcggcgtatgcagacgcctccacttagtttctgccttccttgcacctggtgtgagtttcttccacacctgccacccactccctcctcctgctagtaccactcccgggctactcacattcatgcactgggcttcttctcacttaatttaatgtagacttctcctgaattgttggcttaggaaaaaaaccaagactataagaatatgagaggctaagaagagacaacaatagaaagaaactcaaaacgtctctccagctctcaacaactgtaaacactgagctatttagaaggtatatgttctctgcaggaaggtcactgggaccttacgtctgggtgtggctgaatcagtcccagtctttttcaaagtatgcattgtgttctctctacatcagcccagactttgaattcagtttctaggaccacaaaggattcattcactcatgctgattggacccgtgactgagaattaattacaaacgttgaatgatggggtagaatcatgtcttaacaaacgtcaccaggacgttcgagtctaaaataacgctacttgggggggctggaggacaatccacactgacatttgtcttgtcaatatggagataaattctggctgaaggagaaattccacaaaacagatacttccataggttcgtatccattgaacagactcttaaaataatatttttggatagccagatgatattaagtatgcataataaatgagaacatgattttcaaaatattgcgttagtgatgtggaccagtctggcttatttaacctcttcagtaaagggctctaggctcttcccaggtcagtaattcaggtaggatcacaggggaagattttaatttacaatgtatcccagctcttgtgagcacctagattgatgggtctacatcataagatgctgggctcctggtagagaaaccttaggcaggttataaagtatttacacagtaaattatgctgacgctatagccatttgtagaatcatttgtgacgtttccagccactggctccattgtactatttgggaaggatcatctccttcattggagaatctgtaccctaacatttctgttcgccacccctaaaaaggaaataattgggaaacgctactcttaatgagctcttttatttttatttgtttgtttgtttgtttgtttatttatttgagac

SEQ ID NO: 119585 - DNA, 1022 bp, Homo sapiens
cattcatcctcctgtcattccttatcgattgtataagacagttttttctagaagcaggagttgtttttgtctttgttttgttttgagatagggtctccctctgtcacctagactggagtgcagtggcattaatttagctcactgcagcctcagccttctgggctcaagtaatcctcctgcctcaggctgccaagtagcaaggactacaggtatgcaccactacacctggctcatttttaaattttgtgtagagatgggatctcgatatgttgcccaggctggtctcaaactccagggctcaattgattctctcctcagcctcctacaagtgctgagattacaggtgtgagccattgcacctagacagttgtctttgttttaaatgaagtattgcattttgatggcttctaaaaacaataaaatattagtggtatatcaaagctatatataattgatatatgtatatatcaatgtccatagtacaatgatcaatatatactcgacgtctaaattatctcttgaaaatacatatctcttccctatttctctttacacaatacaaaagcatctccttccatcctcctttgtttgagcccacatgctatcaggtaaacgactttggagacagacgtagtgtaagtctgtcctcccaatacttgccaactgtgtgacactggtgttagtttacactgagccttagtttactcatctgtgatgatggagataataaatagtacttagttcccagagaagttgtgagtattaaataagctaatgcatatagtacaggggttcctagacttggccatgcctcagaaccttctgcaggtcctgttaaagcacagatttctgggccctaccccgaagtttctgattcagcaggtctggagcagtccccagaatttgcatttctaacagtttcctgggttatcctgcagcttctcatctgggggccacactttgagaactgctgacacggaccatcttttacagagactggcacatgtatagatttgcagcaa

SEQ ID NO: 119586 - DNA, 1202 bp, Homo sapiens
gttaattttggttttaggacattaaagaaagtttttaaggtgtttgagaatttattagaaagtaggaattgccttttttttttttttttttttgagacacgatcttactctatcacccaggctggagtgcagtggcatgatctcggctcactgcaacctctgcctcctgggctcaagcaattctcgtgcctcagccttccgagtagctgggactacaggtgtgccctaccatgccaggcgaattttttgtatttttagtagagacggttttgccatgttgcccaggctggtgtcaaactcccgagctcaagcaatctgcttgcctcagccccccagagtgctgggattataggtactagccaccacgcccggccaggaattgtcttaattcaacttccaccccataaaatatatctggaattggtctggagacagtcttatagcagtgactacgacttgctaacatttcttttcaaagatatttgtaaaagggctagaagaatctctgggtgtctccaaggctatgagggtttttgttgttgttgttgttttgctttttttgttagagatggggtctcactctgttgcccaggctggtcttgaactcctgggctcaagcaatcctctcaccttgtcctcccagagtgctgggattataggcgtgagccaccacgcctggccaggatgtgagtgttgatgaccccagaagacactaaggattggaacagtagctcatgaactttgactttttaaacacttcacactgcacagttaaaaacagtagaatactaagcaaatggaaagtaaggattatgagccatgcgtgaatgtttaattttctttttttaaaaaagtgctttcgagtactgtgtaagagaggctagtgacttagatacccacactatacaattctgttctaaattttaacctttgtctgtagataactgtttggccttgggcatgtcacttaacctctctgggcctcagtttcctcatgtgtaaaatgaggaaattgggctaggtcatctccgaagagattcctgtattattttgctttaactctggagcatgcagtgaaaaaagcagaagtatttgaggcaggcagacttaggttttgtttccctgctgtcagatcttgagcaattaacgtatcttaacatgggcttccggtgacttatctgtaaattgaggacaataccaat

SEQ ID NO: 119587 - DNA, 1142 bp, Homo sapiens
aagtgatccacctgcctcagcttcccaaagtgctgggattacaggtgtgagccactgtgcctgacagtcttttttttttttttttttttttaataatgctatcttaaggtttttgtttgcttgtttgttttttggtttgttgtttgtttgtttgtttgtttgttttgagatggagtcttgctctatcaccaggctggagtgcagtggtgcaatcttggctcactgcaacctccgccgccccggttcaaacgattctcttgcctcagcctcccatgtagctgggattacaggcgcacgccaccacgcccggctaatttttttgtattttagtagagatgaggtttcacaatgttggccagcatggtctcgatctcctgacctcatgtgatccgcccgcttcggcctcccaaagtgctgggattacagacgtgagccaccgcgcccagcctatgctttcttaatgattgttacttgtaggtattagatttcataatgtgtttttttatttgatctttgttttttgtactttaatgtattatttgaaattattctaataaccactgtcctatttggcagaagttacagaataatagttttaagagaaaataagtaaagactcacaaggtaaatatgccaaaatgctaacactagctaatttgagggagttggaaaataaacaattggctacttctttgaacttttctgtactttgaaaatctccaagacttaaagaaagttgctgtatttggtgaaaaataaactctctccttactgagacataatacttggtgctttagtgctatagataatactatgaagtattatctctgggccaggtgtgctggctcacgcttgtaattccagcactttgagaggccaaggcaggtgggtgtctcaaacccaggagtttgagaccagcctgggcaacatggtgaaaccccatttctacgaaaaatacaaaaattagccaggcacggtggcacatccagctagtcccagctacttgggaggctgaggtgggatcacttgagtctggggaggttgaggctgtggtgacctgtgattgcaccactgcagttcagcctgggtgacagagtgagaccttgtctcaaaaaaaagaaaaagaaaaagaaagaaaaatg

SEQ ID NO: 119588 - DNA, 3782 bp, Homo sapiens
tgactgagtcaatggggccacccttgcattgggaatggacgcgcgttcattcctttaacattggttgagagtctcctggtggccaagtgctatgaagtcaaaggcactgtgagaactggtcctctgctcagtgcagctttttcctataacaggtgggctgatgccttcaaggaggtgatgtgagagatccgttaaaatgcatatattcctagcagtgggaacaagttagttacaattaacccaaggatatagggaccagattcactcacaagagaagattttgagtgagaatagttagtaagagactaacctacaaacctgatgaagactgagggagagaggtcaaggaggggaggaaaaaaggacagtgctgttgctccccaggacaagctgcatcctcctcccagtgttgcttacagctgagagctactcacacttgatcacacacaagaatcttctggggattttgtgaagatgctgacgttggatgttgatacaagaggcctggcgtgggtctcaatttcttttttgagacaggatctcactgtgttacccaggctaaagtgcagtggcctgattttggctcactgcagccttgacctcccatgctcagatgatccttccacctcagtctcccgaacacctggggccccaggcgcacatcacaacacccagctaatttttgtattttcatagagatgggatttctgtatgttgcccaggctggtctgaaactcctggattcaagagatctacctgcctgttacaggaaagggatcccgatccagaccccaagagagggttcttggatcttgcaaaagaatgaattcagggtgagtcttcagtgcaaagtgaaagcaagtttattaagaaagtaaaggaataaaagaatggccactccatagacagagcaaccccgagggctgctggttgcccatttttatggttatttcttgaagatacactaaacaaggagtggattattacccccgtttagaccatagagggcaacttcctgacattgctatggcagtggtgggagtgtagcaggacgaccagagattgctctcatcgccactttggttttggtgggttttgggcggctcctttactgcaaactgtttatatcagcaaggtctttatgacctgtattttgtgctgactcctgtctcatcctgctatgtctggaattggtgggttcttggtctcactgacttcaagaatgaagctgcggactctcgcagtgagtgttacagttcttaaaagcagcgggtctggagtttgttccctctaatgtttggatgtgttcagagttttttccttctggtgggttcgtggtctcgctagctcaggagtgaagctgtagacctttgcagtgagcgttatatctttcaaggcggtgcgtttggaattgtttgttcctaccagtgggttcgtggttttgctggcttcaggagtaaagttgcagaccttcgtggtgagtgttaccactcatataggctgtatggacccaaacagtaagcagtacaaagatttattgcaaaggacaaaagaacagcacttccacagtgtggaaagcaacctaaacagggtaccgctgttagttttgtcagcctgcttttattctcttatctggccccacccacatcctgctgattggtctgttttacagagagctgattggtgcatttacaatccctgagctagacacaaaagttctccacctccccactagattagctagacacagagtgctgattggtgcatttacaaaccctgagctagatacagagtgccgattgctgcattcacaatcccttagacataaaggttctccaagtcctcaccagagtaactagatacagagtgccgattggtgcactcacaaaccctgagctagacacagggtgctgattggtgtgtttacaaaccttgaggtagatacagagtgctgattgctgtatttacaatcccttagctagacataaagtttctccaagacccaaccagagtaactagacacagagtgccaattggtgcattcacaaaacctgagctagacacagggtgctgattggtgtgtttacaaaccttgagctagagacagagtgctgattggtgtatttacaatcccttagctagacataaaggttctccacgtccccaccagactcaggagcccagctggctttacccagtggatcccgcaccagggccgcaggtggagctgcctgccagtcccactccgtgcgcctgcactccttagcctttgggcggtcgatgggactgggcaccatggagcagggaggggtgctcgttggggaggctctggccgcgcaggagcccatggcggtcggggggaggctcagacatggccggctgcaggtgctgagccctgccccgctgggaggcagctaaggcccagcgagaaatccagcacagcagctgctggcgcaggtgctaagcccctcactgccccgggcggcggggccggccggcttctccgagtgctgggcgcccccagcccacgcccacccggaactcacgctggccggcaagcgctgcgcgcagccctggttcccgccggcgcctctctctccacacctcccagcaagctgagggagctggctctggccttggccagcccagaaaggggctcccacagtgcagccgcgggctgaagggctcctcaagtggggccagagtgggtgccaaggccgaggaggtgccgagagcgagcgagggctgctagcatgctgtcatcgctcaccgtgacttagaatgcgtaaccatctgggaatgcggtccagtaggtttcagccttattttacccagctcctatttaagatggagttgctctggttcacaggcctctgacacctcagcctcccaaagtgctgggaccacaggcatgggccactgcacctggccagagtctgcatttcttcttttttttttttttttttttttgacacagggtctcactctgttgcccaggctggagtgcagtgctgcaacctcggctcactgcaacctccacctcccaggttcaaacaattcttctgcctcagcctactgtgtagcagagactacaggtgcgtgccatcacacccggctaatttttgtatctttagtagagacagggtttcaccacgttggacaggctggtcttgaactcctgacctcaggtgatccgcccgcctcggcctcccaaagtgctgggattacaggtgtgagccaccacgcctggccagattctgcatttctaacaagcttccaggtgctgctgatgcccctactcttaagagccacactcaaaaagcaaggctttgtgcccactcctgccactttctgcgcctcagaattctttgcaaaaagagtagaattcaacttgttctgtttgcccttctttccccttctgcttttaaaaatgtaatgttttaatgcacaaacatgcataatatgtaagcacatacgtgtttgacacctgtcatcaaacagaaagtattgaagttgaggtttggaatttcagtaacacgaggttagtaggtgttatgtgttcattttataaagacagcaggtaattaattataaatgtcacgatcttacctctgcaataatggaatctgtttctgagtaagagtcagtttgggattatcagtattaaagagaatgaaaaaggaagaaaaatgtcttgtgctttcaaaaatagtcatttcaacattaaatgactttttgtcatgggaatgtactcttcatacttttatgatgtagttatttaa

SEQ ID NO: 119589 - DNA, 1012 bp, Homo sapiens
ctgcaacaaattaccacaaattcagcagcttcaacaacataaatatattgtcttacaattctgcaggacaaaagcctgaccaggctgaaatccaggcattggctgggtcaggttcctgtctgtaggctctgaatacaatccatttccttgccttttctagcttctagaggccactcacattcctggctggtggcttcttcccccatcttcaaacagcaaaggcagagtcagagtggagccttcttacatcgtgtcactctgtccagctcttctgtttccttcttccaatgttgaggacccttgtgattacatttggctcacccagataattcaggataacctccctattttaaggtcagctgatcagcaactttaatctccctttgctgtgtaaaataacatattctcaggttccagggattaggatgtaggcatctttgtctgttctgcatgtgtgtgtttgagggagtgagtgggtggaggccattattctgcctaccacaatatatcttatcagtaattaaaaagaatcttctaagagaggactattgaaatttgggtacagatagcatttgcacagtgccattgcatcaaaattcagattgcattactcactggtggaaaatgctgtaactctaaagcaaagtatttctcttttagttgcatttatgttgactcccatgttttccttttctttttttaattttttttttttattttgagacaggggcctgctctgtaacccaggctggagtacagtggcacaatcatggctcattgcagccttgaccttcctaggctcacatgatcctcccacctcagcctcctaagtagatgggactacaagcacgtgccaccgcactcagctaattttttattttttgtagagacagggtttcattaggttgcccagggatcttcttacctcggcctcctaaagtgctgggattacaggcatgaaccactatgtctggcaacttcttctctagtaatgatttatatattataatct

SEQ ID NO: 119590 - DNA, 2069 bp, Homo sapiens
caattgaggagagggtgctatcggcatctattgggtagaggccaaggatgctgctaaacatcttacaaaacacaggacagcccccacaacaaagaatcatccagcccaaactgtcaatcgcgctgaagtggagaaaccctggcttagcaagatgccaacctacagcaccccacccctcaaccgaattaggtattagtaaatggatcagaattgtattagtatattgatttgtatattgattgaattagatgttatactaattagatgatgagtcaacaactaaaattctggtcaaaagatcaactggaggaaacagaagatgggtagatcagtacataccaatctgtgtgaaatgcgaaaggtaataaactgaaagaaagtaagcctgacttagaggcttaattgatgaaattgatgcccttctctcatgactctcatctctacgcttcttctttatcaacattgcaggtgttcctggctctatgccaaatgcatcctggactggaaacctcagagctataaagtggagtgacatggaagacagacacggaggctgccacggtgaggctctcgttccatgcttctaggccactgcctgttggtgttagcaggaaggtagctgtggaatccagggttctcatggagagagaattgctgctatatttagaccaatctgttagttattggagaagccagaggcttcaagacacagtccttcaaaaataagtttaaacatctcattgatgttctctaacttataattacctagggagatggaaaaatgggttcaaatcagggcggcatgtttttcttcctgctagttttcagctttctttctttctttagagacagggtttcactctgtcattcaagctggagtgcagtggcatgaatgcagctcactgcagcctcaacatcctgggttcaggcctcacacctcagcctcccaagaagctgggaccacaggcgtgcaccaccacacctggctaatttttttttttcttgtagagtcagctttcttgtttattcctcttgctgtgccttctgggagtccagctgttcagaggcgaaagccatcaggaggagaagtgatgtcatgttggcaccgcagagaaagctgggcccccaaccctcaggccagtccctgctccccctacaggcagccttcccagtggcttggagagctgtcggggtttgcacagctctggcatgatggatggcaggttacactagcaagaagggttcccctccaaatggaaaagaactagaaatcctaagtcatttccatttctatagaattttgtgaaggagagtttttatcagtcctggcacacactgcattcagaatattgcccagcatatactgggcatgagtattagtttgctagggctgccataacaaagtggcacagactgggtgcttaatagaaatttatttagttctagaggctggaagtccaagatccaggtgtcagcagggctggtttattaaggcctctctgcttggcttgtagatagcattttctccctgtgttcccacatggtcttccctctgtgcgtgtctgtgtcctaatcgcctcttcttctaaggagaccagtcatattggattatggcccaccctaaaggtctcattttaatttaattacctctttaaagaccctgtctccactctgagacactcagtgttaggattcaacatatgaatttagagagacaaacaattcagtccataatatgcaataaatatttatttagtaagtgattgtttgaacaaatgaatcaatgaatgaatgacaatatggtggtttggccttttctctctatggcaacgagactttgcctctactcctcagtccatcttttttttttttttttttttttttttttgagatggattctcgctctatcaccaggctggagagcagtggcgccatctcagctcactgctgcaacctccaccacccaggttcaagtgattcttctgcctcagcctcccaagtagctgggataacaggtgcatgtcaccacgctcagctaatttttgtatttttagtagagacggggcttc

SEQ ID NO: 119591 - DNA, 1010 bp, Homo sapiens
gatacaacccagctggtatttttgagctattcatgagctactcatgactgaagggaaactgcagctgggaagaggagcctgtttttgtgagagacttttgccttcgtaatgttaaccgtttcaggaccacgtttatagcttcaggacctggctacgtaattatacttaaaatatccactggacactgtgaaatacactaacaggatggctgggtagagcaatctgggcactttggccaattttagtcttgctgtttcttgatgctcacctctatattagtttattgttaggatcaatgataaatttaaatgacctcagatctttgcaccagatactcatcatatacaaatgttttagtaaaaaagagaattgtagataatactgtctaggaaaataagaattaggtttctttgaagaaggaatcttttataacaccttaacagtcaccactgtgctcaaccagacagatagtgaaacagctttctgggtaattcaccaatttcctttaaaacataagctacctgaatggagaatacatcttgtttctgagtttcaacactagcatttttggcttactcatggacaaagttctgtatatagtataaagtcattaacaagaaacaggatatgctttaagacagaattcactgtctgttgcttcagtaaaaggacctcggggaataaaacatttctctcttatatgccagaatgtaggctggtccctatgtcatgtcttccattaagaacactaaaaagtccttgcaagaatggagatatgcattcaagagaggtgctatcacatagatctagtctgaagtctggaacactttcctcttctatgacccctctctccccagtattatcttacttgcaaaatggagaccaaattctatcctgtgaggcttttaattgcaccatagtatgctctgagtagctttacactgcctggtactgatagtagtggctcgatttttaagagccttcaattgtagatgaacatctctgttatt

SEQ ID NO: 119592 - DNA, 1953 bp, Homo sapiens
tggttttctttttcttttcttttctatttctttctttccttcttttttgagatgcagtctttctctgtcacccaggctggagtgcagtggcagagctcggctcactgcaacctccatctcccgggttcaagcgattcttgtgcctcagcctcctgagtagctgggactacaggcacacaccaccacatccagctaatttttgtattttcagtagagacggggtttcgccatgttggccaggctggtattgaactcctgacctcaagtgatctgcctgtctcggtctcccaaagtgctgggattacaggcatgagccacctcgcctagccagtgtttaattttctcttcctgcattagtttgctggggataatggcttccaactccatccacatccctgcaaaggacatgatctcattcctttttatgggtgcataaatcctatttttctaagagttgctaatagataagcttttttctagggaagcaaatgtgggaaaccaaactttccaaagtgagaaataggataatagggagaggaaaatatgaacaaatgaatgagaagtgtgtggaaatggatcaaaacagatctgagtgataaggattggattgtggctgattgggtagctaattcactgtttagaaagtggaagtcatgtggcagtacacctggtttgttccccagattagcttgttagctgattagttttgtttacttctgctcaaactatcctagccagccacctcctaaatttataatttgaagacataaagcaaggacgtgaactgatttgttcaaatctgtatctaaactggagatactctgctgaaaatatttgcatagatttgaacaactgtacttacatgaaaaaatttaaggtatgttttagtaatattaagacattgaggccaggcacagtggctcacacctgtaatcccagcactttgggaggctgaggtgggcagatcacttgggcccaggagttcaagaccagcctgggcaacatggcatggtgaaacactgtatctacaaaaaatacaaaaattagctaggtatattgatgtgcacctgtagtcccagttactcaggaggctgaggtgggaagattgcttgaacccaggaggcagaggttgcagtgggataagatcatgccatagcacttcagcctgggtaacaagagtgaaaccctgcctcaaaaaaaaaaaaaagaaaaagaaaaaaaggtattgagtgttttacttagcatagcatagccttcaaatcagaaatggagtttgcatttaaaatgaatattatttttgcctattttggtttttccataggtacaataacttgcctgaaattctatggcaacaggcatttaatcagtggagcggaagatggactcatctgtatctgggatgcaaagaaatgggaatgcctgaagtcaattaaagctcacaagtgagtcgggctctttccctttggcattctcgatgtgccagtcaagttggggactaacttttggtttcattatagaggacaggtgaccttcctttctattcacccatctggcaagttggccctgtcggttggtacagataaaactttaaggtaagtcattaatgctcaagagcatttatctaaggtgtgtgttttactacagctctccaccatctaaaaatactgttatacaagggaaaggtcaaaagctggtgaaccttttcatagtggttcatagtggtagaatgaaaatgacaagctctgttttctttcttttttttttgagacagagtctcgctctgtctccctgctctgtcgcccaggctggagtgcggcggcgtgatcttggctcactgcaagctccgcctcccaggttcatgccattctcctgcctcagcctcccaagtagctggaactacaggcgcccaccaccacgcccggctattttttgtatttttagtagagacggggt

SEQ ID NO: 119593 - DNA, 1871 bp, Homo sapiens
ttttttgagatggagtctcgctctatcacccaggctggagtgcagtggcgctatctcagctccctacaacctctgccttctgagttcgttattctcctgcctcaccctcccaagcagctgggattacaggcgcgtgccaccatgcttggctaattttttgtattttttggtagagagatggggtttcaccatgtttgccaggctggtctcaaactcctggccttaagtgatccacccaccttggcctcccaaagtgctggcattacaggtgtgagccactgcacctggcccacctttgactttttgaacctagattattttctaaaaaacttgacttgtaaaatgtgttacgaagatgaaataggataatgaatttgaaaatgcacagtataaatatttgctatttttattactatgatcattttatgttttatttacaaaataaataaacttcgtttttttccacttacagatgctcacatagtagaatggtccccaagaggagagcagtatgtagttatcatacagaataaaatagacatctatcagcttgacactgcatccattagtggcaccatcacaaatgaaaagagaatttcctctgttaaatttctttcagtaagtaatcagaaatcattgaccaaagtttgtggtgatggttggaactgttgatgacattctggatgttattactctttttcctctctcctaggagtctgtccttgcagtggctggagatgaagaagttataaggttttttgactgtgattcactagtgtgcctctgcgaatttaaagctcatgaaaacaggtatttttaccaatctttggtgtatatgtctagtcttaataaaaggtatatatgcagtagtttcataagccaggttatatgtttttattaacaactgcagaaataatcagacatatctacatgtacagtatatggtatctgtagtctaataaggtggtggaagatgttatcttcctggcatttaataatgcaaaagtgggccgggagcagtagctcacgcctgtaatcccaacactttgggaggctgaggcgggcggatcaggaggtcaagagatcaagaccatcctggccaacatggtgaaaccccgtctctactaaaaataaaaaaattggtgtggtggtgcacgctggtagtcccagttactcgagagggtgaggcaggagaatcacttgaaccctggaggcggaggttgcagtgagccaagatcgcaccactgcactccaacctggtgacagagtgagactctgtctcaaaaaaaataataataataatgcaaaagtggtgaaattgttttctggactgtcatttacacaaggtattttttaaatgtctgttagacttggagcctgaaatcaagcatatttgaacaaacaaaagactaaacaatcttgagctttgttcccatctacttttgtccttttacataagtccccttgcctacttcttccccctttccatgtgattttttttcctgcaggagaagtgaattgacgttattgagttcctgttttgtgccagcttttattaccttttaatgctttctctatttctagggggtagatagtctcaaagtaagtagttaagtggttggccaatattaccccaatagtggagctgagagctgaacccggttttatctgactcttatatccctgctttctccagtaattttgaaaaaggtgatctaatatacagagttagattttgatgtgatccatttgcatgttctatgtctcaaatgagtcttaattcttatttcttaaacagtggttaagttttaagaaatccatacttagagtactgcagtcagtagtataaaggccttactcttctcctatat

SEQ ID NO: 119594 - DNA, 1076 bp, Homo sapiens
ttatgaatgtttgtttcttctgtttagaaagttcccccatctttactctgtgaaataaacactaatgccaggctgacgtgtcttggagtgtggctagacaaagtggcagacatgaaagaaagccttcctccagctgcagagccttctcctggtaatcgaatttgattgttttgaaattttgaataatctattatctcttaaattgtagaagtggaggagatccagataatttcactttattgacagcttgtgtttatttcattcaaaggggaaaacagtctttttttaaaagcactctcttttgtgttttagtaagtaaagaacagtccaaaattggcaaaaaggagcctggtgacacagtgcacaaagaagaaaagcggtcaaaacctaacacaaagaaacgcggtttaacaggtgacagtaagaaagcaacaaaagaaagtggcctgatatcaaccaagaagaggaaaatggtagaaatgttggaaaagaagaggaaaaagaagaaaataaaaacaatgcagtgaatcacagatgtctcctgaaagaactcttttagatgaaatcattctactcaaatgtaccttaattttttttttttccctgagtaaaagcaagaaatttcttcctttggaaaaaatatatatattaaaaaaccacttttagatggttttttttaaaaaaaaaaaaaaaactggtaaaattacttttggcagacagtgttttatgaattatgtatcatgttgatatataatatgttaatgtgtcatgtaatttttactttgtacaaagcaaataaagatctttctcaaaatatactgtaaaataatataaaatattgaacacattctttatcagatttggatgaaggagtcattattcaaaattttctcttaaatgggaaagaatttaagaactgcctttggcttcttcaaatggtaagtagtaattttagattttcataccaaccagacaaacttaaaagattatacatatataattatacatatctatgaaacaaacatatgcttaagtgtaggaccacgtacctaagattatagagagattgccagact

SEQ ID NO: 119595 - DNA, 1484 bp, Homo sapiens
taccctccccttctgccctcctaacgagaactgtgagttggatgcagaagtttctaaaaaaaaaaattgagtattgaaattggctgttgcatcagtgaagaaaagcaacatccctaccacccctcaaaagagacattaaagtagttggattaagggcacgggagtatttgctttccgatttagtgataatgtgagtgcttaatgaaatgactaacacattccctgattatagagctggtcagtggatcttgctgagtttcctgtggacctatgtgaaatgatcggcatctgttcagggtttactaggtgctaagcacctttacatgtgacatccattgaatgctcacaacacccccaggaaattggtaccagtgttatcctcatggtacagtgaaggatactgagacttaggttgcatagcctgcaggttggacacacttctttctgactgctggggagctgtgcttttaaccactgctgatccggcttgttttccccagatgcaggcctggggtagtctcctttctggactgagaagagaagaatggagaagcccctcttcccattgtgagtagacagtaaatggttagagagtagccaggagcttctggaaaccagagttcctttcctcagctgaaaagaaccctaagagtagactgcctgggatggcgtgcgggatgggaggatcactggacctgtgggccagaaacttgggtttgagtcccagctctagctttgcttagttgtgtgactctcagaaagtcatccaacctctgtggtgcttattttcagtgatagtacctgtgggcacataggacctgtggggaatgattaccttttagccccatcctatgacaatatggtttgtttttaaatccaggttagcactgacttctcactgacttctcttgtgttttcagagtgcctttgcattggtttggctttggctacacagcactggttgtttctggtgggatcgttggctatgtaaaaacaggtagggttttgttgttacttagcctcttaacatcttcacgttgttccagtgaaatgtgagtgcctgtgtccctgagaagcaatctcgtttgactcagctttgctgtaggtccccaagctggagtgcaggcttccttgtcagtcttgcagctcctgcccttgccttttgcttatctggtgaagctgagccaggcctcttgtggaattacttatttttgcctctttatctaaaggtaggcaggggtggttgtagtttgttattatcattgactgccattcatcagccatgacccccaagtgccatctctgggcttaagtaggagtcaacctctggcctacacagactggtattttgaagtttcctcattaggccaggcaggggtgtgtcagtggctgtgcttgtttttgccccctagtccttgcctgcattcccaccccaatccctgcaccagacttcttattctcctgatcttctattttttttttaa

SEQ ID NO: 119596 - DNA, 1091 bp, Homo sapiens
tggttgtcgtttgtcttcagtctgcttcctgccagtgcagcagctcctgctagatcttgacatcctagtggccagatcccaggggcggtgctggtcctatccgagctctctgcctcatctcccattccttttttccacactcagtgtgtattctcttggatttccataccctgttcctcctaccatccacctctctacctgttctcttcctccatgaggtccttttctctcctgtcccttaatgctggtgttccttgggggtctactccaggtctctgcacattcgcagtgcctctgagctggctccttcagcccacaactctgtaaccaccacaccctgatcatcaccaatctccacgcctgcccacttgccctctgcctgccacaacatgaatgtcctctgggtaccatgtctttcccccaatcctgattctcctcctatgttgctattcatggacaacgcaccccccagtcacctgagctgcaaacttaggagtttatatttccctctttccctaccacctccaccccgtgaacctgcttagttcccttcttcttcaccctctgccactgctgtggttcagaccctcatcctccctcatttcagctcttagcagtgacttcctcactggtctccagactttagatttttcctcatcaatgcatccctatgctaacgccagattgagcattcaccaatagtgatgatgatgatggtgttgataatgatggcaattatgctagctgacgtttaatgcgtacagattctatgccacgtgctctgaagagtctcatcaatccctacaacaaccctacgagaataggtccacttacaaccattttacagaatgaagacagacacagagagcacttcagagataggggcttcgcagtgggaaatacacccccatgtgaagaagtggggtcgtgagaaagcctggcgtgttcagggtgaactgaacacccctgggccttgagttcagaccccagctcagtctcttactaactgtgagaagttaggcaagttactcaacattggagagccacacgatatggatactaatatgatctaagcgggctgttgtatggat

SEQ ID NO: 119597 - DNA, 1038 bp, Homo sapiens
ctcatgcctcaccctcccgtataactggggttacaggcatccaccaacacgcctggctaatttttgtatttttagtagagactgggtttcaccatgttggtcgggctggtcttgaactcctgaccgcaagtgatcctcccacctcatcctcccaaagtgctaggattataggcgtgagccaccatgcccagccacttttaattttttaatgcaatttatttctcaaatcatttttttctggttatcttttaaaagaggcactgtatagggaatgatggctgctttctaaatctttgaagctcatgtgggctaatgataaatgcctcgcacagggccaaccatagtttatgtgcaatacatttaggtggaactgttttccatttgttgttttctctgtgtttttataggcattgaaacacccatattttcaagttggtcaggtattaggcccttcgtcaaatcatctggaatcaaaacagtctttaaataagcagctgcaaccattagaatcaaagccatctttagttgaggtagagcctaagcctctgccggatataatcgatcaggttgttggacaaccccagccaaaaactagccagcagccactgcagcccattcagccgccacagaacctgagcgtccagcaacctccaaagcaacagagtcaggagaaaccgccacaaacgctattcccgagcatcgtcaaaaacatgccaactgtgagtagccagtcatgacacttgcaatgaaatagtttgactcgtgcaattaagatttttttcgaggcatttctaataatgttggaaaagatataaaagatttttctttgttaaagaccctgagtcctctggttggagcttgacatgagatcacttaaaattctaatatggtttataaaaagaaaaactttcaggataaaagtaaccaagtttacatgctacagtcttcagtcttttttctttttctttttttgagacggaggttcgcttttgttgcctaggctggagtgcagtggcacgaccttagctcactgcaatc

SEQ ID NO: 119598 - DNA, 1366 bp, Homo sapiens
atatatatacgtgcacacgcacacacacacacacacacacacacacacacacgtgcacacaggctgtgtgcggtggctcatgcctgcaatcccagcactttgggttgaggtcaggagtttgagaccagcttggccaacatggtgaaaccctgtctctactaaaaatacaaaaattagccaggcatggtggtgcacacatgtaatcccagctactcaggaggctgaggcacgagaatcgcttcaacctgggaggcagaggttgcagtgagctgagattgcaccactgcactccagcctgggtgacagaaggagactccatctcaaaaaaaaaaagaatatatacgagcacagaaagaggtctagtttagatcaaatagcatctggctcatgtggaatgtcattcttggaaaagaacattgccaaagaggaattctgctgtttttcttctatattactttaactgtctggcttgtccagctacactgataaaccaaaaaatatgagtgcctccttttttatatgtataatacatttggaccaaaactacaggtgatctttggaatgttcttccaaatttatttgttggttttcgtttttgtttgtgttttttgagatgggggtctcactctgttgcccaggctggcgtgcagtggtgtgatcatggctcactgcagtcctgacttcccaggctcaagcaagctacccaccttggcctcccaaagtgctggaattacaggtgtgagccaccattcctgacctgtttttcacatttaaagttgagtgcagagtagggcttattatttctttaaaacaaggtctcaaaatcagatggtattcataatgtcaaattgagttctgaatgatatatgttatattcctgaacttatgaaatagaattgttgttaatttgtttgtttttaatccactgtgtttatctattgctgcataacaaaatacctgcaaagcttagtgatttaaaataagaagaaacatttattaattcacatagtttctgtgggtcaggaatttagaagtagcttagctgggtagttctggcttgggttctctgatggcagtcagataattggccgaagtttcagtcatccgaaggcttgactgggactgcaggatctacttccaaggtggctcactcttggtttgctagggctgctgtaacaaagtatcacagactggttggcttaaacaacagagatttatttcctcacagttctggaggcaagaagtgcaacatcaaggtatctgctggttgtttcttctgaggcctctctccttggcttgtagacagccatatcctctctaggtctttatatgatcttctcgttgtgcatgtctgtgtccacatttc

SEQ ID NO: 119599 - DNA, 1051 bp, Homo sapiens
agctgaccacctctctccccatgcaggtgctctgtgaattgtatcctgggtttcagggcattgcacgatgtcgttcctgcctaaaaatttctcctcaaacaaatctagtgctcctccctaggtggctttatatagcaatttattaattatcgtctttatatcctctgctaatcttacgtttttctagtgaatggccatttttgaaacagcttaacttggtatatgaatacaatgtaaaggtaatgatataatccattgctcactgaaacaagagaagaattaaatgtctaaaattcatggctaaaataatgccttattgtaaaaataactcccaagtgataggtcatttggaattccatgcaggcatacattttaactgctttgaaccaaataaaactcgcaacatgcatttaatgtaaaaatcaatttattatacaacaatcatagataatgctttttatctacaaagagaaatggcttctgcagcctccctgtctactccattcatgatactatgttcttaagatataattactttcaaaggaaaacaaagcgatatccatattttccaaacaaggaagcccccagacacatttatgaacgatatggaaatattggaaagaactcaaatggactcctagatacaaaaggctgttctgcccatcacagtaaacactgttttgccttaaaataaaaataataaaatatttctcaaatgcaggggtgaggactttaccccgtaacatgcctaagtggttcgatatataattttgatggcttgacaattgctatgtttaattccattcagttaacattccattttgttagtttaaaaaattgggggaattattaatagatatgctttacagtatttaagtattttcattcccatgggtcagaggaaatttgagagaaaacattctccattttttttaatagattatagaaatattaatttttcaatagttttagaaaaatcacattaaaataagcattttggttttttgaagttacaacacttaacgacaggttaaaatgtttacctgattta

SEQ ID NO: 119600 - DNA, 1030 bp, Homo sapiens
ctaggccctgagcaaatgtgagtgacagtttctgcctttgagtgatttgcaatctattgatagattcgtaacactagctacaccctattatgtctattgattatggagccacagttaaagtaatttgaatacaaatgaagcagcagttcagcctgaaaaaggaaagggctgggtgaagttccagagaaaaggtggcatttaagaggaatattaaagaatatgccagacctgaagtaggaaaggagtgctgggagcagagagaagagttttcatggctggaggaggagtaagcaggccactgttccagcacacaggacaccgtggtggggagcttgcaggaggctggtggaaacagcagccacccaagcccatgggagatcctgggttcaagccaggagtcatgaacttgggttctgcggatgcagaggaggaacgtgatcacacatgtgttctggaaaaataactcatctctcactagaggtgggtggattgcttgaaataaggagaaactggagacaaggacaccaggtgagctgccttttcagcagtgagaaagaaacagcaggaaaccacaggcagcaggcagaaggccgagcagtggggcagcaccaggaacactgccatttctcacccttttctcccctttacaaatttctataggtagccaaggtgctttggtggtactatttctccaaatcagtagagttcctggacacaattttcttcgttttgcggaaaaaaacgagtcagattacttttcttcatgtatatcatcatgcttctatgtttaacatctggtggtgtgtcttgaactggataccttgtggacaaagtaagttattttgttaatttttccgttttgaggaatggctcttagagaccactggtgctgtcttgtattaagcatcgcatgcagatcaggagagcatgaagggaggcctagagcgccggccttgccgcagcaggatgcccgtgtctgccaggggtcatgtattctagtgtctggtctttgatacaggcaaaatctggg

SEQ ID NO: 119601 - DNA, 1020 bp, Homo sapiens
gatactttcccaaagctttctccttgtctctgttctctcttcctactctcctacactctttacttgccaaatatatattaatacacatacaattctgacacccctctgaacctgaagaagagtgttgtcaaaggaaaaagaggtcaaaagtggacccttgagattttctagccccattcctggtgtgattctgttacttgttcaataaaagacgcttttcacaaatgcttattgagagctcaaatgtgtgccaggtaaagaagatcttgactagtttgggagaacaaggggggccagggaaaaccaacagagttaggaggcatatccaggcagagggaagaacacatgcagtggcacatgcggagagaacaggatgtgttggaggaactccaagtaattagatatgcctggaacaaagaggacatctgaggatttggaaggagcagagacttagcaaagtgggtggaggtcatcacattctggcccagtctgccaaaggacttaatagcaattgtttaattttttaaagtttttcagattttaagtcagataagaatgctagttcctcttgtaacatacagctggataccaaggaattgaggttaagatgcatagtgtatacatccaaactactatagcacagttcactgagatggacttttccttccactgagctctgtactgtgttagttccatcatatttaaacattgataatagtgacagtaaccacacttgtaatgataaaaataatgagtttgtcactggaccatgcttgctttagagctttggtttttgtaaaaatttaacctattagggggaaaaatgctgttttactgttaacacatggcaatctgaccagcacttaggacagactactgcacatccactgagggaagcccctcatggttttgtttgggttgaataaaatccttctcttactgtggggttggagtcatcttattcctctgaggtatgttagcagataaagcagaatggagtaactaaagagctaaaggacc

SEQ ID NO: 119602 - DNA, 1628 bp, Homo sapiens
ttcagcactagaaaggtacctgcagacagtagatgctcaaataatacttgtctgataaatgaacaggcatgtaaagtcactttcccatgtttgaagaaactgagactgagattatttcattcagagtcataaactagtaagtgattggctgaatccacggatgcagattcatgcatacagaggatgactgtattttgtaattgtttgaggaatatttgattatcctttttccattggaaaatatgtggcatgtgcaactaaatttccaggatttgtccatggtttagtacatagagtagaaaaagctaaggattaaacctaaatttatgtgaccctatagaggccctatcctagtctcctctacattttttttttttttttttttgtataggaaacatttatccaaattgtgtaaaaagatgtgaaaattaattttgtcagccattaggagaatatgttctgctatttaataatatgatggaacaacttatggccttgaagttctttcataggtaagaccttaaccttgtgcaggagccaggtggaaaaatagaataaactctacatgatatggataacaaaactaaagcacagaaaaagtaacttctctacatgtctgtagccgactggaaacctgagcccaagtctttgacttttagttcattgatatgtacaagaggaaaacatctgtggtttgctgtagtgatgcagaaagtttggaatagacaactagattagtgaggccaaaagagaaagtctggtgcagatatgggaacttgctataagagaggagtagcactacaaatgagtgtggaaaggactgtttgaggaatgatgttgggacaaatggcctttcatatgggacaaaataaaattagatctctacctgataacaatatgcaaaaataaattgagatcatttaaaaacctaaagaaaaattaagctttggaactgttagaaaatagaggttatggcaggaataatttcttaagcaagattaaacacaaaccataaaaagtgacatttgaccacatcagagtttgaaaattttgagatgacagaagacaccatacagattttttctttttaaaggaggagaagttatttgcagtgtatataacaaaagattagcactaggaatgtgtaaatgacccttataaatcaataaacagaagacaagccatccattagagacatgggtaaaggttatttaatggcagctcactgaagaggaaacctgcatagccaataaatatttaaagacatacgcaacttcagtagtaataaggaattgcaaattaaaaccatgtcagactcatgaacttggcaaaatttaacaattctgacagtagcaagttccatacatttttagagctttgtggtagttttcaaataaaaatgtattccccaatgtagcaattccacagagatttattcccaaagaaattctcattaataaacataaggagatttgtataaagcagcattttttgtaatagcagaaaaatgggaaataaccgaatatatccattagtaaggaggtggacaaatgacaatatggaatattcataagatggaatactatacaacagttacagtgaatgagccagagctgccgtgtcaacat

SEQ ID NO: 119603 - DNA, 1044 bp, Homo sapiens
tgttaggattcctaggattccaaagtatccagcctttttctctttcgattcttcgaacgtatagcattttcaaggagtaaaaaatcaatttttaaagtatccagttgggtaagcctaatttttggttcttcaacaagggttccatttaatctagtttccttcaaaacgttttagtcagtttgggaggttcaggtgctttcatgttccgaaagagaatgttgaaaatgtgtcaagtagatattatgtatctagttatgttcagaaaacagggccctgctattcagggttaggtggatgatcgtctgggttggacagttggatatgtatcatctaacttgacaggtttgcatttctgggagtagacattgataaggggaaagaagttgcaccagaaacttctttaatggcccaatgtggtgaaaatacgccagcatcagtagctcatagtaattctacagttacagattcacgcatttgtagcttttcttcttaattgaattgggacataactgactttgacaatgaacaattctaataaatagttaatttatgacattttaaatctaaccatttaataattggagagcataacttgttctgaaatttatgtgacagtttagaacctgagatctgaggtcattcgtgggcttgaatcctgacaccagcatttaactgtgtgaccttgggcttcagtattttatcctgtaaaagatgataatatttcataaggttttcgggaggaacaaatatgatggtgccctttatgtgtctaaaacagtgcttggagtgcttagtaaatattaactattataatgatgtgtgttcttttttctcccatatctattttagttgagacacttcagaatgatgtctctgtcccttttgtggtcttaatatacaactaatattgctgtccaatagaaatataacataaatcgcatatgtaattttcagttttctactaatcatatttaaaaagtacagagacaagtgaaattagttttaataatgttatttaacccaatccatgcaaatatttcaaca

SEQ ID NO: 119604 - DNA, 1024 bp, Homo sapiens
gctacagccgcggccgggcgacgctgacatctggcatccctggggtctcagagacacgggtggacagcgacgagggccttgtggccgccgtgtgtacccgtgcttaccctctgtcctccctacaggcgcgcggcgtccgccatggaagcgcatccgaccgctggggtctctgggtgccgcggcctcggctctccggggcgatgagggactagaggcgccctgaggcccgcctgcctcccgcgctctggccaccccggcgggaaaaggatcgggcgggcgggcggtcccacagtgcccgcctttgcgccgccccaccccctgggggcgctgccgagggggcgccagccgcccatgccgccccggcgcccagccgcgcctggcgcccgccgctgaagcgcaggacgcgccgccgcccgcgctcaccgccgtccgcgccagccgccccgagccgactgcccttctgcccccaagatgtggcacagcgtcgggctgactctgcttgtgttcgtggccacgctgctgatcgtcctgctgctgatggtgtgcggtgagtgggggcggtagccgcgaggcagttccacacgccgggtcgctgatctgctggggttttttttgttgtttgtttttttgaaaaaaacaaaagggcgtggacggacaattgtcttaaaatcaactgttgtcccttagcctctagggctgagcgcagaggtgggccctttactcatggccggccctcgggcatcctggggagggaaaggacaggctccagggcttcctgcctctgagtgaaactcagccttgcttcaccggcagcgtctgctctttcattctcaccacaggctgcccagattgtaaccttggcctgcattcgaaggtgaagtgattgattggtcctttttcatttgcacagattctgaccttaataatgagaggtgtcaccttcgtttcatcagcgagtggggtagagttgggttttcagcacgcgtgaaattgtttacttagagttcagccttaaactcaattc

SEQ ID NO: 119605 - DNA, 1068 bp, Homo sapiens
gactggtgggtggcttaaacaactcatttcttttctttgttttgcttttttttttcttttttctttttttgagttggagtttcactctcgttgcccaggctggagtgcaatggcgtgatctcggctcaccgcaacctctgccacccgggttcaagcaattcttctgcctcagcctcctgagtagctgggatcacaggcatgcgcctagctgattttctgtttttaatagagatggggtttctccatgttggccaggttggtctcgaactcccaacctcaggtgatccacccgcctcggcttcccaaagtgctgggattacaggcgtgagccacagtgcccgtccccagtgcctggctaattttgtatttttagtagagatgcggtttctccatgttggtcaggctgatctcgagctcccgacctcaggtgatctgcccacctcgacctcccaaagtgctgggattacaggcatgagccacccatgcccagccaaacgcatttatttttttacagctctggaagctaaaagtcagagatcagcagggttgattttctcctgaggcttctctccttggcttgtagatggtggtcttctccttatgtcttcacatagtctctcctttgtgtgttctaatctctttataaggacatcagtcgctggattatggctcctcaccctatgactttatttaaccttaattacctctttaaaaatctttatctgcaggccgggcatggcggcccatgcctgtaatcccagccctttggaaggcagaggcaggcagatcacctgagatcaggagttcgagaccagcctggccaacatggcgaatccccgtctgtgctaaaaaaaaaaaaagaataccaaaaatttgccgggcatgatggcacatgcttgtaatcccagctgctcaggaggttgaggcaggagaactgcttgaacccagtaggtggaggttgcagtgagccgacattgcaccatagcactccagcctgggtgacaagagtgaaactccgtttcaaaaaaaaaaaaaaaaccttatctccaaataccgtacagtcacact

SEQ ID NO: 119606 - DNA, 1053 bp, Homo sapiens
aaaagaatgtgcacaggcagtgtcatgggaaggtgccttgcttggagaactatagatagttggtcattcctgaaatagagaatgcacgtgtccgggggtgggggtgggggtccactgttttgacaatagagatgtacagtctaggtcacaaaaagactttgtgtgcagtggcaaaggctttgaagttcatgtcatatgggacagagactactaaactattttaaacagagagcactgatttgcttatttaacatatgttgagtagtcgactaatcttccaggcatctgcactagttgctcgtgctaactgcaaggaggaggactggttggaggcacgatggaaacaggatgtctcttaactggtccaagcaagaaaacaaaactaatggcagactggaaaggagcaatgaccatgggaaatttgaggatatgaaaaatcaataggacttgagattagattgtgaaggagaaggagaaatgaaggatgatttcaacatttagcagttgataacatggggggatgcatacagcaagagaagtaggtttgggattgggcatagggaggtggaagataggagtccagttttgggcataccatatttgaatttcaggtgcttatatgatattacgtagacagaaataaccagttgtacaaatagtatgagggacatggattgaaaacacagactcagtgttatcactatgtgtatgcatttgaagctgtatgcaaaaataggattccccagggtaggggggtggaataagaagagacccaaggtgacactgctgtggtttgaatgtttttgttccctccaaaaattcatgtgttggaaactttatgcaatagggttgggaggtggggcctaatgggaggtgttcaggtcatgagggccctgatctcatgaatggattaatgtcactataaaaaaggctttcaggcatgggatcccttttttttattttttgagatggagtctcactctgtctcccaggctggagagcagtggcacgatcttggctcactgcaacctctgcctcccgggttcaagcgat

SEQ ID NO: 119607 - DNA, 1031 bp, Homo sapiens
cttaatttaatgcctcactcccacaggagatgaggctaactgaggactcatctagaggactctttaagaatgagctgggcttttctgccccccaacaccctccgcctcccaaaataaccataacaggcaaagccagcacacagaaaatggcagtaagtggacttctagacactccagctacttctgagtcttcagtgtcaggacacatcagtcatctgtcgatgagattttttttttcttttccttttgttctttcgttcttgttactagtcactgtggcatgactgagagtttggcaggaaatgggttcgtggacctgtggtacagtcgcactaccacagcagcattggcctagcaaaatgttgagccctctttcccttgcatgctcccctggggcagaagtccagtgctatctccgcttccctgaccctctccactcagagcccagcatgacaagcacacctttaaatgggttcaaggaagggaatagcagaaatgaacgcagcccgacagcctcctttctcttgataacccctgtcactgtggagctggacttctaggctatctcacagaggcccagaggcactggaatcgatctcatttccttacagacatcaccttgtcaattagagaacacataacgttgattgaatttaagattcttatcagtgcctagctctttttctcccaaatccgaaattcagccatggcagatccataatcaagaaatatacttacattcccatcctttgttgttggtttcaaaaatatttcttttttgtgagtatgtatccatgttttacaaaccaaaaaaatgggacatatggtctgacaaagggaaggatatttgaacctggggactgcctgggagagtccggaagcacatggtcactctagagactgtcatcaagggctgctcctgagattaatccactgtcgaaggcattatcccatctcccttacagcagccttttgcaggaaactgtctaagatgttgtgctttttttttcattgacttgtaaataacaagg

SEQ ID NO: 119608 - DNA, 1054 bp, Homo sapiens
gatggtcaggaatgctggttctggctcagggtcttacagtgtccagtcaagctgtcagccaggactactgcattctctgcagacttgtctagggctgggggttcagctcccaggggcattcatgtggctcttggcaggtggtgggaggccttctccatagggctactcacaactgtttttttcagaatgagagatcacacacacatagacacaaacacacagtaagagaaaccaaaacagaagccacagtctttgatagcctaatcttggaagtgatataccatcatgtctgctgtattctattggtcatacacagaccagctctggaacattgtgcgagcagactgcacaagggtgtggtagggactcttgaaggcctgctggatgctggctaagacagtcttaaaggtgggtatggggagaaaggaatgaggctaagggaagactaggggcatcatagcaggtgagggaatgaagtgtctgtaaaaacaaggtgattagaaaaagcagaaaactgtctcgatatgtaaaatcatgtttaaatagcacagtctagcattttcaaggattaatcctgatatttcttgattataagttatgtgccagtctctgtggtaaacactgatgaacaaaagtgaaaatgtcagtcattatccataaggagctcagtgatctagagaagctaacctttagattaagtaattcttttgtggcttgttgagttcaggaagaaccaggcaatggaactgtgaagacagcacaagaagaggttaagagtggagcaggaacctgttcatgggagggtagagaggcaggagaggtgaactgcctatgggttggtactaccaggacatgattatgttgctgctcttgggtgccttggaaagcaaagatgttttcatcagtaatatgaaactggattttcattatacagttttttccttctgtcactccctaccatgaattacgtgaatctgtcatggtttccaggcctgcgtatcagaatcacctggaactgttcatacagatccatggctccagtcgataaatgtgg

SEQ ID NO: 119609 - DNA, 1058 bp, Homo sapiens
tccatgtttaattgaaaaacaaaaatccacatgtatgttggacccatgcactgcaaacctgcattgttcaagggtctactgtatcttaaaaattctaaacattttagttatattaaatctgaagtatataggagaatcaaacattaaaaatgtttatgtaaatatgttaggtgagcagctattggaatttccacctcccttcttggataattggggttctgctaaatttttttctaaaaataaagatttgaaagaagtaataggatccttgaatgtatgagtcaaaaaattttttagcctcaacttctactagctagttttttttactttagacaagtcatgtatttcccaggcctgtttcctcacttataatactatctaatgtaaatagttttcatattgattaagggagagctgatctagaaattttatgagttaagaaaagtttagaggttttactaggatttaagaaaaaatgtatgcatttgcacataaacttgtttctttaatctttcaagttaagcaactttctttttcaagtgggacttcttcagacttttaatatacttatttgtagagtaaggtttagaaccaagaaaatctttgctctctgcacacctctgacctcttagacttaggccttcttgaaatttggtttaggaaacttgattcagtatttaaagattccttccagttatgaaattatctctctctctcttttaatcccagtacagcataattacttccttacagttagtctgaatgctatttaaggtgtgattaccgtgacttgactttgcattatttgcagtttccctggttatgcttgtatttcctgatcggtcattcctttggttacctatttatatttagtttcaggaatgtattatattgagaatttcattacaagttatgctcgttggtgtaaaaagtttaattttcagtatttagtataaatatcccatggaaatgttatattatgagattgtaaaacattttatccttcatggagaaggtttttttaggttggtgattcaaacaaacatgaatcaaaaaat

SEQ ID NO: 119610 - DNA, 2031 bp, Homo sapiens
ataagaagtttcctttactttttatatttgttccactgtttgtaatatgtcttttaacctctgactaccctcagtattttccctttatctttggttttcacgcatttcactatgatgtgtctaggtatgtgtgtgcgtggtttatttttgttttgttgttttttggttcttggaagtgggaggtatttatcttaggattctgtgagagtcttggatttgtggtttgatgacttttattatttttgaaaaattttcagcatctttcccttcaaatatcttttcttctccattgtctctttcttattctggactccaattacatatatgttaaaccatttgaaattgtgccatatctttttttctaaacttctagcattttcatttggctctcagaatttccatctctactgaaattcccaatctgttcatgtgtgttgtctgcttcttccactagagactttaacatattaacaataattattataaagtctctgtctggttattctacaaactgggccatctctgactctggttctgtagattgctttatctctcaacagtgagttgtttttcctgtttttgagtgcttcttttaattttttgattgaaaaagtctcactaaagactgaggtacaaggccgggcgcggtggctcacgcctgtaatcccagcactttgggaggccgaggcgggcggatcacgaggtcaggagatcgagaccatcctggctaacacggtgaaaccccgtctctactaaaaatacaaaaaattagccgggcgtggtggcgggcgcctgtagtcccagctactcgggaggctgaggcaggagaatggcgtgaacccgggaggcggagcttgcagtgagccgagatcgcgccactgcactccagcctgggcgacagagcgagactccgtctcaaaaaaaaaaaaaaaaaaaaaaaaaagactgaggtacatcgtgtttatgtctggagatggtctgttgcttccgttagaccaatagtgagaattgatttaatctacttaggagttgagctgaatttgaattttgttgttgtggttaccttcagtgcactgcacgcttcacattctgtaaggttgctgttgttgccttgtgcttagggtgggagctctgtactgcagggttattctcagtggcaatgctccattgtagcttttagccatttcttcacaactatgcctcaaaaggggtctctctccacacactagcctccccccagtggtggaatgctgatgcttgttacttgctgctaggctcctgaggggagctgtcctgtttctgtgttaggcatgctctgtgtatggggatctcaggaggtggggctttgtcagcattcctgcctttctgaaccatggtggccaaactcttcttacatttgtgattgttcttaggagtttctcgtccttccatcggcagtaacagacctctgcttggaattgggtcctgggtcctggatggttttctgcttctctcccaggaatagaggttttattcttctacccttccctaaactggagttctactagagctttgcctgtccctttagggtgacaggatttgctgccctcccctaatggctaagggttttgccttgaataagagaagggtcgcaagaaacaagatttctgtgtttccctagcagtcacctcccgcaggcctataccaccagtggtggctctctccagtctccagcctatgatccagtctttccagggagcactcagtagagacctgtggaaaagcacttgcaagcgagtgtgcatttgtgtctgtcacttgtgtcatttactcaaggttgatatgttaacccatgcttggtctttaacaatctgtaaaaattgtagctgatttcttcttacccacttgtatgttgcccactgcctgctcttgtgctttaccaggtaacacatgtcccccactccttgctttgcatcctcacctcactaatgagctaaggaaaagttacgattgtataattttatctttttctcattggatgggagtgacatt

SEQ ID NO: 119611 - DNA, 2044 bp, Homo sapiens
tcttttcttttcttttttttttttttgagacggggtttcactctgtcacccaggctggggtgtggtagcatgatcatgggtgactgctgcagccttgacctcctgggctcaagtgattctcccgtctcagcctcctgggtagtgagggaccacaggaatgcacaaccatgcctggctaattttttaattttttgtagagacagggcctcatgctggtcttgaactcctgggctcaaacagtccccctgagtcagtctcccaaactgctgggattacaggcatgagctactgtgcccagcttcttgattttaaaaaatcatttcaaaatctaaaaaccattcacgaagactatacagagacaggtggtaaactagatgtgactcatgggctatattttgccgacccttgatctgtatagcacttttccaaattataaatgtatcatctctctgagagtctagtaagtcccctatgtgggacatgtccccaaattcagaagtcattgctgttagaaaatgggtgcaagttctacacttcagatttgttggtataataaaaagcttgaaataacccaatttggacacagattatttaaatatgtaatatggaccatttctataaagaaggtgatggtataaagaaagaaaaaatatatatataaaatatataaatggtattttcagcttgatttctagaatgtttagtgcatagtaagttttcagtattgacttgctaatgacttttaatagagaggttgggttctctgtatttttgaggattaaaaaaatagtctaatgagataggttttgttgttttaatgactttcggagttttaaataaatacctcttatgtaactttatcctagagtagtgatttctgtctctactgcatacccagtatgcagtaattctcatgagcagctcaagttgagaaccattgatctagcagagcatcttctcctttatttttatttttttattttttattttttattttttgagacagtcttgctgtgtcgcccaggctggagtgcagtggcgtggtctttgctcactgcaagctccacctcctgggttcacaccattctcctgcctcagccttccgactagctgggactacaggtgcccgccaccacgcccagctattttttttttttttttaatttttagtagagatggggtttcgccatgttagccaggatggtctcgatctcctgacctcatgatccacctgcctcagcctcccaaatcttctcctttgataaagaatagaatgagagccaggcatagttgtacatgcctgtagtagcagctactcaggagactgaggcaggagaatcgtttgagcccaggagtttgagtccagcctgggcagcatagcaagactgctatctcttaaaaaaaaaaaaaaaaatgaaaaactaatttctaaaaatattatatttgcagtaaaaatgtgtgtaaaatatttcagaccagtttaaaatagtaaagaatgtataaaatgatatcattcatctcatatcttatctctaaaagccattgttaggtcttcttccatttggttatatgttttctatacagatatgaaaatgtacttttttaaacaaataggattatacaatatgtaccattctttgacttgtttttactcagtattttttagacatctagagaaattcatttctcataaataatgttgttgaaggattaaaaacaaaagcacagaagataattttttagtggcttggcaaccagagctgatgaaagttacagattgggagcagagctatttctagtattgtttggaggctggaacagatcataactctgctgccttttaccccaccaaaaagtaacacactgcaacaatccaggcaaaattaaggtgaggattatagacagtcttgagtggggaaatgttaccaaaggaatttctgagatacgttctggaagaagggatattcccttccagagaattatggtgattataggcatgagatgcttcaaagtttctgttgtttttttgtattacatttttaaa

SEQ ID NO: 119612 - DNA, 1048 bp, Homo sapiens
ccttaaaaatgtaagtctgacacaatttcaagtaaaaatttgtgtccatattagcaataaaacatttaatttttttctggctaattatctgacctgcaaacaggtgaattaggaaaactagccaatgtgaatagtgatatttattttcttaatacaagttgtgaatactagtgcactcatagctgtatcttcagttcagttattgattgctaaatacctatattcagtaagatgctgactgaatatagttacatattcattatattttgctacttcttagattttattttgaaactagagtgatttttcatatagtgtttttagttaataccagaattgggagaaactggtttctatataatgtctaattttagctgtttaattttagccagtctaaaagtgtaaagtaagttctcattgttggtttaatttgcatttctgtgattattagtgaatttgagcatctcttcttatgtttattatatatttaggttttcttttttacagattgcttctttaaattctgtggttttcttttggtattcttgtttcctttttattaggttacagatatttttatatattagagatattgacctcttgttggttttggactttgcaaataatttatctcagtcttttatcagttaccttcatccatgatatcatttacggagcagaaatccttagtttcgacatgatcaactgaaagggtttttgtcttatggtttatacttaaagattttattaaagaagttatcctccattccattgccaaaagatattctgatatattttcttctattaattttacagtttttccttttgtattaaggtctttaattcacctgtagcaggaagtggcaaacatttttgtaaagggccaagtaataaatattttagatttcgcaggctagtggtctctgtcacattattcagttctgccaaggtagtgcaaaagcagccatagacatatgtaaatgaatgctcatggcctgtttcagtaaaacgttatttctatttacaacagaggcatcgggcattcagg

SEQ ID NO: 119613 - DNA, 2074 bp, Homo sapiens
tagaaattacattaaattatgttatttttctgcattatcacttgtaattatcagtatgttatactgtatgtttacaaaaatgctaaagaggtctagttaattgaatgcccaggtgagaggttgcaataatgaattattcattgtttatgaacatatttgctatcaagtatgcagcatataccataaatatatatcttttggttgaatagaaaagtctgtttttcaaataagtggctaagtgtattatggtaagttgtaactttcaccaatcacagggaaactttttcatagaaagtggataaaatgagaaaaaaatgatgacttatgttttgatgaaatgaaaagagctcttaaggtgcagcatgcagtgtgttataaaacgagtgactgtatcccttcatttttctcccgtttctccttaggtgcagcagtagcgggcatttacagagtagctgggaagaacatggcccctttggaagcgctggtatggggcgttggacagactgtactgacattaatcatctccttttcaaggatcctcgctacactttgaggtttctgtgggaatgtcttacttcacataaggaaacagatgtacagattccctgaaaacggcattgttaacaagtggaaatgaaattgtgcaagaatgtggactgagcaggtcaaagcataaggaagaccttgagctgtgtggaaggattgccctctggtgttcaagtgattgcactaccgcactgcaccttatgtgcctctgtctcaggcaaggtgcattaagacactatgtaaagttacaagaaaaagcaccttgtttagctgcctatcaggttaacattggtgttgaaatcatcgttcctaacagtgttatgttaagttacagggacgttttgaggtattgatatatgtgccaaactcttttctttttgttaacattgatcatgtgacaatttgcaagtgtagatgtagctgagtgctgtgaacatatttgacatgaattcaggtaatgtactaagatttttgttcggtaacactaaatcccgtatgagtgctaaatactgaattgtttaatatgagagaaattatttggtttttaatgttgcgcgtttctgggatttagggcttcaatatgtttaggtattattgttatttaattgatgtggaagataagtcttcttaactgaagactagctcaactgttttaagaactcagagtagctctatagggtgcatacttttcaccaacttaagtaacacccttttaatagcttctctcatgcatccatattctgtttatacaaattcagaaacttgaagggtcatacacattgattgtagtttgtgcgtcataaaaatgtaatttgaagattttcttaaaaatttttgtaagaaaaaagtctgaaatgcatgttgcattctttgacccttctaaagaaagtttttgccttgtatctcatggacaaaacatctttataactagtatctcagtgggattgtattacgtgttgcatatatcttgatttttgacaaaacataaacagtctttcattctggagtattaactgtttttagagactggcctaaattaggctctggaaataaagacctcatttgtagaaataagtaacaagtaagttatataggaagagtaatgaactattttactttggacatgtggcaacatcataattttgctaagtaaaaattggggaatatagtagataattttaaaatttggcaattagtctcagcatatcaatgcagtactgagcgtgtattagagtaattcagttgttcagttcttgatttatgatatgaagttatgatttaagtttagtagaagaatctgtgagggcatatagcaaaagtggaaatgtcctttatataaaacattttaagaggttctggcaatacgtaattgtaagagtataggaagtagggttgaactggtctcctaatgagattttttttggcaccagatacaattataatgtgctaactcaaaggagacattgcagagaatatgaagttaaggataatccaaaaataacctggtagccttgctgtttaatccaat

SEQ ID NO: 119614 - DNA, 1070 bp, Homo sapiens
tgtgatttagcagtacattttcttcgtgacaaatgcaagaagggagggaggatcctctatagtggacactcctttatttaaaaaatgtttaataaaatattgtttatagtgaaatcagctccccaaagaaggaactcctacatgcccaaactaattacagttgaacatactgattaaaaatgccatagatcacagctagtcaggaggcctcaaataaactgcaaataatgcttaaaactttaaaagaaggagaaccagcagtcttccgaaccatgggacagttccaaggtaatagcctaccttgcctaggataagtgaagtcctaaatgatggctatcttcagggcctggagcagaattattctttagatcttaatgtttaccaaacagtgttacagtttgttacccaatatactttcttagtatttgcagcatacatttcactgctcaaaaaagtataagggttttgtttgtactttaaatgagagaaataaagaaatgagttggcctgtatatcttgtatttgtgatatgagcaacgggataatttgaaatcacagaatgttgtgggaaaggtctttaaagaacctctaatgaagaaaatgtggctgccacattgatgtacctaggctgccactcatacagcaaataattctattttgtaaacacttcgtgtggatccactatgtaaagtgctctaccaagtattttctctagtaagaagtacaagaattaccaagatggaattctttaccttgagtacaccaagagctagcaagatgatttttaaatcctaaaaagtttgggacaacattttgcttcctgattttagttgagagttagcctgttatccctccaaattctcattttcctggttcatccactaaatagaatttccataactgagatatcatggctgtgacatagtgaagagaatacgagactccaagccagcaacacagattgaattaagactctgtcacttgtcaactttttgaccttgagcaaatcacttaacttctctgagcctcagttcatactccgtaaaatgtgactaatacctcatgtagtt

SEQ ID NO: 119615 - DNA, 1576 bp, Homo sapiens
aattgtgttaactctcagaccactgatgaatcttttggtaaatcacaggcagattttaaaagctaaatgaagccttagtgccttgaaagttaagatacttgtgcaaaatggatttagcaagattcaggattggcaccagtgagttggctagatacacatcaccagtgactgggaattcaaagtttagaaagcctaacgaatagtagctactaacttcatatggttcaatgtaaatcagttacttagtcattgactgtgacagatgacagctactttcactatattttcatgatgtggtatttttctctattttttctttttccaagtatgaaatggaaaaaaatgtagttaagaaaattaagtgtgagactttaaaatttagttttgttgtaaactagagattctagtgaacagtgttagttttatactgtagtacagggcacacactttaacctttagaaatatgtttaccatcagggatttatttttactatagaaatactaaatgtactgtgaagcttaaagacaggagaataaatgttggaggggtaatacacaaaaacaaaggcatatttgatgaagtaccctgtgttatgtgaacacaatttccccttctgttaagactataaactatatgagtatgtgtactgcatgtttacataaaacagtttaattttgaaggattattttaaaaactatgtttatatataatacctaacaagctgtaaatattgtatattattgatttttaattttatataagcaattttttatttcccaattcatgtacaaatctcattatgtatatagcataatttcctggagaacacaaattttgcagtgaattttaagtaattttaattgcagtaagcatcagtttagcctagagatgttgatctttattttaaattatttttcaccattctcattttcttcaaagggcagcaataaacatatgcaagttatttttaattatagaaagtaggtctacaaagataagatctaggttccaattcattgctttaaggaaaagatgcacaattactatcattcagtgtctaatcacaggaccatttctgaggtccacatgtggctctcctctttgtaatatacagggtgaactctttactgatacacacaagacaactgttaaaaagtgaatccagcacttaaatgtcattacacagaatttattggattaaaaatttgtaatatacagtattttaataaagtttctgtattcaatttcatgcacttatatataaataaacctgtctttgaaagctttatggggtgtttgactcttggtgataaatcttttcaattcattcactatggactcaaatgtcttctcttgcctttttgtcaatttttctggccctgttttacctacagatttaggagttagtgcttaaaagctgagaggcgaccagcttggccaacgtggtgaaacccgtctctactaaaatacaaaaaaattagctggacgctgtggtgtgtggctgtagtcccagctacttgggaggctgagcctgggaaatcacgggaggcggaggtttcagtgagccaaaaacgt

SEQ ID NO: 119616 - DNA, 1094 bp, Homo sapiens
aagacttcagggaagcggcggcttctgagccagtgtagctcactcagcagcgggggacgggagtgaagctctaggtccccatgggaaaccctgagtaagcaaagggacagaggggttggtgctcggcggtgacacctagaaacttccgcgctcctcacaatgtctgtaaggactcgagccctgggaaggatgtgggggttagagtaagcaggtaaccatcagctcctgagattaatttttgagcgtatctttaatatctcattgtgacagtttggaatatcaggtttgttgtgccctacctgtgatccactgctttgctttactagaagacatctctaatgcgatgagataagaaatgcggggagaggaaattgggagaccagaagaggagtcacagcccagtttgcccctactgtttctgccgtcagctcaggagctttcaggaaacccatcgcctctttttaggcttcctgggggaaatagtctgaaatgtttgtcttgtgcttggtaatcaagtccgtattaaaaggcagatacctgatactttctcaaattatatttttcttatgcttccatggtagtttcacctcttagaatgtaatctttctttgatttattcttggttctcctgctgggacagatatatccctacggatgtgcaaagccacagggtaacatgtatctttcaggaatgtgaattttacttggggaaaaatacgtatacttgtctgtgtgtgcacacgtatacacatattaaagtattaggcaagcataaaaatgtgcaataccggaatctatcatggaagagtatagaaagtttgcatggatttgaaaattaagcctgcatagactgcttttataaggagatggagtatctacttctttgctcttagaggttgtttactagaaaaggtataagaagaattgttaggttaagggcaggaaacaaattggggacataagtgagacagtgtccgacttgatgggtgatctgtatactgtgtaggactgtggttttgttgaattcagtctcttcacccttggcccagcgttaaaccagatagaatcagttctccatgcctgtttcccatctg

SEQ ID NO: 119617 - DNA, 1047 bp, Homo sapiens
attataatatgcatcttaaagtatcactgcctacttgagagtaatactaactgaactctggtaaaatatagaaacttttctccagtatctccttttctttctccttttatgctattattgtgatatatgcttaatccctttatattataaagcaggttacacagtgttaaatcactcctttacacaatcttttttaaaaataatttaagagaagaaatgagaaacatactaataggtcttacatatacctacatatttattgtttctagcactctcctcttcttctatggattcaggttatcatcctgtaccacttttattcaacctgaaatatttcatgtagcatttcttgaaagtcaggtcttctagcagcaacgttgcttttttaatatttatggaatgtctttatttttccttccgttttgaagcataattttctggatatagaattcttggttgatagggttttgttgtttttctttctgaactctgaacatccactattctctggcctctgttacttctgagaagtcagctgtttattgtgttgtgtttgttttctttgcaagatgaattgtttctttcatggttctttccatttgtttctcatctttctccaatttgaatgtgatgtgcttagttgtggatttctttgtgtttatcttatttggaattttattgaacttcttggatatgtagatcagtatttttgttttatcaaatttggggagtttttggccattatttcttcatatattttttctgtacctttcttttctctaatcacacatttatttttatgtttgttgttccacaggtctctgagggtctgttaatatctctttaatttttttctgttcctcagattggatacttttcattgagctatcttcaaatatatggattgtttctcgtaccagttcagatttgcggttgagtccctctagtaaatttttcatttcacttactttacttttcaactctagaatttctatttgcttctctgtctctttttaaaataatttctatcactttattgagattcta

SEQ ID NO: 119618 - DNA, 1111 bp, Homo sapiens
aactgagaattgtatagtttatcttactattttacttactgacagagtaccttattctagaatactttttaaaaaaatattaagtttttaaaagccaaatctctagacacttcttgttccttggaaaccttcttgtctcctgaagagtacatttgttgtggatagtgtgttcctcaagagtaattcttaaactagttggataggtttaaatttcgcaacataggcattgcagaatttagacatacaggaaatcaggattcagggctcatttgttgtaaggtgaaatcaggaagtctctggttaaagattggatgggattaagcagacgttttgtaggcagtctcttcaccctgaactgcagccgtgtgctgtctggaatgcggtctgacttaataacccacccatgccagtaacatacatgatagagcagaattgctgtagttaaataatggattttataaacattagatagtcttttagcacctgcatttttttgtaagagtcaagcaagaagttatgtatgtatgcattttggtctgaatcttgtacttttgttaaacactgatataaatgtgtctcttgaggctggtctgtaacagatttataaaaatgattactgtttcttaggctttaaaaatcatatttttggcaaccgaatctatgagttttattaagtaaaagtttagaccttttattctttgcagattggataatttttcttgtacacttagcaaatgtttgataaatagccctgcaaggcactgtgcctgctgagtgctgtggaggttacctgagtgactctggcatacattgtagcctcagcgaccctgacgctgcagttcaataggagagttaagacaagcccaaaactgtaacagctgcaaagtgataagggctatggaacaatgaaaactgtcaggagagactgggaaaggagaacagtgttttctgattccatgtgaaagctaccccctcaaccccaagaattctctttactttctgtgcccacattgagctaattctctaagtcccagtttcgtaaaacctatgcatgtatttctgatttcttctcattgtgggtacttgaaagagaggaaaaaggaatttgggg

SEQ ID NO: 119619 - DNA, 1101 bp, Homo sapiens
cactgctgattgctgttaagagtttggcctttccctcactctgcttttggagtgggattggctgagggtgtggatgtttccttcggttttcacccttacgtttcttaggcacttctaagggcacctttttcctgtggatgcacccggtaggtagctttttaattcagtggtatttccatcatgagagatcgcttgcagtcatggaaccctcttagtttcctcgataagctggtcaggaaagaatttcagacctttgttttgggttcattgcacttgtcttttcagagcagtaccctccttgcttttcacatctgagtactgagcagtttgcgtggttctggcacgtgcctagaggccctctgaatttgtaagtgagctgtaggctcaactgttgctgttccattttgcaggtaggatgcatctggactcttctgtttttcactagctttcatgaccatgggcttttcagcttcttacaagatttctgttaagcgggcatctccatttcagccagttctttgtcccagcttcaaaagtcataaattttagctgccattgggcccagtgataagagtaggtgggccatggtgaagcgtaaggccttgggaaggcacttgtgcgccgtccgcggcagcagggtatgtcaaggctggagagtggacaccttcttgctcctttagataagggaaagaacatttgcttgaataaaaaattagggtcatatttttctgaactttgtcacctagacattaaatgataatttagaattgagaagagatggcatacatttccaatactctacctctctccagcaattcttggccttccaaccaatatgcccatcatcccaccccaaaatcttaccttttttaaaatttattttttagtaatcaagattctacttgtgagtcacagagtatttaaaaacatgcacaatctgttgttcatggtacctggatacactctctaattgaaaattcaacatttaagggcgaatacagaatgcttgtttttaaaaatacctttccagtttaaagaaccatagaggctaaaacgagattgtctcctttttagtattactcacatcaaaattattcaatc

SEQ ID NO: 119620 - DNA, 1030 bp, Homo sapiens
ttactgcctagtgggaaagtataatactaagtaattaatacattattatagaattatacttgcaataaacattacgaacctaaagttatagtatgtttttagaatgtatacttgaggaatctaaacaggaaagaaaattcttcagttaaaatcatgattttcagtggctcacgcctgtaatcccatcactttgggaggccaaggcggacgaatcacgaggtcaggagatcgagaccatcctggccaacacggtgaaactccgtctctactaaaaatgcaaaaattagctgggcatggtggcacgtgcctgtaatcccagctactcgggaggctgaggcaggagaaccccttgaactaggaagtcagaggttgcagtgagctgagatccgccactgcactccagcctggcaacagagtgagactccgtctcaaaaaaaaaataaaaagtcattattttgttatctttttttgtttctatttaaaatagaaaaccacaatgcctcatctgaccagttggcacaaaccggaggatacaatatggacatggtatttatatgtttttctctcaccaatatccagtttacaggagaagaaatctttaatccttttggttggatatttgatttctgagctggaatttttttctaagctagcaaatttcaggatacaaattgagttatttctgccagcatcctggattggaatcatgagatttcatcactatgattaaaagagcctttccctgctcacaaagcaagttaaacaaaatcagcaagatgatggagataaacgtgcttggtccataaagcccaagacaagtgttctattaagctagtgctgttataaagtgagcacagggagatatggaaggctagtgtgcatcattttggggaactgtactatatgtaatattcgtgcaaaagatgagctgttatttgctccttttattttatatgcgcttgctcagcaccttaggtagcagaagtcatatattggattaaatggctctaggcacttgttctaggggccc

SEQ ID NO: 119621 - DNA, 1085 bp, Homo sapiens
catcacatgtttataaccacttacagaatttgatactttggtgcatcccatggattaaaacatactttaaaatctgacatctatatattaaacagttattgtaagcatgattttgttaatggggatttacatctgctttccaatctctgtagccatatgaagtgtaactagccattatatttgcttctttaaatatatatctgggaaataaaacttcagacaattacagtataaactaaacctgataacaattgaataatgaatgataatctgttcagtttttccctcctgtagaattagatagttgatgatttggtttaaaagtaaaaatattttttaaaaccttgacttttctaaataaatgagaatctgcaaaagaaacaatgcatattaagtactgattgtttcttgactgtcataatggatggcctctctctctctgtcgtttttaagaaagccaaattacaggatagttaatatcttaaaggactcttatctcaaatactaggatgctgagacataaagggggcttgctgagatactgtgtcagtaaatgaaactcagcaaatcataatcatctttggattctcagtcatgttatgtaagtggtcacacagatggatttttaactctgattttcctaagttgctttcctggccattaaacggttgggaaggtactctcggatgcagaataagaagaatgcattactgtgactttaagaaggaaattaagtagggagggaaaatggggatgttgtgactgctgacatttgtggcctcctttcatttgcgtaagagatggactggcttctctgtggctgcggttgccatggagaggtagtgggggaggacttccaggaggcagcccatgagcgagagtctgccttagagctgctcctagatgtgacgtgaaggggcagggagctcaggtgtgccgcggcggcacagataatggggatggccgacctgtcatggctggtaacgtgactgtgcacatacccctgggtgtgacggatgtgtttgtgcaagtgcctgtggattctctatgtgaaatgaaaggattgtaatgttgtgtgtgttccc

SEQ ID NO: 119622 - DNA, 1051 bp, Homo sapiens
cagatacccagttggccttcttcatagacatatgagtgtatatgtctgtcaagtgtgtgtgtgtgtttctgtacatttctacacattcatcttcatggcgcaaaatgtttagaattatgtctttttaatataatatatgttgagcattttccatcaataaatattttgtaaaaaatacatttaatggctaaacaacattctcttgtatagaaatatttaagtatttgtttaaccagctccatattgttttgtatatagaattcctgccaagttattattaacaaaaatgctggagtaatatcgcaatagcagttcatttattagacaactgtgtgtcaagggtctagtgaccctggcaactatgtgctctgtggagtaagatacagtttgatgtggaaagcaagcaaacagactctcagaatatgctgtgaggaccgctgctgctctagggttaggaaaagaatgccagggacacagaggagtttgagggagatgtcagggaaggctgcctaccagagctgcaggggaacagacaacatggttattgactgatttctttgctcaggatatttgttaggataacacttggttagtatgatgaagaatatccttttctatgtaatattgagggttttttgaaacattaaagatagatacgatttaatcaagtacatttgggacattatttaacttatctttactctccttccttgacctgttgctgtgaaaaattataatatgttgcttctgaatattgaaatagctttgcttcctattttctgtgaatgtgcttcttgatatagattgttaaagctgtgttcatgtgtggtgttggtttttctgcccctgtggctgggtttggtatctgaggcatgccagctgtatgaaatactgtagaatgccttctgtgttatcctgggctctggagcagtttaggacatgctttattctttaaaatttgaaagaagttgataataaggttccaggcccagtgagtttttttaaaaagcaaattcagtgtaatgctatggcaactctctcagctttgtca

SEQ ID NO: 119623 - DNA, 1033 bp, Homo sapiens
taatagtgctttggtaataaaagtccttttacatgtttttcaagtactatatgttatgtgatttgtttattatttatagtttgaaaatctgcaggtaattcatgtatttcgttttttaaaagtgggtcttagccttttgttacttacactgtgttaatacggatttcatgcaagcattccatatttttctgtctgaagcaaaactaccactgagcacaggatccagtttctgcatttaatgtgtgtttttttccaggactatttcaacttcactcatcgtttcatgagcagtaactaaagtttataaataagaaaaattgtcttattccaaagattgcctgtactactctcaaattatattctggatctgataattcgcaggaagcaaataagacattgctgtgggcgatacatttatcaggatgaaaatttagttatttttgactattgttgagatgtaatgtcctatatttcaaactagcttgcttcctttgttctgttctcccactttgccttggcaagttggatcaatatgcaattgaaagacgtttgatctgtaaatagaaggttctctgaatttcttggcctttctggcaagatagggagagaggcaggtagatcagagtttgaagggcccatggtgtgcggtgtctgccttttatttatttggagtaggataccatattggaggttacatcttccatggccagtgagcagcggtagggtcagcattggagacaacttctgagctgatgcgtttatttaaattgtacttacacatttgggatatgtagaatgttatataattatcaatattgtcttcagttcagtacaaaatagtaccctgggaatttgttccttttgccattttaataagtacctagaccagtgtgttaaatttggaatcgattactgcccatgtcatgaagtatgtatatccttataaagtttaaattaattattattgaaatagagcatgcacatatttacaaaatccagttgtgcccagagccccaggtcaaagaacagcagg

SEQ ID NO: 119624 - DNA, 1080 bp, Homo sapiens
gcttgaaactttaaaaggtgaattccaaggtaccagaaaaaagaagctcaaagctaacatggtgaacagatactaacaaaaaaattaaaaggccttatgggaatcgaggccagatatatgcctacaggcttacctgtcctgagatagcatctgaggttcctgaaataagcctagtcctcctgtccagtgactttgggccatgtgggaaaaaccctaaccgcttaaaagtaaaaccctatatctataccatgcaaaaacaaacaaaaaaactggcccagagtcagttgtctgaagccaatgaaactgttaaggtcccaggcagaagcaattggaaaactgctttatagagatgtttctgcaacccagggtacttaggattccatggaaaacaatcttgctgaggataaacttacaattaaaagtaaaaagcatgcaaagaaacaaatgagaaagagccagcagtcataacaagtggagaattcacactccaagaactacagatcatagtgtagtctgaacgggactttaaattaagtatgtataaaatgtcccaagaaataaataaggattagagaatagaaaacataaggtaaaggagatgttatcaaagtagaggaggcagattttaaaaagaaaatataaactgataaataacaaggtattagaacatatagataccaaattttcttttgttcacattttagtcattggagttgtacgaccacaatctgtacttttgcttgaataggaatgaaatttgccagtgtttacaaatgcaatagcaaaatcatactacttaagcttagtaaacattcttttcccttaaggaaatctgacaaaacacatgaagtccaaggcacatagcaagaaatgtgtggatttaggcgtctcagtaggtttaatagatgaacaggatacagaagaatcaggtaaggctttataccatatttttcataaatgctatttataatgtacaatttttttgcttccataccctttccattcccactgattctgcctaattctgttttcattacctcttatttatatgcagtagactcctaattagtttttccatgt

SEQ ID NO: 119625 - DNA, 1067 bp, Homo sapiens
ccccgcccctcaggcacacattccaggtctccagatcttgaacatagcattgcccaccttaatcccctcagtcagtcaagtagccgttgatgcacagggagctccagaaatgccagcttcccaaagcaaagcatgcgagacacaacccaagcagacttctgtagccagcgcaaaccaggtcagcaggaccgagtctcctcaggggttacctacagtccagcgggaaaatgcaaaaaaagttctgaatccacctgcccctgcaggtgaccatgcaaggcttgatggcctgagtaaaatggacacagagaaggctgcctcggcaaatcacgtgaagcccaagcctgaactcacttccatacagggccaaccagcgtccacgtcacaacctctgctgaaggcacattctgaagtttttacaaagccctcaggccagcagactctctctccagacagacaggttcccaggcccacagcactaccgcggaggcagcccactgtgcacttcagcgacgtgagcagcgatgatgacgaggacaggcttgtgatagcaacctgatggattttattttttatttgctttttttttatataacacttaaaggtttctttgaaaaccctcctttccttaaagcacatttttctgacataaactcatgactaatctttgtgcaatcatgaacttttgaccaataattgttgttttgtgtcagctccagccatttttgtacatgttgtatagacaattgtgccttttaggagctttatgtttagaaactgtacagattgttgaatatctatatacataaaaatatattatatatgtatatgaaaaccaggtagttatttgtgtttagtaaggaaaacctgtcaaataaatcaaatgattaaattatatgttccactgttgaatataaattttatggctatggggcagagtttctgtgtataaattagtatgtaaactccatatttattgtattcatattagtctttgaaaatgggtctgtcctccttgtgtaagacagtaactttacacttcagacagattttctgtgttatgaaatgtt

SEQ ID NO: 119626 - DNA, 1011 bp, Homo sapiens
tcaccactaacttcatagctctgccttttctgaatgactcctaagcttccatcctagtttgttttctcttcctgtccaaggtcccttattattctagcaactataataaaagtgagggcattttcctgaagactgcctttcaaaataagttataaagcagatggtaggttttgctttaggaaactaaactcttggaaatgggactaaatcaaacaaaatgtgtgtgtgtgtgtgtgcgcgtgcgtgcgcgtgcatggtgcatgtgttagagcaaagagaaccttcagatgatgggtatttatgccctgttgagaagtttcgacaaaagagaaaactgcatagaaaaacaagatgcactgactaagcaaccatacccttatggctggaagaatggtaactgaatgtgccagagtggccaactgccttggaatataattttcctgtcttgatgatttgtggttttaatcatgtatatcttgtcacttcttaaatgtttgcctctgactttggagctgaagacaagtttatttagaaagctttggcattttctatggcatgctgtagtagtccatggttcccactttggaattgttaatcccctacttctatgtttcagattcagcgtatggttgtgaggggtctcacaaaggaccgataatagtttcttttaggagcaagattgttttcccaaccaagtgatattggaaattagtctattgacccctttgcttagcccaggaggaacagagccaaagcagcagttagtaaatgttgtttaccttctactagtacttttatcacaaaacaataaaataaagtgctaaacaagagtttcaagtttcagctgctactcaattaattactttgtcaccagattaaacctagtgacttgcaatcttttattttggttaaattgctctggagtccaatttaaagattggctcagacaggacttatctatgtttcatctggaaataaataagccagacaagcactcagtcccttctatat

SEQ ID NO: 119627 - DNA, 1039 bp, Homo sapiens
ttctcccggaaaggcagaggagagagtgtgtgtaaaggcatgagtgcaaatcgcatgcacacattgcaaagaacaagaaagctggtaggactggaacctgtcgtgggaccaaggacatgcaaaggatgagactggagagggagctggacaaggcagggccccagaggcttttgctccaaaaagctcatgataacaacatgagaaagatggatcagagcagcccgaaactagaggcagggaggtactgggttgatcttaaatatttggcaagacatgataaaggcttgagttagagcagtaataggaatggaaaattaatttaggattaagacatttttaagaggtgagatactcaggacctagtaaacaatgaccatgaaggattaaggagaggggtagatgacctctaagtttccaccttaggtagactagtggttctacttaccagttcagaaatcagagaagggggcagatgctcacaggactggttaatgagctcacacttacacaggggagtcttggggtgacatcgttgtgaaggattcaagcaggcagtgaatacatggattgggaactcaggagaaatattcatcctcactaaaatcataagcaggtaagatctgggtcaaagattcttgcccagtggattgaattgtgttaaagtgtgcatcccttcaaagtctggatccgggatgctccagtaggaccagctcaagttcccacaccagggtctgccatatacagtcaggctattgctttacccgactgtaacttaaaaataccaccctttcctatatttgccatgacatggcaaaaagttaaggaagctctatgctagggaaaccatggagagagatggaagggaattgggatcagactcccatggaacatcaattttaaaggactgcagaaaaataggagccactacaactctggggagggatagaagttggacaagggcaagactgggggaaggggtgttctggggaaatggaagaaacagcaggttcaaatgcagcagagagaccagggagaccat

SEQ ID NO: 119628 - DNA, 1050 bp, Homo sapiens
ctttaaaacgcatataatatttaagcaaacctgagtttatttctgtatcttttggctttaaatgggatatttttaaaaatatacaaatccacatcagcctagaaagtgctgattatgtagccaacactgtctttattttccttttccttgttgatagaagaaaaacatgagaatttttttctgttgtcttaacacactcctcattaccgtttacaatttaatttggtccaaaataagaaaataatctttctacttgtgctgaaaaagcttactctggagagttggaatcagtactttcagcagcctctggtaaaccagaaacttaatcactcgcagcagctgaccctcctgtccctggtgatctgaatgccaccatcctgcaaagacttccacttggctttgcagagcattccacagccattgtcattgggcagatgtgagctcagcttctaacgggaactcagaaatgccttgtgttgcttagaatcagttctagtactccattttaatatttggaatttcatgtatcctaagtaaaatcccacttaacgattaagcagaatggatgtattattttaaagtttgtttttatcttcattaatcatttatacgtctcttccctaacttaagaatataagaaacctcaagtactagttatgtaaccaaatggatccttacgttcttcttactgctcacttatagattgaggaaataagatgttcaatgatagaataacatggaagagtcttaaattctttagcaaatgtagaaaactagttaggactctttacatgatatagcttgttacaaaataccacctttaatacaatcctttttccattgagtcaaaataatagtggtgtatagaaggctccaacagcagtaattttcattcattttaaaatacactcatgttcaaggttagaaattttcaattgtcccacaaaaatgtgtgtggtgtgcccatagcatctatgtttaatatatccgtggattgctggaaatgatgaagaattgggtaatacgcaaacattttgtactttattcaat

SEQ ID NO: 119629 - DNA, 1100 bp, Homo sapiens
acatggcgaaaccctgtctctagtaaaaaatagaaaaatcagccaggcgttggagcactcgcctgtagtcccagctactcggtaggctgaggcaggaggatagcgtgagtctgggcagcagaggttgcagtgagccaagatcacgccactgcactccagcctgggtgacagaatgagactcaatctcaaattaaaaaaaaaaaaaaacacctcaacaaaggaaactgagcaccacagacccacgcttccctccccaagttccctacctcatcagctgatgtaactaagtggtgatatttccaatttctaccacttagcgagatgagggctttgctttgcagaaatgaaaatctagaggccatggtcaggagagaaatattatcttatcagagttatttctaaggattttgaatgacttagtgatgatatacaaaatcacctatttttaatgaggacctcataggtgatggagaggaacgaaatataataaatgagaataaattcatcaggacactgagaatatattgggctgtaaaattttatttcaccttgattcactgttctgatttttagatggaaaaagattccaacattaattttgcaatagttgttattatccttacctatcaaaatattaataaagtgagaaattagttaatttatttaaggatatccataaatctgacagagaaaagtggccaaggccttgtctgggtgcccattgtgcccagaatattctagtgatcatttctaagaacacaaaagaaatctaaatcattgcctctgccttctaggagctaataattctggagggagataagatacgtaagagaaccctaaagtaacaagaggaggcagatttgattaaattctgcattgaagacttgaaggcataggaaataaatgccaatgcaaacattgcaagatgagaggaataatgtgagttagactttgaaaggaaggtaggagctgaagtagagagagtattcggagaagaaaggaagaaatcattccaggagaaatgaatgtaaggcatttgcatcagctgaggtcatttggatgatataaccaccatttctttgttcttcttttgtatgtca

SEQ ID NO: 119630 - DNA, 1016 bp, Homo sapiens
attcacaactatgaatagacatagaaaaaatgtggtgaaagatgacgctggtataacccagaactcagaactaattttgaactaacgctatagcatgttacactcttttgcaattacaaaaagttttgacagacattatttactttaatttttccatcaacactgtgtgatagcttttcattattcttattatttccattatattgctaaaaacactgaaatccaaataaataaatgacaggcacagcaaacccaggtcttcttatctcaaactccgtatttatttcattaccccatagaaaaatgaaatagaacagtcatataagcaagaagcaatggcaaagaaaaatctcaaatccaaccattttctaggctagatgtttagtcatttctttggttagaatgagtttcaaaggatgtaaatctctggagttcatttttaaaatataaagattatcattccatatgtgcaagagaaaaatctcaaagtctgggcacttcaccaaaaggctacaacccaagaagatgaagagtgagtgggcaacacatgcagggagactaactttattttttcagtattttctccctattacaaactttttcctagactccagttaaacgaattgattttatgtctcattgtatgccattgttttttctcttaaagttaaaagagtgactcctaattttaatatgtgtagagttcattagggaagtcataatgaagagagtgagctattcgatctagaaaatattgagttaagaaagtttggaagttgaagccaggtgccgtgcctcatacctgtaatcccagtactatgggaggccaaggaggacagattgcttgaggacaggagttcaagaccagcctgggcaacatagtgaaaccccagctctacaaaagtaaaataaaatttagcacagactggtagcatgtgcctgtagtcccagctctttgggaggctgaggtcggaggatcacctgagccctggaggtccaaggctacagtgagccct

SEQ ID NO: 119631 - DNA, 1025 bp, Homo sapiens
aatattccgtatgaaaacaccagtatcggggtataggcagcgacagcacttgtaaattcagcatgagttgcatggttggccaatgttggtgagtcctgtggagatctggagccagaatggcctgaccttgagcacaggggatcttactgagacatcaggaagaaataatgcccctggagtcacagtctaggtcaactacaaagcactagatctgggagactgtgaggaaggaggaaacacacctctactgtccatctcagggtcaccggcatacactgggggatggctcttatcacagagatacttactgtttagggccacatccccctcccttacaagcccgagacaagagaagaatgatcagtggtaagttactactcatacagccattaaaaagttcaacagagtttcagcaaatacttctgctttttcatacaccacagggatcatgatgcaccatgctatttgcgttcagcagggtctagaacaaggaataaaggaaactgaaaaaaaagcacatcttctctgatgtgtgtgcacatctgagaaacttttggaaccaaaattatatctccatgcaccttctactactaattaattacagcaacctacaatatataaataaccttgtaccagattctatatgtaagagtctagaagtggccaggaagacccctctgcaattgaagcaactgtgttgaatgaacagaacagtgacctcttctttggaagacatgggttccaccccagagctaccccttaccacctgtgtccttgagcaagtcattgaaactctcagaaccatagcttttcacctttagatggggactctgataaatacatcacaataatccattaaagggctttatgaactctacagctgtataattgtcagcagcatttgctaacatatacagtatgtagagaagttatgaagttggagtctttactgtatagattagtctgctcaggctgctgcaatgaagtaccacagactgggtaactcaaagaatagatatttattt

SEQ ID NO: 119632 - DNA, 1007 bp, Homo sapiens
cacaaagcaactgtgtggtaaagggtggatattattaaagggagacatgtcttcaagtaggagccaagaagtgaatgttcccatcactaataccaacctaaaatagcattagtccaaatgtatcatgcacgtggtcagcatagccaaaggttgcctcactgcaaggttaaagaagaagctaaacaaatttcacttccttacaagggcaacaggactggactccatccttcttgacatgggttgtttcctctttcctatttaagaatgagcacattgggtgcaattctccaaggctccccactggtttattctgccctcctggcctttgcccttagaaaggtttatagccttctccctaataactcagtacataatcattaagaagcatgagtaaaatgggactttaattactttattaaaggtaataaatatgtctatgcccttgagatcatataaaaatagcttaaaatcattggccatagttatattttccacgagctgagttttaaaatatgtataaagtctgtggtaaattaagagagatttcagcctactaacaattcctaaaccattctaaatgggtcaggaattcaactgggatatctatgatttttttgtttcttcttatttcctgataatgccatatgttttataatttagcatcttattaaggaggtgagagccttaaaacttttaaagtcaattcctgtttttaactattaaaaataatttttagtggagagtttgcttattattattttgacacaatgcctgcattcattttaagatttaggggattactgagctattcttttacatatctccagcatatcatgcagcatctggaacagagaagacattttcatttatgtttattaaataaccaaaacatacatatgaattaacaaataaactatatataaaggcaatagttagggctttcttttagcatttccttttgtctttaaactagtctcttttatagaaactactcattacggccgggt

SEQ ID NO: 119633 - DNA, 1037 bp, Homo sapiens
gagatcatgcagaatatggaacagcactggctccagaggtcatcaggtgactagcctgtgaggctaggctgtcaggcaaattggccgtgagctctcactgtgtcccaagagcacttaaaatgtcaaaaccttcactcaaattttagcacacaaagtcccacgaccccgttgctgcaaatccaaagagccatatgacagttaggcactgggcaaccttgaacttggtaggactgattaaacgctaacagcttccatctgagaccatgtctccccaggaaatgtccgaatggataaaactgttctcaaatcatataggggctcccagctgactccagaggcccaccctgcatgctctctagtacgagagaactccttagaggtgggatgatttttctggtatccttatcaaactccagctctggagtagcataatgcatcgcacatttatctcagcccctctcaaaatcagagaggatctcagggcctcaaatcctgagaggtctgatgatttttgtggcccagaatcatcagcagctgagctgcaaacctttgggcatgtttcatgatgaagaagaggaagcgatatcccaggtgttcctgaataacaaacacgtcactgttcacaaacaggaggtggtcacagaggtgacctgtttacaccctactcatttttgacacttttgaagatgttgtttctgggaacaacctgaagcagactctgaagacactcaattccactgagtggtctgagacaacttcttttcttttctttttctttttttgtttttttgttttttgataaggagtcttgctgtgttgccaggctggagtgcagtggcgcaatttcagcttactgctacctccgcctcccagattcaagcaattctcctgcctcagcctcccaggtagctgggattacaggcacaagcctcccaggtagctgggattacaagcacatgccaccatgcccagctaatttttgtatttgtagtagagacggggtttcaccatgttggccaggatggtctcaatctctt

SEQ ID NO: 119634 - DNA, 1490 bp, Homo sapiens
ggagcaatcaggagacagaaatcacacggtcaactgaaaaaaaggaacaatattaaaaaaaatcattaaactatgacagtggagtaactataaagaggactcttaagggcagtctagagctaaggaaaagtaggcaagtcaggacaaatttggaactgggacccctcctaaggactgaggttcaggtccactggagaaagtgtccttgaagtccactggatgatggagaatttggctgagttgtccacaccagagctgatcaacagtcactcggcagcaggaactggccctctgtgatgaaggtgagcctaggttgatgggcagttcacaagggagttggagctcaagtcctggagtatgtcttgtctgcataaagacggcttcagcaatgtgatgccagggcaagccagagcagtgaggtgaccaagggactgcatattctgggtgtgcagctggggagcctttggatgtccacacacacacacatctgcaccaccagagtgagagcaagaaaatgcaaaactcagcatcaaaaccaggaggagccaggggcagtggctcacgcctgtaatcccagcattttgggaggccaaggcaggtggatcactttgagctcaggagttcgagattagcctgggcaacatggcaaaaccctgtctctactaaaaatacaaaaatcagtagggcaaggtgatgtgcacctgtaatctcagatacttgggaggctgaggcaggagaatcgcttgaacccaggaggcagaggttgcactgggctgagatcactccactgcactccagcctgggtgatagagtgaaactctctctcaaaaaaaaaaaaaagaaaaaaaaaaaaaacaggaggagaagtgcccttcttcctgcaatgtccctccagtaccctccatggacatagtagaagagaaatgcttagagtccagtttactatcacagagcaggtactaagaggtgaatttggagctgagctataataaatctgaccagcacagttgcccaaactaaactccttcctactcactcctcatagttagttgccaaatcttgctaacaacttagcagataaatgtctctagaattgaacccatctgcttcgtcacccctaccacctctgagttagttcatcctcttctttgctctcacatggactttggccacagcctcatgactggttgtcctgccaccagtacattctcattccagccccatacctgcatgactactaggtagcttcctaaaataacaaaattatctttattatgcccttgattgaaaacctctggtacctgatcagctagtgcgagatgttaataccaggcaaaactgtgcgtggagaaaagggtaatacatgggtatctctgtaatgcgtggcaaaaagggtaatacattggtatctctgcctgctcagttttccataagcctaaaactgctccaaaaactagtttattaacttaaaacgaaacaaaaccaccctc

SEQ ID NO: 119635 - DNA, 1037 bp, Homo sapiens
agcagttattttccaccagtctgaaaactttatgaggcagaaatcacttctgctttcttcacatttgtatatcctacagatccatagcaggctgttaataactatttgttgaatggacgaattaatatataaatgaataagtgaatgaacaagtaatctataatgttatttccaatagactttatctttttcaaccctaatgttctcctctgttggctcattgtagttgcgccatgaacctttccatatccctaaaggaaaggccaagctgattggcaacagacttaggagctggatggttctgcatcattagtcaaaacagacttcctgttctagggtaatctggccagtaggtgatgctgactgagacagttgaaaacacctagtgtcaagtcatggctgggtgttggtaagctgtacagagcccctgagattatttggattgtttgaaacaatcatgatcatgacattaacataaaagctgagaaatatagttgggttgaagggaaaatgtctcagtggaaggaaaggtgattaaataaagaaagaggtatatcccagccagctctaaggccttaagagcaaaacccatcatggtgactaggatagggttgttggtggtggtcatggtggtgatgcagatgataacagtaaactataagatgtatgccttctctgtgccagttatgatgctaagtatttaacacaaaccacatttatcttgacaataatcctatgatataggctttatttttatcccccttcaagacttgtgaactcgtcaaaggtcacacagttaaagtaataatggtcaagatttaaaccctgaccctgcccgattccggtacctaagctttgaaccccatgttattttcctctaggaagaggtaattgaggccatatttatctttcaattaggtttttttatgtgttcatcatctacatttcattcacatgcacttactcaaagttgctctcacattctgaagtatttgaatatttgacaatttagtgatatattaaattttacttccaag

SEQ ID NO: 119636 - DNA, 1075 bp, Homo sapiens
attatctactgttctaaagacaaggtattgtgcaaagagttccgcagtatatgagaaaaggaatcaaagctactcatacctattcagggaaataaaacatgtacataaaattttaacaaaatatagaaaatgacagcttccatgagaacagaaaaaaaagattattgaggatgataagagggagatattaattctggctagaaaaggctttagagatgtttttaacctaagagtcttgagagctgaataggtatattttaatacaggagaatggggaacagaaagagggaggcaggagacattttcagcaaaggaaggaaagtaagtggaatgccaattcacaggggaaggcacgcctggagtgtacatgaggcatggtggccaggccagttttgttgaacgagagggtagagagaaagggaccgatggtagatgcattgaaaagaatttgaataccaagcccagaagtgacatggtcagagtttaatctatgtgttaggtggagtgaatggaagttgatgggggcaccatcagttacaaatgcaactgcagcagtggagaacataatggtaataaataataatgataataaataataataatagctctcacttgttaattgcctagcagttacttcttagattatgtcctttaatctgcacagcaagcctgcatggtaggtacaaatacagctgttcctcatttttccaagatctgtttaggtacaaacacagtctttccttgatatccatagggaaccacagtgcaggttcctggacacctccactctgtcccgcagtcccactacccccgccatgctcaagttcctgatagaaaatagtgtccgtagtatttgcatataatctatgtacatcctcacacacagtttaaatcatctctagcttacgtataatacctaatagaatgtaaatgctatgtaaatagttgttatactgtattgtttattacatttgtgttatttttactgctgtattgtgattttttattttttcctcacattttgaacccccccatggattgaacagagggctggctgtacagtcaatcctcattt

SEQ ID NO: 119637 - DNA, 1377 bp, Homo sapiens
agcttctaattagaaaagtaagtgctactgggttatgggccgagggagtgctgactctatctgttacaatgagtgtgagaggtgtggggaagtatgggaaatgaatattaaattaggaaataggaaagcccacggcctgtgttttgcattcttttaaacttgctatgacatttctagagattacaaggcattgttctgcaatgtttagcagcataaacatgctatctccatgatggacatggaccagaaaattaatttgcagctacacgttaaagaagagctcactaagatcctgaccagagtggaaagggtgatatgttaataaattatggctgctctgtattatttatatgaaaatactcttaaaacttcactctgcaaaaatctgcaatgaatttttttctctatatccattcttcagaaatgacattaaaatgttatagcgctgagacattttaactattaaggagctcattttcaattgcttggtatagaagattcagtttggccaaaagtctttctttatgtattttgggtctttcttttcttttatgagacagggtctcactccgtcacccaggctggagtgcagtggtgtgatcaactgctcactgcaacctcaacctgccaggctcaagcaaccctcccaccccagcctcctgagtagctgggactataagaacacaccaaaatgcctggctatttgtaaatttttttgtagagacagaatctcactaaacgctgttgcccaggttggtctaatttctgggctcaagtaatcctcctgcctcagcctcccaaagtgctgggattacaggcatgagctgccttggtaggctgaatctttctttaaatgcaccagccagtgctataggtaaaatgggccgattggtcttatgatcatccattgaaaagatttggcatttagatatgcttttagaaatatatggggcgggaggaatgggaaaatttaattccttttcccccttctgaactttatttctgagaactcaacttgccaacatctatgaaaaatagaagaggcttagcaatcaatcactgggggagggggtgatggaaggggaaggagacagctggccaaggaattctaagcttcaatcattttgtagttcggaacaagagagcaggattgccgacttttagatttcttttcagaggtggtgcgtgagcagcatatggaatattctaataaagtcaagtataggtttaactcctttaggaaacaatcaaacaggtaaaacgtgagtctttgggtgaattttaaataaggtttgacttatgtgtaacctgggatcttagaataaaaagggactttgtagagcatctgattcaacccttccatttgactcaagaaga

SEQ ID NO: 119638 - DNA, 1067 bp, Homo sapiens
ccacttactcaagaggctgaggcaagaggttgtctgaaccctggagttcagggctgctatgagctatgatattgccactgcactctggcctgggcgacacagcaagacctggtcaaaaaaaaaaaaaagaaaagaaaaagtaaaagtcccaaggcagcgcaaaacatcaagtcaacaattggtaagtttaaatttaaaaaaatctttatatgacaaaggactcacaaacaaaattatgactgaaagactggtactacacataaagccaaaaacaatggttatactagaagaaaaaagagtctatataaatcaatgagaaaaaaaaatcaataaacaagtggacaaaatatgagcaagtaatttgtagacacagaaacctgaatacctaaaaggtaatcaagatatagcaattaaataacccagcattctgaaaacccaaatgaaataatggtagtaccaagtaatgatgaagtggaaagagaaactttcatacactgttgatgagagggtaattgttaacgatcactttaagagctatctgtcaatatctagttaagctaaagttgcacgtaccccatgacacagcagttctacttatattctttagagaaacctttgcacaagggtacaaaagagaattgattaggatgctcactggaggattgtcattgacaaaaatttacataccaactaaataaccctctgtaagggttgaagaatcttgtgatagaatcatctattggaatactaatgcaacaggaaatatgaatgaactaggtttacatgaaccaacatgcaataatcttaaaatacgttgaggccgggcatggtggctcacgcctgtaatcccagcactttgggaggccagggtgggtggatcacgagatcaggagttcaagaccagcctggccaagatggtgaaaccctgtctctactaacaaaatacaaaaattagccgggcgtggtggcaggcccctgtaattccagctactcaggaggctgagacagagaattttttgaatccaggaggcggaggttgcagagagctgagacggcgccactgcact

SEQ ID NO: 119639 - DNA, 1047 bp, Homo sapiens
gaattgtggttagtgcaactgaggaaatgaatttgaattttattgaattttaattcatttaaatgtaaacagccacatgttgctagtggatactatattgcatagcaccattagaggctgcaaactcagggaggacagttcagaaagatggatcctcaaacaagagaaatgactctcccaggtaaacttcataccttttatacacttaacttgaacaaagggcccctacagcccagggcacatcctttaatatttgaggctaagctggtggctgtgtcagtgtttggtatgatacaatcacaatgcccgttggccaattaagatagaaacatacagagccctttagtattctgcaagggaaataaaagattgcttcagtcttagttgctttaatgaggtcagatggggtttctgcaggtccactgttctaacctgtggggcagagagtaaggcggaaaaggcatgcaatttaaaatacacatttacggaaacatgtaatttgctggtaaatacacaacctcctcttttcagaagggagttaaggggtgatagtttggaggagggacccaaggaattacaaaagagaataacaaatgtttgctcagaacacaatgcagtaaattccctggtgcactcaaccagtataacaaacaggtcctttgtaatctctaagataaggcttataattagccagggaccgggtgacatgaatctgacatgagtagacatagtggattcacctgtggttggcctggctggtagtccagcaaaaggggggtggttgctgaagccctcaatgggtaccaagagggatcgagatctaattacagagacctgcattctacatccatccccctctaggggaggcgatggcagctggacacctgactttcctaactccagaatgaagatgaagctcttattgtgctgatttgtgcagactacttgcagatgagaagtagtagaaatgatagagtggtagaattggagtgatcagaagcctgttgtaatacagtaatttaatatcctcagtggatcgttgacctt

SEQ ID NO: 119640 - DNA, 1101 bp, Homo sapiens
ccttttctctgtgaatttacaattaagtgagcaaacacaatggccactgaggaagtgctttatcctgtttctcctttgctatgtcacgggcagaaatatgcacgatagaggaagagatgttcttgggagggaaggtgagcacagtatcctttcgaaaagcagaaattggtggcaagtcagaaggctcgaaaatagaaggtactaaatggagcgaccttctactttacgttccaaacctgggtatttccgagagtgaaatggggtgctataactacttaggctgaacgataatctaaaccaggcctgagctaagcaaagcagggagaatatggtcaccctgtacaaaaccacagagacagatgtgcaggccccgaggccagtgctgttttacaaacagaaaagaagcgccagttaactttcaaaagaaaacagaagggattgctggaccccagaaacagaggaacactaacatggccctccactgtctaccatctcagttaaattaattaatggaggttgagtatctttgcttctgtacagaattgaatttctttgttcccagtcctcgcactgtttctgccacctctcttgcacctcttctgctgaatgtcttgtctggaaattctgtcccagtgccatttctttcaccaataatttattttctattcctttaacacttctttttctctccaaagttctgatggctcccgtcatcagctcccatgccaccaggtctagtgcctctgccccacttccaggccctctagacctgcatgacacacacgtcttaccactgcctctccttggaccagtcctgggagtcatgcctgactctcctggagtacttctcttcatgttcaacatattgttctttctttcttcctcggctctggttttctttccattctttccctctccttttcttcttggaacactcatctattccacataaagcttagatgtctcctaagttcatttgatttccttcttcccaggtagaatgtgcttcaacaatgtcatatcggttgactgcagcaggagcaatcttctgttgtgctctgctcatattactatgtattaataatatgaaatacacgtgac

SEQ ID NO: 119641 - DNA, 1342 bp, Homo sapiens
tttttttttttgagacagagtctcactctgtcacccaggctggagtgcagtggtacaatcttggctcactgcagtctccacctcttgggtccaagtgattcttctgccttagcctcccaagtaactgagactacaggtgcatgccaccacgcctggccaatttttgtatttttaggagagaaggggtttcaccatgttgtccaggctgatctcgaactcctgaccttgtgatctgcccgcttcagcctcccgaagttctgggattactggcatgagccaccacgcctgacccattctatgaatttttattgacaaagagatctgggaccacaagtggccaggtgtttctgtgccagcaagcttgagacaagaggaataaaccattgagagaagtgacatagatgggaccagatgacacacaagcccctttttttcatattagggattccagactatcccataggcagtaggtcactgtgaaaggctttaagcagggaagtagtagagttcatattttctttttcttttttttttttttctgagatggagtcttgccgtgtcacccaggctagagtgaagtggtgcaatctcggctcactgcaacctcagcctcccaggttcaagtgattctcctgcctcagcctcccgagtagctgggattacaggcgtatgccaccatgcctggctaatttttgtatttttggtagagacaaggtttcaccatgttggtcaggctggtctcaaactcctgatctcatgatccacccgccttggccttccaaagtgctgggattacaggcgtgagccactgcacctagcccatattttcaattcaagacaaattgtctgggcaaaggatatgaaccagcaagtcaaagaaaaatgcaaattcccataaacataaaaaagatcttaccctcactcatattataattaaggatatacaaattgaaactactgagataccatttgtcacttatgactttggcaaagataagaaatcgataacgacactctgtcagctggtgttaaagtagactgggaaacagctacccatacagcactggtggaaagaggagtcagtgcaagatttttggaatacaatgtggcaaaaataatcaaaattttagatgcacttacccttgaccttgtaattcatcaacctggcaaaggatagtaagacaggaagagcattccacatgcaggaaaaagagaggctgcaaagtttcagatttgaggaaggccatgcccagaagaaatggcaaattgccaggaatttaacctacatatatatacttgcagaaatataataagaaggatgtacaaggttgtttgttacaga

SEQ ID NO: 119642 - DNA, 1062 bp, Homo sapiens
agggcgactagtaattgaccaagaagacaaaacagaggagaatattctaaactgagggaaagtgacatgcaaaagcctagggttatgggaacatcaggcagtttaggaaactcagcagttcaggagtgagggtggatggtctgggtaatggtgagaaaagtgggctggaactaaatgggaggtggggaagccgtgagtgctcctcttcagttcctcactgggatagggagaggcatctgtggaaggtgaggatcctggaggaggctggggaagactgcagcagctcttgggagaatggccaaggccacctggtcaactttgttgagcatggagaccctgaatccatgggccaccaaataagtagaatccacaggagaagtgatctgggccataggagagattctgctccagcttttcaggtgccataggtaaggttatttccaactgggggaaccagagcagactttatagaggtacaatgtggacatgaagagatgaaccaagcaggagccagcccatggaaggccttgaatgatgtatcaggaaggtttagtccatggatgggttttaaactggggagctacgtaatcagatttgtgctctaggaatgtcattttggcaggactgtaagttagactggaggaaggccacgttcaaggcagatagatcattagagaagaatctatggcctccgagatggagagtcagaactgcgtggtgctccccaacacggggtgccagtggggcattgagactccctactcctccctgctgtgctgttccagaccatgcttctcccaggcaagcctacaacccacagggttcaaccaggttcccctccagaaatgtggggtatggcagcaggctacatcttcccagaaatgccctggggtctagtctgaccctgagcccctcaaatgtggagcatctctaggaagctcaatggcattgtcatggaacccagcagttggtcctaggtaggttccagcagcctggaatcccctgtgggagcctccttactgtttcagtagcccacacttgagtgggcccaccagtccagca

SEQ ID NO: 119643 - DNA, 1040 bp, Homo sapiens
gctctgttgccaggctggagtgcagtgacacgatcttggctcactgcaacctctgcctcccaggctcaagcgattctcctgcctcaccctcccaagtagctgagactacaggtgcgtgccaccacacccagctaatttttgtatttttagtagagagaaggtttcaccatgttggccaggatggtctcgatctcttgaccccgtgatccacctgcctcggcctcccaaagtgctgagattacaggcatgagccaccacgcccagcagtatagcttttttagttaacaaagatatttgatccaagttggttcaacttaagaggtagaaccaaaaacatcatcctcgatgcctcttagaaaactgacctgcaaaatatccagactggcattacctgtggctccctgtgggagagaactttctctaggtcatcgctaacaatgtcatgcatgggtctccagccttgtgtccatcccgctcttccctttctcagcatctccagccacagcatttcagtctttcacacactcagtccctattagtcgccctgtgtagctttagaaaactagaacctcaattattatctttctctcctgaatctgtagcttcactatcaaattaatcctttacccttgcttttaattttttttaattatggtaaatacagataacataaaatttgccatcttaaccattctaaagcatacagttcaatggcattaagtacgttcacatcattgtgcaaccatcacaccacccacgaggagccggatttattatttcctatcccacgccactattcccatcaggaaaccatgccatcttaaccactattcccatcaggaaaccgtgccatcttagccactattcccatcaggacaccgtgccgtcttaaagtgattccctgtaagatgagcaatggaactttacttgcccagtagaccctttgtctcttaggactgggcaactgagttttaaaatggttttgatgcatttatatagcacgttagccaaagtgaatttcctctttcctccttgtcttt

SEQ ID NO: 119644 - DNA, 1042 bp, Homo sapiens
taagtacggccctagggctcgggtcttccctaggcaagaacctcgagggccggacacgggagtgcaacccaggcacgcgccttcggatggccagagtaaatggtcgcgagattttgcggggtagcaaggggccgggtgcccacggcgggagaaactacactactctggaggcgagcctagcccttcatcccgtcgggtttcacaaacgaagccagagcttcctggagtgagggtggagcttcctgcccgcgccctctgcgcatgcgcccgcccggcgcccgcccggcgacctggagttgatgtcacgtccggcggcggcggcagcggcagcggcagcggcgctgagttttgtctcccgggccgtctgggcgcgcgcgggtgtcccaggtaccccgccgcctccctccttcccgcaggactcgtccctcctggccctgggccccaacggtgcccgcctgcccggcggtcggtcagcgcacagggcacggcttcctctgcttctcccggaccacttagtctcaacccgggtgtgtttgcactactagaggtgaagcatccatcatagagagaatgggacctggggtcttggaccagggtgtttttacttttcccatcaggtggacgcgcatgggcaggagatattatttgcagcatttcctcctagaggacgcctttgtcattgtagtgcaatctaagaatgggtgtccttagacaacagggaccgaccaaatcgtcatgcagctgtttggatgctttaaaaaaataaatccccacactcattacgcgttttatgctgctgacttttttatttttaagacatctgctcccgaaagctcagagccctttagcatttcattttctaaacgaatcctaatctttcctgtgactgaatcggttcagaggatatcttttcaataaggaaggaagccctcccctgctcactggggacgtcgcagggtttttaaacctaaagatttactcttttgtgcacagacgctggaagcatttgggtgaggcagtgcagtgctttttgggaaatgca

SEQ ID NO: 119645 - DNA, 1044 bp, Homo sapiens
tcataaaaagcatgcacctagatccctcacatgcacagttcacaatagggtttgcactcctgtgagagtataatgccagtacccgtccatggcctggaggttgcggacccctgtgataagggacaggtggagggcaaacaaagcctcacctagagccgtggccccagtgagcatgcgttagactcagctggggggcttgctggatccagcctcagattcgacacgtctggggtgggactgaggatttgcatttataacaagtttcctatgtgatgctgatgctgctgagtgggggccatactttgagaactgctgacctagaggtaattttccacaccacacctgtccggtccccatccttaaagactgctgtatcacccaggtgaacttggggtgcacaggtggggaagatggtagctctgattgagaatccaagcaaaaccgattacgtaacacacaactctgatgatggagggtgtgacatctttcaggagtctcagagcagacaaaagttgccagctagcaacccagagcatgaaaaccagaatgagaagctgatatttgtttcctgtgctgaaagtaaagtttcttgaaacgcacactagaactggttaatttttggaaaacagccatgccacaagaaggctgtaaagggcctatttggcaccatggcaagccagcaaccaggagcaagacctttatcttaggaaacccagttgccaggaactcaggggcctgttttgacctacacagggcttgttcccaactcccatacctcagtatagagcaattgccaggatttcagccgtaggatggagtctgagaatgtctgatctcagagggaaggcagcaggaaaatgaaaacgcgttgagagtggcggcccctagttctccaaatagaacagccaggtctcaccactccctggattccaattcttaaaaatgaaccaggcctgccaggcaaggccaccatagctgaaaggaatgacgtttgagcaggtaaaaacctaaccgaagggacggttcctgagtgcgtggacacag

SEQ ID NO: 119646 - DNA, 1056 bp, Homo sapiens
ataccacagtaacttgtccaggtcacaaaatcctctttgtgaagtgtctgcctgtagccagggcaatacttccatggactgctgtgacacagagttcccgaggtgctgggagagcctgcctgtgggttgaagatttgacaatgatgtccttggaccagcttttgttccctcagatctgaactgctcccaagtctgtggatcaatggaacgacactaaatggcacagatacaccacgtcacgcagaatttcaggggatttaacttatctgaacatatcacgtgtgaaaaggctttttccgagccctgtagatgggtcagggatatggaaatgcaagtggaagaaagtacaaggaggctttagcagggacggggagggtaggtttccatgcagacttctgccacagcaggctctttgggctgtttgggcctgggcttgaattgcgcttcacaagccctggcctgatttctgcagagcttttcaacacggaggatgaaaggcattccacagctgaaagggattctgtcctcccagagtactggggctgtcggtggcaccaacagcataacagccgtctgccgacccctgacaggcttaggaaggagccctttcataccgctacagctccgtgttagcggccgcccgtggagagggaactgtttccatgaagaaatacaactcgtctttttgcttttaatttctctagaatgagtggactcagaatggtggcaaaagaggcaaagtgagagtaggcgtctccaaaatgtcaggctggtgactggaccaggggcaggaggagcaaagcagctcaattacctgaagagcttcaaaaagtttttttttgtttttgtttttgtttttttaattgtggtaaaatacatgtaacataaaatttaccattttaccattttatttatttatatatttttggagatagggtctctctctgttgcccaggctggagtgcagtggtgtgatcttggctctctgcaacctccatctcttcggttcaagcgattctcatgcctcagccacctgaatagctaggattataggtg

SEQ ID NO: 119647 - DNA, 1149 bp, Homo sapiens
gtggctagtggcagagaagttggaattagacctgcattggacctcaattcgctgagcagttgcagggaaatctggaaatccttttttttttttttttgagacagagtcttactctgtcacccaggctggagtgcaatggcgtgatctcagctcactgcaacaccgcctcccgggttcaagcgattctcctgcctcagcctcctgagtagctgggattacagacgcacgccaccatgcccggctaatttttgtatttttagtagagacaaggtttccccatattggtcaggctggtcttgaactcctgaccttgtgatccgcccgccttgacctcccaaagtgctgggatgacaggcgtgatccaccgtgcccagccgggaaatccattttttaaaataaattcaattatgtcttgaatgtactcagaaaacgagctgtttaaaatgtcccattgtgactgtaatgtgaacaatgacctctaacttgtattttatttggcaaggatgggggatgtgcatcaaatcttcacctctgggatttcctgaggcttggtctacttggctcaccctccacctgcatccccaccccactcctagatattaatacaaatctagccttgacaccgcctactgctccaccaccgcctacgtttttggccatcagagccttggagtttacagagcagaggccatgacattggggagcttgtttaaaaatcaatgatcagaaccccacattttagtttccttttggggagaaagaggagggccgtggaagaaaaggggtgtgcagctggagcgttattatgtctttctcagcggcaggcatgcccgcctctccaccttctccccgccaggcacaggagccagcagctggagcgtgctctgagtttcaggggaccccccacccagactgactggggcttctgggacttctcataggaagagtcaagacctcctgcgcttctttaaaaggtgatgggctcagtgttcccagtggcatctggaggtgaagccggtactgtctcaggagtggaaggcaatggcccactggcctttttctcccccacgtcacagtccccatttgctggagcccttgagggggccaccgaaactgtggctctcattcagcctcccaaagtgttgcact

SEQ ID NO: 119648 - DNA, 1044 bp, Homo sapiens
taccttaacaccgcagtaatccctctgatactcaattccacctttactggaaatagtgttataaggtgactccttgcagttttttaattgttgacaagttcaaagggatattttattctctgctgcccctgctttggtgcagcctgtgctcttttcttgtggctcctgggagtcctgctttttgcttgctatttctgacctctctttctctaccaggtgaagggcaatgaaccaagtacaaagacacaccctcagtgcttcctatgaggaagcccaatcaatcaaaaggtggccactttgctactaagtacttttgccgttagataccttatatccaataaaaagtggcttcctggaatttgaactttctcaccagcccatcccacccccaaccccagcctaacacgcttctgtggactgtgaaaatgggccttctcctgccagcagtgggtatcccgggcactgagcttgccatctgatactagtgccttgaccttgcagaaccacttggcttgcagaaggccaaggtgtgtgggatggatgaggtagggagggaagcaacccctccttgcttgtcacagtaaagggcagcagaggcagctaaaccaaaccactctcgtgcaaatacccagcagggatcatcccaggaatggcaggctctcctgaatgcttccaggctaggagctcagcccaccaacagtctggtttggggtcggtcaccgggattggagtttaccttcctagatgccatttattcacactgtccctccacctccctgatccccacattccccatggtcaccctctcccctcggcccttccctctctgtggacatcccctgcagaaggctcaagtccccgaggttctcaatctgtgctaacagtagagggacatcctgctgcggcgcatggcctcgctgatcaggtaggcggggctcagctccggctcctcggtcatgatggcaatgttctgccactcgcccgtctggctggacctcttgatggtgtccaccacgcacaaggcatacaggcagtcgtcgaagg

SEQ ID NO: 119649 - DNA, 1076 bp, Homo sapiens
accacatctgaccttctttttctattaatgtgaaatattttaagatctgacccagggacgcgcgctcggacatggtcctgccccgctgaccgctgtcttcctcccacccgcaggcatcggcaagaacgtcatctgcgaccgcacggccacgccgctggacgctttccgcatgacctcggccgcccactactaccccaagctcatgagcatcatgggcaacgtgctgcgcttcctgccggctttcgtgcgcatgaagcagctgatcgaggagggctacgtgggcgagccgctggtgtgtgaggtgcaggtgcacggcggcagcctgctgggcaagaagtacaactggagctgcgacgacttgatgggcggcggcggcctgcactccgtgggcacctacatcatcgacctgctcaccttcctcaccggccaaaaggccgtcaaggtccacgggctgctcaagaccttcgtgaagcagactgaccacatcaagggcatccgacagatcaccagcgatgacttctgcaccttccagatggtgctggagggcggggtgtgctgcaccgtcaccctcaacttcaacgtgcccggcgagttcaagcaggatgtcactgtggtgggctcagccgggcgcctgctggccgtgggcaccgacctgtacgggcagcgcaacagcgccccggagcaggagctgctggtgcaggacgccacgccggtgagcaactccctgcttccggagaaggccttcagcgacatcccctcgccctacctgcgcggcaccatcaagatgatgcaggcggtgcgccaggccttccaggaccaggacgaccggcgcacgtgggatgggcggcccctcaccatggccgccaccttcgacgactgcctgtatgccttgtgcgtggtggacaccatcaagaggtccagccagacgggcgagtggcagaacattgccatcatgaccgaggagccggagctgagccccgcctacctgatcagcgaggccatgcgccgcagcaggatgtccctctactgttagcacagattgagaacctcggggacttgagccttctgcaggggat

SEQ ID NO: 119650 - DNA, 1056 bp, Homo sapiens
agaagtgcctgagaaagtatgttttgtgttttgccaagccccaaacatttcccaagtggtgggagaggtctggcaaagtcccctggtgctctcaatggtggtagaggaacgggaggggctttctgtgcacatgcgggtatgatgggtgagggtcactctgctgcatccatccaggactgtgaaccatcacgccacggctccatgctcagctcgcccccctgagggctctgtccctgcatccagaaatggctgtcttggagggttgccgcatctgtcaatgtgatgcagtgtgaccacgggtgagtggcagaaagcacacgaggactggcctgagtcttctggggaggccttcacaactcactccacaaagaccaggcagccctttgtgtgagaacaaagagctaaagctgggtcttttgaaggctttggggcttgaaccaacttaaaattttaagacaatatcctctcagcagcaaataaagcgaagctatctgtctttaaaatggtggagctgagagataccttccaacctatgttgccgtgctgtaattaggagcaaaatgagatccgtgggaaacttctgacgggttagagtgctatgtgcaaggcagtgtgcctgatcttcatcagaagcttttaagttaaataatttcagaagaagctttactgccctcctgagatccctcatggggaaatggaaaatcagctccctccgaagcctgctgaatgtgttctctgtaaccgagccaaaatattcatggccctcctgagaaatctgtgctatagggaagagtttccagcccagagaccctaaagcccttcaggcagctgctccccttatatcctccaagctcagggtctccaagttgtggctgagtctctgctcctatctcaggacagatcagagctttggtggggctgacacttgatccaaatggtacccctgggagtctgggcaaggggcttcccattcacacctctagggaaagatggagctctgttgtcccacagagcaggtacccgttgctgcccttcatcagggaagttatccctggg

SEQ ID NO: 119651 - DNA, 1604 bp, Homo sapiens
gaggcaggccctggagccacgggttggattcagtcagggtttggagccctctgtcttcacagctggcttctctgttctcctctgtgtttcaaggtgtccctttgcctggagtcttccttctgtttttcaccattcctgctgacagtctcatttgtcctataacgcaatgacagcatactcaaaggtctgcatacatgctggctgtttgcaggagctgggctcctcctggtgaaagctcaggtttaccatacaattatgtgaggcttccttgttactttgaaagctttccttctgcatccgtgaaattaaactctgtattgctgtgtgagtaattatggggcccttctgtgctgaggcagagggtgaggggtaaggtgttgattctcagcgttagtgtagggagtcaggtctctctcctctaccctccttcttcctctttctcctcactttttctccttccatccaaattggtcagacctatattggtctgtcctgggatcccatgacactgactctgagcttgcaaattgttctctacttttttctgccagcatattgggtaattaatgccccttctttccacctttcttcctctcttcctttcctcctttctttctttcttcctttcttccttcctctctctctctctctctctctctctctctctctctcctttctttctttgacagagttttgctcttgttgcccaggctggagtgcaatgatgctatctaagctcactgcaacctctgcctcctgggttcaagcaattcttttgcctcaacctcccgagtagctgcgattacaggcatgcaccaccacccccagctaattttgtatttttagtagagatggggtttcgttatgttggttagtctggtctcaaacacctgacctcagctgatccacccatcttggcctcccaaaccttctttccaactttcattgttgttgtcaggatttaccaagcattaggtagagcctccttcctataaagatgagataacccatccaaacacaggagcaagccagctgcattgccagagccagggctcccagaacacaaattccagagtagcttgctatatttatctgaagttaaggcatcttcccagagtgccaaacaaaacatttgtgcatcatctggggctttatttccctatgttacctgcttttctgatgatgtttacctcagttggccttagaggtttaccctgccaatctaaaaaaaaaaaaaaaaaaaactaaaaatccgtatcattttagaaattcagtagcagatcctatttcaattcagtttctttctttcttttttttttttttttttgaaatggagccccgctctgtcgcccaggctagagtgcagtggcacgatcttggctcactgcaacctctgcctcccgggtttacaccattctcctgcctcagcctcctggagtagctgggactacaggtgtgtgccaccatgcctggctaatttttttgtatttttagtagagacggggtttcactgtgttagctaggatggtctcaatctcccaacctcgtgatctgcccatctcgggcttccaaagtgttgggattacaggcgtgagccaccgtgc

SEQ ID NO: 119652 - DNA, 1011 bp, Homo sapiens
agatggggctatggaggcacagagagatcacatgagggacctaggtggccatgccaggaattgaacccaagcagagtagctcttggactagatctcatcaactctgtgctgtgctacatgcctggccagagatagctgtattcaccctgggctaccaacctaagacaaacagctcagcttctcagcctcttaagcctctgctggctagttttgttctgttggttggatttgcagggcgctggccgactctgcccagtgcttccggcactcacagacctgcgtcacaagcctggctctcctgccagtgtgactgcactgccatctcaagtcatctccaaatatgtgcatcttttctcgccatccacattgcaagatgctaaggaacagggcccatgctttgtttgtgtccagtttccccagggtacctagcttgttagtgggtacttataagtggtttaatgccagttagcctggctggggaacacgatagtctctgctgaagaggcagcctactaatagtagataaaaacctgcttttgattggtgtgagcaagcccttatctgtttttagaataaacgtgatttgctttggcaactgtaaagcagatggaaagcatcatctgtagaatctagaaactgatttctgggagagtcttaggggcttggccctattatgcattctatattggcctctttatatcaggcatctctgtgctgcataattcctaaggtgactcttggtcccattaacctgtgcaagggacggaaccaaactaagctttgagattgaacctcgtttgcttggtagagccttggggtcttatctgccaagctgtttgtttggctttgctgtgggctgctttgcacacatgcttgtttggacaaggcagcacaggctgtcccatggtccagggggtggtagctggggcagccttggagggcagggtcaattcttgcttcagagtggtgctttttttcccatcttggccagggaatgctcatacattcttt

SEQ ID NO: 119653 - DNA, 1041 bp, Homo sapiens
gttccctgcagctttcaggaaagcttttgtttaaacaaaggaaccagcctactggtatctgggtgaacacaggcttcctacttagatggaaatgatctgaatggagggggacacgggtttcttttttcattccttttttccctgtcatccacctgaacgctagtgacttacttgcaaaggattggagtagagacacgtaaaagacgtcttgacttttggggaagtgactttctgcttctgtcttgtcaaggcattattttaaataaattgaataagcaggaaagtggaggatgaaggatttgttggatgatattgaagctgggagaaaatggacactctctgtgtagcatcttggggacactaagtgtcacttggtggaccctagtttcctccacggggtggatggggtctcaagccccctccagctacgccattttctgcatttgcagagtcagattttctctcctgagaatccgttcggacagcatgtgttttagggttcttttactccacttggggtttttgcaacacaacaaaacatacaaatgagcttcttgttcattttgttgtcaccagaacctaagtattgaatggcagccttaattggaaaagggcacgattagaagaaagggagagagtgtgtgtttgtgcatgtgttcttgtcctgtgtgtgtgtttgtgagtgtgtgtgtgaatgaaggtgaaaaaggggaggggacccaaccaacccctagtttttctgaaagcctgttgatttattttcttcctcccctgtggatatatttctcccccaaaggaattatgtagctcatgatttcagattttggctcagtggtgctttctggagataaaacgcagccgttgctttattcatcacagattgttgtgcctgtttgatttgcagcctccgggaaaggcctcgtgtgcccggcaaatcctctgctccctcactagagatcctccgtaggcaggatgagcttccggcctgatcttctcaacagtcccttctgtgatgttcatcctagtcaggccttagaacat

SEQ ID NO: 119654 - DNA, 1005 bp, Homo sapiens
agcccataggtgtgtgctggcagcgtggatgtgggaggatgaagaagggcagatgtccagggtggaccctcatgcaccttcagagctggagggaggtctcagaatccagaaataaacttgggcccagtgtgggcaccgcactaccctagcttctgtgggaagggctggggaaggagatcttactgttaaatgcttattgtaccaaattatatcaaccttagtagatgtggactgtgagatgacttcttcacgatgatctgatggacttttaggttagcagatgaagtaatctgtgtaataggccaaaccctattctttttattcccatccatctgaatacacagctgattgcagcagttccttctgtctgtggggaggaacagtaggagaagagcagtggagaatgtatccagagcaggacagacacacaccagggaaattttggcaaagctggggctttaaaaataacaaaataagcactattttaaagtatttaaagagctctgcatttcttgaagtgaactagggatgttagggtaattacccaactactgtttacattgaaagctgttctctgatttaataggaaacatatctggttttgatttctgaaaacatctggtagcaaaattgctgccaggagacccagccagtcctgaaatgggaggaagtccgaactcttggttttctagcgatgaggagtgctgcccaaagctagggctctgagagcagtcatcgtagatggactgattacagtccaggaggtgtacatggttcacaaataaagaattcatgttggccacacacggtggctcatgcctgtaatcccagcactttgggaggctgaggctggtggatcacctgaggtcaggagttcgagaccagcctggccaacatggtgaaaccctgtctctactaaaaatatacaaaaattagctgagcgtggtggtgggtgcctataatcccagctgcttgggaggctgaggcagaagaattgcttgaacc

SEQ ID NO: 119655 - DNA, 1031 bp, Homo sapiens
tcacctaagctggactacactggcacagtcatagctcactgcagccccaacctcctgggctcaagcaatcctcctacctcagcctcccaagtagctgggactgtaggcatgtgccaccatgcctggctaatttaaaaatgttttttttgtagagacggtgtctcactaggttgcccaggctggtctcaaacccctggtttcaagtgatcctcccaactcagcctcccaaagtgctgggattacaggcaccaaatcagtttttgtttttttgagtagccctttcttcttcttgcagttgccctggattgcccaggtggctctccaagggcagaaggagtcattccacctctctgtattccagcgttaaaattagcccctgttttagagacttttggttctgtctccagagctagggctagaagtcagcagctttaagaacagagcatctcaggaggtacagccagatctctgtccaccaggtttctagaagcatgaccctcagaggctgttttggaaaagtttataaattccttggtggtttagtggtgcgagacactgactttagctgtatgcccaggagctgctgcaaacaacatgcaggcagtaggcagatattgtgcctcccttgacacttatgaggaagactgagtgttgcaatggcatttggaaacttccattttctattcaaatttgttcaccagatccttatcaggtggaagactaataagagcacaaatagtgaaggggacctgaggcttaccctttccttgaggctaaagcaagaaaaggaaaccattggccagccacttttgtcaagcacttcctttgtgcagagaacatgctgtgctctgtgccttataggggtggaggataaacaattgggaggaggggctcccttccagaacatcccatgggctgcatgagagggcaacactgaagccctcaccatcacttgcaagaaatgactgatgggcacttacaaaacaacaggtaaatgaacgagtacattagcgttccatgtataagatgat

SEQ ID NO: 119656 - DNA, 1003 bp, Homo sapiens
tgatgtcactaaaaactccggcaggagttgcccgaagtgtacaaagaatgagcaccattgcatcacatggggccagcccagaggtgagggctactctaaggtcaaggtgtggtaggaaaccttaacaaggacaaccaatcacaaagcagctgaggcctgggatttacatacctcaccggagtcttgatttattcatcgtgcaggccctaggctgctgtccttataagggcctgcctgcaaagttgacccttggctggtgtctggcaacttaactgataaacagtttccttcgccaatatacaatttttcctaaatcataagatgggcttgctgtgccgaagctgcttgtgcaaacagtatgatttatactgaacactgctttctatttgggagtctggaattttgggacatggtaggcagaggctgcctacatcagcagccccacgataaggtccctgggtgatgagtttctaccgaacttccctggttgacaacacttcacatctgtagccactgctatttgctgggggagttaagcacgtccagtgtgatccactggaagaggactcttgggagcttgggcctggtgtgctccggtcttcatcccatgcaccttctctttgctggttgtgcttcatcctctttcactgtcataactcttagccataggaacagctgtatgctgagtcctgctaccagatcacctcttaccaaacctgggggtgatcttggagaccccaaacacactcatggattttcaaagtgactaagcgcaagtgaagataagtccagtgtaattccctggtgttaattcatgctacagaggattgggcccctctgcctgtgctaaaaggagctttagcttagttaacatctgcaactgtggcgtcatgattacttacgtccccctcagccccacctagaatccaaatgttgtgctgtccattgagaggccagatcatttgtggtctaggggtaaaaaatcacagaaatcttggcctgg

SEQ ID NO: 119657 - DNA, 1007 bp, Homo sapiens
gaaacctgacccaccccgcacctctctgggtgtattgctcactgccaggctttggggctgtttcaggaggctatgttcttacagggacaagagccagtgtgtgtgcgtgtgtgggtgtgtgtgtttgtgtgtagagccctggtgtgtcaggcacacgtgcagagagatttagatcagcagacctcagatgacgaaaccctaaactctagcggaagcaactgcatcagatggtggaaaatctcatccaaatgcctttacagtgtctttcaggtttttgatatcaagacaaccagaaatttgctgtgagtgacagccaggaggtgatgctaatatcctggggtctgaagattcctcccctccctctacgaaactcttgctctggtgtccatttgtggggccacctctctccccctcttgcagcccacagaaggactgggaagcattgacagtggtccccagctgccacctgctgtctgtgactcatgcactgtctgtgggagggtggagaatatcatcagtgggttgcggggcagagagtgggaagtgtctgctttgtggctgatgtgtgagtgtgggaacatgtgtgctcctggacgggagtggtggcattgctcattctgaggagctggcgggtagcatggaaatgtgtcttcacttggttttttgggtttctagtttccttttttctttttttaagacatagctactgaaaggccaggaagtaggacttgggggcatgccagtgagttggaagccgcattaatgtcctgtatctttagctcttcagtccaacaaaggtgcaattattatgttatgcacatgccttctgcaggattatgtattggcattgctgattctagctaatgtcttttagcagtttgatgggcttatattagtttccgggagttgccgtaacaaagtaccatcagctgggtggcttaaacaacagaaattaatttttttcagttctggaggctggaagctggaggtatcaaggtgtgggcagg

SEQ ID NO: 119658 - DNA, 1092 bp, Homo sapiens
gggaaggttaagctccttttgcagtctgttttcactttccgtgttgggcagatgtggacctgctctgctagctgtgggctgtgggcagcattgcccatttgcttcctgtttatgagagaaaagccccatctttgattttcccaggtgggccactgaaatcacctgaatgctctgaaactgtccctgacttctttgctcaggtgcccccgagttgtgaagtggcttagctcaaagcctcctgcagggcaccacagtctgtaggaggtctcttgttcttatatgaaaagctcacgtgaactttctgttctactcagtaatgtccctgtgattgtctgaataggaaggttttcattcccaggaggctcagacctcctggctcccaagacagatctgtgcggggccaagacgagcagcgtgcaggccgcccactctatatggtgcagccctaggaggctgtatgtcaggacctatcatctgttcaggtttaatcacctgcagtaagagagcagtctaatctgtctatatatttatttagattcttgctttagtctagaaaggattagaggtgaccgtgatgagtagttcaaaaattaacctgaatttaatgggcaaaagaaagtggaataagcttgcacctgtagtcatgacaatattcatgagaaatttttaaaagctaaaggaggccaagtgtggtggctcacacctgtaatcccagcactttgggaagtcgaggcgggtggatcacttgaactcaggagtttgagaccagcctgggcaacatggcaaaaccccgtctctgcaaaaaatacaaaagtcagccgggcgtggtggtggatgcctgtagtcccagctactcaggaggctgagatgggaagatcacttgagcccaggaggtggacactgcagtaagccaagatcatgccattgcactccagcctggcatgagagagggtgacagagccagaccctgtctcaaaaaataaaagataaaaactttaaaaagctaaaggagtctcttagaagcctcatttcccttcaaccctctgagatcttgcttcaaggtagggctgttgcactttaaaacccacctct

SEQ ID NO: 119659 - DNA, 1036 bp, Homo sapiens
gagtgcatggaaaatcaggtctgcaggaaaacccatgtgtggcactgtggagcagacactttgcctcactctctcgtgatctgagtcatttgggaaaggggaaaatgagtgggggtaaatcacccaaacatctgcaggccagcagagtaactttttctgaccctgacttacagggagaacaaattttatattatgatccggtatatacgtatatatggtttgttttttgttgtatgttgtttgtaaagccagtgattaagtttgaggtttggcaggtaggatttgtttaaattccagcagatggaactagaaaagacccatgatttcactgacctcaagaccctgctggatagatatatatttatctttgtatttatgtactggatcataattagtgtatatagtgtacctatatagcatatatatactgtatcagtgttaaaaaatttacagataacctacgtatgtatgtatgaatataaataaaaataaacataaggtttatgacatgatgcttacccttgtttcattggcacgtgaaatgctatcgtattttctttctttcatttcattaacaagaagaggaaaagctggctgtgacccactgaactgatttcaccatgcttaatggacggataactgtgggttaaagaaaagacccacaccccggtgacgtggaaagagcttgtgatctggagcagtcctgtccatagacgtttccaagaccatgaaaatattctgttttgcgctgtccaacatggtagccactggccccgtatggctactgagcatatgaactgaggccagtgtgaatgaggagctggattttaaattgtctttcattttaattaatttgtggctcctgtgatggacagcacagatctgggttgctgccctgtgcctgcccctaactcgctaattggcagtgagacccctttttccaagtgcagcatctgtaaactgggaggccagactcagtcatctccccaggggctgccagccccacccttctgcattccggtggtctggaaagcca

SEQ ID NO: 119660 - DNA, 2284 bp, Homo sapiens
acacccaggggaaaccaagtctcagaggaactgagtggcttatccaggttgtcacagctgatcactgacagctaagtcaggaccaaaccgaggtctctgcagagttgtgcctattaccttatgaggttgtttaatcactggggaactgtgcttttccaacaatgaagaaaacgaggcggttgacttcttggaagtttctgaaggaaataacctaaaataacaacaatgaaaacacctacatgcacaatagtgttcagtgaagccttatttgtgattactgaaacactggaaacaacataaatgttccacagtaggagaacagttaggtaaatatgataaatataattgataaaatactaaatagccattagaattatgtgtaggaagactagcaatataggaaattttcttatgataatttcctatattttaggtaaagaaaaaggacacagaagcatttgtatattatgatgatagccttgtttaaaatcacacacacgcacacacacctagaaaattaaagtctagtaaggagcccaaatcctaatgatgcttgttatcaaataatgggattataaatttttttcttctctaaatttcttgttttaaaaaaatatcataatgaaaaaatatatttttcaaaagaaagagacaataagatgggaaaaaatggtttggttggggtgactctccagttcttatattctgtgatcctttggctctggactggctgttcccagctgcaggtacttgtttttcacagggcaaaaatgagtttagccttggccaaaggaaaaaggcagtcttctaggaagtggaagtggttgaataaaggtctagggactctcccgttgtttaggagagtaattgggcatgactctgaatttggggagaaaccatagactcttggctgcagggtaatttatttgtatttctaaccttgtgtgcccaaaacccaaacaggtcagaaacagctggaacagtcctatcatttttctctgcctcctgcatttgccccagggtgggaagtgaagctcttgttggcttcattcagccttccaaagaaaatgcgccattcagccttccaaagaaaatgtacaattgcaacatttccattttttatttccccttttctttgcaggcaggtttcttttcagtcaaacctgtgttggtataaatggttagcagttttagaaccctgggcctgagaaaattcatcaccatctgcttgaatctctttatgggctgtgtgtgtggtggtgtgcagccaaaagggtgttggccagagagctggacaggcggttcttgtcctgacaccatactaattagcggtgtgaccttgggcaagtgacttcaccctgctagactttcatttcgttacctatataacacaggcaccagagtcaatttttaagagttccttttagctcccaccttttatgtttattctaataactcactttaaaagcttggtattgacttagccaaattatttaatttggtaaatatttttatgtgctgttttattatgactgctgtcatatggttggttcacttggcttctgctattgcttcttttttttttttgaaatcagttacacaaatatacacagctgtcctttataccagaaagcattctttcttttatctgtaagggaggagatgtattccagggcaaagtagcatggctcattgttggttagtgggacggctgcttgccagtagtgtgtgtgtatgtatacgtgtgtgtatgtgtgcatatgtgtatgtgtgtgcccatgggtgtgtgtgcacatctgcccaatgtgtcatgccttgtttttttcccctctttaatggcactgctgagaacacatctgcatgaataactgctaataccaactgtcaagctagcaaagcagtggggttgggtataattttctagcataaatttatcagcacagtgggcgtttggggttagctccttctgcagatgcctcgtgaagcaggttgtggtccactgcaccaaggaaagatgtagttttgccaaagaagaagtactgtgccatcagcagcagatcaaggggatattatccatcccaagcaactgcaggtcagaaattgtatcatggacagttcacaggaggccacagggagggaggtgattgagaatgtcaccctgtcacacttgagtcactggcgggtacagccactttttatgtgggtgcctgccactgacaggctccctcggcatgtagttacccttcttcaaaggtagaggatgtgacattagtaatctgtgtgg

SEQ ID NO: 119661 - DNA, 1009 bp, Homo sapiens
ataagtctcacgagatctgatgggtttatcaggggtttccacttttctgtctccctcattttctcttgctgccaccatgtaagaagtgcttttcacctccccccatgattccgaggcctccccagccacatggaactgtaagtccaattaaacctctttttcttcccagtcttgggtatgtctttatcagcagcttgaaaacagactaatacagtttcctcagttgtcctagccacatttcaagcactcaaaggccacatggggctggctggtagctaccatattggaccatgcaacatagaatatatccatcattgcagaaagttctactggacagcattaatggatatagcaatgggtaaatcagtcacttatgtgagatccaaacatggatttttgagcaaccccaacctgtgggtgtgtttcattttctcctgggaatgtgttgatagtctccaccttgggctatgggtgtctcaatactaattagtagaggtttaacaaggtctgggtgctgctttctggatttattagtaaggactctattattaatgagaagaagatgtgctgtgggaagtttcctaaattctttattagacatagggactgagcaatgagataaatgacagtgcccctccctgctccacccgccttccctcaggtttattacaggactttaggtagcagatggcacggacctgggtggggtgatgccagggcaggaattctgcctttgctcatgggtagcatcttccttaaccctctcagccatcctctcggggaggtaagaaagacattttccctcctcaaagcaccaagaagcaaagggtcttagtagatggcccaggaaggtggtgaggggaaggaagtatatgccaggcctctttgtcctgcaagaactttcgagaacacctggcagctagctcctgaggacctgggccagggggaggaattttgacttcagagtaaggtgctttctgccctactgccaacatgctgtgcagttcca

SEQ ID NO: 119662 - DNA, 1043 bp, Homo sapiens
caaagtgctgggattacaggtgtgagccactacgcctggcctgtgtgggaattttaaaaaccttttacacagttggtagcatgccattcattcttatggaccttacttttgtcatgcaacaatattagcttgaaaatttatatatgttaaaatttaaatattattttaaaaatatattaaatgtattaaatttattacataaattttatatagtaatataatcaatgttaagcaatataaatattaatataaattatatttaatcagttaatatgcattattaaatttatgtatatttatatctttacatatacagcatatacatatacacatttgtatatatacatatattaacatatttatagatatacatgtatgcacatttttatatatattacaatatataacatataatatatacatatattttacatatacacaaatatatgaaactctgaatgtgaaagtattattgctcctatttttggctacctagtatttcattgtatggatacatcaaaatttatttaagcagttccctgttactcaacatttaggttgtttccaattttggcttatacaaccatgtaatgaataatcttgagcatatgtcattttgcacacatgccagcttgtttgtgggatagatatgtaaattgctggtcagagagtacatgctgattacatttaacaaagatattgcctaattaactggcacctaaaatgacactgtattttttgttaatttccttgttgcctctcccagcaagcgtcttgacggtcaggacgcagacaaggcaaagaagcctcactcacctttgtgtccccaagccagcctgcctgggtccagtcttgtttcttatgcagtctactctgtacaatggggaaagtgagcacatgtgcacacgtgtgtgtgtgtgtgtgtgtgtgtgtgtgtgtgtgtgtgtaaggtatcactctccactttcagtggctcccacagcacctagaataacatccaagctccttggcatgactttcttggcctgaaatggccctgcctt

SEQ ID NO: 119663 - DNA, 1034 bp, Homo sapiens
gaacgtaggaagtgaaaaaccccaaacagttatcaggctgatctggctgttgggagtgtatagatacgagtgtttgcctggaattgaaactagctactttgactcatcctggtaaattgtccttttagcaaaggcctggactttgaattgcttgcccagtgagggtgacaggtctgtagccttcgatccacactcataactggtcacaggcctgtcaaagtaaggggctagggaccctactttgtagggaccctacaaagtgtggtctagggaccacagtgaaatgaaacttcagatcaattgaatcacacacatcctcctttaatttttaaaaatttcctcaaaatccctacctttgtgaatgaggcattcctctgttgtagaggcatttctaccaagtgtactttctacactgtccaaggctgcctcttattaagtacatactgtatgccaggcagcatggtaagtgctgtgtataaagcatttcatttcatgactaaaataatcctctaagatagatattagctccatttcacaaatgaagcaactgagattcagagacctgagtcactttgctcctagacctacagctagagatttgaacccagcactctacctcccccggagtcatttcttcctcttccatcagctgtacctgttcctctgccatagatcatggcagcccaggtcagactgttggagttgtcctttattccatcccagccctggaatcggttcccaaacctgtttgatgccatctgaaactctctgtgtctgttccccatagaagtcaggtcctttcgtagtttctgaactaggttccagtccaccccacccaaccctgcctctagccactatctacactgctgccaggtatggagtatctggcagtgctagagacctggtcatgtcatcgtttcccctttcaggaaaagccccagctgattggcgtgacatgcccagcctcacatcctgaagaagtgagcccagcctcacgtcctggtggccattcccgaacccaagggcttcagcga

SEQ ID NO: 119664 - DNA, 1253 bp, Homo sapiens
aggtgctgctgcatcaggacgtggacttggtgtgcattaacctgccgccgcccctcaccagacagatcgctgtcaaaaccctaggtgagcgacccctaccccgcatcctccgtcccacccccgccctttaaccttctctaggttccttcccccctgcctttccctctccgcatcccagaagcttaccctgcatctacgctgccccggggatctgagatcccagatccgactcagagctccctccttcctcgtccccggccttccccacctttgcgcttccctcctgcctcctggcaccacttggacgcgcttccccacgtgtgtagattgcaggctggagaaggcgtgtgttccggggatccgaactaggaagatcagatgccgataataggggatagggtgctccgcgagaagaggaaagttactcctcagctgtgtgtgtagtgtccaagtgtgtgtgtgtgggggggggggatgggggggtggaggagggttgtgcgcgcgcgcgcctgggagaggcgagtgcgcgcccagaaacgcctgaataaaaggccgcacacgtgtgtcgggttttcttgggtgcgatagaggacctgcccttcagcagcggtggcgccctgctagggtcgtttgtttctttctgctgtgagttagtttagcgtgagattgcagatgttaccatcggctggaattatttcgtctgcgctggaggcaaggacggtgggagtggttggatgggggtgatgatgtattagaatgttttcagaggcgtcataggttagtaaagactgatttggtaaaaccagggggttttaacttttgactgcagcctcccgggaaatgtcttctgccccaatttggagtaatagattttaaatttttaggaggatgggcgcagtagctccagaggcatggatgctttgcatgagaaaaggccctccctaatcgccttcaggaatagtttcggaaggcacagtgttgacccgtgggctggagatgagttcagggtgcctcaccatctggtccctgctcccctcaactcccaggcagtctgaacaatctctgaggacagagtagcagcctctcagcctatgctcaggggaaagagaagggcatgttttgttcatcatcagttcttgcacgtaacctaaaacaatcccaggaaggttgcttgatcttacaattccaagaaaatgagcagctcacctttgaaagctgaagtttctattggtgaggaaaaacacaaagcttat

SEQ ID NO: 119665 - DNA, 1054 bp, Homo sapiens
gacactaacactaggaaaatgaataaagttaacttggagcagcccaagaacaaacttataagtgcatgatggtattttatgtgcaaaactgctttataagtactataagactattacaggtattaccagtgccctcagtgtaaactccttggcccacccatgtaaagtgtacatcgagccctcagggtccctgactggttctccagccgccccataggctatgagcatccccgttccctacacaaaggaccactgggatttattaaaggttatgccttgcaatgcagtacaaagttttatatgatagtgtcttgttgcctgtttctacaaaagccaagggtgtaacattaaatgcaattttgcaaggggctgaggtgatgtggtccaagtatgtaatcacttcagggagccatatgtgaccttcatacactgttgataatggccatgcctcccagtcaggcctgtgacacctgctggacagcaggcattccaaggcccctaagcactgagttagctggtaaaggttaaggaaaaagctgtattcttactactttactccaaggtagtaaagtgtatggaagatgtacctgacagaaataacttaagcatcccctgagaatgaccctgtatggcagatgcatctgacagcaataacttaagaagtgagggttgccacgtggaggctgctgaggggagggtgctgagtgaaagtgctatgtaaactgcatgctttttataagtggttgcagttctgtccagcccgcggccactggaccaccctgtaaggttccccaaataaaccctatgtttccttcactagctccaggtctcttctttggcctcttgaacctggtgccatccctactgaagttaacagaggtctggcccaacctaagggcatcattttttaaagtcccatggaaaaaactcccagcagagttcagcatctgggaacggttggcaggccccacaggaaccacagcttctgcctttatgatgctgagaaacacttcactgttgacttcccccatctaagggggccagagctaaattt

SEQ ID NO: 119666 - DNA, 1059 bp, Homo sapiens
atggtggatgtaatttgggttggcaggatattggagtggggaaacagtcaccaagattgcctctgacagtggtggaaagatgctcgggccgggcgcggcagtactttagttggacgaggtgggcggagcccgggatgtcgaggctgcctggagccgagatcacaccactgcgctccagcctgggcgacagagcgagaccctgtctcaaaaaaaaaaagttcgtctcctttagtgtccaccaactgaaaataagaggttgctgtgagaattaaatgaggtgatttgtaaactgtaagggctgtacagacttagtgtatggttgctttgctgtctgatactcgacacagagagctggctccaggcagacattacttaactgctttcaatttataacagtgacctgagggttagaataccgtgggcaccctttctagttttcatcaagtctttcagagaatgtggagttttgtggacccggtcttcccatagcttagaggtatgggggcagtttccagcctaattcatttctttgcctagatgtagggcattcttaaaagcggtaacttcagaagcaactccggacatactatgtacatgactttctattaattttaaacgttttcattccaaaagaaaagaaaactccttccagacactattttggagaagttaaccacagcttcacagactaagtaagtaatggatctttttatattacttgcttatatacacccatctttgaattatatactggtacatttatttgaatccatataactgaaggaattgtagaacccaaattcaaaagctaccttggtatatgaatttgatgggaaagacggaggtaacgttctacttcttattttaccatttatttttgttcattcccatagctagcttttgaattcctgatcccattgtgttcattcagtacattttgttgactgcctgtcattgtactagggcatagtgggtggtggtgaataaaaagtgttttgaatcatttagtggggtagcaggcacttatccacaggctctgaaaacttgatttgtcccata

SEQ ID NO: 119667 - DNA, 1400 bp, Homo sapiens
ggtctgcctcatttcatttggagaaatcacaaaggattaatttaatagtttaggcacaggagacagggaacagcctcaagggggctgtggcccaatggagagagaaatgtaaatggacagaatacaatacagaagcatttgcacaggagaaaggccacacaaaagcggaagtgatgggaggtgggggggggcaaatgagaaggtaaaggtgacacttgagcttggttttaaaagatgaaagggaatttgccaccaaatagatttgctcttacgtttaatgtattcaggatctgagtaactctttggtaaagtttttttactgaaaacttgagagtcactggcctaagcaaaagggggctgaatttctgaatttaaagccttaaggggagaaaaagaggatagaaaaaaaaaaatttagaaggctaaatttagtagggtttgatcaattcccaaagacgactatagcttttcgctttaaaccataaaacaccaaagatgctaaatgaagtggggaacaggaaggacaggttggtggcaggtaaggcaagtatgggacaaatcaagttttcagagcctgtggataagtgcctgctaccccactaaatgattcaaaacactttttattcaccaccacccactatgccctagtacaatgacaggcagtcaacaaaatgtactgaatgaacacaatgggatcaggaattcaaaagctagctatgggaatgaacaaaaataaatggtaaaataagaagtagaacgttacctccgtctttcccatcaaattcatataccaaggtagcttttgaatttgggttctacaattccttcagttatatggattcaaataaatgtaccagtatataattcaaagatgggtgtatataagcaagtaatataaaaagatccattacttacttagtctgtgaagctgtggttaacttctccaaaatagtgtctggaaggagttttcttttcttttggaatgaaaacgtttaaaattaatagaaagtcatgtacatagtatgtccggagttgcttctgaagttaccgcttttaagaatgccctacatctaggcaaagaaatgaattaggctggaaactgcccccatacctctaagctatgggaagaccgggtccacaaaactccacattctctgaaagacttgatgaaaactagaaagggtgcccacggtattctaaccctcaggtcactgttataaattgaaagcagttaagtaatgtctgcctggagccagctctctgtgtcgagtatcagacagcaaagcaaccatacactaagtctgtacagcccttacagtttacaaatcacctcatttaattctcacagcaacctcttattttcagttggtggacactaaaggagacgaactttttttttt

SEQ ID NO: 119668 - DNA, 1049 bp, Homo sapiens
aacctcttggcattttgttttttttggattcctagaatataaagttttctgcagtaagtatattagaaaaacataattcaaaatttttttaattactctatatgaatgtaattactaaaactgggtgggcttattatactttagatgtatatacatactacattgacctgtttttcacaagtaacttaatatataagccattataagggggaaaagtataattatgaactatctccttcaaaagaacattattcaacatataaagctattagagacaggagaataaagctggatcttaccccaagcattattcaaaaactggacagcagctcttttcactggtaacctcttgttggcaagagacaggaacttatttactagaaaagaaaggtatttatcatttcacagttttatttgcagtaaaaagtgagaaaaatagtccataaaaaaattaccagtagtcctgttggttcctggcccatataatgaattatgtatgaaggcttgtgctgcttgttgccttgaatctctcagatcttggtcttttagccttacggccaagtagcttttattctggctgttgatcaatataaaaggttaaataagaattacacatgcttactttcttttttttttcttcctgagacagagtctcgctctgtcacccaggctgcgcgatctcagctcactgcaacttctgcctcccaggttcaagcaacttgcctgcctcagcctcctgaatagtgggattacaggtgcctgccaccatgcccagctaatttttttattttcagtagagacggggtttcaccatgttggccaggctggtctcgaactcctgaccttgtgatccaccagcctcggcctcccaaagtgctgggattacaggcatgagccaccgtgcccaggctacatgcttactttaaaatatttttatcatttgtctcatagtgataaatgaaactaattttatatatgcacagataggataaaactaaattacaaggactacaagaaacagacactcatattttagtagagcacatggt

SEQ ID NO: 119669 - DNA, 1206 bp, Homo sapiens
tggagatggctaggcagcctgtttggtcctatccacagaggtggaagaacccatcagtggaaacttgtaatgaaaacctggtgccttttttagttttagttagtatcaactgactttgatcaaccagaagggaaataattccttactctccactccaaatatcagataaaaaattgtacctttcccatcatagttaatatggaagtattttagtatctgatactttaaaagtctgattctgccagagtttatcttatagttgaatacacaatacccacactaccttgtcagaatagtatgtccaaggcggcatctgtcttttgcttagaaaccttcatttgctgatatttcagagtggtatgggagtggtagtttttaaagtcattgcagtattctcctgattgaaatgttttttaaaatgtcttgctaattgctgttctcatttttaaattatttttcctcagaaacccacaatctgccaaagcaacctccacttgccctagcaatgggacaggccacacaatgtctaggactgatggctcgatcaggaattggatcctgcgcatttgccacagtggaagactacctacattagctatgcatttcaagagctcacacttatattgtggcatatagtcaacatggaagtagaccagctctgctgatttgaaatttagattttttaaattatgtactggggacaggtttttgtcgctttacattgcttcctagtttacagcatgatgcaaatgattttctaacttagtgttaggagaaattattttccatctttaacctcttagttgtctaagagttaaatattactgaatttcagacgttcaaattgatcatcacaaatcctttaaaacaattacctaaaagaaaccaaaaatcctgccttctttgtgggggaggggggagagaggggaaggaaatggaacaagttgtgtttgtgttagcatgtgggtgatgtaaacttcaaattgggagatgttccgacccccactcccatataagcattcaatcagtgtaacttgcaaaatgcataaacatccgacagtttgaatttatagtgttgatggaagaaatcatttttaatgtgtactgtaaaacttgaaatactcaggagctgagtgaatatgtttgttgctacttacaatcccgacctgttagtcccagtagttttgttttaacatggtctttttc

SEQ ID NO: 119670 - DNA, 1072 bp, Homo sapiens
aatgcttatatgggagtgggggtcggaacatctcccaatttgaagtttacatcacccacatgctaacacaaacacaacttgttccatttccttcccctctctcccccctcccccacaaagaaggcaggatttttggtttcttttaggtaattgttttaaaggatttgtgatgatcaatttgaacgtctgaaattcagtaatatttaactcttagacaactaagaggttaaagatggaaaataatttctcctaacactaagttagaaaatcatttgcatcatgctgtaaactaggaagcaatgtaaagcgacaaaaacctgtccccagtacataatttaaaaaatctaaatttcaaatcagcagagctggtctacttccatgttgactatatgccacaatataagtgtgagctcttgaaatgcatagctaatgtaggtagtcttccactgtggcaaatgcgcaggatccaattcctgatcgagccatcagtcctagacattgtgtggcctgtcccattgctagggcaagtggaggttgctttggcagattgtgggtttctgaggaaaaataatttaaaaatgagaacagcaattagcaagacattttaaaaaacatttcaatcaggagaatactgcaatgactttaaaaactaccactcccataccactctgaaatatcagcaaatgaaggtttctaagcaaaagacagatgccgccttggacatactattctgacaaggtagtgtgggtattgtgtattcaactataagataaactctggcagaatcagacttttaaagtatcagatactaaaatacttccatattaactatgatgggaaaggtacaattttttatctgatatttggagtggagagtaaggaattatttcccttctggttgatcaaagtcagttgatactaactaaaactaaaaaaggcaccaggttttcattacaagtttccactgatgggttcttccacctctgtggataggaccaaacaggctgcctagccatctccaaggcatatataggtaatgttatttgggctggtggggagtaagtggtggtgg

SEQ ID NO: 119671 - DNA, 1286 bp, Homo sapiens
atggaagtaagggagtgaagagcttgaatatcagagaagctcaaactgatccagtagagggcaggattcctagctggtcctcccctgttacctggttcccaaccattttgcttgagctaaatttgcaatgggtagcagcagcctaagccactggtatcacagctcccaccatgcttatgaatatgggcacaaggggcttcctgatgacttgtgagtacccggcaggatcaagccttgatgtcacattctatttgcatttatattagccggattcaactacatgcccttacccaataaaaagggtgggtgaggaagagaaaagcaatttaaaaggcgaggcttagccaggggtgagcatcaagtgcgaaacgctaattcgatgttcgtttggttgccattcctatgagcagctcactgtagcgtttgtgattatagtatttatatactgaacaagtactttttatatgaattgtgtaactgcacatattgtgcatttctatataaatgtgatagggtcgattgtttacataaaacaagtttgagttttgggcagttctcatcaaaggtaatttatataaagagtgagttttcatttgacttcagagtctaattcccaggtaattgggactccagtctagtttagaagtctgtgctgtgctgtttggccctgcaaggttcagggacttttagtcacatatttcaaactagtttaggaagatgagggcagtgccacaaaaagtagattaaagagtagtttagatagggagacttgcaatgagggccaggactcttacagcaagaatgtaaaggaagcaatgaaaagcattcatatttaagactcagtctgtttctttgcccttagaaaatttattaatttgttaaggaccaatactgaagtttgggaataggagtagtgtcctcagtgttgtagttctccggaatttaggatttgtatataaatgtgaattttctttggttaatgtgttatattttcattggttctacaaaattcatttagctccgttggtaaaagtaacttagtaataatgctggaattgtaaggaaaattatggtttactataaatgtctttttgaagttatattgtaggtaatcattaagacctaattattagatgatactaatctttaaagtgaccagttttcttacaatttagtttcttgagttcttcaagggaatttaattgttgagcaccattatctatagacacatatactcttacatattgtgctatattatgtagattcagccataaatagtgcttaat

SEQ ID NO: 119672 - DNA, 1035 bp, Homo sapiens
ggatgagaaagggcaagagtacagttaatcagaagcctttcccccacctctgctttcataacactagtaagataactagagaaatgatggaaaatgggtgtggaatctggttttttgagcagctgaacctaggagatggtgctctttaggaatttcagtagtcagtattttcaaagtgttgtgttcctgaactcacaaattgacagtttctgcagcaactctccatgtctgccttccaaattggtaagagtgttctgaatttctctatttttatatttgtataatattgctctggattagggtattgacttttggcataataataagacgtcatttattgaaagattagaatgaactgatactgctaatttcatttagtcctcatacaaatctaggaaatagggcctcttatagtccccattatgcagtaatgaaactggcacttagattgtcaattgccaaaggctacacagccagttagtggtggagcttggacttgaagccagtatctgaaaccaccattagtatgtgcctcccatagaaagaagacaaaaaatataaagtagttgtttgaaaagaagacgactgtcagtcattttaagttttgaagaggtgtggcttgagatagttggaaatactgaatgcataaacaggtcctgaagggcagcctgtttaattttttcataactgaatttgagaagatgacatcccagtgagatgtgtccagttcctaaatctgttgaaaaaaggaaatgcagacaggccctgtcctttgactgtcacattcatatcagtagtaataaattgtgaagtaaaacatctgaatgttttgccttccactctccctacaccagtactagttcattcctttgaaatttttttttcctgttttgtgtttagggatgggaggaagttgaatgagaatggctgtccacaggaaaaatgaaaataaattaggctttgctgcataatttaatgttcaaaaatgtagagcgtcccagtgctgggagtaaatgggtttaaagtttacattat

SEQ ID NO: 119673 - DNA, 1184 bp, Homo sapiens
ttcaagagattgagaccatcctgctaacacggtgaaaccccgtctctactaaaaatacaaaaaagtagctgggcctggtggcgggcgccggtagtcccagctactcaggaggctgaggcaggagaatcacttgaacccaggagttcaggttcagcctgtgcaacatagtgagaccttgcctcttaaaaaaaaaaaaatagaaaaatgagaagagtggcattgctttatatttttttgtaagtctctttaatgcttggtttaataggtgagctgtattcgcatacagaccagactgcctttagtctgttgtggtatcacatgtcttgtgcctctggaaaattccactatatagtcagaggaaatgaaagagaaaagggcaaggaacatcttagtactattatacaaataattttgacttcacagatcccctgaaaggtttttggacccaggtgtccctgaatcatactttgagtactgttgttttagggcatatttggaaataaagaatttttttttttttttaagaattcttaagactttttttacactaggtcatctgacttggttttctttttaaaactttatgctaattgagcaggatgaaatacctttgaaaatttaagattatactccattagcttactttgtgtttgattcttatttacatgaagctcagaagatggcattatatggccaattctcaaagatattccttggttatatactgaattgtgtgaagatgtatcatctttatttaaagagtatagatgtctttgattttgcacctctaacttctaagcaaatgccagctactttcagagactttcttaatactctgagctgcttccatctcatttcccaaacttatcttgatctagatagggataaggtgagcaactgacccaccttatatataagtagccaaagaacaaggccggatgatttgagggcaacatgaagagaaaacaggtttagaaatcattccacttctttttgtcacttcagttcacttgtaattgtagcattttttaaaattgtagcatcgtttttaggtttgcataaactttgagtcatgtgactcagaagttcatgcaaatacacacacacacacacacacacgagagagagagagagagagagagagacagagacatgagagagagagattgagagatttgattaat

SEQ ID NO: 119674 - DNA, 2056 bp, Homo sapiens
tatacagttaaattattttatcaatcaagatatataaaactattttcttagctgggcatggtggctcacgcctgtaatcccagcactttgggaggccgaggtgggcggatcacaaggtcaggagtttgagaccagcctgaccaatatggtgaaaccccatttctactaaaaaatacaaaaattagccaggcatgatggcgcgtgcctgtaatcccagctactcaggaggctgaggcaggagaattgcttgaacctgggaggcagaggttccagtgagctgggatcacaccactgcactccagcttgggtgacagagtgtgagactccatccaaaaaaaaaaaaaattattttttcaaagtggtatttttctaaaagtagtgcatttaatcttttcagttagtataatatgctgtcttctgtatttttattgtagtcatttagcttttcttagctttcaggagcattttattacatctctactacgtcagttaaggcagcctgagtggcattattaacagttttcctttttttttttttttttttaaatgttgcttaatgtagttttagggaattatactttttctaaaatttttttctgacataagtaccctctaacactgaaaggttgtcccctctcaactgcatgctgaatactggatcctagactcttgagagctaaataaagtatatcttttagctgcagtttcatattaaaaatgaatttttaacaatctgcatatttagatgaaatattagggaatagttactaaatgtacaaaatggtataagaaatgtatgttcgtgtcctcattatactccattccataaggtagtaaaatacttgtctgtttttcttacagaagttgattcaagtcagttgagacgccagttgtgtggaggaagtcaggccgccatagaaagaatgatccactttggacgagagctgcaagcaatgagtgaacagctaaggagagactgtggcaagaacactgcaaacaaaaaaatgttgaaggtgaatatattttttcttgaaaaattatgaatatgtcagaggaactaaaatgtagttttgtgaaacactgagcagtgtaccagaaattcttgttagggaactgggacctgaccttccccctggctccttgcccatctgagagtggaaatatttgatgaagttaggcagttctgatctactggaaagagcattggactaaagcaaaaaaaaaaaaaaaaaaaaaaaaaaaaaaaaaaaaaaaaaaaaaaaaaggattaaatcccagtgctagtgcttatcaacattgtgtgtcctcgttaacttagtttcttagttttattttctcagctgtaaaatcagcagttactaggagcaatgtgggcgtgcagataaaactataggtctgagatctcattttagtaaatgttgttcaggtttatagcattttggatgtataacacatggttctcattttgatgggaattagtgaagaattgggtcacttttcatggccagaatagttaaaatacattttaaagtctcttctggattgttgtccatgagctgataggatggatacaatctaattcagtaaagtagccacagttttgtgtaccagttgaaggtggaggggctttctcctaacttaagtcagcattgcagttgtagagatgtacagctctttaacagttggttcattgtaaacattttcttctgaatattttggaagaagactgaaattaaaggggagatgaatgcagtggccttgagactaatgtttgggtatggtaggaaagggcaagcaaaagattcctgccgctgtttcttcctgacctggactgaaagttagtacaggttgagtatccctagtccgaaaatctgaagtgctccaaaatctgatacttaagagtgccgacatgatacacaaggatatgctcattggaacattttggactttaagatgagagatgctcaattagtaatgttttaacatttgaaaaaatctgaaatctgaaacatagcacaagtgtaggacataacatgcttgcctggcctaggatgtg

SEQ ID NO: 119675 - DNA, 1225 bp, Homo sapiens
catttgttatgttttcacagtggttaagacacagtagcatatttaaccttgaacggtgacataagataaatttacaactgattttttctctgtgtgtgagttttttttggtgtaaatgtgtagaatgttttccaagttcaaaactaactttacaaataatcttttttgaaagcctgcctttaagtagcttgcatatagcagatggttaagtcatttagtaaacattggtgtgaggatggttttgaggatttgttgggcaccaaacattctgctaggtagggtgtctcactttgaagaggtttgaaagatgatatctcagtcagtgtactatgacccttgatatactcaggtttaatatttatgaaacctaaaagttcatgaagtgacattatttgaattaaatactactgtgcagtagcaaattattgtgaattcaccctgcccaaatcatccaggactgggtcaatttaatattggtttggtctataacaaaccagttggttacattgcattttcaggaaatggtcatcagtgccacattttcttattaaaggagagagagcctaacttttagcatggaatcttaatggaaatatgattttgcagaaaggattgtatgtaaaaaaaaatctgtatttgaaaattgggagattaatctcaatttctgggttgtctgtcacacgtgacaaaaatttactgaagtaatagtgtgtgtgattgatataagttgtaatggagaaccacaaaagtgtatgagaagagcagaaaaatcgtctttcacagcagaggtgatatattggaaaatataaaatcaaaatattatagtttaaaaatagatggaaatgtaaaaagttaagtacttcatcatgctttatactaaatgcattggtactttatcattgatcaaggctcttgccaatgtttgagggtaagattgcagtcagtttgtgagtttttctcttgaatactatccctacagcaggaagttgctaaacagatctattattacctgagttcagggaagcaagcttaacggaagggtctgatgacacaacatcctcctttgtctgcagtataaaagggaaagaaagtcaactttgaactgccttaagctataagttattttgtagttggtaatggctttcctaactgtgaagtaggcaaagatggtattaactatttaaaccattttacagatgtagagcgggatatcagaaaagtaaat

SEQ ID NO: 119676 - DNA, 1049 bp, Homo sapiens
ttactaactttcttttctgaggtcactaagtttatgttttatctacttttgtaaaagttaatcgtttgctttcttttactgaataggaattcagaaattggtattagcaggaagaatgggagaagccattgaaacaacacaacagttatacccaagtttacttgaaagaaatcctaatctccttttcacattaaagtgagtttgcataataaaatgctatatttgttatatattataaatatttgtcaagttatgtaataaaagacattttcgtgcttttgtaattttagtttttttcgtttttcaagtatatacaattttgtaatgtcatttaagcaacatgttatgaaaaatacttttgtgttaaggaccataagcagaaggtgtcttttgctatgtatttgcttttattattctatttatgtgtttaaaaatgtgaaaatcttatttagaagatgggtgtctatttttccttctcagaagtaccttacatttaatctctctggcattttaaaaaattgtggtaaaatatacataaaatttaccattttttacattcacatcattgtgcaaccatcaccaccatccgactccagaacttctccatcttcccaaactgaaactctctattaaacactaaccatccattcatccccctagcccctggaaaccaccattctacattttgcctctatgaatttgactacccatataagtagaatcagagtatttattcttcattactggcttattttagtgtaatagccttaaggttcatctttattgtagtatgtatcagaattttcttccttttaaaggctgaattttactccattgtttggataatactgcattttgtttatccattcatccactgatggacacttaaagtttgcttctacctcttggctgttatgaataattctgctgtgaacataggtgtacaaatatctgagtccctgcattagatttttttggttatatacccagaagtgaactttctggatcatatggtaattctatgtttaactatttttttttaataatag

SEQ ID NO: 119677 - DNA, 1360 bp, Homo sapiens
tgcattttactgtgaaatctatttaacatattcacacagaaattatccgctcttgatctttaccttgttttgtactgaaaaatacttgttataactattaaagatataagacataaatacagaaaatgaaaatatggtaggatttggagttgcaagaggaaaaatcagttttggatgtggtatcagacaaacttgtgttccaattccatctctgccatttgttagcagaacgaccatgagcaagttatttaaccttgaatcctcattttctctgtctttgaagtagaaataataatagtggcctcacagaattatgattaaaccctggcatttagtagccactcagaaactcattctgcctttagatgtaacaaccaattagtgacatagccaaaagaatgacccctgtattttttgtttacttgaagttatcaccttttcatcttgattaaccttgaaaccatggagtgtacctgaatgcatttctgagtttgggtatattcagattcatccttttcctcccttgaaatacatatatttgaggttttgtgttttttttttaatatagagaatctccactcttcctggcactgtgttttgcttatagttatggtcttatccccttccctttgtaaagttaggcatcccaaatatacagaatgaaaacagtaaatttaagctattaaatgccagactagctgagatcatacttttatgataactagctttaacatgcagtttatagaaatgtatcatatataaaatgtgggataaacctgagttatgtgtttatagttgaatttctgtaactactatatgacataatcttagaacaagaattacatgcacatatattagtagcataataccacgtggtataatacaacgtagtccctgaataaataaaacagagatcttgggtctctttgttttttcttgatgattacattgcaggaagtgatattttttcatctaacatataatgtattttagatcatttgttttagccttctaatattttgattgggattttaaaatatgaagtaaatttatagttctattcttttaaatgtaacattaaaagaattattaaatctaacataaaatggatagatgtttaatgaaatatgctatcttacagccaaatttgtatcctactgtggggcttcaaacaccaggagaagtggtcgatgccaattttgggcaacatcctttcgtgtttgatatagaagactatatgcgggagtggagaaccaaaatccaggcacagatagatcgatttcctatcggagatcgagaaggagaatggcagaccatgatacaaaagtaagagtgaagaaatttcaattgatgctattca

SEQ ID NO: 119678 - DNA, 1004 bp, Homo sapiens
tttaaaatacagtcttattgatatttattaggtttatatgacatgcaaagaaagagatcttttctctaaccaccttgggtgtagaccctcagaaattaagctccaacttgcactggattcattgtataaaggaaaataaatcagaattgattctcaagtgtctttttaaatgtcaccattcattcatttgaaatgtatttccttggacttttcagcagaaggctgtatagcagttataatcgtttattcatccaagctatatagaggcctactatgtggcaggtaaagtgcttggaatatattattcaacaggtagtaaaggtctctgccctcttggactttatagtattcaagctgtgaaagagaatgagcagtacatgaaaaacaagtaaagtagaacatattttaagggtgttaagtatactttggaaagaaagggaaaaaacagagaatgggaataccaacggtaggacacaaggttgtacaagttgctcccctttgctcaaggtgagacttgagctgaagcttttggaggagtgagggagtctgccaagtggatatgtagagcaagagttttcaggcagagggaggttagagaaaaggtgctcaggcaggagcacagatggcttgtttgaagaagagtgtgaagtgtggtagagaggagtgaggagggcagagcatatgtagtagcagatgatcagagataataatggggttgggggtaagctattaatagatcatctagacctgggcaagccattgggagggcttggaaatttactctgagtgaaatacaaagacattgtggacttttatttgtcatgataggacttcagtttttatgggatcactgtgattgcttagttgaaaagtagactaggccgggcatggtggctcacacctgtaatcccagcacttagggaggccgaggtgggcggatcacgaggtcaggagatcgagaccatcctggccaacacggtgaacccccgtctctactaaaaaaa

SEQ ID NO: 119679 - DNA, 1033 bp, Homo sapiens
tttttaaaattttgtcttgatcaaaattatatatttttacatatgaactttgaaataattttgctcagttttaaaacttctgttggaatatgtcttgaaatgtataaatgtgtgtctacatcattttagaaaggttgtcctcctttttttgtttttgccctccagcctgagtgacaagagtcctggtctatcactcagggtggagtgcagtggtgtgatcattcatgtctcactgcagcctcaacctcctggggtcaagcagtcctcccacctcagtcccccacatagctaggaccacaggtgtgcaccaccgcacacaactgatggttttgtttttttttgagacaaggtttcccaatgttgcccaggctggtcttgaattcttgggctcaaaagatcctcctgcttcagtctctgaaagtgctgggattccaggtgtgagcctctgtgcctatctgaaagattgccatttttatgctctccagttatccagaagttaactatatccatttatatacagcttttaatatgtaattttgagccttccttgagaaccttattcctgttttatgttttctgtagttattgtggctgtccagctggctatactagaagaaatattaaaatgttcctcttacatgtagtcactttgccagaatgcctaaataattataaaaggttttggtagattctgtggttttctatgtatataatcataccaactacaaataaaggtacttttatatcttttaacatttatgctagtcatttagttttcttattttattaagctttctaaagcccctaaaacagtatttaacaattataggcatctctttgttcttgattttagtggaaatgccttcagtgtgttttactgttgaatatcttgcttgctgtatttgggggaaaagtctcatagttaaataatttccttttattcttattttattggagttcttattaggaatggtggccgaattttatcaaatgccatttaaaaccttgataacaataatgggcaattagcctt

SEQ ID NO: 119680 - DNA, 1062 bp, Homo sapiens
ggtgattttgtcattgtaggaatatcatagaatgtacttacacaaacctaaatggtatagaccataccacatggcttattaaacacctaggccatgttgtgtggtctattgctctgctcctaggctacaaaactgaatagcttgttattgtgttacaatagggaattgtaacacaatggttttgtgtatctaaatacatcacataggaaagatacagtaaaaatgtgtggtataaaagatttaaaatggcacacttgtatagaacagctccattataatcttataggactattgttgtacatgcggtctgttgttgaccgaaacatttgttatgtggaacatcactgtaaataggtttttaaaagtgtttcttgcattgccagcatgtgatacatatactaacttaatcaagaatgtaatagatcaaagatgcattaaaatcttaataaggtagtcattaatatactgccaaaaggtatagcagaaaactaataatggccataaaacaaaaataagaattaaaaagaacacagaaaaagatggagagaacagatggacagatagcaagatagtaggcttaagcctatcaataataggaattaaactagaatgctgttagtctccattgtatgttaggcacaaacattacttacataactgttaataaatgcataatttgtgatgatctacgttgacatattgatctgaaaaatcttcatgttcattgctcttggtaaacacatagtaccacaataataaatttcttgttcacataaattttgcctgtccctcactgttggattgagtttgtttttatatgtcagatagcctttatatatctaccagctattcagtttactgtgtgtcatgagccacacccagccacaactggtattacaaatttccctttgtcagataaccctcctttcatcacttcacagtaactcacaagtggtaactcttatgacacccatttcccaggcataaacttaggtgtttttcaaggtaaaatactcactttcttgtagtatttattccataacaattttttgttgttgttgt

SEQ ID NO: 119681 - DNA, 1131 bp, Homo sapiens
gcaatttatgtttgggtgggagagaccttgttgtatgtatatgctgaggagaaggaatcactagtgagtccaggagaaggctgaggaggcgaatgaggcaagtttctttgcccagtaggtgggatatggggttttaagtataaattaggaaggtgggatgctgtgcggaatttatttattggcacttatcactacttctggaagcctgtcttgacagccttttcacctccaaacaagatgaggctcctctgttaacaccctttcacagcatcttgtacttccccttcatagcatttaatcaccttcataattatttatttaagatctgtcctacccgttagagtatccctttagggagggcacagacttttgtctttgccacagctttatctgtgtcatcctacacatagatatttagtaaatgttcattgatcagagaagtgaaggtattgaggaactgtgagatttaaaaccacaaatttgtgacagcggtttacatacttacaattttttactatatacccagctggttagagaggaaagttgaattgtatgattgatgcaaaatgggaaactataggttaggtaagttggaagaacaattgtagtaattgaggttacgggtgagggaatatctaaatggaccattttagttcaggctgggtagggaaaaaatgaaatcagcacggagctgatatactcagacaaaatgagagatttatatattgctgtttttagtgagttttaaggagatgcagagggatttctgaggtggatttgctgcatttggctaagtgtagggcataacaatgaaagacaagagaagaaaatctttatcagagaggcttttttggtctgttttgtttactgctatatccatgttgtgtagaacaatgccagacacaaaataggtgctgcataaatatgttaactaagtagaggtgggtagggataataacatcttttcttttgtaatcccctagcacttgctgtgcatagtacagagtatagatagtcaatatttatggaatgaacagaatgtgagtcttggattttggatatgttctaaaaaccattaagaatggtaggagccacatttttggtggagagaaaaattggttatttaagaag

SEQ ID NO: 119682 - DNA, 1105 bp, Homo sapiens
ttttttttttgtggagatgggtctcggtatgttgcacaggctggtcttgaactcctggcctcaagctatcctcctgcctccctaagtgttgggattacaggcatgagtcactgcacccagactgccttcaatctttttgagtagggaagatatatgatacctgctttagaaagataatacaaagtggggagaggatgaagtgtgtgatggcggtctgcaagactgctacagagtttacgggctagggctaggagttaggttgtgaggcggttgcctgaggatagagtgtgatagagatttaaaaaaaaaaataacaggaggaaaataacagacgaggagatttagtttgtcgagtacctgttatgtgccagatactgtgctaagaacctaggattgacagagatggagacagggctgtaaacatggctgagaaagggtacctactttccagaagtttgcaggtaagaagggaaatgaacatgtaagtaactaataaaatccagtatgagatacacagtagtagacatataaacaaattagagaagtatgttggaggaggtaaccaacactgttggaagacagggtggtgatcagggaagtctatctaggaagcttacataaaattacagaagaggaatacagttaaacataagcttctctgtccttcagttgctcaggtatccttcacaagataggatatgaacagagatgttaaagattagtagctgttttagaagctgactagttacttttgttgagaaatatagtggagatgtaaatcttggctctgctacttaactggttctgtggttttgtattttttgacagactctctcagtctgtgaaaaggaaataatagtgccaacctcataagactaaattacataactcacttaaagcacttattagagtacctggtgtgaagcaaactcaaggtagcttgatgctgctctgaaaaaagatgcctggtgcacagcaaactcgtgtcttcttgctgctgctgttgctgctggctgctgccactgctgctgctggaggaagctcagcataaagttttgtgggaggaatgtgtctggagatgatcatgaagggacttctaatgcta

SEQ ID NO: 119683 - DNA, 2962 bp, Homo sapiens
aacatctttgtaaagtatggaccagaaagagtagctgttaggaaccttttgtttgcagtgatgtgtgcccatctgagagtttattctgcttaatttaaaactgaattttcgctgggcacagtggctctagcctttagcactttgagaggctgatgccggtggatcatgaggtcaggagttcaagaccagccttggccaacatagtgaaaccccgtctctactaaaaatacaaaaaattagccaggcgtggtggcaggcacctgtaatcccagctacttggggggctggggcaggagaatcgcttgaacacaggaggcagaggttgcagtgagccgacatcacgccactgcactccgtcccaggtgactgtgcgagactcagtctcaaaaacaaacaaacatacaaacaaacaaaaaaaaaacactgagttttcttttaaacagtgtttatcccagatctcagtttttaaaataaattgtccttggcaacaaattttctcatgaaatggcaagagttggatgtgaattgcctctttcaatagggtagaaagaactggtgttaatgtattatgtgcttgtaaagacttttaattcctatggtgtacgttatttctaggtttaccctggaaaattaggaatatgactgtcatgattgttacttgtatttctttattgcctagaaaatgagacctgaagaaagttccttttattgagtgaaagaatatatttcattttctgccatgagttttcatttaaactgaacctaagttttgtatatgtgcagctaaataaatttattaggactaaatagtctttaaatattattaatttaaaaataaaatctaatgcatttcacaagaaaaattaaatcactttatctacatgactttttttttttttttttttgagacggagtctctgtcacccaggttggagttcagtggcacaatcttggctcactgcaacctctgtctcctgggttcaaggaattctcttgtcttagtctgtcctagtagctgggattacaggtatgccccaccgcacccagctaatttttgtattttcaggagagatggggtttcaccatgttggccaggccggtcttgaactcctgacctcaaaatgatccacccacctcggcctcccaaagtgttgggattacagacgtgagccaccatgcctggccctgcataacttctttagggcatatatttaacgggtgtgtgtttactttcccttctttttagtgatcattgaccgttgagatgaatttctttaaggagtctgtatcttaggtactttcagttcagggatttcattcaaattttaaattatgcatattaatagaggcagtggacatactgttaattctaaatgtgagagagaacaaaatttttatttgaaagtttttagaattataatttattatgaatggtatttttagctcttcaaacaaaatattgatgccactctttgacagtgtttcagtaagaactggcaagtaattcagtctctctgttctgttcctaaattcttctgctgataataaagtgcactctttcagaatgttccttttatgcttgctgactttctagtttatttcttggcgggggaggagaacaaaggtctttcttcctgtctagctttgaaaactagaaggatctttccttctaggtttgattcgttgtaagcagcaaatggaagcacagggtaaatgtgaacaaagagtaaacaatacatttattataagtaagcaatatatttatttaacaaatatatgttgaacacctatgatatagcacatcgtcagcagctgagtggggataagaaattattttattgatttgtcttattcatagttcttactagaggacctgacatttagtagaaactcaattaatacagtgagtgaactgaatgtggtccctgcccttgaggaagatcaaatttagtgtagtcatatgtcacttaactacggaacatgttctaagacatgagtcattgggcgatgtttttttatgaacatcgtaaagggtacttatgtaaacctagatggtatagcctactacatacctgggctgtacctactacatacctggtctgtccaacagaggactacatacatagtcctttgttgaccaaactgttggtatatggtgtttggaagatatggtgggacaaggcaggaagcagaaatatgcaactcttaagacataatatactaagtacttagaaatgagaccatgtatgggaaaactgaggagagagtaattaattttggctcaaggaaatatttatacaggaagtagtagttggtagaccttacaaaatgagtaagaatttgagaggcctttttggggaagaacattccagactatggtaaatggccagaatagtctcacaggaagagtgcaactttgtggtctttggcagagatacatggttcagtattgttggggacttggattataaggaagagttataaaagtaagaacaggctgagtgtggtggctcatgcctgtaatcccaacacttagagagcccgaagcgggtggatcacctgagataaagagttcgagactagcctgaccaacatatagtgaaaccccatctctactaaaaagtacaaaaattagctgggtgtggtggcacatgcctgtagtcacatctacttggggagccaaggcagaagaatcgcttgaacccaggatacaaaggttgcagtgagccgagatcacaccactgcactccagcctagcgacagagtgagacttcatctctcaaaaaaaaaaaaaaggaaaaaaagtgagaatggaatcagatgttatagagccttgatgatagttctagggtgaaatatactctataggtagaagggagctttcagttttttgttttgttttgtttttgtttgcagcagagtcttgctctgtcacccaggctgtagtacagtggcacaatca

SEQ ID NO: 119684 - DNA, 1955 bp, Homo sapiens
aatttgcataaaaggctgctaggttcaatttccatatttggattctgcaatcttaataaaactagtaatagtgtgaagagttctgtggttaacttgggctattttgcatattgggttcatggtgatgataaacgttttattgagtatttgaactgataggagcagaaataatacatcattccaaaaacctatatgttcctgaattgtttaaggttttcatctttcagtgaatatctcatgtgacttcttttttccttcctgtttctatgcaggtcatggcaaaaccccaaaagatgccgcgtcagttcgagccacgcatccaataccagcagcctgtgggatttattattttgaagtaaaaattgtcagtaagggaagagatgggtaagtaaattttggtgagaaaaatcgtttgctagtttttttgttttggttcataatgtttatgatgtaattggaaagttggaatcctggaaattttgctaattggaaaagtggaatctgaatatttcagtataacagattggatctggttatgcttaaatactagctgaagttaaagcttgagttggtgatattaactaagcttttctggtaggtttattattaaaatggagaatttggaattaaggaatgaagggatggtgactcattttccatgacttttcttacactgctttttcgtgaattctgctaagaagttaaatcctctcaaactagtaatcatagtcagttggtgattcataggtattttacagatgttggacttagaattttaggtttcagctgggaaatgtgtatttgtatgctctcaactagaggagattttcaaggtttaggatgtggtttagaaatttccaaatgagaattccatggtagggcctggaaccaaattttatatcattgcttttcagcttgggattggtgtgtggtttgtatgggtatcagaattcacttatgagactattaaaaatatagtaatttttgggccttaccccaaaagttcctaaattaggattttcagaagtagagctttgggcaagataggcattttgagaaagctccacactgaattttggtgcctatccctggttaagcactaattacctagaatcattggatctatcctatagtatttcctgataactttattgcatatcagaggtctcttaaagcagtcatagggtctttagttgagttaccaagacaaagcttattgagctgtgtggataagttgccctgtgaggtcagtcagatggacctcaaatcaaacccctcttagtggtcctcctgtgtttaattaaccaaataagtgtattcagtagattactcctttatcggctgaatattctcgatgtcaacagtatgagcaacagaaaataaaaacttggaattcagtgacagctttttatgtaactgcctcagttttcttagggtaatcaagccaaagagaaaatcagagatgccaaggatagagtggttgagagaggcccatattgaaataggcacacgattgtcaccatttctcactttacaagctgtataatcagtaagctgattctttttatacttcaaattatatgaacttgacctcatatttggctgcaaataccctgatgattctcaaatctaatgctacatcttagcttattccctcgagctccagacaatgtgtctaaccaaatgtttgcatttgaatgtcccacaggcatttaaatttagcttgtttaaaatctttttctgaaaaaaaaaaaaaaaaaaaaaaaacatttggttggtggtttcactattgctagaaacttgagaatttcctgcttttaacttttctgttcatctctactgcctctccctttgtcagatctcaattatttatctgctgaattactctcagatagttggttgatgggtctccagttgctgcctgttttgctcttattctagtctataactgttgt

SEQ ID NO: 119685 - DNA, 2069 bp, Homo sapiens
atctaatttaaattttaatttaaacatgaaacaaatctttttagttttaatatttacagaatttatctgcaattagtgaatcctaacaaatataatggatccttgaagatttataactggtactttatagtaatttttgcataatggaaaaatgtatgggattttaattcatgcatggatctaatatatgtttctaccaatttggggctgggtatataatgtgtaaacattttatttttttttctgtaggcccatgacagattacagatttcttcatttcaaaaagtgaggttaaataatacctatttcgtaaatgttgaaagagaaaaatccatacaaaagcacccaactctttgagagactgtttactttcaaatattggtttctttctcttttcccgtagaagtagtcagaataggacatggggatatgtgaagtgatccccgaatgttcattgtaactaaatccttcatgtgggttcagagctcacactagatcaggtttcttgaatttaaatcccagcacaaatcctggtttggaattcgcttttagcagtatgactttgggcgagtttcattatcttcccttggattcctcaactgtgaaatgataatagatagtacctacctcatggggttgttttggatattaaatgagttaataaacttaatgctcttagagcagtgcctttcacacggtattaaatatatgtaactattatttgttattaagaatactttgggattactttatcactaaaagtttgggtcactccccttaaaaaatcagtggatttagaactgcagttagattttgtttagatagttttctatagatttatttgtaacaatctaatttttaaatatgtagtttccatggccttttctcaggtaacttaattatttgaacatattttgactgaaaaatgtgttttactgccaccataattaaattttattaaaaagtgactagtgcacagacttgtgcaattgtttcttttctgctgcttagctcagtgtaaatctattacctgcatcatatgttgaagtagttttgatgcatgtaaatactgttgcttccatttttgtcttgcctagccaagcttgttgactccttatggtcaccaggctaaaagaacttctgcccataacccaagttttcatggtaatggaaggagtggcagaattcattccatttttttgtggggggagtggggggtgtgaacatgtactaatttgcattgcaagtgtaaacttaagtgtttaatagtaataaggcatgtgttggaaatttgataaatttggtcaagtgtgtggtaagggaggatatgatctcattcatgtgtgatgattgtatatcttaagatacaatttttgacttacaagaaggtatttagttttaaaacaatcataaatttaaggagaattctgctacccatgaagataattttatagtatgactgaaagattaatgcgaagtttgtattgcgtggagcatatttaactagaacaccccaataatgatttagagtattgtttctcatgcagtccttttggggatatggagacttgtctcactcatactctatgagtactttctgacatgctacttcaacttctttctttattcttccatggttttgtggacatattttctcttaatattgtctacatgctagctttcaaggtaatttgtgtcttgggcgagaggtaggggaagtgattgtgagtttagcaaaccctgtgggattagaattgaggaatagctggtttaaaaagtttgaaagccattatctaaaagattttctaaagtgtcagcagtggcatggtgttacttctgttgtttaaaaagaaaaaaatacgtttagaaattagatgtatttctcaataagctattattggcccaagagattttatgaatcagctttaattaataagactataccaaagaacaaaactgtaaattcttaagaaagctgttttgccaattcaatctaattgtgtaagatttcacttagaaatatacaatacagatgcttctggtttaaagagccaggactttggcaagag

SEQ ID NO: 119686 - DNA, 1031 bp, Homo sapiens
tactttatgtgtctggttttacaagcaattttgggttggcatttagagtatgtgacaaggagcatctgggaaaagatcaattaggaggcttttttttttttctcttttgaggcagggtctgactccattgtccaggctagaatgcagtggtgcgatctaggctcactgcaacctctgcctcctgggctcaagtgatcctcccacctcagcatcctgaatagctgcaactacaggcacgtgccaccattcccagctaattttttgtatttttttgtagagaagggggttttgccatgttgcccaggctggtctcgaattcctgagctcaagccatctgcctgccttagcctcccaaagtgctaggattacaggcaggagccactgtacctggcccagttaggagccctatggaatattttgttgagtttagatcttattctgtaggagatggagaatcatcaaaggattttaaatgggaagtgactggctcatatcttcatttttgtcagattacgcagctgattggaagatagattcaagaggttacaagagtgggaatagtaaattcatttagaagactattgcagtagaccatgttagaattgacctcagctgggtcagtggtaaggccagagaaaggcagatatatttgtgagatatttaaaagtaatactgagaggatatgaggaatgatagtgagagaaatcaaagaaaatgtttgggtttccaactctgttaggatgatgtttgggtctttagctgttaggctcttgcagtgaaccatgaataaaataatgattgtgaaggagactgtattacagtatagttggagataagtaaaaatgggaatctcagccctgtgatctgacttcatggaaaccagaagaagccaaagaaacaagccttacagaaagaacaggaacaggtcttttggagttaaggggactctaactggtcttaatagtcatgacttaattctattctattaaaatgactcagctccaatcactagtttctggttgttttatttc

SEQ ID NO: 119687 - DNA, 1034 bp, Homo sapiens
ggagcccgaaggacaagttcagctacatcggcctctctcagaacaacctgcgggtgcactacaaaggtactgggcgtgtgtcctgcggtgggagtggggcactgacccgacgtggccggccgccgctgcgccgctctcgacccgcccccgacccccgccctcgcgggctctgccctcggaggccactcgccgcctgttgtgctgctccgggtgggcgcgggggtcgcggtgaagggtccgagggtgaggggcgagattcttggaaaaggaaggtgagtagaatgccccagggtagaaaggagctggtaatcctagaccaggagcaggacaccttgagggaatccgggatgacaggacagaactggctttctgatttccctgggagataaatcttggggcttgggtagaggaatccatggactcggagttgggttacattgttctccaggtggtgggtcaggcgttctcctcttacaaggggggaagagaggcacgattctgaggtatgatttctaattaagagagagcagggatacacagggggaggagtaatcaaaattaggccagagattgtctagggggacaaaaggacaaggggcccaagtttgccatcaatatattttagtaaaagcaaccgggagggtaagagaagggaaccccaggaacaccctttttcttaggggagcagaaacctacccctcccgattggaagtgccctatacaggtccttaggtgttgatatcacatgaagtcttgttgaaaacgaagatggaacaaaatgcagcttagtattttgaagaaaattggcttatgttttgcacttgcagttaaaaacaacaaccttaggcttgtgcttgcccctttcctccctcacctacctctcctaggttaaaacaaagctggaagcaaatcagttgtatataaaattatgaattgctatgggaactattgaaatgtagcccaatttaatagcatgtatcaagtttacttgtgtggaagaaaaaaaaatcaacctaacgtatcagtcttgtctg

SEQ ID NO: 119688 - DNA, 1030 bp, Homo sapiens
gatctcctgacctcgtgatccgcccacctcggccttccaaagtgctgggattactggagtgagccaccgcgcccggcctaagtgtgttttaataaagatatgtgtcgggttgcctctagtgatttttaaccctgtctgaatattcagccgtcttcttgctcagactttatttgaatttggtaacatcaggtgccttttttattcttagcataatgagaaatagggcagagagagcatcttgcactaacacaaaactgaatacacatgcagaaactgagtactcacaactgtttgttgttttctcatttttgacaatttgcttttagataaaatgtgctataatgataagtgaagctaatactgaaactcaaaaaagtaacctacttgtgttttggaactgccactggatttcaagagttaatccaagcttcgttatacaaaataattattaaggctgtgttacctgtctttctagtcttacaacaacagtctccacccataaagattaaatcacctagtgttactaaatagttactgactatagcatgtcactggtgtctggaagaggagaaactcttttggttacctttatctttatgggttgtatactcaggaagaactgaattcacttgatataggaaaatgactgtgtgtagctaaccaacctgggaaaaactacatcaaggacatcaggaaatacagggcatgaatgtagattaaagccagtgaatttttttaaaattttatatggagtcattttaataacataactaggctgatatatatgtacatttttcaatcatgtaacatttagattttactcattttaagtcattaacatcatccagcaaacaaaaattttccagaaatttttttcacaattacagttttagtctttaaaccaaaatgaaaaaatttctgccgggcatggtggctcacacctgtaatcccagcactttgggaggtcaaggtgggtggatcacctgaggtcaggagttcgaggccagcctggccaacgtggtgaaaccct

SEQ ID NO: 119689 - DNA, 1072 bp, Homo sapiens
ctcgtctcgcggggttggacggcggggcggggatctcagctacagcctccccgaggaaaggcccggcaggccggagggcgggtcctccaaggccaccggcatctgcccggagcgtgggtcgaaggtccgggcccgccctgctcggccgcggtggcggggcttagcccagaagagacgaattcctgggaatcccgggcgctaaagttggagggaggtgcgtgctggggcggggagttggtgcccgcccactcctagggtctgcttttgggcgccgccttccaggagttctgtttggcagcgcccagcctgttgggcgttcaaggggaaggggtgtgtatgtttgagcagcaaagctctgggaaatgaagggattgctttacagtttgatttcaaattctgatggaatcattaattcgtggagtcctagcgtctgccctgtccctggcgcttttctagatgtgtgagatatatcagtccacaaaatcttccctctggagcttaattctagcagagcagacgcagtaaatatgtgtgtgtggatatacgtatgcataattgatgtatatataatttatatatacaaataatttttatatattcgtaattcgatgcctggtatagaaaaataggataaggcttgggaagtggaatgggtctccagttgtgaatttaaatagggtgatcagaatcgatttcattgagaaggtagcatttaattagagtcatgcatctcttcaggacagtcgcctactgagaaatgagtcattaggcgacttcttccttgtgtgaatattgtagagtgtgcttacacaaacctggatgctacagcctactacacacctagactatcaggtagaggctagtgctcctaggctacaaacctgaacagcatgttaccgtactgaatactagaggcaatctgaacacaatggtatttgcgcatctaaatgtagaaaaggtagagtaaaaatatgtattatagtctcatagaccactgtcgtgtgtgcccctctgtcctgggctgaaaggtagttgtggggctcatgactatttaaaggaggtgagagagatc

SEQ ID NO: 119690 - DNA, 1053 bp, Homo sapiens
aatgctggctggcagctccattccttttttctagtttgttcattattctcctgtcctggacaaacaaaatccaaataaataaacaagaatattagcagagataaataaaattgagataattaatgcaaatgagtggatgagtaccttagattaaagggtaaggtaacatttaaatagggatttgagtgacgagaagatttgatcaagagcagagcatttcagacagaatcagtgcaaaggccctgaggcagagagagaagacaggagagtcagatgaaatgcggttagaaagaaaaggggtggccagattgctccagactttgttattcagtgtaaggacttgggttttattctatgtggaataggaagccattctaggactttgtgtagagatggtctgggaaagatgggagtaatttggttaacattttagaaatattcttccatgtagagaatggatgtacatggaagatgcaagggggcaagattggtagcagggagacttgttaggagccaatgtcaatagtccaggtgagagatggtgtatttaccacagttctaattttacatttatttatgtgatcgattgataccatcgtcactagactgtaagctccaacagggcagaaacaatgtcttttttttttctttttgcctaaagttgtaatccctgtgttgtattcccagatgtagtccccgtatgttgacttaactgtcaattcagcattttccatatttcacacacacaagatatgtgtgtgtatcatgaccaaataaattattgtagctggcaggaaagtattcctaaagtcagaatatcaaggcctttattcatatatgcagattagagttggaagtccttcactctgattctgacagtggaatgacttacaagctacatattaataagtagaagatgttttcacaggaagtcagaacatttgatgatccaaaaagatagcacattagttataaccacaggatgtcactgaaattgttgaaattgttatgatctcttaatcatgataatgtatggatagaagttactcagca

SEQ ID NO: 119691 - DNA, 1092 bp, Homo sapiens
atggccagtcaacctcctgaagacactgcggagtctcaggcctctgatgagctggagtgcaaaatctgttacaatcgatacaatctgaaacagaggaaacccaaagtgctggagtgttgtcatagggtttgtgccaaatgcctctacaagatcatagactttggggactccccacaaggtgtcattgtctgtcctttctgcaggtttgagacgtgcctgccagatgatgaagttagtagcctgcccgatgacaacaacatccttgtaaacttgacttgtggaggcaaagggaagaagtgcctgccagagaaccctactgagctgctgctcacccccaagaggctggcctctctggtcagtccttctcacacgtcctccaactgcctggtcataaccatcatggaggtgcagagagagagctccccgtccctgagctccactcctgtggtagaattttataggcctgcgagtttcgactctgtcaccactgtgtcacacaactggactgtgtggaactgcacgtccctgctgtttcagacatccatccgggtgttagtgtggttgctaggtttgctctacttcagctccttacccttaggaatctacttactggtgtctaagaaagtcacccttggggtcgtctttgtcagcctggtcccttcgagcctcgttattcttatggtgtatggtttttgccagtgtgtttgtcatgaatttctagactgtatggcacctccttcttaactgatatgcaaaataagaaattggacacacattgccctgtttgagtgtgaagttagataatttataatttattttcttttatgttctttatgattagtatccatgacattaacaaaacccttggccacatgttgacttgattggttttcctgtaggctggaagtaaaaatgttcatttctacttaggggttagcaaaattgtataagctcacacttcatggagcactgacagcagtgagtcttcccagagaaaggacagggtttctctcagcactgccagacagacggcaggggtgtggtgtgttatactatagggagagcatggatccctcctttcgtattcatgga

SEQ ID NO: 119692 - DNA, 1041 bp, Homo sapiens
ctgcctggggccagcggggctggccggccgctccgactgcggggcctagccaagccgacgcccatccagaacttgcgctggcctgcaagcaccgcgcgcagccccggttcccgcccgcgcctctccctccacatctcaccacaagctgagggagccggctccggccttggctagcccggaaaggggctcccacagtgcagcggtgggctgaagggctcctcaagcgcggccagagtgggcaccaaagcgaggaggcgccgagagcgagccagggctgccagcccgctgtcacctctcaccttcagcagtctccgtggaacacgtccagtgatgggacctcactgttctcggggcaacaccttccgttacttgaatagctccaattattacacttcatgtagtaccaagcttttgtaatacagttattagtaaaaccgactaacgttaaacttcaccattttttttctttaaagttctattttgcattcaataaaagggtgctgtgtggaaaagcatgcatgcatctgcctcttggcccataatcaaggcaccatcattcacctggggcagcaaaagtatgaggcacttggatggaaataaacagcctctgagttttgaccttgctgatggtggtgagcgcacacttcaccctcgcttctgtggttagcagggccttctgcccaacggtgtccaccaagaacaaatcaatgctaacaggctggccgactgagtcataagaagcacaattcatgagtgagaagcacagcatcttcccttcctgccacaaaagggcagggaaagaagtggagccgtgagtcatacagcagcgctggtcatgggaagatcccaccagagttgtcaagcggccaggagagacatctcctttgatatgttccgttacattcctttttctccaaccagccatatttgaggagagattaacagctagactcccttcagtccaattcaacaaggatttgttgtgtatacgctgaccattttccccgaggggaatgactgcagtgatgaagctgattaatt

SEQ ID NO: 119693 - DNA, 1036 bp, Homo sapiens
ataactgattatgcaatgatttttaacaatgacctgccactatttactcagtcttagatactcaacaaacattctaagtcattaccactattgaatctctgtcgctctattccagaagcttgttgggcagactttcaaagtttccagttgtcttatgattgtagagcctgcatttccaataatgctggaatcagtttagaattaagccctggttggtgtgtgtcttctaatacaggatgaggagagccatttagtccctggcaggacctgcccaagtgtcagattttccacttgctcatttgtttgggccctgagtatgctccatggttgccagctggggatgaggtgctcatcactggaggtgttcaagggtaggtatgtaacacttgtgtagatgttaaggggaagtgtgaaaggttgtactaggaaactgtggttgagcttggctcattgctgttttctcttcttattgggcatcaactagatcacccttcccaaactcccttgcagttttaaactcttattttgtgaaatcactgagctttctgtatttacttgttttagcagctagcagttacctcagctaatacagtaacctttagcattccatccaatcagagtctagggtcataaatctgttctttctttctttttttaagatggggtttttctgtgttacccaggctggggtgcagtgctcactgcagcctcgacctcccatgctcagcctctgaagtagctacttcagcctctgaagtagctgggcctataggcatgcaccaccatacccagcttttttaaaaaaatattttgtagagacagggtctcactatgttgcccaggctggtctccaactcctgggctcaagtgatcctccctcctcagcctcccaaactatgggaattataggtgtgagccactgtgccttaaggtgataaatcttgacagacaagactcagttatgatttcttttgactttctccccacttatagttgattcttcttatgtcttctctcctctctccacagggtatct

SEQ ID NO: 119694 - DNA, 1027 bp, Homo sapiens
cttagctttttttcatggtagaaaaatcctgttaaaatggcttcacatgtcgcttacttttttaaaggatgccctgcacagcgtaaagaagagacttttaagaaatacagagcggagattgtcctgctgctggctctggttattttctacttaacactcatcattttcacttgtgtaagtatcttcttaaaacatcttctcttattaaaagattacccagggcaccaatccaagtatctcttgcagatagtgcgaatcatttaataatggtgagagagattattctttgaaccctggactttttgaggcccctagactgggagaatcattacaggaagctccctgaaatatttccagcttttgtctagtggctacgtttagagcattgtggaaaaaaaaaacaaagtaagatataggaaggacgtttgggaaatgacaaggggttctatgcaagagcagaggccctgtaggcgcagtgctagaagttgcagcgctgagggtcccccatcccagagcagaggccccgctcttcctgtgggtgagggagtgggccccactgccccagggatgccaggggatagatcagcctcctttggctgccttcaaactatttctcgtgggggttctccccttctatttttggtatttctgcccatgccttaagaattaatcccaagaagccagagcagtgaggcacagtgggaggcttccggggtgcaggatggctggccggtgctcaggcaccctagacatgcccatgagctgttggttgcaggttctggctcaaagccctcagagattctttctgcatggctgctcacctgtgttgatgatggttgtgggagagtagggccacatgtgtgtctgacccctctaggaagtgatctgccccctttgtctccatccaccaggcagggctggctacctaggggccaggacagacttcacccaggagctaccccaggactggttcttgccactcactgtgtccctctattcacttacttgcctctctggctgtgcactc

SEQ ID NO: 119695 - DNA, 1045 bp, Homo sapiens
tccaccatcttttaactggcccaacccaaacatctgggcatcatctcagacttactaccggacccaattcctcaccaaattcctcaatagttctcacatatacttcctgctgccccaccaccactgccaaatttcatattgtcactgactcttgtgttgatcattgaaggaacatgccaaacaatctccctgcttctagtcctgctttctcccacactacataccagaggaatcttttgaaattccaaccagattatgttacttttctgcttaaaaatctttcagtaatttcccattgtcttcaggatagaacccaaacgcattcacagaacatacagagtccttcatgatctctccctcgcctcccctccaacctcatcgcttaccatcctcctacctaccagtccttccctgcagtcaccttgatcatttgcaccttccccaggacattttcaagtctctgagcctccacatgtttctctctgaaattatttctcccttctcattatttctttcaagacattgtgtcttttcaagacatcttttaagacttagctctgttttcctttgggacgctttccccattctcctgccctttctttccttttaactaactgctccttcactacctccaatatacacacacctcaaaagtggttttcatgcctacatcatccagggtcccaacagaaaacagatgacaccctctgatcaatctaaatatgaggaaagtttatttacaagcaactaattataaagttgtgggtgtagttaagtgaaactacaggaactggtacagaaactttggactagcagcagcagtggagctctcattatctgtaggtcgtaagggagaaggtaagggagacagtaggtgagtttgggatgagcagtgatatttgatggagtcatcttcccaaggagagaaagaaatactccagagctgcctctcctctctgccccagtctcctaaagtgctgcctgtcagttgaagccaacaagaaaccagacggcccaggagtcttgttgacgtggtccatgtaga

SEQ ID NO: 119696 - DNA, 1001 bp, Homo sapiens
aaaaaaaaattaaccgggcgtggtggcgggcgcctgcagtcccaactaatcgggaggccgaggcaggagaatggcgtgaacccaggatacggagcttgcagtgagccgagatcgcgccactgcactccagcctgggcgacagagagagactccgtctcaaaaaaacaaaaaaaggaaacaaaagaaaaaagaaatgccagtgctagaaagaatgcacaagatcatctatttcaggcggtctcaaacttgagcctgcaacagcattccctaaagggctggttaaaactacacagatagctagacctcacccagcgtggcccattcagtaggtctctgttggggtttaagaatcttgcatttctaacaacttccctgagaatgctgttccagggaccacactttgagaactactctaattttattgatgaagatattgaaacccagagcatgttagtgattcatgtaagatcgcacacattctaggtgaccaaacccaagtcttaggagaatgtggtggttgggaaataaaaagctatgaagattttttaactaaagcccttggtattagtgcatcttatctggtttttacaactatctgccttctctttccacccaagcctgagaagtactgccaattatggtgtggggttgtgacagcagcagaggaggtgggggcgggtacggagcatccacaaagccctggatgttcttgccggtcttaacaccctatctccaagctctctgcacagttttcagggcataagtcagaactgtgagaactagcaaggactcagcgagagcttcttacccgtgcttcacgacacattaaaaggcaaaaacgtgttcctgcagatcaacccggaagagcctgctgcttaccggttggcgcccagtacctacacggcaatagctgctgcagcctgacaaattcgttgaaactctctgaaacacaaaggaatcaccgccagcctccctctcccattgtaaccctgccattgtgc

SEQ ID NO: 119697 - DNA, 1070 bp, Homo sapiens
tctacctattccctagagtctgctaacttcaaaagtctagatactcacacagctgtttacttgcagcagtatttgaagagataaccttggtgtctagaaaggtctcagaaactggaggtaagagacctggattcaaatcgcgccttggccacttcccaaaaggcaaccgagagcctctctgagcttgtcagtttccgcatctgcaaattagtggtgatcaaacctgtggggatgattatgtgataaataacagtaacctagtttaaaactaggcacgttattggaagctttcagtaaacgaaataaaaagccttttcgagagggtattttccttattatttttaccttttcaaaaaatctgaaatgaaataattttatctaatgttcacttcacaattggaaaaataaatgatcttttgtgccctgaatactgcaaaacttgtacgctggtgccatttcctgggaaggatccaatggggcagactacagtagggccacccaaggtgttttctaaaaactttctgatcattaggactggcatactgggaatctccacgtctccacgttgttaagattttaaccagctttctgtaagtttaacgcagatacctcattccctaggcaaatattaatgaacaaaggtgagtttcttttctgttcccctaactagccctggggcctggacttctcagtcctgggcttgcgaactcccctgccaggctaccagctccaggtcacctggtgtgaaaaactattgtgtaaagttgaggcctcagggcagaggggaaaggaaggaatttgctcatttccaaaagatttgaataatattagtgttgttttccctgaaagagaaaaaaggttggccttcttagtggttgaaagattttcctgttgtgaaagtaacctactcctaatgaacttccttcccctaccatcttggcaagaccatccaaggcttttcttgctccttcctcctctttttcattttctgtaagtcaaatgcagcttttcttatgatgattttcacatctcaaagccttgacctcttcaattggaggggcagggatgag

SEQ ID NO: 119698 - DNA, 5625 bp, Homo sapiens
agcacgctctgtacacagacgcgaggcgctgtcctgaggtgacaccggctgcacggcacaagcagcaggcgccgccgatcaactagttcgcaccgaggattcctcttggtgcgtggcccagttttccttaggacgggctccaacccctccctgacaccgcccccctcaccgccacgctccgaggccttccccggggaagcctcgcgtccctcccccgcggctccgggccgcacgcgcgcgattcctcgattccacaggcggttcgcgccgcgggtgggggcggggcgcgcggggagggggctggcggccgccaggggaggggggccggggcccggggggcggaggagggccggcgtggggagttcctcgctcgcggaccacacgctccgcgggccaatcccgagccagcctctagcagtgtcgcacgcgggacacgtccaagcgtttgttggcacggccagtgagggggagggggcgaggaggagggaggggagttgagtgacaggctttgcggggcaggctgggaattgtagttcccagcttccgtggccatagccattttgtagtcgggggactacaacttccagaagatcaaggggaccattctaaggtgccccgggaataggcggctctccccggggccgggcgtcctggggcactcctacccagcagcccggctgcaggtagacgcgaaggcagtggcgggggctggcgtggggcggccgtggggtgagcggcaggcaggggaaagggggtgaggtggagcgacggagcgtgccatgcattgagctagggagcctctctcaattccacgcctgggctcggcgtgggagcgacgcccgagggcttgcctgggaggggttcgtcgaggtcgctcgggtgtctggttggccaggctgcgggggtgccctggactgggccaggggcggtcggcaccaggctaagcgggcgcctggcggctgagcggtgggagttttcggctggcgcccggcggggaattatccgaggagccctaacttgtataaaagcagagtccatttaaagttgggctggatagcctctctctcattggttagggggcttggaaaaaagagactcggcgagccctcgctgtggtgctgccgccgccgccgccgccgccgctggagttgactcttctgctcgcactgctgctgcagcacaaacgtgacttccaacattttttatttatctttcccttttcttttccaagatgtaactacggatcagacactaaggaccttcacgtttcgctgatgtagtttttggaggaaaaaggggggggagtgaagggcgtcggtttttttttgtgtgtgtgtgtatgtgtttcgggggaaattttccattatgagtgttttactaaagtgaatttttttttgtttgcttcgttcgtctttggctctttttttttccttcccaatttcggatttatttcaaggcgaatctggctttgggggaagaggaagaaaagtcggattacaagatcaaccaccaccaacaacaataaaaaccaccaggatatttttttgcaaatttctgacggctttaaattcatgaagcaattgtccccttttgcaatcagcatttggatctcagaatgagcaaggaaagacccaagaggaatatcattcagaagaaatacgtaagtgctcctaacaacacatcctttgacttgcagttttaagcaatggctgtgaatgtcaagtttatagataattctgcctctgaagggttttaaacacagcgtccgataaggctgtttcttttttttctgaaagagggcttttcaagcaaagtggtgtctgcctagtttggttgaaaaaacagactggtgtagagatacctcaagtgaataaattgacctcgaatgacacaaccataatctacttttagatgaaaggcaagggattttggtggagcttgaggtggggggtggctgcggtaatgtaactaaactgcattctcaagcggatttggccccgtattgcactttgcatgcaaatgagcctgtgttattattattaatgttatttggaaaaatcgtgtaacgcatgtgtgttggaagccctttaagttgcgatcgagggtccgattatggcgatcttctctttgcactggcacatcaaatttaatgtctgtggtcgttttggcttatctggtttgcaacataaaccagttgggaatcatgttacagcgaatgcatttgttgggattgactttaataatgaggctggttttgtttaaaaaattcatggtttccagttgtaggggaaaaggacacacactatggctaatgtttttaagtgtgtacgtgaatgcatatgtaagtaactacaaataatttctccctgttaactgggcttctgaaattgggtgattattcctagatttaaatggcttggaatagttaaatttgttttgtgcatagtacagctacgttttgattggcatggggagtgtttttgttttgtgtgtggtggcttttttttttttttaagtttgaggggagggaggaaagggggaccgagggattaaccaaatatgcactcgagtgatctgtgattagctgcatgctttaaattaaataactctttttttttttcaaaaaaggccaaatgaacataccttaggaataatgcaacgtaagaggaaagtttatttaagttgggtagacaaattggtgttaatattttccctttttgatcattgtggtgtgtgtaatgagagatgaccttcggggcactggttttgtaaaaaaatatatttaatggaaaagctgaatgcctcttcaagagagctgatccttatctagacacgtcaacttcaactatgaaagaaatgcaaggttaaataatcaagcccaacttagaaagctgttccataaagaatttaagaattaaaatacatccgcattgcagagggctgggtagaatgcaaaggactagtttaaactcgggctgtagaaactgcactgaggcaaccttgtcttggagcgtggacgccttcccggggcacgtccgtttcggatgcagccacaaagcaaatggggtagaacttggacgagaaccgcaccccgcctcccattccggacctcgttgaggtggagagcagcgtggggtgggttttctttcttattgcgggcgttcagcggatcgtgtctccgagtccgggcgtccggctgcaagcccgtggctggcggcggctgcgggaggcacggcacgagttaatgcaccgggagcagagccggtgttcccgacgtcctcgagccggctgcgaaagggacggcccgcgggggtcgcggcaggctgggccggggctgggcgggcgggcgcgcgcgcgcggcctatagggggcatactccgggctctaggcgggcgcgcgaggcgggcaccggtctacccgggccggcttgcaggcgggcaggagggcgggtggggcgcgggggtggcgcggcctgcggggcgcggggaggggagagcgcgcggggagggggtgggagcgggggcgggggcgtgggcgtgccggggagggggcgcgcggcgcacagctgcagcgggcgccccccaccgcgcacacggccgagcatggcggcggcggcccggccggcttcccgcggccctgcctgcgggctccgacgcagtctcgagagcaacaggttaagccggcgagacgtcagcgcgccccctctccgccccccggttcttcccccgccgcgcgccggcgccccagcccttcttccctccctccgccccccgcggcgctcggttccccgacgctcccggccgcactctgttgtcattgtgacgtcacaaagggacgggctcgggtggaaccttcccctcctcctccgtgacgtcaaaagtcgggcgggaggctccaggcgcggcggggcggcggggggaggagggagctgggcgggggcgggggctgccgcagagccgggctgcggcgtgggaggaggaagaggaggaagatgcgctcggcctctgccttccgctccggagcgtcgcgcttcccaccaggtgagggccggggagccgtaggtccccaaaggagtgccactggaccctgttctgatgccacttgggaagcggggagcggggaggaggcgcctcctttctgcaggaatgttttcacttcctctgttccaggtctcctgatggtgttgcattactagcgtggtgcatgtgtcccctctccagtgcttatgtaaagaaatgaaagtattcagggaaagctgtgctttgttggaggaccgcgttgtggatttggccaccttgtcacttgaagtcgtgttaggggtgcttcagcaggatgtggccggatgcctttcatgatgatgctgcacagcagcaactgttgctctttctggaagctttgtggtactacggtgggggggctttcctttgctgtgccggctctgtacctactgactgttattttggggggctggaccaaaggaagacttgtcattgataaatgtactgagaagagcacaggactcctttaagtctcaaggtgctctgggcttagttcttctgagcagggaaaccagaggctggcgttctgttttctcttttgtaaaatggaaaaatacctgccattgccacttaactaagtcactgaaaagatcatgtgcatggaagatgtaaaacagtatgcctctttataagtaaggtggcattattacttgagctggtggaaggcagcacgtttcccacaattggtctcaaaagcccgggatgcctgctgagttgccatttagtttattaccttagcaaagcagagttgggggtgcgattgtcgatagtaggctttgggagaaatgattgttatatttcgtaataaatgatgtccttgagaaactcataagttgcagtgtaatcctgtcttaattgtgttgagcacgactcccactgcaataccttaaataactgaaaacatttgcctttgaaagccccaatcgacttggacaataaaaacagttgcatgttttgctctagagatattttctgccgtttccatcattccactgcctggttattcctagggagaataacagataggatactggggcttcaccactatttgatcaggtatcagtttgaaatagagaatctctgccttatgaagatagtaattcctgtagttagcatgaaaacaaattgccagtttgattttctaggacagctcaagcagaatttgtaccactaggctgtaagttttaagtatctaattttctgatttgaaagtgtatgatttaaaaattggaaaaagtttttgttataagcttcaaaaggatttactataattacaactacgtaaaattacaaagaaaaaagtaggaagaacacaaaatatacagtggttggatttatgaggttttttgttttaaaacttattcatcacaaattgttcagtcacgttattttacagttggtggggtggtggggaaatttgcacgttattttattgctgtattttttctttcctgggatgtttacgtggcttttcagttacttgtttctagtagtggaaaatcttgctctgtgttacttaggtgcagggcagtggcagtttagctcctatcactgtacagggacagta

SEQ ID NO: 119699 - DNA, 1063 bp, Homo sapiens
caagtgattcccttttaagaaccaaacttcagttatgcccagacttccccaacaatcaaaacagcataatgtagaacaacagaacgttcagagacttaagctcagaaagaagacccatggcctcatatcaaaaaaaccgtaattaaaagtagatttgtctgtcagttaatacaaaatgttagggaataccttttttttttaaaaattgtttgttatctaacaaacttgttcccattaactaaccaacttctggttcttgtcatctctgataagagtgcttccaactgtgtttagccttaatccccgcatgctaaactggactccctgtctgcttcatgccatgtaacatgtaaagtgtggatcagtttaaagtagtcctactgaggtgattgtattacttttggagttaaaataattgtgccatttactgagtggcagggagcagaaagattagtaattttgcacctaattcatggagttcagaagcttctatcttgtaatctggcaactttaattatatattgttttacttatgagatattgtggaaggtctgttccattttaaatccttaagccttacctgttaataaaaatgaaaccaaatgaatctgttttttcatgtgctcaattatctttcgttttttttccgtcctccagataactgtactctttatatcctgtgactccctaagacaagcctcaattgcttttccaggcccccagtctttgtttttctgattccttttgtccataaaccttttccatacttgcctcacccttgcaggcatcttttattctaggaggtgagaactccgtggtatctgtctacatttttgtagaagaagagtgagcgagattttattctcattatccttctaggttttaatctttcttgggacttcagacaatcctataaccttctgccagcttcaggtttttttaataaggatttttttttttgagacagaggagtctctctctctcacccaggctggagtgcagtggcgtggtctctgttcactgcagcctccagctcctgggttcaagctattctcccgcctca

SEQ ID NO: 119700 - DNA, 1629 bp, Homo sapiens
catgtttccaggacttcctgttcctgtcacttcttgcaggtggcttttgtctttcttgctctcttaggctgtaggaaagagcccacgcagattgttccagagggcaaagtatagatcattcctgcgtgagcagcgactggcagctcgactaccactctgggtttctggttttttttttacacttgtaccacagtttgtcttgccacagattttactattttaagggtgctgcccacctctactggggttcttttttccatttgaagaaatgtcccagaaaagcatggattatagaaaacacctccagatgacgacacaacacccacttctcttaacgggattgtgaagagaggactcagtcaattctgaaataaccgcctacattgtgagtttgtctgagaaaaggggtttttgagtccattttatagatgagacaagtaaggtgaaaaaccagtcagatggttagttttctgaatttgctccccccttttgagttcagaggacatagaagtaacatgaacgatcagtggagccccaaaaaggggagaagaaaaggttgtaaaagggactgttggcagcctttggagaggctttttgcttgggaaagttggaagggagggcagttttgtcagaagtgtccgtcttccctgcatgtttgtatttgttgttttttgaagaaccagttggtggagctacccccttatacccagctggctgtctctttgagtcatcattggaagactgacatcccgtgtcccttgggactggatggtttgtgctcttctagttttacaaatgcccccaccacattcttgggtgtatctgaggcccagtgtgggctgcagttctccagacttgcaggaaccagtttgatttcccagggctgttgactttttcttgtacttgtatcattgcccctgactttgaggcttaggggaccatggagcactggggaaatcatatgccctcagtcctcactaggggctgggccatccattaaacaaaggctgtccagatgtgttaatgaggcggtgtgagtaatgggaacattatacatgattacttacataatcatgggacagatgcgggtgttagagaaagaggaaccctactggtagaagtttttgagagctattcttgagagctggtgctgcctaaaaggtctcaattggattttaagttctaattttgtaagtctgtcaagctccaccacccatgaagaggaaggccagtgaacactgaaatattatcaacagcagtgtttatttaccatgctcctagaaggttaacaaaatacatagccacagggccgggcgcggtggctcatgcccgtaatcccagcactttcgaaggccgaggtgagcggatcacttcaggtcaggagttctagactagcctggccaacatggtgaaactccgtctctactaaaaatgcaaaaaagttagccaggcgtggtggtgggcacctgtaatcccagctacttggaaggccgaggcaggagaattacttgaggaggatggaggttgcagtgaggtgagtgagactctgtctccaaaaaaaacaaaacaaaaaacaaaaaaaaaacaccacaaaaacacacaaaaacaaccactgtgtaaccacagttt

SEQ ID NO: 119701 - DNA, 6198 bp, Homo sapiens
aattcttaacagtaactttttttcgggggaggtgaggaggaggagtgaaaaggataggttgtgtgactcttgtctacctggagacctggtttactgggacaggagaatgtgggagatcttctgacacccagtttattgatctcttaaaatcttggtggttctgtctccattatttcccagccaccattttggtgagagcttggtctgaagtggtagtgtattatctgttggttctctctcggtttcagccagctgttagagtgtttggtgcctgtgggggcagaaacaggtgccaggaggaaatgagaagggattagggctgagcatgtgtttcttgcatttagtccttctataggtttgcagaagggggctgagtgaatgcttattctgttaagcagcagacttttgtgctttgtgtatatgccttattactgctactaaatggacctaagtaatgaaatgcctcagatttggacaggcttgtgaatatatggggtacctctgcagtaatggacaaggttgggaatgtgagcctacttcaagtttggccttgtgttaaactggctgtgtgactccaggcaggctatacaacctcgctgagctatttcctcatctggacaacttatttcatgcacttcacaggcttgttgctgggagaggcaggggaatttttgatgtgaaagcactttgtaaactgcatactgctgcacaaatgctcaaggtattattacccagttggaaatcaccaacctggagacatcaggcctgccggcggccttcctagctgactcagatataaatgaatcaaatgaattctgcactttgattcttaataaagcaagctgatagcaagtagcagatgcacattgggaaacagaacaaggctttacggattagaaggtgatgtaatcaccttctacctctgtcctatattagccaacacttgactcctaaatacacctggatggtgaattggaaagagggatagattgagaattaagactggagtggcactgaatctgtgcacgaagatgtttaaagaagacatagtccttgaaattaaaaatctgattatgatgtgaacacaattctttagtggctctctggtcctcaggatcgaatctaaaccaactttgttcccagcccttcttgatgtactctgggcttatcctgccacccatccacttcacacatccggggcttcagctgagcccagcattttattcctctacttgcttggtgaatggattgcctgaggagcccaccgtgtttgtctgaagcctgtcaccctgttcaccccgtctggcagagccaggctctttctccctgttggctggtctcctcgcactttatttttaggtgctggagttatttgcttacatgtctctcaccctattaaccccacaagagtaggggctgaatttatgtcattgtaggtcaatgttaatgtctaatacatagtatacattctaggaatatttgagttcaagtttggtggagtatttcgagtactacttagtagtgggagggaatcggtatgaatctagtgcaaaaagatagacttaactgatcacaattttggacgctataattttatagttgagaattcctgaggtttctagtactgttgtaaagtgacctgcttgtggtcgcatattttatcagacacagctggggcatgaaatccaggtcctgatacagtagaaggccctctctgttactgcctttggaaatacttttcttttcagggggattttcagttattcatggtaactgcagtaattgattcattttcatggaaaaataaaatccacgtgtaatccccatacctaattaagccaatagcattttactgttgtgcagatggccttttttgcttaataagaagtgattcaaatcagacaagtactcaaaagatagaaatcattgaaatcacatactggacattcctctacttgcacatacagttttatatatatgggccatactctttaagtgctgtatttttgttacctcctgtttgcatttataacttgtcatggtaatcaaagacagtgatttttaatggcttcaaggccgttggttgatagttaccactattttcttgactcatctcttcgggatgggtttttcacagatttggggctgttgtacaaaatgatgcatgcagcctgctttgcacgtgtctgtttgcactcaactctaaattcttactgtgaaattactgacttagaagtgcccgtatttacgttttgatctttcctagtacattgctttcttggagagaggctatactaatttacagtcccacaggtagtacacgttaggccagcgggttggttggtttgttggcttttaaaaaacaatacaggcatttgtaacaagtagtaaagatgtcagttgagttttatttaagtttctattttcttcctgtgtcctctctcagggcatttagaactaaatgagataagatatgtgaaagcactttgtaaaacaaaattgctctaagaacacaatgtgttattagtcagaacagctccagaagggaagggaaagggagagccttgggtaattgtacaatgatgttcttattcttatatgtatgaaatgctttttgttgtgaggacatagagatacttaagtaataaagatgacccccaatcacattgttttcatatgtgatctcagccttgtttgtgaggtgggctttgtatatttacgaagatccctttgggctgtggcttggaagactgttcagttaaatacagctggcattttttggttgcttaccatgttctgacactgtgttgggagtttgaaaatacgacattgcccttgtctgaggggcatttacagtttagttggcagcagggatgtgaaacaatgggaggagagcactggctttggagtcagtctgaagttgaggatctctgctctgtcatcttgggtagatcacttcacctctccaggtctcagtttcttcatctttgaaagggggagaattgtgccttcattattggcctctcaaggtcattttgtgggaggctgaatcaaatgttaaagtgtgaagtgctttatgaactgtgactatagccggacgtggtggctcacacctgtaatcccagcactttgggaggccaaggcgggcggatcacaaggtcaggagtttgaggccagcctgactaacatggtgaaaacctgtctctactgaaaatacaaaaattagccaggtgtggtggcaagcgcctgtaatcccagctacttgggaggctgaggcaggagaattgcttgaacccaggaggcagaggttgcagtgagccgagattgcgccactgcactccagcctgggcaacagagtaagatcctgtctcaaaacaaaacaaaacagcagaacaccaactgtgactatttagaccatgttattataagtcttacagattcttgtggctgtaattctccaagtgcaagattgaagaggaaactgtttctgggtcatctgtgctgattatagtatatcccagttgttcgaggaagaggatagaaattcagataataagggtgcttagcacctttccttctcaccaaggcttggtttttcttcctaacttatggaaaaatgcagtgtgagtctctttacacccagacatatttttggatggatgggatttttatcttccctctgccttccctggtttgtgaggatgagggtagtgttcacagtgtgactaagaagcagcatgacttttttgcatacttttgaatgaactactttgcctgccttttattctccaggcaagatgtacccttagagatgaggtggaacctaacacttggttttacctaaattgcctccttttccattcttacactgcccagagcactaaagctctgtttgttctattttcagcttgtaataatgtcttgatgttggaggatgaaagagctgatgtgaatagaaggcatttaataaggagtcatggtctggagtcccagtcaaattggtagcacatggttttcatctgccttgaagggcttggttgcatggtcttgccttcccagagctgtgacagcaccaggctggaccctatacacaatgccacatctccttctcaaactgatgatttggagtggcaaatgccactggctttgagagatgccaaaagaatggtggacttggcttcttaatcttttgaagatcataaaatgtttgctagggctcgctcatctgcacttaggacaggggttagatgggtatgttggggagatgaggttattttagtggggtttggttaacgttcagttttaaccactgttcagccttctcactgggactcctagctggttacatttttttgatgggggttacttttatatatttatgtatttatgcccctcattctaaaaaaggattttaaagccacgatgagctgtcattccaggagcaaataatttttacttagatctgactcaagttcactttccaaatgcaaaaaagggacagtcagattaaactgtggacagcagagtagttgttcattcatctcaatgcagcagtgtttgggcctggcagtgtttttgcttttggtttgaggtcttgacctaaaactttaagtaaaggcaagttttgcttaatagtattggtattgacactctgacagatcttttaatctgaaagaattttaaagatgcatgaaagtaatccccagtgatgattacatcttcgagtggcagagatcagatttttatttaaataccaatgcagtttatcacttttttccacagtgcagggggccagggagggtctggatttgggagggtctggatttaatagtgaacttctgaacttgacttactttgaggggagcgattggtgggtgttactgcatgattcagtgttctgtgtctttaaaaatgttttgaaatactcattctgtattgtaatcctcaaaactactgttaggattccaaaccattgtggtttaaacttagctggaatctaaaaggtggctgacagagggaaaggaaacctcctttaaataaagaacatatttggcttgcctaagtgtcccagagtctgggctctgggcatatctaagccatgggccaagtctcatagttgaagaggtcgggaaatacttgtctcaaatataaacaccagctcaatataaacaccatcaattagttctgcagaaactcctggtacaaataagaacttgcaaagcttcatgttcaatggagttcttgtctggatgagataaggagtgcaatactgcacgctcttctgtacttgtgataaatcaaaactctaatgatgctattaaaatgggttttcttttggccctggtaagctggaaagcattgggaggtggggaggatagatttcacttggaaatacctgaagctaaaaagtggtggctttttcttctttcttctaaatgtactccttgctctaattaagcgatgtgatcactgtcccaacactgacataccccaggatgaaacacactttctattcaagtagcctttttttcccttgccttcttccatgagacttgctgaaattgtcatgttatttctttccagaatttattggagcattaggcaaaagcctcttgggagtataaataatgatgattataaagaacagtcagtttaccaaggaaggccattatctttgacttgcaaagcttttacagccaaacattgtttgcttacagttctttaatacaaatgaagaccttaatggtaagaagagtcctattactactccctttgtacatggaggtcatcccaataaagaaaggacgatgtcactttgctcaggcattaacagcttgtttttcaggacaggcattatatacggtctatgaaggccttggatggtgttttttcttcttcttctttttttttttttttttttttgagacggagtcttgctctgtggcctgggctggagtgcagtggcgctatcttggctcactgcaacaacctctacctcccaggttcaagcgcttctcttgcctcagcctcccaagtggctgggactacaggcgtgcgccacgacacccacctaaattttgtgttttttgtagagacagggtttcaccatgttagtttgccaggatggtctccatctcttgacgttgtgatctgcccgccttggcctcccaaagtgctgggattacaggcgtgagccac

SEQ ID NO: 119702 - DNA, 1035 bp, Homo sapiens
ttcagttcatgcctctgaagtgatgtgctctgttcagcagagtcctatgctgtgccctccccttctggggctctagcttgccctttggagggtgtgtgtttgtgtgtgtgtgtgtgtgtgtgtgtgtgtgtgtgtgtgtgtgtggtaggggtcctcattttccttactgcctgtcactctccatgtcactgtgggtggccaagagtggtctcatttcctctacccctttgcaaaccgtaaacactggtcacacgtgcttgtgctggaatcatatgctccagtggcttgatggtgggacttcagatttcctgcattaccttaggttttgactttcttgtggttacctctgtcagcattctttggcagaggactatggggagtagaatgacctagaaattatccctgattttcttctccttccaagcctgctgaaccaaaaatggtttttatttttctttgaaaaactacccttcgtaatgaactccattaagaaataggagttcttcaaaggaggagggatgttactgtattcttttgatttctctgaatttactagatttattttccccaagttggtgtgaaattgttgagattggtccttaactagagtcagacaatttttttttttttttttttgagacagagtctcactttgtcgcccaggctggagtgcagtggcgcgatctccactcattgcaacctccgccttccggattcaagtgattctcctgcctcagcctccagagtagccaggattacaggcacccgccaccacgcctggctaatttttgtatttttagtagatacagggtttcaccttgttggccaggctggtctcaaactcctgacctcaggtgatctgcctgcctcggcctcccaaaatgctgggattacaggcgtgagccaccgtgcccggctggcaatttttattttttagatacagggtgtcgctgtgttacccaaactggagtgccgtgacgtgaacgcagctcactgcagccttaaccttcctgggctcaagcgatcctcccacct

SEQ ID NO: 119703 - DNA, 5364 bp, Homo sapiens
ctgtaaggcaacataagagaagtggatggtggggactgcaaatgtcatgtggcctagtggtattgagaagcattttgtgaagcagagagtgcgtgttccgattctgtaggagcacatgtcttggtgtgggtgtctttgccttcctagaacttcctgatgataagaagcctgtaaacaccagtgtgtccgtcagtatttggaatcttgtttattacatagtcctcaggttcattgtcaaaaaattctttactgatggtattaatcagtatttggaatcttatttatttcatagtgctcaaggtcattgtcaaaaaattctttactaatggtattaatcatgcttctcacactccagtttttctggtatggttttctgttccaaattgactcctgtgctcaggtcattagtttggcttactaacaggagccctgacagctatattcaatatttttctctgcagtggccaagtagccaagaatttactagtttagacacccacctcagtttagaaggtaggtgtgagtgtgtgtgtgtgtgtgtgtgtgtgtgtgagagagagagagatagagagagagagagaatatctaagaaggagttaatattttaaactttgcattgtttaactggaaatctgtgttctgccgggccgcttttatgtggtgtacctataacctatacacatacttgtgcctttcaaaggctaacgccacatccctcctactaaaattgcttattagagctaattttaagaattgagttagaactgccctataatgtaatgcagaatatttcccaataatgcctaggttaacaatgatagtcttgctgtattgtgcaaaaaaggcttctgttcagacccagctgggtttcaggcttaattcattgctctatggtgggatcaccacagctgctgtggggcctttacaaatgcaaaaaagctgtcagtgtttgtttcatcagctgcataagtgatgaggccaagttgaggaatccattccagtgcgcagtgtgcaggctgtagctattattgtttacagaattagtgtgttggagctttaaaatagttggcacatcgtctgccctttaaaagcacaagactaaggaatgagaccagttggttgtccttgtaatgttggccggatccagcccagcccttgtcttttaacagctactgctccgggctgtgctgtgggacttgactactctttggaggaagtgggggtgcttgctgagttcttgtctctgtagttctgcatcccaaacttaggtttgcattaaaaaaaaaaaaacaaaaaaaaaccacgcagtcatttagagttccataagtgtaattgagatttaaagccttaatcatcctcccagccccaaataggtataggactgtcagctgggatttcaaatatctgtgcagtaacattccagatttggctctgtgagatttattttgtgaagtgatactgctttgggacttgccctcatctctccccatgggtacagaagttaaggctacttcttggctggcagccaagaagccaggaaagccccattggacaggtcactttccaggcaattaaggagtattctgcagggctctccgtgaatgctgtcttaacagtgtaaggtgaccctcttccccagggacctgatgagcccgggcagcatgttcacttgcttttggactgggcaagcaggaatctgggaccagcatcatggtcattcacaggatagtgtgggattgtcccagcccctccctcatttacattcagaccccttctccactcaggggtctctgcctcatggaaactggagggcatgggcggtggctggtctgttacggttttgaaagtggagctcatcaggtctcctagccaacgggggtgaataattgtgcttccttcctcccagctggaaaaggtcccaaagtgctctctcatattcataaaagagatggcacgaggcttagtgtctccaaattaaaggtcaatactgatcagctttctctcaaagaactgtcacatatgctctcctggagacatttgtgtcttcccattttaccttaggaagtctctggagcccaggaagacaagtgtgtccgatgaatctcctgtggtgttggtactgattaagcagagtttggggatccttgtatggcccctcttttaaagagctttttagcacggtctctgccaagtatattttaactattagttacaatgatcttccaacagagagcaaacaacataagtaatagtttagagttttacttcttaacgtcttcccaaattccttctctttctctttcttacctgcaccctggaatagtagtaatgaaaaggaaaatagcaaaccgtgagctccatatcctctcccgctgggggaaggactaatttgcagggcctcataaggaaacagcagtttcatggtcattgttgtcagcctagcagcgcttggttgcacttccgttgctcaacgtgtttctcctggctagggtgtttgtagtatattttgagttttaggaatctttcatcaaagtttcttctgcttttttgtcattttaaggcaaaacattttcttttggtagcttgaaagttctacactctcaatgtttaaacattttttgggggcagggtgagaaacagctttgtggacgcatatctgattgtgtgtgtttgttatttcatgtcagagtcatctcatgaccccaggagacctcgccagtggcctgcctcctagaaaatgcactgctgtaataacaatcagggcgccagctgaccactggttgtccctcagccacttattagctgcatgtccaggaggatcaccaggccgtggtttaaattctcagtgttctccattgtaatgtggggtgcacgtgcgtccctgagtggagattaggtgctctaataggcacaactgtgcccctttcattgtaggcattctcttccacctgtatattagtattgcttctagctgcgtgatcgagggtttgggttaatgctgacatattgcaacttactggatggcaaacagttaagttgtcttctttggctgtggggagagatggtgaattcaacactctgaaactctgaacacagtgtccaaagagaccctgggcttcctggagtgttattctcttactctcctaaactattctcccactcccatgaaaaagaaaatcttaaagcggcttatcagtatctgacataagacagagtgaggcctttccttttatctacatagagatagctcaaagatctgcttgaggggcagcaaaaggcatgtcagcaaccaccaggaaaggatcctgaagcctaaccaactggttataaacagcagtaggtgcccaggagggaaccgataccttctgcaagagcatcagttgtgaaatggcctaggtacaaggatgttcttagaatcaggtttcaaattatagtaacatgtagacagactctgaatgctctgggaatggagtaagctggttctagtgaattttctggttgactgtttcaagccatggcattaactccttatgaaggatattttttggctgtcctgtcttcagaagtccggtgtgacgcgcgaactcaatggttgcgttcccgaggaccttatggagtgcttcctgtctgtctgccagtgctttgttactgtgcacctctgtagatatgcagtagggggtttttgggtggtgtgcatgctgatccccagagggtttatattttacctgcactcctgaggatgtgtttgtgttgcttggggccctgagaaaaaactgcattcagcggaggatttagtaagaagaaagttggttccatgaagtgtacatcagcagcccccgaggatgctgtggggttgcaactcctaaggcttaactgcggcggggatcggttaatagtatggacaaccccacaccccagaacaggggataggtgatggacgacagtgggacaccatacctaatgtgcatgcctgcttcctagaaattgtgatagtgtggtgactctttccttctctgaaaagaccaaaccccatcacttaatatggaaatttaaaaccaaacctccaaacccttctgacagcatttttgaccaaattggcttttcgtaagggtagagctagattttccgaagagctttaaaaacacagcctagaagcttatctttgtgaacttttgctgttgtcaacagtggatatcttgctgctgctaatagaaaacaaaaaagttcatttgccaaaatgcttgtcatttcctcctgaggagtgcagcttaacgccaggacttcatttagtcagagggaaatggttgctacctccctgttaagcttctttccattatccagttatggcagaatgagtgttggggcggcctggggagatgggggtaaaataaaggaacagctaagaagtggttctgcagaatgtgtacttatatccgaaagcctggatggaaaggacggtggctttggaaggggtgtaaaatgggagggggtggcaatcgctgaagcatgacaagcctccgaaggcctctgggacttgaacacaaaaaagggagctttttgcagctctttcacatgcacacgtctccctctgccccatccatcctcccctgctgttttgtaaatctcccagttggaaatttttaacatgggagagcttcttcctgtgcttcagttggcagaatgctcacacgcagctgcaaagaatttgcttttccttttcacagcatctctcatttaaaagcattagtgagactacagaacaaaataaaaacttcaggatttttcagaagtggaagccaagtttaattaaagtcaaggaagttcggggctctaactcttttgttaaacctcttaaagtcaggcgtgtgcgtgtgcccatggcaggcaaggtaggaaatgccagtgcctgtttctcgttaggaaatttaaaggcctacttgtctggtgtgtgcttggggaatgtcctagaatttatcaaaagatgtgctgaaccatcatgtctttggtggcctcaaaatgcttgccagtggtgaggtagttgcccctttcttgagggaggaggaaaaccgttaaatagctttctgtctcctcccaggcctctgtaaaacctcctaatctgagtgccctgttccctgtgctccacccttagtccctagaccaggccactgggctgtgagcattcttgttggggggggcggaaagaagtttctgactcgataactgcctcctaaagttggatttttaatctttcaatagtatttgaaccttcagcattttttacattttattttaagagacagggtctgttgcccaggctggcgtgtggtggtgtgatcacagcttattactgcatccttgaactct

SEQ ID NO: 119704 - DNA, 2100 bp, Homo sapiens
aggaagagctgtttgatctctccttgcaaaatgtttctgggctcaggttcaagagtggagaaaccctcttgaacatggaacagttggctcttggggtcagtagcaaagacaggaatgagctggaaaactttgtcctgacctaaaaggaggttacatagacagggttttggatctttggtgtttccttttttacaaaggccatgtgcacagctgtacttccagaattggaaaatttcctacatacacagcttcttcattagatactgataccggttaattcacagtcacctgtaattggaaacagctgctgtttcccagctgactaggtgttcaagtcagatgctttgaattagctggacttggattattcacattttaattaaagtccatttaccgccccccccgcccccccccccgtcttttgcctcttcaatgaccaggtttttacagtaatacatttgaaattacatgagtatcccagtagaaaggcataatgtaagttcaaggacttgcagttgattatggcgttacattattaaatagtgaatttaacagcattgcaattcccttttctcacccactgaaccttgcctctctagtggggaaaatttcattccatttaggaaagttgagacttttgtcccctttccttctcttgggacagagttgtattaacctaattgcttgtgtcactgctacagggaaggtactgcgtgaagtgggacaagcaattttctggtactttttgtctaatggggtttgcaaattaagccatgactagtggggatattttctcagaagggggaaaaaagttaacaattgctatggtgtggctgttgtccagtgcttctgtattgatgtagaatgttcactgagcagcttgtaggagaaaaagactgccttaatttttgggcaaaaagttagaagggaaattgctttgcatttttctctccataatgttaatgaggaaaagaggcaatgctggaggaaaggagataaatggatgtttcctcccttccctatttaagctgcctaagttgactaaagttcgacttgataaatgtcctagttaatttaattttgtgttagtgcctctcctcccctcgagtgtccagtccattttcagctgacttgcagaaaaaccaggttaatgcaaatccatcagattctgcatgcctgttaaaatgcttaagcattctacatggcgtgggagacatgatgcttgcctaaaagggtccctggagagataaagtatattcctgccagtgcatttagggagttatacatatataactgtctcatatgatttggcattgtcacatactgagcactgggagagccaaaggaggtctggggttggtaggctgtttggaggtaaaagtttactactggaatagtccttccagctcagccgcttccatttccacattgcctcagaagttgcctaaaggatgtgcatcttgttggcagccccatgactttctagaagccctgttgtgtctgtttagtgctttctacattaggtcggagatcttttttcattaggtcagagatactggactcctttttgttatggaaataacagtctcttggggttctctggaatgagccagggggtcctgttggcctggtccttggaggagaggtccaggctgttgctttcagtatccatgccacctagaatttccagtgactgttgagtcattacattgctatggtagtttcttaggaataggccggtacaatttgattgtgtttttggaccttcccccaagttacaaggccaccagcactcagactgtgggtataccatatggaccagggaacacattggacaaggcgaaagcttgttaccatgaagttcgttagaagatgagactccattcaaattttcagttcttcatgaatgagttcttagtaaaagtgctttgttgatttttttccatggtagtaactaccatgttttgagtgccttgttaagtaacataagtacataatattctcacacacttttgcaaagcagaatctattattttatttttacagatgagcagatagggctttggagagagaagtggcctgaagtagcacgcagtgtgg

SEQ ID NO: 119705 - DNA, 2527 bp, Homo sapiens
aggcaatcagtaagtattggttgttatcctaattttgcattccatattaacttgcagatcatctggatgaatttgattaaatccccttccctcactgactttatatttcgggaaatttcatgtctagggaagttgaaggaatagcatgaacatctggggcacttaccacctagactgaaaaattaacacctggtcgtatgtatgtatattacccattgtctactttcttctgtcaaatccgtgactttggaaattttgaaatagtgctcttggttatccattaaaaaagggtaaaataaacatgctgttgctcctgctgcagcacttcagtagtaataaaaaaaaacttcagtgacttgggtttttttctgccaaagtaaatgttggctctctttcagatgtagtaatgttgcttctctaaattcgttcgagttaaactaaagcagggccaagttgagaaattagtttctcggttttttcccttccaatttagaaaaaaattaagttttggatattcttgttcctgtaattttcttccgtgttccttcctcctcctgcattaaaaaagatcataaagattcagctaagatgtcagtgaaaggaacaaagatccagccttttacattctttatgtggagttattgttggtagtaatcttaaaatagggtgtttgaatccatgttgaggcagttaattcagtagtacagtttcttgttaaccacaaaatgctaagtaaaggtaaagccttatccccacaccctgctttttttttttttttttgagatggagtctcgctctgttgcccaggctggagtgcagcgatgtgatctaggctcactgcagcctctgcctcctgagttcaagcagttctcctgcctcaacctcccgaatagctgggattacaagaatgagccaccacccctggctaatttttgtattttcattacagatggggtttcaccatgttggccaggctggtcttgaattcctgacctcaggttatcctcctgccttgacctcccaaagtgctggaattacaggcatgagccaccgtgcctggccagccccttaacatgtgatttttgcctttttgtgatttttgtcttatgctgcaaaatacgcttgcgttattactagctaggaaatccaagcaggtatcacaccgtgccgtcatatgagtgataactgggagttttcatgcattagctggtatttgacaggtttgcaggtatgttagaaagtttcagtgtgtcagtgtttggtgtgtataagcgtgggagagcccaatacgcatgtgagatgcagcttccagtcagtgcgcatataccacttggagggcatgctggttgcaacccttttattctaataaggaactggtttggctaggtgaactacgaagtcattttggatttgacccacactggctgtgtctcactctttactgcagtttaattcatgtgatgctattaagataataactttgtccaagagcaaaagaacgtgaatacattgtggtatgtgtgaattcacaaacaacattcaagatcagtttcagaaatgttcagagcaaaatctgaagtccccttatctcctattgtactgccttcctcaaaagtaagccatcagtggtttgcacatccttctagcctttctgtgtatttacctgcatacatgcatgtttatgtaaacatacagatgggttccccgcgtggggggccccccacttcacttggggcctatttatataaatggaatgtaaggttatggcctgtgatttagctttttctcacgtaacaatatctcaaagatctttccatgccattctatttcatgctgcaagtagctgataggactagtgtactgtagtttatttagccacttccttctgatgactttcttcctagaagagtccttggcatttaggaggcactcagtagacctttaggttgttcatgctgttttgtttgctttaaaacatttctgtccatacacctttcaaacatatggtaatattagcatatgattgaattggaagtgcagggtccagggtatgtgctctgtgtgtgtgtgtgtgtgtgtgtgtgtgtgtgtgtgtgtgtttgagacagagtcttgctcagttgccaaggctggagtgcagtggcatgatctcagcgaactgtaacctttgcctcccgagttcagaccattcttgtgtggtagctgggactacaggtgtgcagtgcaccatcatgctcgaccaatttctgtattttaagtagagaccaggtttcaccatgttgcccaggctggtcttgaactcctggtctcaggtgatccgcccaccttggcatcccaaagtgctgagattacaggcgtgagccacagcgcctgtcatgtgctgttttagagtaggaagaaattttttccttccgaaaaccttcagccaatctacacacccactaacagcatatgagagtctttattttcctcccttcttgccaacacttagcattatacagcttctttggtttttgctaataaatat

SEQ ID NO: 119706 - DNA, 1049 bp, Homo sapiens
ttttttttttgaaaggaagtcttgctcttgttctccagactggagtgcaatggcacgatcttggctcactgcaacctccgcctctggggttcaagcgattctcttgcctcagcctcctgagtagctgggattacaggcacctgccaccacgcccagctaatttttgtattttttgtttgtttgttttagtagagactgggttttaccatgttggccaggctggtctccaactgctaacctcaggtgatccgcctgcctcggcctcctaaagtgctgggattacaggcgtgagccaccgcgcccagccgtcagtgtactttaagtatattttcattatgcaattaattacaatatgggaagtcagttaactaggttattactttgtgaagtaaagttaaacatctggtcatagaatgacttaaaaatgacaaataaggaaaaaaatacatatatatatatataacatgaggtaaagttaaacccagatagagggtatcattgctttcatgcgtggactttgaaattgctttttattcctgagaccttttctagttctctaacatgttccccaataaacgaggttagaggataacaattctagaaaagaaggcagcatctcgtaagtcattccacattgcatacagtaagtgtgatttctagccatgcatccttttaaaaaaattcatcttgcaataaaagaatttggagagcctttggaatcttgtataaaggaattttgctggcataaaacatgcattatgtatcacacttgtattttaaagcccacttgatgaaagagcagcaggttgacagtggttgactcaacaacctgcaatttctgatgtataactatgagcagtgggattattctttgtaacttggttatatgaagtttgaagtttttcctttcagtgcagtgtttcctttttcttgtttgtttgtttcctgagtctcactctgtctcccaggctggagtgcagtagcgccatctacaagccaattgcttgactctcctttgggtgagtggctaagtaagttaacaagtacaa

SEQ ID NO: 119707 - DNA, 2060 bp, Homo sapiens
atcaggactcctgtgctttgtgtcagaaatagatgccatccctttttctgtaggaaggaatttatagtttggagaaggtagagttggatttggaacctcagttggcctgcgttgagaactgctggtttcctgctcagttaggccagttagggggaaataagaagactgccaaaacctgtggcttgtgtctcagttccctttctccagccactgcaccagagtttgggcgccacacagatggttctcagtggcagttcgcagagcggtcctcatttggccggaagctactcaggcagcctctgtttcctcacttcagcggggtgggcttgggtgtgggtgaaagagataagatatttagcagtgagtcatttttttctggtagtttgacctggttgctttgaggatgattgcttcatcctttctcgtactttacccactgtcccttaggaaaatgggggtcctgtccggccagtgttgttggtatctcaggccctgtggatgtgggattctgcatatctcttgaactgcctgtttcctcccaacctccaaaaggttataatgtccccattcttctatgagtgaccaacatggaatgccatgtatgctcaaaatatgatttctcattggcccagtgtttgtaagaagaaacctctgatttagggtgtgcttctttatctcctgcatttggggttgggataggcagaaatctgttggaaaaattttccgcagtgaaggttggatgggtgttctgtcctgtttttaattctttgaccacaggaccttttctcttgtaaacacttaaaaacctctaaggctaatgagcaaagcctggtgtgatgtatattttaaggaaaggtgtataacaatacatgtgtacaaggagggaagcggagaagggcatgggagtagaagggatcattcccctgcaattggataagtgacatttaagctgcattccatgtaagcttttgggcctggaaaccttcccctcccatcttcctgagatactgtgcttgttgtgagctcattcagagtaataaactgtacccgtaattcatgagcttgcaaggccttctttaaccgcttgcagccaggagactaatgacaacatttaaaattatagattgctcattttggagtctatctgtttcgagttatgaatgaaatttcttagccacttactggacagtagaacctgtttgcaaagacccagtgtcctcatgttgtgtgtgtgtgtgtgtgtgtgtgtgtgtgtgtgtgtgtgagagagagagagagagagagagagagacagagaggaggggtggagaaagggagcaagcagtcccccctttatgtatgattcttagaggtgttacaggatgcagtaaccatgaggactctggtgttgcacagaagttgaattcttacttggaaagtttaggtctgggacggaagggtgacagaaaaaggttaaggttacccacactctatcagtggtagttatcaatgagtgactgttggtagacagcaagcaaatgatactggggtaagaaggttctggatatgaaagaactaggtaagattgcaaatgtagtctctctataaaccagatactcaaaagcaaatgtttaaagcagcgtataagtaactgggttgtccataactatttcagaaatggctacaattactcaaatcccaggtctttaaaaattccaaaggaacagcaagggccacataaagaggaaaatctgcaaaatggtagggtggtacctgagttagcaaatgggaacttgagctcttctttactataaaatttttttcttttttcacagagtgccgagagtattagcagacctttaatgcatttggaagtgacaccatattaatcatgtggatttcactttctgtcatgagttctatacattttggcttgaaatcagtcatcagtgtgatattcagaggtttactacatctcattcatacctttattttttttctagccctctcacccgggtttcatctgagtgactagaagtggcgtttatttattgactgtggaggttaacttacactgatgg

SEQ ID NO: 119708 - DNA, 1941 bp, Homo sapiens
agggtgcagggaataccctcaccccttagcagcttctagtcctcttccttaatcctttacctgttttctcattattatactagtgaattttgtttaattcctttgtgctggtttggaacaagtgccatgttaaatatcatttctatgatggagtgcattctaggttttaaactgcaggtttataaatgaacttttagaaggtgggcgatttgaaagtgattctgtgtggaaatagaagccagaggggccagattcaaaggccatctggatctggagcctcatttattgtcaccaagaactggatgtttgtgctgtttgtcatttccctcaactcagcctctctaaggataatggcttttcacagaagcctaaatgtaatgctttcttcattcccttacttccctttaaaatcttgcatataaacattgatagaaatccagaaagagagagtcctgttttctcccctgtggttaaatagtgacggttgatctactgaataccttccttccttaaaaacaacgagattaggtaattacagcaaatgtggtcattagcctcatctgctcttattatcttattatgtatttgttactgtgagagccaaaagatgtgaggataagccagactctccctactttgaaaagacaggaattgtaaaaacacgtggtcactaatggaatctgcagtttgatccaccatgacttttgcttactggtgaaattggttttcttatattttgtcaacagtaaataggctgtgtgcttggataatagttaggctaatataggaaaatttaatcatggcttttctcaagtttaatttgaaagagtgcagtggggaagtcccctgcagggtggaaatcgtagtagttgaacatgagtgacctttttggttgactgactgcccttcctgtgaagctggcccaatatctttcccctgtcaggattacttcctgtctcagcctgaatagtttaagtagctgcaagattgatgttggatatctctgggaaaattccattctcttgaatttagctgacagagtacctctttcatttctttcattgtgttccatttttgacctcggaaggaactaaacattatttctcatccaacagactcattgttcatcatctttgggcttaaaaatcctgtgttccctcagttatttcttttatgaaggtttcaggtgcctcattattctctatgtggagactgtgttagtgtctttaaaaatcgacattccatgttttaagcatctagtatacattataagtagtgtgatattttgcatccatttcactcagccaccctgcttctaggaatttggccacaaggatgtgtagtaagtattttactgtgtatcccagtgaaaaatggaaaccaataggggattggttaaattatggaacgtctgttccgtgcagtcattaaaatgaaatggtagcaagaatgttgactgacataaaataagtgaaaaaagcaagtgagaaaacagtatttacagtttaatttttttgtcttatcttggaaaatttagtaaatatatgtatacatataatatataaagcatacatatataaacgtgtgtgtgtgtgtgtatatatatatatgtatgctttgacaaatgaagtggtggtgtaggcacaggtgggaggggcaactaatccacactgagggatgacagaaggcttgaaggacagggattagccaggtgaagatgggattggccagtagtgtgttccaaagtgaaagtggaaagcccagaggtgagaagtggcttggaagagtttaggaagagggatggatgctcaggagataaggcttatctatattttctccaggaaacgtgtattactctgtaataaacaaaaaaaatggtacctagaaagcttcttcttccaaagaagaaagtcaaggaagcagcaggaaaacagattgctt

SEQ ID NO: 119709 - DNA, 1135 bp, Homo sapiens
tgtggattttggactcttaatgagattaaggccagggaggctttcccaggttggctggatgggctggggctgggtgtctctggtgaaacagatgaattccagataggtaatttaatttccagaggtgccgcacaaatgcctttgcctcctgctactggttagagcaaaacaagcatgtgatttatgtaaaaatacatgaatattagtttttatcaaaaccctgcagaagaaaaacagtagaaaaaatgatacttcctgccatagcctctttgtggaatgaaattaagaaaatcaatattctttacaaatgactagtcacagtggaactggtctgttgaacctaccctttgtagatagcattaatacatcaccctctcccacattactccaaccataacagaaatagtgatttacataggaaaatgcgagctgaattaaacaaggatggccctgaattctgctgtagggattcttaagatggcacaagctaggctgtgaatgccttggcctcccctcttctcccctgtttctgggtcatgctcccctctggatttcttgctgggtagttctggagggaaggggatgcccttctacataagcatctgcaggtgcagagatgggatgggcctaagtgttctgagatcttccaggagatgggatttcaatctccagaattcccatccccgcttggctctttggtggcccagttctggaagttgagatttagaccaagattatagtcttaaaataaatcttggatgtgactcctgccaggatgacttgtaaataatttcgtgccagaaaccgagctgactttggtttgtgggctggaggtggctgattccaactctgggaattcattctaatttttggtgccctgttcaccctgagttgtcttctcacggctgcctgcccagtccctgtgtgggaatgggaaccgtcatagagtgaatatgaggacttcacatcctttgggatgcgggtattttagttccagggctaacatggcacgttggcagtgagatagttgctataataattctctaataagctgttggtctcagagacccttccgcgtggcgtatcaatggggcttgtgacagtaggagttgggatcttagaggattcatatcac

SEQ ID NO: 119710 - DNA, 1542 bp, Homo sapiens
tccttcctgttatggttcagtagtctcctctctttctgtctttctgtgttcttcctgtgactcactcattgtctgtgtttctttttttccctgtaagcctggcctggtcctttcgtgattccctgtagtctttttctcaagtgggcattaaagcaaccttatctttcacacacactgaaagaacctagtaactgagagatgatccagccagattctgcccttacctttacccctcaccaccccactaggggacaaaacaagcaaatatactgactgacccaagccttgttgttccgacgaaaacactggcgttcagcatctttcccgcaaaccgagctgcagcctccagtttcagaatagtgccttccataaaatctgtgggagttttccgtttatgttgcttgtttttaaacaatcttcttggaaaagaattcagtgctgttaatggattgccgtcggagctttttttacattacacctgtcctctgcttcctgatctccttttgatggttagggagaatatgttgacttagaatagcaaggagccatggcaccccaaggaaacaggaaaaatctcagttttcatggatgagaaagtcccattctattgtctgtgtgtgcctgagtatgtacactgtaacatctcatttttagttgtatgaagaaagcgctgtggctgagaaccagtgtttggaggttggggtagggtagcctgggttcatagtcactacatatcccagctccccaagccctaggaggtactgcacaagcagtacagacagggtcttgcatttgtgcctcttcactggtgacttcccattttgaagagtgccagcttttctgggaagtctgctgccaacactgagccgagccagggttgctgttcacatctacgcaggctgttggtgccgcggcagcatgctgtccttgagagcactgtggaatttgcagtgtgccgtacagattcagaaatggtgtatgtttcttgtggcattagtgttttgacttgcaaatctggaaaagaacaggaagtcttggtggaaacactctctggctgatgtatagaaacctgtggagttaactgcattttaagcaccaattattagaaaatgaatttcttcttacttggggagatttctttcagatcttaaatacatttgtcatctaaacctcttctcctaggggcagatgatccctgccttgggcctaggagagtagacattggtaattacctttggcctgtgtctccccaaatatccttataccttctgctggcccatggctgtctagaagccctcatggaggtgctgcttttgtttttatctcttcatttggggagaggatactgcatctggacccaaggcccaaggtgtcctgatgttgagtccttccaattctgggtagccatgaacagtgatgctgttcatagataaggtcaaagggacgggcttaaggttaagctcagttagtggatggcagaggctgtattcaaattaatcttgatccactctgcaggttgctgtggctcctgtttcccccact

SEQ ID NO: 119711 - DNA, 1299 bp, Homo sapiens
tcttgaactgaaagtgaggttgaacttcatccgtaaaggtgagttttccccaaaggtacctgaatgcttgccgtgtaactgatgggtccatagtccactgccagaaggtaccctcttgcgtctcggaggtgctggttctgaagtatcttttttgagttttagttggagtttctcttgttgagaattttgaatctcagaaaatgccatggctgcgtgggtgtttgttttagctccacacccttcatcttcagggtggatgcacccttgggtggcgttgcacacagctggcgcgtggagagccgatccctccagggtttgtttctttaataccagacccgctcccacaaaactggtgtatttaggcgtcccctcttctcctgtgtttgttgctggccagcagtgcctgcaagttccagcagatgaggtgaggatggacagtgaggtagaggctagtctgtttgcctgggttcactgaagttgctaggttttgagtttgctccagattagtgaatatatcagctgtgagaataagagtgattaaagcatggtggcgcatgcctgtagtcccagctactggggaggctgaggcaggagaatcacttgaaacctggaggcggaggttacagtgaatcgagaaccctgccactgcactgcagcctgggttacaagagcaaaactccgtttccaaaaaaaaaaagattaaacaaataggacttctccatttgtatttaaacttcaaagagaaagctgaactccaaggcccagctggaggacacgtggatccagccagcatgttagatgtaggcaattggagaaggacagggagacagcagtgaggtgcagggggatgaggcacatagttgtctacatgaaacaggcagatctttgttttcgtatacctagaatagtttccatgtccagcaagaacttccaggtttttgttgttttttgtttatgctttggtggtggtggtggttgctaccacctggagaaaagctgcctttgcagccccacaactgtgcagttgctgtgagtgagcaggctgggaaccacatgctcttgttctgacattcactggaggcacccccctcccctttccttacaaggcatctcagaggattgtcatttgaggcaggccggattcactggtgtgactgtttcaggactggcttgtctcattaaaaaacattttttggatcagaaacaatgaggggtgggaaaggcaacaaaagcctcttgagattcccggattgctcaggatgttataaacagtaagtgctgcttttgatcttggagggt

SEQ ID NO: 119712 - DNA, 2656 bp, Homo sapiens
aagcgattcttgtgccccagtctcctgagtagctgggagcacaagtgtgcgcaactgtgccctgccaatttttttgtgtatgtgtttttagtagagacggggtttcaccatgtttgccaggctggtcttgaactcctgtcctcaagtgatccacctgcttcatggcaggtgagccactgcatccggtctgtccatagtttctggaacacaattagaagtgagatctgtgtttgagggagaagcaggaaaagtttaacctgaggatggccctttaactttatatgatgaaaaactacctaatcaatggttgcagattatgtaaattaaaatagtggtgggtacttcttaaacaaattatgcaaatttgatgcagtcatcaaggcttcttgcttcactgcatcatttaccttttgatttcagagaagttcagccccttgactctttccttattcgaactggagctaagcactgagatatttcagccatacgcttgttagggagtgtatctatgtaaatacaagtaattttaagtagacaaggctatattagtagaacctgattacttttatcttgctggtttcttccattgttttattagtatgtttcaaatatttaccatggtgagccgatcagcttctgatctatgtggatcagtatccaacaaaaactgactagaagagactgtggttgtggatgcttgtgaagagaatggaaaatgtattacagtgttaatgtcctctacaattccagtgacttagtattcagttaagacacaggtaaggtgttggttataagccggtaattcaagttaggttaactctgtttcttttccatcataaccagttgaaaagaggaagactttacatttaattaggtagttcgtagaatgtaagtgtgagaatagaaaaatatatttaagaaactcagtcattgttctttacacaaattagagtggattggtagctttgggggatttaagtgggttgaagtagaaggtgaaatgatgactgttaattatcaaaaaccatacataaatgtgatttgtagtttattttgaaacctactgtagtttaaattcatctggtattcattacaatgcagttcttaaagaagatgaaactgtatagctaatgacccaaatgtttccttcttatctaatcagggatccttctttagtagctagattagatgttattcagaaaggataatataggaaataattactgtatttcatttgtggagttaagcatatggcctctaattcattttcatatgcaatatatgtaaattagagaccaatctatattattttcagccatggccatgcaagaatatgattcattctctctctctctctgtgtgtgtgtgtgtgtgtgtgtgtgtgtgttagttaaacttgcatgtgaagtatgacttgcagtttgtagtaattttgtgatgctggtacattttctcatcttgtttgggagttttatgaaatgttagaattcaaatttggggatgggaggcggtgtatcatatgaatgatttcattattacaagtagtattttgcagtagttagtatgttgtgagcagattgaaaatgccaggaacttaaaagaatttttggaagaaaataactagatctgtgcaagaattcaacagtctgattactcagtgttatcaattacaaaacacctggccctgtgccatgatatatatactatatatcagtataatcagtataatcatacaccttcttgtggggataaagggaatgaagggaatgtcatttttttacatcacaaagaaaaatcatgaaattattaatagttgtgagttgtccactctgtaactaaggctaactatgaactaatgaactcacatgtagtattaattacggcacatatttcattaatgggaacctgcaattcaaattatgtttgagcaggaaatatttaacaattttgtaaacctttttgattgggccttgaaacatggtttgtagctttttattacttctgctctgtttcttaaatgtgggtggcagtgaaatcaagatctctattcagaaccaaagactgactgtcagggggtttatctacttcgtaacttgtcattagaaaacatgatttccttcagcttctcctcgtatttacaagccaattgcttgactcttctttgggtcagtggctaagtaagttaacaagaacaaacaacagaaatgctttctttgaagatatgagacttcaataatagagtgtgagttagaatagcaatctaattttataattggaagaattcttgtttttttttttttttttttttttttttgagatggagtctcactttgtcgcccaggttggagtgcagcggtgtgatctcggctcactgcaaacttcgccttccgggttcaagcaattctcctgccttagcctcccaagtagctgggattacactgcccagcactacgcccagctaattttttgtatttttactagagacggggtttcaccatgttggccaggctggcctcaaactcctgacttcgttgttcgcctgcctcccaaagtgctgtaattacaggcatgagctaccgcgcccggcctggaagaagtattagatttagtgtctagtggttaatgggagaatgggaaatctgcatagctcctgttt

SEQ ID NO: 119713 - DNA, 1394 bp, Homo sapiens
aacacataattgtaatttcaaatatccaaacaggcatgtagaatcatagggtcatttgttgaagcttagttttcaaggagcagtaagagtgaggaaaaggtgcacaggcttctgtgcttctgattctgagacttggttagagggcacttgccaggcatggtgacacactcctgtagtcctagctacgcaagccatattcactattatcactctctggaccaattattgatttgcaagttcctgtgaaatgttttatcacccagtgtgttttgtctgtgtacaggaagcactggatacactggctaggtgtgtgcttttaagtaacattcttctctgattcctttccttcaaagtgggagatactggtagcatctacctaccctgcaaggatttaatgagttttaatgacatgagaaatgcttagatttcagggatttgactaaacccaaatacctgggccatatttttagccaggagccagggaatatttgcactaagccactggctgacccaaaacttctctctttaagtcatttagccaaacagcaaattagggagccagcagctcattttgggggtgatgttttgtatgagaagttggtgaaccctgggggtagcagtaggggagatttcagcatagagaagaggggatagttgatttcctaaaccacttccaaattatgtcttcaaacaaaataaaactttccccttgatttccaaattccagaatattaggcataaccataatataaacataacagcatactcttaaaccagagagaaaaattccaagctgttctgaattatctggttcatttgagattggactgtatgcaatttggtcgtagcagcaggctcattctagcaaatgctaaggtagcaaacaccaggactgtaggttacttttcctcacaacattctggttgtaggtttcctgacacattcattctggctgtttttcttttgcactctgtggtacgaaacctcttagctctgtgtgggtggtgggcttttgcttgccaggcaggcaggcacagcctggtttcccaaatgcatttctccctgattgccttctctatccattaagcatatctgaactgtgtaggattagctgtgtcttgttctttccttttctttcttacaatcacaggaatgagccaggtgtgtgtgtgtgactcaccctagcccagcctgggtgtgctacagcaccgggaaatcctgccctcttggcctagcgtcttcatagatatgtggcttggccttctctctttggtgcttttcccttgacagcaaacttgtcgtcttttgtcttgaactttattgctcagagaccaccctactgctgtccttttacttcagatcttcaaattcagtcacatactgaggtactaggg

SEQ ID NO: 119714 - DNA, 1491 bp, Homo sapiens
aggtcagaaacaggatttaggaacccaaagaaataatctttgttgatgcttaaattgaatgaggcagaaacaaatgtctctttaatatggttttttttttttgggggattattttggtatcaccccaagcctgtaattccctccttagtcatcatcttactatcccttgggactctggcctgggattcttctgctttgtggttgtgattaatcctgcaatgagtgagttggggagggatgggcctggggaagtcagctgctgctagcagcaagcaggggtagggtttatagggagagttgacatcctgctgggatctaacagaaaagtttgaagattattgtgctgaaataaactagctcacaattttgctgtttgactcagggcaagctcactgtaaatctcaaggagtactggactgtatgatggcctcttttgctgtccttatccccactggaggatgcacagattagttaatgtctccctttcatgaatgcagcttttatctttaataagcgggttaaaccgcatgcgctctgtctagtctgtgaaggtcagccagccattcggattttatcttcccatttctagactgctgacagagttcttgtgcaaagttaggaatctttgggttttaaaatgttttcttcctttgcccatccatgacatgcccttattcttgaggggaggaaaaagaaggcctgagtctctgttaggttgcaaatattgtctattttttgggagtgatctttgtagaatctgggcagtgacttttgttgttttgtagtcctgatgatttaaaaaacatatctcatatatttctttacatacagctcagagctcaacattgaaatagatgttcagcagattcttgcccccacttaattttcactgggtttctgggtttttactgtgattaaacttgacattcatttaaggaatgagttgtgatgttctctggtcatgacctaaggaaaaggatatatatgtgctctaggagtgaattctggtgagaacgtttgtattctttcctttcctctttgatttcacaagtcaggctgtaactttaaaagaaactataggggctgttccccaggttattcacaaaacgagtctttgtctgctttttcattcaccatctggtatacaaagctaaattggaatcgtgcttgttttaattattttctacttgtgtggccaggaggttatttggtctggtgaggttacattataagcctgcgcactcattaataccaccgaatccacatcctgcgccagcattggaatggttaagttgatccacttgtgtggccagagtttgatacaacacagtggtcacgaccacattaccggaggaagtatggtgtgtgggttttgccctcttcttttttcattttttcttccaataatgttaattgtttcagtgtattttttcttccagtagaaatatgacttaggttggcaatcttagattagtgcctggtgtttattaa

SEQ ID NO: 119715 - DNA, 1099 bp, Homo sapiens
ccttgtaatcacaggggttcctatggaacagtggcttatgtcaccaataggaacatgagccctagagttactttggcagaagtcagatcttagaatgcttccttataattctgtttctataaaaatgttttttctatattgatacgtattttaatgtgaggatgctttttatataccttgaaggagtaaggttttccattcattccctgccactacttttctgatcaccccctcttcatttcaagctagtctggatttgacataatttttacagcagtttttgcatactccttttaccatgtgcttgctccttttgctgttttccattgcgctttggggtaccagctttctgactgacagatgggccaagtcaggtacaggctgttgttaccaaagggcatcttccatcatgttgtttgtttcttcaatactgtaatatttgagagagtgtacaactctagatacagaaggccttttgaaattctacacaaagtcacaataaaacttggggtactgtgggcctggggagattctagttcctgttcaaaactactactgccatttaaagaactggaatataactgcatatcataccacctagactcatgaatattgctattttcattggtttaattttcaaaaattagtggtattaaaccagtggggtatatttaatttcttcatgatgcagattattaaacactcaccagccttactttctctcttgattttataaatggtaattgaaagtccatagattttaggtttgtggaactggaatgggcccccaggggatattcagtccacacccctctttttttttcttttttcctccttcttctttccagagacagtcttgctccttcacccaggctggagtacagtggcttgatttcggctcactgcaacctccgtctcgtggcttcaagcgattctcatgcctcagcctcccaagtagctgggattacaggcatgtgccactatgcccggctaatttttgtatttttagtagagacagggtttcaccgtgttggccaggctggtcttgaactccaggcctcaagcgatctgcccacttcggccacccaaagggctggga

SEQ ID NO: 119716 - DNA, 1450 bp, Homo sapiens
ggtgtttagtactagtactaagttaggaaattattactgaggtgctttgattgaagacgcctttactgagtccttgggaagtaaaatagtgacggttaggcctggagcagtggctcacgcctgtaatcccaacattttgggaggccaagacattttgtggtatccagtgttttgggcgggttacctgaggtcaggagtttgagaccagcctggccagtgtggtgaaaccccatctctactaaaaatacaaaaattagccgggtgtggtgttcatatctgtaatcgcagctacttgggaggctgaggcaggagaagcacttgaactcgggaggtggaggttgcagtgagccgagatcgtgccattgcactccagcctgggcgacaagaacgaaactccgtcaaaaaaaaaaaaaaaaaaaaaaagggaatagctgctttacttcacagtcctagttaaggatttaaaaaaaaaaaaaagctcatgagcatgctcttcaaattttggttttgtgatttctggggttttcccatttaattccagatggaagagtgtcattaagttctcttcaaatgtaaccaaatttagtgtgtattattattgctggtggaatacaatgatggtgaatatcccattaaaaactcctccctagcccctaatcacattgaagttacattaaagagttggatgtgtattgaaagtatgatagtctcttgctataaaattaggctattgtgcagtcaaagaggcctctgctaagtgtggttccattttggtgtatttggagggagaggaagggcagccggtatcctgtcactgtgtcccccaacattgagcagatgttctctgagttaatgttgctcttcagttatctttgacagaagcagggtctggttaagatcagattgtttagactaatgtacattgatcttggcataatgatcacaagactataagccagctagacaagcaagtgctggtggtgagttgttagattaaaaaaacaaagcagttgttttgagaataacttcggtgccctggacttacattacaagacattggttttgttgtatgctacttttagatttacctgggaggaccttttacttaataaatagctccagactattaagctcggtgctgctgatcctgcggagaggaccccgacctgagagttagtgggagccaccctttcagacagacagggcgttgaatgcaaaattctcttgaattttaaggaagtacatgataatctgttttacttgggagtatgtagtgattttttttttttttttttttttttttgtaaatttccaagggtggctgtgaaacttactttcgtggtagtggtggacccttgaagcgtttttggaaagtagatgaaagagggagatgtttactaattctgttatttttattcagtgggtggtgcttgagtgggtataatttcct

SEQ ID NO: 119717 - DNA, 1803 bp, Homo sapiens
taccatatacagttcacccatttaaagtgtacaattctttttttttttttaactgttaggttgtgcaagcatcacaatttaagtccaaaacattcccattcctcagtctctgattgtagaaacaaatgatctatgactatttcttaccatgagtatgcagattatttgatgcacagctttttattttaccttctttatagatttccacccaggaaaaaattttaatcccaggttgtctcttacttgtatgaagttttctgtaataatttcttaattattgtaattctatgaacatcaactgaaatgtaattttattaatagcttattctgtaaaaatgctattaataataataaaaatatcaaaaaacgttttgaaggcattgcattacctgccgttttggattatgatcattcttttgtgtggatagttgaagattttaattttttgacaagctcaattgaattagggaagtaagtttgctgctattgcaaaatcatataatgcatgttaaatatcagttatcagtgtaatttgtttttttaatgcagcagctggtttctaggcttaggaatgatagttggcagattttcctactgctttcctgtgatgtttgttagaagcttctagtatagtttcttcatttctaagcttttgagactgattgtatgctgcttatctatatatgtagataagtttcttgtctttcaaggtcttttcaagaggtgctggagcagatttaggaacgcagcatagtttaatattgttaagcagggatgtgtacctgaatctcttttggaagtacaaaaattcaccaagttggtacctccggctacccaactctgatatggaaacctggggtgatctgctgtcaattacgagttgcacctcagctagagaaccgttgttaatttatttgtcctctaattgaaaatctggagctcgagcttactcattgatcttggtctagttactgtattcccatcctttcctgtgtaattgagaaagagcttttgataggaagtagtatatggaaaagtaattcaacctcttggaattttcaactaaaattcagttcataattaaacatattaatttatttaatattattcgttcccattgctgggaccgaaataagaccataagtgcattttatacattttctagcttttataagtttgcttcctttaaaataccgattttgactttattcctcttagatggaaattttctgagaaagaattccattttcttacgttttcttagagttacatgggcaacattgtagttcagcacagcccttgggttgctgggagtctgttactgggtcattgagccttgggtggaccagaaggctcacactgatgaagccttgggaagggaactgcctgggattgaatctctgctctgctgcttatccaggtttgcaacttgggataagttagcttttctttcatggagtggtgatatatgaaacatacattccgtaagtgttcgtggttttgttgtcgttcagctgtctgtattagaaataatgaattattattcagtgatttttcctgtctgataaaagtctgttgtcagatgtagattggacgcttagaggttcagggtctttcatctagttaaatgcgcattaaagcatctatttggtgaacattacttttgtggcataaaatagtttaaatgtgcttcccaaagatcctggcttccattaagatattcatttattcattaggagagtaattcattttttattacacagtagcttatagcaggtgttagaaactccagttaacactaat

SEQ ID NO: 119718 - DNA, 1161 bp, Homo sapiens
taagaccatgaaagaactccatggacaatgttgaaaagggttttcacattaactgtgtgtgtattaggaagggaaaaatgttttcactgagattcctgaaaccatattgcaacatgagtttccctcttgaccttgcagcttatgttggtctgcttttcaatattaaaagaaaaatgtggatcccatctatgaagtcatagctcatttaggggtgatgtggtagataggtcctggttagttttgaaggacctaattgctatattaggttttattttctaatccaagatggtgactttttgttggaggtgggagatactaaagaaaaatgttccatctggatggaattttgtgggcaggtaagtttttagtgtctccatccacaaccacaacaacattgtgtgccctaattagttacgtgtgtgaagtgggcctaactggagtagccagtgagaatgacttggacgttttcagaagaattatttgcaggttggaaaattctcacttctatttccaggattgttcagtctggaggaacagtacaaattaaagtgcactgttttagaagtgggactggattttggcattggcagctccataattgtagttttggccaaagatcactgatggcttttgactcatcacgcgtgaggagctcctgcaggaatgctgaagaaaaaaggaagggattccatgaagggaagtaaaaaccagagcagaaacaccgagcttcccagttcctctcccccaccaccccttacgctagtgctgcattctatcaaaagacagaaggaaagatgaaggctggggatgctacctccttcccgcaagcaatgccttattctggccttcagcttaatacatcatctcttctagcttgaatccttgcaggtactcttttttggagatgagacggacaccgttgaaatgtatatacaatgacagagtttattctcaggctatgattctgcgtcttttgctaaggatgtcaaatctggatattctcggttcttgtggtcccgtattattggttagatgaggaaagttaacagagatgggttgagtggaagtagctgggcccaccatgtcctggatcttaatgttggataagtctgctgtattgtttgttgaactctgcaagcccagcatctgttttaacacgcg

SEQ ID NO: 119719 - DNA, 1042 bp, Homo sapiens
gaagcccatctcctttttctatttacggtaattactagagagcattttattttggcctctggggcgtgtctgctgtgtttctttgtgtgggcatgtatgttaaaattggaaagtgttttctttgaggtcagggcttttgtaaggtgttctaagaagtttgtcaaaccccaactagctttaaaaaattttttgtttgtgtaatataacctgtttactatttctgcttataagcgtttctatcatcaactttaatgttagtaggaagaaaaactttctcatcttcatatattgactttaattagtgattagtttctggtgatgagatatattgaatcaaagatggtctggtttttccaatatctcctttctgctattattaaataaatgaagaatcacaacagagtttcccgatactggtactaacacactgtttttgtgttgttggtggattaggactgaattacctctgactcagagattcagggttaatgagattttcatcattgagttggggcaaccgaagctttgaatggatgatagcagattgattctgtttcttgaagccagtaggtgctcgttttatgtttcagtgaatgaaaacttgtgtccactgtaacctttttgctttttctgagaatagtgaattctcattttcagagaattactgtcaagaaaaacatgtatcaagccattccgtgtgctctgtttaaacagttacctggtttccttagttacaaaggtttcccttctttctctctacagttagttactaagcttttaacgcgtaccagtcttgatgttaaggagttgtcagaatatagattttttcatgccaggaggctgatttgggagatggcgggactgaattctagagcagccattctgagtttataagatctctggcacaggccataccccaaccagttaagtcaatgtgagggtgaggaagtcattaagtggtttccagggcggccatgcctgaccactagtattctaggagagtgctcccagtgagtgctgcagaagcttgaacacaaaccac

SEQ ID NO: 119720 - DNA, 1042 bp, Homo sapiens
cctctatattaagctgaccagtaaaccagaatgcatggggtgcttggttttgtgggccattccagagtgggccaagaagaggtctgcactgtcaaaccctgactgattctaccaaggggcctgaagtggtttacagaggacaaaggggataatttggattttcagacagtgaggtgctaatgggctattagttgacttgaacatatgattgagaatgaattattggatctagagggtcgggcaggagcatcatgagagattgctggaaatacaggagaaagagtctgaacagatgtaagtggggtaggggaagagtagctggaatcattggtcaacatttagcaaatgggagtgtgacagagttgttacatgtgtaagaccatgtggacatctggactggcactttttcttacagagaacactgcaaagtggctgaggaacgagtggtagcagccactgtggaggaaggatgtctcccctaggacaccagcctctgctgagaatcagaggtgtggctgagccccttgggattagtctctgtggggagtgttttatgaggatagcagtgtgacttctggcactggatgttagacactggcagggcgagtaggggtaaataaatgtcagtgggaacagtgagactgagcttcgttgagtttgtaattgattccagaagtatttattcagctcttgctatatcaggcatgttttaggagctgggatacagtggtgaacaagagtagtgatttccttgccccgtggttaaatgcctaattaaataagacagctattgagaaaatggaaaggaaggtctgtattgggtgtatgtattttgagtttgcttgacctctaatgatagagttgtatctgggctgttttttttttttttttttttttaaagacttgctctgtcacccaggctgtagtgtgcagtggcacgatctctgcacacgatcactgcaagctctgcctcccaggttcatgccattctcctgcctcagcctccagagtagctggtactacaggcgcccgccaccacgcc

SEQ ID NO: 119721 - DNA, 1064 bp, Homo sapiens
ttgtgaacagcactgagtcaactcatctactagatttgtgtcttgcatcagcattgagggagcaggtgacaagtctcaaccagcactgtagattacaaaacacttgtgtgttgtgtgtgttttaagtttgaattttaatgtgtagcatttgaaaccccataatctgggtcatggatttgcttctcctgtatttaaagtacttcataggtgtaatgaagctgcttgtgtcagtaactgaaccttaaatgcgcttcctttcttgtagttttcatctcacatggtttatgttttaattagacattagttgtaggggaataattctctcaactggagcctgaagtcaggatgaaggcaccagcctgcacaggatgcaataaatcgtcatgggaattttacattgaaagctattttggggccttataatttataaactgtgtacatgtaggaaataatagtttataatctcacgtcattgtttgttgtggagattcgaacagtgagaataggaacctggtggtgatgaagagaattctgtctgacagcctttatgaatagactgaggctgctgaagaggtggatttcagcctaataagcattaactcctcctgcagttaacactatcattcagttgcagctagtatattaggagagctttcttgcaaacccaggggagttgctgtaaagattaattcagctatatcatgcttttcatgtgttgtggtgtcaagtcagttgcattttactcaggttggtatttgggttcctccatttttctggtttttaatcatttgattgggaaggtctccagtgacctacacgcagtagcaggttagaaattgtgtttctcttgttaggttggggcaaggtttgctggcttctcttagccttcatgtccgaaccctgaccccgtaccgtggtctgtggatgttttggctgtcttgggagagcggacaggaagactggatgtacctccttcttctagaggcactgcccagcagtcggaaatctcagcctggcaggcttctgtgagtgaaggatgtgaaggagaaggtggaaatcctagt

SEQ ID NO: 119722 - DNA, 1388 bp, Homo sapiens
gaggcagcaacatttttaagagctccgtacatatttctgttgcagtgtacattctggcattgctcactttataaaactcaagtaaaatgatccattatccttctggttgtgggtataacaacacctttttctgaactttgtcaggaatataaaactattactagttgatgaacgtatttgattttggggcgtataaagaagtgagatggttgtgtgttgctttcattctttttaacagcctgtggattcacttttctttgaggcctgttcagaaaggtcattgcccctttaccttatgggtgtaattctgacattgagaactgggtcgtggtcacacagtacgtgttcggaaattcctttaaaataaagtttattttgactctgaatattgccttgctttctattcagtaactcctctcttttcttatgtttcttcaggatgacagtgatgggattccgtggtcagaagaacgggtggtacgtaaagtcctttatttgtctctgaaggagttcaagaattcccagaagaggcagcatgcggaaggcattgctgggagcctgaaaactgtgaatggtgagttgactcttggaatatctcattggaatgtacaatatctctgggcgtggacttgttcctgaattggatgtattctggcagcttgtgcttcctggtctaggcacctaaaggcagtctgtaggctaggtgaatctgcactgcagacatcctgttgggtttatagggttgtttttgtgttcctttatgtaccgcgttatatagtggacaaaatacattagtctgttctgtaggtcctgtcttgctggtttttctatatgtatgtctttccacactggtatgtgagcagaactctttgatgatcttgctgaaatgtggagtctttagttcttgtccccgggttgtataggaaatagcctaaatctttctgtctactgcttttcctgctctctggctcagcggctttctcatctctccttccttccttgctgggcaggttcctgcagtgggacagctttgcatacctctagaagtgtgcttcttcctggatgattatcacttggctccttgatgcctggaaagaaacttgttcctatatgagtttgttctcatgtctgttttgaacagggttcatatggtgcagatgaagtcatccaacagaaagtatctgaggacaaacatttgcttgtagtttactattttatttcaggggaatgcagtgacattctataatcccctgtgtacttatcaggattacagttaaagtgaatgaattgaccatgtttttgtttatgcttccttggggcaaggagatgagaaagagcaggttctgttcttttttgagagctatggctctggtcttaggagagtcacc

SEQ ID NO: 119723 - DNA, 1037 bp, Homo sapiens
tggttattgctgggcttaagcgtgaagtggtaagatttgctgattgtgagccttctgtctactttttgttgtagataatgccacttttcatggatgtaataaattgacaaaagctttggaaaggactggcagaggctgagaccttggccactctttgagggcccttggcctgctgaggctaaaattagggacatttaaataataacatgctacacaaataatgagtacacagaattacacagtcagagagggaagctattaactgtatttgaatttcatttgcttcctataaatgtcatcttagatcaagtcctttggccagcaaaacactcttgatgagatttaagggaccctggattcatttccttaaacttaccccgggcagtagttgtgatggctagcctaccttgagttctcactatttgccagttattgttctagtactttagctgtatttaactcatttaatcttcagaacaagcaattttataggtgaggaaactatatactaagagtggattagcaatttgcctacccagctattaagtggaagcatgaggatataagaccaggccttttggatcagacctcccatgctttctggattagagctcccaagcttgtagccaccacttagataaggagaggtaattttggagcctttcataaagatagcattccaaaaataagaatttgtaggaagactttactttttttaagtaggtatttatttggaaggaggtaagtggattttttttttttttggtcgggggccgggggtgaggggatggagtcttgcttgctctgttgcccaggctggagtgtaatggcgcaatctctgcccactgcaacctcagcctcctgggttcaagtgattctcccacctcagtctcccgagtagctgggattacaggcatgtgccaccatgcctggctaacttttatattttagtagagagagggtttcaccatgttggccaggctggtctcaaactcctgacctgaggtgatctgcccacgtcggcttccccaagtgct

SEQ ID NO: 119724 - DNA, 1081 bp, Homo sapiens
gcactttgggaggccgaggcgggcggatcatgagcctggccaacatagtgaaaccccgtctccactaaaaatacaaaaattagccagtcatggtggcgcacgcctgtactcccagctactcaggaggttgaagcaggagaattgctggaacccaggaggcagaggttgtggtgagccaagatcgcaccactgcactccagcctaggcaacagagtgagactttctcaaaaaacagaaccaaaaaccccaaacgagtgtatgggtgagtgcaggaggctagcagggaggcagatgatgtcagagacccagtcctaagatacaggaaacgttgtatatccatgagccttgcaaaggggtcttgaaagatgcgagagatttctgagcaagaccttggggtggcaggggtcagcaaatatttgactggtctgttggtgtcataatctagtgggacaaatggctgcaatggccggtttccgtggccaagtcacttgtactggtctgatgccaaaggagtggtgtgcaaaattaaggactgctagagcaggaagagtctttttagaggtatataggtcaaactcatcattttacagatgaggaattttgagccttgatgagaaacttaactggaaggaatggatcatgctgaagcctgattggaaccagaaatccaatttaagtgacagtgaggcgccacgcttcctagtaggcatggctgcttgcacgcatttcctggagcgttaagaatggaggtgcctgaggaggttaatgtgctcctctttcgggtcactttgtgcttgacacccactgcccctctctttctctctgcccgcctcctttgtcagttctgtgagctgggctctgtttccctgattacatcatcattcccatccaatcctggacgactttaggagggacacagcactcaggtagtgtcacctgggtagtggagtctgtatgtgtagggctatagggcggaggaggtggtctgtgtagggagacagaagggagggagagcagtctgagctctagttgggcctgtttgctacagcctatttgcttttgccagtttttataggagttc

SEQ ID NO: 119725 - DNA, 1512 bp, Homo sapiens
gggcggtgcttgagtgctttattcaacaggtgtcccaccttctaaggaaagtccacttttttcaccccctgcctcctgcccttccctgtttcagagaacaagtttccacagtaaggaggaggaacttgcctttgatttattctcatatttgttgtcatctgtccacttgcatttcagtctgatgagaaacccaatgtgagtgcgccatggagctcgagaggtttccatgctcctgagctgtctgactgcagagcctatagccacttctgcctagtccccagagaagcctagatatggagaagaacccaacagtgcttgttggtgtggggttctctatccgttcatcgccgcactgccgcacactcaggtcaagcagggacgtccttcttagctctgtccacgttgtgcagcccatgcttggtgcttctagccttctggggtctccctttatggacgaattccaagggaataggttaagattgccatcaagtggctgttcttggtagtggatgttgacatccctgctggccgatttcttagcccctctgtgagaaactctgtgcaagggattgcctgtccttttgtgggggtaggcagttgttgacagagctcaggtcatctctgggaacgcaagctgggccttctcatgtgtgctctgtaaaactgaaggaagactgggttgtccttggatccatgaatacagaccatcagagatttcctggagagaatggctgggcatctaccctcctgccagctcaggtccagtaggccgcagtcctccagctctgctagtggaaattgttgaaggatcacactgtcatccctgtaagtatgtcccagggtcccaccaagggttcagaaaaccgacaaacttgataccaccatctgtttggtttgttgttttccgtctcagaaaatgggatactaattttttttcctcagaggtggtattcttacgatgaatgcagttgatttatttcaggttcttagtgcctggaagaatgtaaacatttaaaagggcgatcattattgaggttgtagatatacagtaccccgtgacttcctatttgtgctgtagctttgtcatgaagcaggacacctaagggacggttttcaagttggtttgcccccttctaggttctgaatgccaatgtcttgtaatcaggcctcaccctagggcttggcgagctgagactgctgcggccctgacaagcatggaaggaaggattgcctctctagttttccccagcaaggcatcctcagtggtgttggtgaaagctgccctgtaggcgtagtcggtgttaggtttgtataggaggggtaccccacagactattgggttctgaagtctctgaggagccctagcagagagtttcagagccagcatgtggcatgtaatggaggctagatctgtgccagctgggtcagtggggaggcctgagacagacagaggggagaaagtgactgtgggagagcatccgatgggaacaagctctaagttagggtcaacaa

SEQ ID NO: 119726 - DNA, 1047 bp, Homo sapiens
tatgaagtgggggaattgtagtagagtatctctgaggccctatgtataattatgattttaaagtggtggatatcaactagacactaaggaggaccatcatctaccttcgtgatgtctgtgtgtgtgtgtgtgtttatgtacatgtatatatatatttatgtttatatatttttgatgtaagaagttgtggcatgttcatgagctttaattatttaggaaacaagagttggccattgtggagagaatacccgctagcctgggtgacttcactcctgagcaaagttgacatctaccttcagggtttttgtgaggtataaataagttactgtgtgtgaagtattagaacccagaaggtcctcgttagatggttccacaactaggaaagaagaaactgaaagtattagtaaggcatgtttccatttcctctggatgcatctgaggaaaacttccagtgccatgtggacttggccaccatcttcctcccattggaagggcatgaagagaagcatgtggtagtgttgagagcatgtgttttggacattatcattgctggttgaagttcaaagaaaggcttcaagaaaattgactttaaaaatcaaaaagctataacatatgaaaggagatgtgtactccagttgtctgaggccagggagctggccagccctcagttggactcctgcctttttcacccctcccagcagctgccagaccacagagccagttctgtgaaagatcctcaagaaacaatgagagaaaacagcttctgtttgattagattagatcaatttatgtgcctcggggaggggcctgcgcagggcagggggaggggtgcccctctgttgttggtgggggcagcggtggcccatgcggtcacttcataagtaatgaggctccgtggaagctggaatcagagtaagggggagggcgggctggaggaggagcatgtggaaagagatttctgcagtctgtctggagagctgcccaggtttcccagccaaaaaaacaaataaaaataaataaaaggcaagtgctgaatgacacagatta

SEQ ID NO: 119727 - DNA, 2411 bp, Homo sapiens
tatggcttttgttggagaaataggcctttgtgggtttccctgctggggtcctgattaaatccattgtggatggcaaggtgctatatatatatatatatatgagagactatgtaaaaagtgttgcaatttgcttaatattaatattcttttagctttgatatcctccctaggggcaatggtggctcctgcaaaggcactgtggaaatttacaagagagaattaatgtcgctcttaaagcattaagctctgttgaccattttggccaaagctgcagtttcaatcaggcttgtatgactttagacatttctctggagactgaatgccatccagctatagctggtcccttttattttattaccaatttatctgatcatttcccagcatttaaaaataaatgtttgattaaagttaattagttcatcctcaccatagctctggtttccttcataaacagcatgtttgctttcatttccattaatcctttctttttcttcctccatcatctttccttgaaagatggaggaaactgaggcatgcaaatagatcctgagacctgaagtggttctggattgagacctttaaacttcgagtgctcttgattcttctcccgaatttcgtgcattaattcatgtctgtattactgtctgtaaacacagatgaatttcaggaaccttcaatgtttggtgcctcaaatcttagcagattccatggccacattcctatagtgctgctttctgtactgcttccattcattatatttcagtagtggaaagaatgctgctctgggaggcagtaggcctttctgaagttatttgttgtcagcagttttttttttttttttttttttactttgaatggactacttaatcctctctgaatatattcatttgaaaagtaggagggcagttgatttcttgatatgtgagtgaggtaataaggaaacaggggaactactgtccctcctagtcatgctacaaagaaaacagaacttagaacttccaagagattccttttatcctagggaatgaaggcagcccagagaggtttcagggcaaagggtgtggctgtttatttatctacaaattatggtgtcagtcaggacacaaagtttgtggagctttgcccatttatcattacagattagtacacaaaccgataactttatggcacttgtcgatcgagttaaagcagcagctttgcttatctttggagagcctggctcaaattggatacctggtttcttttggtaccttacatttgtggggtaaagatgataggaagctttagagacctaagtacatacacacttgtaattacttgaaggtagaagaatatcattagctatctgtgaacatgctgtgttcatggacatctccctttgagaagtgcaaattctgtgagatgagaaatcaaatttgggcctgttagtttatctgaacacaagactttccacatgttgggcccatttatctgtcttagaaaaaatctcaaaaaaaaatgcccttgtgtttccgtctccttcatgtgactgagttcccttgctctgcagtgatgccattgttctgccgctcatggttacacatcagcctaagcccactgtcgccttgagtcagttttcttctgtaggcggcttttgaccttggaggtggtcagttctgggccctctgtggtgtggaattcttttcatgagctgatagaagctcgagttgcatatcctaggggattccagggatttatattttggtgcgtatttataactgggttgtctggtgggtgtgtgtttgactgggttgtcagtgtaaaattaaaagggtgttgaaatgaagtgtggacccagagcagttacggcctgggatagagtagtcatgggattggacacaaaactagaactgccgattgtagagcatcgtgggtgtttataattcagtcattattattattctaggtactgtacttgttctgattgttataaaggtcatattaaggatgaagaaggagtgaagaggggaagagagtggggaggatgagcccttgccccaaagaagtaacagggagttgtgccaaaatgagcagtacatttatgttcacagtggtgatcatcagagtttaaatagcttctggtctgtttgggaaatctttcatgaagatcacggctctttgtttttgtgagaggttttgtgttgaataaagttaaactgtcagccttgttgtctatttttatttatttttgttggagcctttcagtgagcagtgttttctgtccccctgggattgttggttaggatgtacgaaggggagatcttttgtcttttggtggttcttactcatttggggtctagagagccagaatggggcccattctagtagtagcagtgttctgcttacctcttcctctgaggaaataggagata

SEQ ID NO: 119728 - DNA, 1319 bp, Homo sapiens
tatgctaatgactttggtgtgctccagatgttttagaagccctggaacagcctcaaagccctccttgtttttcctttctttttaacccttgttttggggcactgcttttgtggaatagagccattggcttttcctttagttttctattgtcatgtatgtgtagctaatgagagaggactggtaaaacttctttgtgtctaaaacatcataaaatgatacagactacatgctctagtccctttttttttccagatattagaaaagagttgtcttctgtccatacatttgtgttctgaaatctgtcgttctcattggttgctttagaagttccttcagctaaaggaatctttggcctaatttgtgtttcaattttcccaacgcccatcatataaggcaagagggagatagccatacactagtgtctccagttaccaagaacaacaggaattcctattccattttgatgctgctgttccagactcagaagcctgttttgttgtattgttttgtgcggtcttttcatttcttgctaatttgggagatgcggtgaaaagctcctgaatgtgcagagctgctgatggcagggttctgttgtgttcaatttctttagagttctcggctgcacaaatggacactgccttgtggctaaatggtcttggatcccagacgcacttctcccgtcagctgatggtgactagctgaggttgcaggcacagtaaccaagctgcctttactgcaatgatttacaattttcagctcatatttattgcttttgtgaaagacaatagacatggtttaatttaagttcaacctactgaatattaatagaggagaacaaatgctaatgggatagactgactctttgggccattcattcaatttcctctgtttaacctcctctccccaacaaaggtttgtgttggtcggggtgggggagggggttggaaaaataaaaacggtttgagtgtgtgaaggaggggatgccatttcattatttctcgttgactaaaaataataattttaacaattggtggcagggctttgttaggggagagaaaaggcagtacattagcttggctaatgttataataatggctctgttgccctgtggcgtcatattccatcttgctgacctggccctcctggattgggcaggctgtatgattgggcttaaaacattcaaaatgaaatgtggtagccagtacagtggagattggtcgccagcgggggggttagataaagaaaaagcccaggtttatttaaccatgtaggctgtctgactattaataaatgtaaatgttttctgggctgatatatac

SEQ ID NO: 119729 - DNA, 2589 bp, Homo sapiens
taaaagcacatccatgagcaccaagactcccctgcttatcatctgctatcatagagaatccttatcctttgagatgatcaaaggcaaatccggttacaatctaatcttgtagatggctatgaagaaaaacaagtggagtaggatttctagttaatatctaagatgtagctgcaaagataaggatgccttttcttgtgtggcaggtactggttcctgcaggcaattccagaaaggatttcagtatctgtagagtcaatatttacctcttcaagagtgactagtttgataacagatactcctttcttcctttcaaccctttagctgcaaaagatgtttatgtactctttaaaaacgaatcctgaagtatagtgttacagttccaaatttctgctcaaatttcttactgttgaaattgtttccctcttaggcatttcactctctttaaaggtctcatagaatgaggttttgcttttctccacccattcaaaagggatgtgtgcttttaaattctcttctatccacattcttgtctgtcttcatcagcgttgtgtagggttaactgtggtaaagtgctgcctcctgatgtgatgtatttaagtgtttgtccccttttctcacctgtagggctccttggtaatgaccagtctaagggattaggaccagcatcagaacagtcagagaatgaaaaggacgatgcatcccaagtgtcctccactagcaacgatgttagttcttcagattttgaagaagggccgtcgaggaaaaggttagtacccaaggctgaaaatattggtaccttcaaccagggactgcaaactcaggtgccagttttcaccacatgataacgtgagcccattcacccaatctcttgattttcatagaggagccagaatcatgaggtttcgtatcaaatgccctgctttctaagtattgtctaataattataattaaaaacgggaaaaaaaagtgctctggactgacagcacatgttcctgctggaacagttagccaaagagttgccagcttgtaatgcctgtcttaactgttcatttaaattgattctcagcagcagccatcttgaggaatatatatattaggtgatgttttgccatttctgaaaagagatctttctaaaaatttgaagaagtaaatgtggtgtttctgagacgttttttccttgtcaggaaagctgaaattacactgtgtatttttaatcccttgctgttttaccaagttccaagttagtagctgtggaattggtgcttaaaacttagaacagcagttatttttatgtggctttcctaaataagcttcagatagtttggtaaggaagttggctttagtagtttgataacagtttgtggtttcatggtcaaacagtggcagtgacattttataataatgattttacttgggtgtttttgaaaccctttgcctagtatctaccctacttcatacctgatatgttacttcctttttttccctgttagaatttatatttccctttgttctctttatgtttacctggaggaccagcttcctgactttttcttagaatttgttcgtttccgggattgaaggaaaagaaaaaaaaaatcccccttgtcagttcatctctgtttactcattctggagaatttactttttagaagcaatctacatgtatctatctaaagaagaacagaatagagtgaaaaattaagagaaaaggacaagattagccatgtgtagatatttaagattcctgttttcaggactgaaagttgagatgcatagctcaaagtctttattttctccatcatgagggtgtcgtcttttaaatagccttttaaatacattgaatctgtattcttctctcattttctcttcatcctcagcactttgtcttagaagatgtcataagattcgttattagtatagttaggatcttcccgtgtactgagctttgtatgtcactcctttaaaaagagtgtctcagtgatgaacctgttatattacagatattccataacaaacattcccctgttccagtttaaagcatgaattatcacaagagagtgattttaaggatgtgtaaaaaattgtgtcagtaaatatattggaatgtgtgataatattatccatgcctccaacatgggcatctggcatgcatctggcatcaactttcatctccatttggggagcagaattctctgagtctgggcacccactcctttagctatgtggctggccatcaccctcacttctggctgagagctggtcagcatccgggtgcagtgatgtgtgttgtaggcttcattcttaaggaggagggactctttgtccctaactcactgtgattctctcagaagatagtgttgctagctttctctttgtatgggaccacagtgtcatgtggcacctgagtgcaaagcagtcatttaactggaattctttaaggtagtagaaaagaggaactctttttcagagttagctgaaggaaaacttagccttggcaaatcgtttttaattattaatgtgtcaagtatcttactgaattaaggattcattacagcctactaacttggttctggtctcatcaaggtttta

SEQ ID NO: 119730 - DNA, 1835 bp, Homo sapiens
catagcttttcatttagttttgttagtctttaaaaaaaaaaaaaggtgaacagcgtaagtaagccctgactccaagaaaaaaaattcaaaattaataaacataagcattcggcctataataaaaatagtaaactccattccataataaagcctgtgactattagaagtccttctttgaagctatgtaatctgtctcttccgttaggaagaactgaccttagcctagataatattgtgctaaaaatttttaccttaattcttttgaaatacctgtttttaaggttttaccaccctcacttggcagctgagttaataggatttggatctaagctttcacatctataatgcctggactttgccactgtaccatgtcaccttccataagttgtagcaaatgtaggtctgaattttcaggtgtgtgcatctggacagcagttggcttggtgagctgtactgggggtgggggtgcagtttgaactggggtctggcctggtccacaactgtgctgaggggcacctcttgctgtcatgcctagtgttactcttcagctgacctcttctagtaaataatctcttctgccaagggatgtattccttcttttctgaagtacatgaaatgccttgcttcattataaactgagcgatggatagaaaggggaaaagttttagcttatcttgagcagaacctacagctcccgaaatcctctcttgggtcctccaatgttagaggtccttttgtttaaggaccctggagagaagcgcgtccaggagagggcccagctcagctgactgttgtttcaggtagctgctgcaagtagatctgtgattacttgttgattttagtgggtggttctctgtccttctggacgaatactctttttctttacttttcctgcagtgagctggagttggtaggtttggggtggctcacatcacagtgcttgcttgtgcatattcacctttcccatggaaatcttccaagtgtgggagggaagtttgtatttcacgcactgtgccttcaccttgatcagcaaggtgaacctgagttcctgggtttcagtgtctgaggttggatagcacagagctaaggaagcgttttctgagtgtgccagcaattctcgctgggctgtgcatgctctgtttcctggaggctgcacatgctgctcatcgacattcgtggtcaggttctttccctgcagcaaaaacccttggttcagacctcatttaactcacaatttctcacctctgctctaggggtacccaagatggtggctgtgtctccccacttctgcttccccatcaggaaatagagccccaccatgggtgtctacacaatagatgaagctggtcaaataaacacgaaatctgactggttttgtgtgggcttccccgctccccctccctctctcagaattttaagtgcttggcagaatactgcttatgtgactctgttttgggattataaaacaatcttttgtattgctccagtttacaggaagcagctccttttttctcattaatgacgcctgttgttgagtccatcttgtcttctcatgggttaggcctacttgactatgctatcaaggcttacaggtgtagcctagtcttttttttttttttttttttaaacatttatttgagacagggcctggctctgttgcccaggctggagtgcagtgttacgatatcggcacactgtaacctccgcgtcctgggtgcaagtgatcctcctgtctcagcctccaagtaggtgggactacaggtatgtgccaccacgtccagctaattattttcattttttgtagaagtaggttttcaccatgttgctcaggctgg

SEQ ID NO: 119731 - DNA, 1074 bp, Homo sapiens
gtgagttgtagtgtgatggaaggaatcgcaaagcctggacctgccgcagaatatttgcatcctctgcaggtttagatgttggcgaacacttgttgggacttcatattcacccccattatttgcttcaggctcctggcaaacatactagcttcttccgcatttgtttattttctagaaaacaaaaaaggctggaacttcatttttattactgcagtggccatttcctttttctgttacctcggagatcagattgcagggatatcacttccaccccccatgtaaattatggtctagtatgctttgtggttgccatggaaactgctggatacaagtttctttccttcctcctctaagctcttgctaggcttttaaacagtaacatttttgtctcatccctttgccctccttgccttttcacacccccaaaggacaagtctaaacaccaccctgatctttttcagcagtttctgaccctcctgggaacatttgatcagttcctgaatcttccttagtgtgaatgtgtagacactggttcctggcatcttacgtgaaaggcactagatgctggaattgtgagggcttggagtcacctggtttgtgaaggaggtgacagccattaatgtcacttgtggttcacatgtgagtgcttatatggggttgttagacataccttttttttttttaatgcagagtgctgcttgatgttaatacctcacttgactgcctagtgcaattgcaagtagtgcacagtgctttaactaagatgagaattgaatgtttcttcttactactgtcgccgtatacttcctgttccctcactgcctccctcctattttattgtaagatgggagtctggcgggtgatgaaaggcagcaaccaaagtgacttgttttagaagaaaattgggttcatttctgcttttggaaattttaaggaggggtttttatggtaagtgggtttttttctacacaataaggtaaatatcatgcaagaatattttttcctttaggctcaatggctttaatttgcaatgatagaatcttctttttttgttagatatatatttttgttata

SEQ ID NO: 119732 - DNA, 1033 bp, Homo sapiens
ttcataagatgattcccagcttcctgtgggttgcaatacatggtgcttcccttggccaggtcgatgcacccactactgcccacccacatcaattgcatcatacaggactggggatgtttttctccattcttttggggatatggggggaaaatttgacagtgctttctccctgatagttcttttctcttataattagcattaatggatgatactgtggctgacaataatgcaatatccatcatacccctgttttttaaattcttttaggccctaagagtttttccagtagccctcactctccagggtgtgtgtgtgtgtgtgtgtgtgtgtgtgtgtgtgtgtgtgtgtgtgtgtcaggagtagaatagggttgagaatatgtatgtgccagtgtactttactttccctggtttcacatgtttcagcttggcatgagacagtttatacccagtgggggaatctgcccgtaaaacacaggtacctccgtaagtctgtctccacccttcactgtgttcctaacagtttttttttttatttttattttttaaacgaagttttgttgtagatcagagaatgagagatgacattaaataatactgtagctgtcccttgatgcacagaattcatgcttctgtgatggacaattccatatactcctcaatcagtgacttatcttttaaaatggaatttgttgtatttttagcctgtggggttgtttagggtggtggtatctttcagagagtgttgcacatagatagattacgaggagccagttccctagaggagctgatggggagagagattttcagaaaattcttagaagggcaaatagggtcagctgtcatctttgtttattttaaccactgtgaaatgtggaagagaatgcattggtttttcattgtcatgacaacagaggctcttcacacccctgggcacaacaggaaatgaacccattcatttatccaagtgtgagtctcagaatcccattatgtgaattccatggagtgttaattcaagtattttgatagaatgt

SEQ ID NO: 119733 - DNA, 1799 bp, Homo sapiens
aattagttttcctaaagttcattagctattagcagattttttaaattatgattgtgtttccttatcttaggcatttttaacaaatgttgtcagagacaatgtgtcagttatagtgaatccttttcttacagagcagacttcactccgcatttttgttggtgatagtttaagtaatgccccatactttgaaaatcacaaatgattaaggtccaggcaactaaataaatttctgtcagagccccaaaatgtgggttttctgatacttatcaaaaaaggctagatgttgtgggttttctgatactcagaaaatgtgataatcagaaaatgtaggttttctgatactcaccaaaaaaggctagatgctgtgtgttttatctctagccatgtttcttgggatctaaaatagctggattgtatattcctagatgttttccatacaagaactttggggtgtaatgagttggaggggtgagatggtattactaatagcgttgatagacctactttctgtaaatagtggctgggttcttaactggcaccagattttagtgcaggtcctaaaaattggctaatactagtgcttgtcataatttagcattcctttttttccccttaggggtgatcccacagctggagtgtaaagactcgctattgccatctattggtgcatgctggctacttcataagatttgcagtgggtggggaaattgcctgggatcccttttctatttgttaccctttaaatgaagaaaatttctgttagtgaacttactgcatgagagggaggacatgtaagatgccagagcccactctggtccttctgggacttagaggacactctgagtgccgcctttgtgctttggtctgtcgtgtgctgaatggatggttaggacctcacctaccgcacaactccatctggtatgatatttctggtgggaagtttctgcagctatcttagaagcattccactggattttctttatttatttatttttattttattttattttatttttgagatggagttttgctcttgttgcccagcctggagtgcaatggcacggtctcggctcactgcaacctccacctcctgggttcaagtgattctcctgcctcagcctcctgagtatctgggattacaggcgcctgctaccacgcccagctaatttttatatttttagtagagaccatgttagtcaggctggtctcaaactcctgacctcaggtgatcccccacgcctggcctggatttttattttttaataagctgtatagcattgtagaatacaatttcttcttatatttctcttgcattttgaaaaaaaaaaaaggaagtaaaacaggattctcgcctcacagggtcattccctttgcctttccaaacatgcccattgccaggagagttctggcaatttgcagttgggtgttgagtaatctaaaattgagagactgctagggtttttgttgaaatgatattttaaaaactaaatagggaatcccatcgagagatagtagaaaggcaaattaacattttaactcgctcttctaggcttttaaaactgaatgtacttagataatttgttcactccttgtaactacaacagcctattagaaattattttggccagatcctggctggattctgtagctacttgcatgtgttactctgactcttactgtctttatgtagtcccttctgccttaagatctatctgctttttgcttgagactgtcctgagaccagcagtctttgacgagaagagtatttgtggctcttccctcctgggcttggagttgta

SEQ ID NO: 119734 - DNA, 1021 bp, Homo sapiens
gaagagtagattagggctattttctgttttaatgtctaccaaatagttgcaatttgaccttgttggcagagggtaacccagaatttgggattggagggggcgtagatagactagagacatacctttttttctgtagtacaaacttgaattgttgtagtgaacttttcgtggccgaatttagaagtggcgacagggacactgatggctaaataggcaaaggtgacctggatgtaatgacacagaagagatgtgggtatggatttgtgaccccgttagatggacgtataggatgtatataaatacagcaggataatgtagtgttttcttctttactgtcagtggaaataaatgaacaccattaagctgatgatgtcagataccgtgtgtagtttttaaatactcaggcaaacatagtgtgtacataggcatgtatttctacacacatgtatacacatgtccatgacacacattttatatccatgtacaaaacatagtcctttaaccaaatttattgcgcttgaaagtaggcctgtggtttatgagagtgtgagagatatagaaccttaattaggaagagtttgcttgaaataggatcttttttccccttatgtgtcatgattttattgccgcacgtaggcctatatcctccagtctctgcttaatttatttttaattttcttttgcttttgcaggcccaggctgcaagcacaaaggaagtttgctcagtctcagccgaatagtcccagcacaactccagtaaagatagtggagccattgctaccccctccagctactcagatatcagacctctctaaaaggaagcctaagacagaagattttcttacctttctctgccttcgaggtaagactttgcaaccatcggcggaggtctacgtggaatctacatgtaagcctgaggtctacgtggagtaaccttagctttactctctgccatgttcatttttctgtccccaacctgggttgagggggaattgaaagtgagaaatcccaccgagagagt

SEQ ID NO: 119735 - DNA, 1181 bp, Homo sapiens
atagtgcagccggcccgaggtatttgcccgcagtgtatttatctttaaatagctgctttgaaggggtccacatgtctcttgccagaggcataattagtatctttcactggcacacgcggggaagagggttttgcgcttgctgcatgcagtgattcgtaccatcgccgtattccctgtcaccactctggttattcttaatgagttctgtcgtctcctctttgttctgactatgattattaacagattaaaaagagcttaatgtagcagagcactggcaggttaaatgattctcttatttacattttcctctttacggggcactgcaaacaaggggattcccaaaggggactcctgaagcatgcaaacctacatacacagttcattcctatgaccgtgggcatcacagttcagcgtcacggctcggcacagtgaagagagtgttattatggggagttcctcgtaaatatccttactgtcagccgttgtgaagcaatgctgtcttgttttggaactgcctgccttttgtttcttctgtcttacagaatctttagtgatcagctgtcattcagttgctaattaattcagcaaacctttattaaactctttttgtatgctagacacctagaaaacagattagacacaggaaagcagtattggtggtgggtgaaattgaggatataacaataaatgcgtgaaaatgctgggatagaagtgtgtacccattaaagcaggaagggagaggccctgggatggctgcaaaggaatgctgacatttgctgcgggtctccgcgttacagtgcattaggaatctttgcagaaagaggatagtgctgggaaggggttctgcagaagcaactgccaaggcatggattgatgttggaggtcctggagttaaagcaagaaagttaggataagcctcagattctgcatgccctgggctagttactggagtatcccttggcgttcttcaagtcaggggtgacatcataatacacctatgaggttaggaagatgttactggcagctctgcagaaaatcgattgaggctgcagggagttctttctaggggcattggcagaaggctggcatgtcttgggcagatgatttaaatatttctcagcctgagcttcctcatctgcgaaatggatattctagagtctatagcacatagttgttgcaga

SEQ ID NO: 119736 - DNA, 1367 bp, Homo sapiens
cctaatacaatgtaaatgctgtgtaaatttgttagataatattgtttagagaataattacaaggaaaaaaagagtctgtatgtgttcagtagagatgcaaccgtccctttttttacctgaatgtttttgatcgacagttggttgattccatgggtgcagaagtgtctgatacagaggtccaactgtacatttatttaccattttttccagtgaattgaggcagaggtagtggagaggaagattattagattttggatttaggtggaactgtctaaaagaccagctgaatcggccacaggtaatagaagagacagccaacctgtggtgttttttctaaagagcgttgctggcctcattggcaaggaacacatattttgatgtggtcctagccttgagtattgaggactaggatttctaagtagggcaaatgcaaaagcctggggtgatttagaggtcacagaatgaaaggggattaacctgccagaaagcaattaagtaatcccccaattgcaaggaacactatggtgctaataatgagcttccttgagcaaaatgggaatactttacattatgtaaactctttggggaggaaatcacactgtctccagtggtacacaactttttttgagggtctctgggagttgttgcatcttagtttttgagagcagcagtagtgaaagtgtatgtttgagaacggtgtcatcactgcctaggggctttcagtggccttaacgttctgcatatgcttggttttctcctagagtcagttacctgtttcatttgttgggatagtttatcagttaataatgaagaaatctgaaaccctgaaatttttgaggtctgaggaggggaaggatggatcacttttattggccctgtgacgttgatcagatgttattaataagactgtaggtcattttgctgtgaggattctccctgctacaggccagctggcctctgaccatgttgtgccctccctgaagataaggcaggcttcctttttgctgccagtgagtactggcacagattcagtagtacttctcagagtcatctctggccttctccttactttctagagagtccttgagtctttctgaaatccacttagagaacatggaaataagactttaagtatggcagtgctgttttgttggccaagcaccttgctgactgaaggggtttcatttatagcactaaagtccctggtgtctgtgtcccgcagggaagttgagtattcagcttctccattgggaactgaggaaggcctcacatgattcgcacaaagactgttgtctgtagtggctgttagaatgctcattttgttgttgttgttgttgttgttgttgttttgttttttgagacgaagt

SEQ ID NO: 119737 - DNA, 1001 bp, Homo sapiens
atcgctgtgaccatttttactttggcatgaaataagagatgatcttactgcatttgtctcgaggagaaaaaaagaacctactttggcttcatttttaccaattctgtggcttctctgggtctggaatgccagtttgacccctctgtgattttacaagtggacattccagcagaattcttagagggatttacagcaaccacgtggtgacagagcaatggcatgtgcagcgttagactctgttggctttattcttttgtacctacttctgtttgtctatgacgttgatgagatggacaggtatgagggtgcccgaccaaattctggaggtctgttccttctaggggagatgccagttgttcatgagtgctccccctggtggatgggtgatggattggccgtggcccttggaggatgatgccaaggaggacagtcaggccatatccaggcttggggagacagtgttgtccttgtggggtaccccccagtgagaagaaggggtacaagcttaacctctgaactaagggtactctggtggtggttaactgacctcctcccctggagttcatttttattctgcttcaatccctttcctacactttcccttttcccagtcttccttccattcaacatattacctcctgattccccatctgatttacgaatccttcattacccatttttctttgttgattctttacctttagatccagaccaacatgccaattacctgaatagaagcagaatcatcttctaggttgaaaacaatccttttttcctgtgtccccatatgtagaagaaattgtgttctttcttacctctgacttcagggccagttccatcagagggacttactactattataaggttttactttgagagcaagttcctcagaattgcccttattcctcactggtcttctatttctaatctttcttccattttagcccctcactttctttcccagcacccagcaggtcacatcacatattcgtatttgccga

SEQ ID NO: 119738 - DNA, 1366 bp, Homo sapiens
ctttctagaaaaataatgatattgagcttatttttttgttactttaaaatccggaatgagaacctttgaggatgagaggttaagatgtaaaagggtaaaggtgaggagatcggttcccccgttgggaggtttatttctttattttttatttcaaattcagcacttttacttagtgcagcgtgggaatttatttgggtgatttttgcatccagttaacctaatcaggacatcaaagtaacttccaaaactattggaatttggggaattcatatccaccataaggaatgaatattccttatgaatacaacacagtgattttatataatgaaatgttatattctgtttttacttctgtcttctctgtctttttttttttttttttaagtctattaatttagagtaatctctcttcctcagcagtgggtaggtgtttttattttattatttttttgttccatccttggaggtgtttgttttttttctcaagagatattcagatgagattttaaaaatccttatttgttctattttgcatcttcttcctgctgggggattttgcttgaaatacgttcaaaaggcacagatgatcttgggagcatttgaaaaataaatttaaaatggcagtagagatcagttgctttgttttttctcctcggttttgtttcattgtggtgttccttctggaaagggtgagggtcaaggcctgtgtttatgagctgtttttcttattccaccaggttctcctgcgctgcccaacagcatggtgtattttggaagctctcaggatgaggaggaagtcgaggaggaagatgatgagacagaagacgtcaaaacagccaccaacaatgcttcatcttcatgccagtcgacccccaggaaaggaaaaacccacaaacatgttcacaacgggcatggtaggtccaccgttgaacttggataagaaaaaatctaaagctttgggtgagagctggaagagagcctctgctgagaagagatgagatgaaggcaaagctcgttctgggtacttctccagggccagacacttcatgggcaaagggattattagtgtagcttagtgtagtccagggtgttctaggtgagtgcagatactctgatgatgtggagatgatggtaaattctataagagctgtagataaacaggcatcagaacaggaaaagaccagatctacatggggatggtcaagaagatttggtgaaacaacatctgtgcccccctttaattactaatgtgattttagcaggtggatatggtataggaagaaaattatcattcctcctatggaattgcacatacattctgaagtggactgattttccccttgcgtgtatagtgtggaggaggagg

SEQ ID NO: 119739 - DNA, 7872 bp, Homo sapiens
ttaataattgttcatctggcttgcctcttgcttttgattgtgtttaggtgacacatctgcatagtagagggtgcaatctctttttaggttcttgtggtttaattggggagatggggtaaatacaaaatgtaactacattttaacctttcgggaaaaggttgttacctgcagctgtggtcatcagggcatctgggtggttggaagagagctgcatatgtgaattggaatgcaggtattagtgtacggatgtaatttctaaggaggaagaacatcgcaaacagagcgatgcggaataatgcctgtttttgggactgttgcctgttgttccaccagtgtggaggtctactgtttggtgacctggaaagacctgggcacgagaaagaattctaataacagaataggaacctgttgatgattttagatgtgggagtaagaggaaatgcgtcaagttctgaacgattcctttggtagcagactagtctgaaataaaggaaaaaattattgtattcagagagttccatccaggcaacagctgatgtgaacctgaacttgagaagctacagtggcatagcttttcccaggggcctgcagaggcgggggtgaaggtaattgaataggaattaggaatgggttgatttgtggaaaggtaataactttataatcttttgagtttgtgttgatggtgagagacaaccgaattattgagaatacaccaggaatttatcattttggagctgctgcttgaagcctcctgaataagtaaagtttttgaaatataatatggatagaaaggaaacctctggagaactttttcttgtgaaggaatttaattttctaggtttctttttggtttaatagagattgaagagtgaagaaatatgaacaaaacatggaattaccctcatctgttgtcttctgcatggctgtatgatagaaatctgtttcatcagtgtagtatcggattgggtccttttcataagttgtttttcacccttttatgctgattgggcaggtgaatttatctgacgtcttgatcagttgagttaatcccatgtatactagtgcagttgtactggggttgctaactcctttgttttccagagtgtttgagcttgatttagagacattggattcacatgctgatttttctcatggattcagtttttaatgttaagaatcatcatctgcatggatcttaggtatgtgcaggggcagtgactatctggcagcatgttacatggagcatatgaaagaaggggatggaatgagggtgaagggataggctgagctctcacctaaaggagggcataatgattctacattgaccactgtcattgccactaggagtcaaggaaagtgtaactatctatagatacatatctctgtgcatttacacagatgaacttctgagtttcaaaaatcttaggagattctactttttcattttttattgtttaaaatttaaaattttatttaaaaatttttttaattttaaaattaaaaatttaatgcctgttaattcagatatttccaggaacagtgttgggatttttttgtcccctcatgaattttgatgtctctcggtgaggggctggtaggatagtgtgaatcctggctccaggctgggaagactaggtggaatgagtggtcttgggtaagcaccgacacacccacctcctactgctgtttctgagttgtgcccttgccctccttgctgtccctcttccgccctgtctcttctgtcatcctttcttttacaatagagtcacagcatcagatagaggagctgcaggaagcatacccaaaccagctgagcttagtaaggggactaacttcactgaaatgtacaaacctttctgtgcttccttttctgagacttgtagataaccaaactgaaaggcctttctcacatccctgagcagctggcttataattttaattagattgatgtcatctgtgattaggcctgcccccaacctccaagtgtctaccattttgattatgtcgtatttgaattgtgaatgggttttctttgatttcaacccagcagagtcccagaactaccatcttgggagaagccatggggctgtgcagtctgtttgcctgcacctgaacttcaggggaagtttggtggggggattgttgcaggcccaagagacctgtatttagatctgtccagactgcagtccttcttgctgtcccattctgttgtccagagtcaccagccatttccctgttcagtctgtgttaggcctgcccgttcctgagcaggcactcacttcctgggcatgtccctctgcaatttaattcattgctcttcagcagcgtcatagggaagtttgaatcttatttagtctgaggttttctttctattgctatgcctgggcattttttagatcttaacctggtcagaaaaattccatttcctgtgcaagtcaaagagacaagcacgaaaccaactccactagaatttttcctacagaatttgtgagtttttagcaaatgtgaatacccgtgttaggaaagatttcatatttacatgttcccgaaattgctgtatttgtggaggatttggagagagctcaaactcattttattgtgataagtgctgaaacataatcatagaatctttgccatgttaacagtggtgaatgatattaaccatttatggagttaccttttctctcctaaatcaaataagattaacttctgtataaatgagaaaaatgtaagcccctgtgctgacgtaagcgctctgaaagatagcacagatgaacacggcaataggatctacccacaaggagctaatgggagatgatgtctcctggcacatctgtcagaaacgtcagaagacattcaggtctttacgtgtgtttctcctgatgaaacaggtttcagtgtctcattcatctttgtcattccctgtcacttggtgatgctacctgggtgacttgtctcccttgtcttctgatgtgcgtgccccccccccccccccgctttgtgtcctgccacccacctcacacccatataccaaggtccttaagaggggggtggtgtgatcgttggggctccattaagacattttgtagtttttgtgtatatttatgggttttatgtatttgttgtccctttgtaggcatccgagtaccaagtcttttgtgaagtcatatgaaaagaaaaaatccccacaagccactacctgggatataggtctctgcagagtccttcctgctgttgccacatggcttgaatggccttggaagccaaagagtaacaatccacaggatgtcagtgcttccttatgacgccagtggagggaatggaataaagccagcttagtaatatacaggccacttggaatgctcctccgatttcaaatgacccgggggaacatggtggtttcgtgaaaccaaagtcagctttgaagaaagctaatgtcagcctcaggttcaggcagtactgtagaagaacactgagctctcagtagctggctagctgtgctgccttccccagtctatttcacatccgcttttatatcaaggcagatgacaaggaaacaaactgacgtcagtttattaaaggaaacacttgtgatattgggagtaatccctcaggcaagaggtgctaattgaacctaagagtatttctgaagttactattttcaacagtagagaaggaaattattgatcatctcatccaaaattgataaaaacctaagtgtagcagtctttcaaaattaaatattctcagctgtggaatattctcatgcccaacattgctacttcctcaaccatttctagatgattaaaattacactgtaatgccatgttgctcaatatgcatatttgttgtcatttttgtctgttcatttcttaggaatgtctttgccaccatcgaacagtcatcaggaacttagttgcatgcctttttttttttttttttagctactcgttagcttgtgtgttcttgggcaaggtatttacttagcttctctgattcttaatttctacttctgtgaaatcagcatgatagagtagattagcattaatttgtccagtcattgattcatttatatcccagcataaggaaacaatgaggctgtatcatgggcagcagtagagccattcagatctctaatggtggatgccagccattgttatatgttcaaggaaaatgacatttccaagatcactattcagctgggtgaaggttcccaactaaaattttgtccctgtaatccattcttctttccctgagataatagtgacttgtccagattaaaacttttatatcccaccgtgtcttcaaccccatttacattgctatctatactttgttttcttcattcttttataacccttaggaaaactggtgtactgttgcatcctccaagcaaaggctgagttgctgaaagtcagtaataatcccggttgacaccagtcgtttacacaagaatcctccaagtggtcagactgctgggatcacctagagctttgttttcatgtgtaataaatacagatcaaatgttggcaacagttcccatggcagctaaaagttctttcctgcaaaatttcactgaggtccatttctctgtaagtttagagcggaattcctagaaatttcttataatgggatttcattatgagtatccatcagtcatcaaagggagtatttatttaaatgtgacataatataaaatgaaacagatcttcctatagagggttccttgcaataaaaaggcaatcaggcaccagtgccttgcaaatctaatgaagcttggagctctgcaggtgcaggtgctgtcagaaaagaggttagcaattttctgaacctgaagaaggcctcttctgaactgcagacagaggaaagagtcctggagagcaccacatctcaggccacatcaggtgctgtggaactgccagggaggcccaggtcctcgcttcgccgtgcaactagcattttctcttgcataatcgcctaccacctgttcttcaacataaacccactagccccacattgtgccatgagacaaggcacctgagccaggccgtgctgcacctgcgacctcaggaagctgtgatgctctgcccttacccctgttccctgattttggagtgccttggtgaatagaagcaaaacacgagctgtgcttttagatgaaaataagttctctggctgcatggaaagaacggtttggatatagttagttaagaaggtgagagctcagtcttccctcctcacacctcagttttactccctcattttttgaaaacattcaaatatagaggcagatgatcttcgtgtccttttggtttctgacttgggtgaagaaggcacaggtcttaaaataggttttcttgcagggagaacctgggtgagggcatcacgattgtgtattcaagcaactgctcagaattgttaatctttcacaagcgaaaggggagagcaagctggttgttttgtgacttttccattacagggtatttctcttatcagatttgtgcttttccctattttgtatgctcgagctgttgaggcgtgtcaggaaatctagcaacatctgtatcctccccagagggatcacccctgctgaaatgtggggagataaacacacagaaaacaaaagtatggaaaactgatgctttaccactggggtgggtttggccaatattttaattaggccacatttcaaggagaacagctttatttcagcagctagctgaagaacctagaacccagactgccaggggtgtcctgtttcatcttgtttctccacaaaagagcagagtggctctggtcatggagccgggacctctggcctcatggcagaggtggcaggagaggacacacacaccatccacagtgtcctgccatcagcttccacatgggcctgagactgtacccttcttcctccgagcaggagtcctgatgccagtagtttcctgcaagagcctgctgtccccaggcagatgttttgttttgcaaacattacacaggactctaatgtgctcatttgtaatccactgaacatcctaatggaaatggatttattaaaatatataatctgaaatgatttggacagcatcacatgagcttttaaccttgggttagcactcaagggttacaataacaatgcttccagcaacttctatttcaatagcacatcagagtttccaaaatactcttccatatacagaatctcaaatgattctaaaaatggagcccttaggtaatgactatttggaaaccaaataacacaatcagaacactgcttcatgggtatttatattacaagttgatatttgagatgcctagatttttcttaagctctcataattggttattttttccagggggtaagtgaggtagactagaggaattaataaatgcctttggaatgagtttaccttggctttttgagtgctttgaggaggagaccttggtgaaggcttgttgctaggtcagctgcatgtgtatcttttaaatgctttttataacttaaaaacggaaggaagaagagtggctgttgtttcttttgtgcatatcgttttctgaagagggatgtttctcagaagactttttaaacagcatgtcattggactcccagctggaatgacttaattgcttttagattcataccgggggcatgttgtgtaagggccaaaaagcaatcatttggacgagtttatcacatttctgctctgtggttgcctttgaggggcattgagccctctctttgtctgggcggtggggtgttggggtgtcggtcatgcatcagggtcaggagcttgccatagccctgctatgttcagtggggacagacactctgtaacagacaaatgccgcctccccgcccccgagagaacatgtgatattctctttacctctttttaacctctggtagctccatttttcctgttgagacaagtgactattccaaaaagttggaatatgggatgggagtgttggtttttttttttttttttttttaagagctgtaatacatgtagagagaccagttatacaatgtatgtttctaaccaccccctttacgcatttggggcggtgttccttagaggccgttgggtaggatggttcagagcatcatgattacagcactgacacacttatggctgcaaccttaggatttttctgttttagttttcttatctctgaagaagagatcataggttttggcaataactaaatgaattgatacatgttacaacagttaatgttagaaactgctgtgttgcatattatcattaacataatgtgattgaaaagatctggtgcctggaacaaccttataattgctaggaaaactcgagaaagtttatgtatctcaaatgcctggggcacgatgaggactgtcaaagagtcagccattacccttgagtgttgtgacatcatcagcctcgccagaactatgttgtgggctgtttcagtgtggtagaaggtcttggtaattcctgtgtcaggattatcatcctttccctgtttcttcttgctttgctaaagtatttatttgttccactggcctcgtagggccttagtgggggatataggcacacacttcgggatagttggcccatgccccatgagtttggtgttgttaccttcgtaactctttctgtgacaggcagctagaagatggtgtatctggtggtggaagagaagctcctggctctgatccctctttttagcctggtgtcagggctaaaaagattatttagcctctttaagctttagttttcctcctttgtaaaattatattactaatacctgactcgcaatgctgcttggggttgtgggggaggatatgtgagggtggggtcactactctcaggtatggatgcagaacccacagat

SEQ ID NO: 119740 - DNA, 3046 bp, Homo sapiens
tctgttattttatcattgcacataatgcattcacacttggagatcatgatgagagtggcaaccaagtggtaattggtgggaaaaatattacagaatttaagttcttctatagaaaaggaagaagatgtgattggctttaaacattctatttccagatatctgttataattgtgatcaaagtgaaagagatttcattgtgtgaaagttccagaagcgttttacaaagcctgtaaaccagtagaatttgcttatgatactggagtttcggagtacagaggcagcatcccaggttgacgtttgttccctgtgcgagtgagctgctggctggatgcaaggtgataatgggggttttgctcacctaagctgtgttcttgcagctttccctagttttacacgtggatggtggagctgttttggcccagggcaaaccgggttacagcactcacacatgctacattaaaatccatttgaactgttggcacaggttggcagacattccattgttttcagacaatagtgactcaaagttgaactggctccagggagcaagtgtggcttttgtacagtaacagggatttaatgccagccaattgacggagtctgtgtcttgcccaaggaagggatgccttgtaatgacatgaagcgtacatttaaatatctggcttgagatcagaaacttgcggtggatctcttttcccttgcttaacacatttcttctttatttacagtgattcttttttttgcccctttcgtttgttttggggtgtggacaggaagaaggtattttaatttgggggttagttcggtcccatcttcagggtcttcttttcctttgttgccttgctagcagatgtttcggctgactttctgtaatggtccttgtctggatttttctctttcaaggaggttaggccttctgaactgtattatttcaggtcatacactgcataattccaggatatcttataacttttgctggatgccaagtaaggactcctgtttcatacacatctaataatctaataatacacatcaggattccctcttgtgtttggatgaggtgcctttattagcatgggtaattggcaagataggggcgtctggttctgggaggcgcttggagacaggtaaaagtagaaggccagctttgtcagctttctctaaaaattatatttttcacatgtggatctttgccattgcagcaagagctttcgaaaagatcattcttcttatatttgcgcaactcctttctctgaagaacgcaaagcacttatatactttattcaaaatacttcagcaagtcctggagggcggataagaggaagcagccagctggtctgtagttcagggaattgaggcccaaacggggttggtgagcagaactagacatcaaaatcaagagtctgtgcatggagtgagggtattaaaaaccttgcgatcagtttctcatagggctgccttccttgagggtctcttccaggaaacttgtgtcagcatctaaatatgcgaacaaagcttttggggaacattgtttaggacaagctccctggaggtatagttgtgaattcccctaggaaagtgtatctctctgcctttcaaattgttacaggattgctattaaatatgtttctaaagtaacttcttttgcccatatctttttcatccctcattgggagcaaatcttaccttctcagggatgaggtgaccctaaatcaaaataatagcctttggatttaaagattttgcctgccgtggtgtgaaaacacttttctataggccgtttaactttcagagtatgtgtatacaaatcaatatatttgtctctgttcgttaatgtaaagctatttgtatctgagtacaatacaatttcctaatatggttcacagtgatgaatgctttttttctctccttaaagaaactagtccaattatttcttttaattggggacagtgtgtggaggacttctatacattgaactttctgtctttctctctcttatgttcacagggtttaatctttccctgtgagagtgaatattttttttcctttcctcttctctccctttctcaaatcttacaaattaagacaaaagataattacttggaggagtaaaactggcaggttcccacgacacttaaaattaatgagctgttgagtacaaaatataccttgtctttggctctgtcggtgttgcccagtcctccccctgccccctttacttcccgtttaacacatgatttgactttctggctatgtttgccatttgggtatatcgctgctctaaaacagcatgatggttacaaaaagtgggtttggttggaaaccttctctttgtttgcaaatgaaagttaatttgattcagtttttaatttccgtatgtttgaaaactcttccatttccagatatctcatcaaaatattctttagtagagtaccttgctgaagtcttcagggcagccagtttatggttcactatgttaatttcacctgcctccctctcgtctccgtttcccctttcctataatcctggtactcaccgctttgctgtccatagtattttcctgagcagtaggttttgtgacctcaaaatacaatcaaagagttgtgcatctggtttcaggtacggatactgcaatgaaggatctgtttttttcagataagaaagatactgctgactaaccacagtcacactcttcaagtgtctgtgaaagtcccagcttagcaactggccttgccctgccaagtgatttatcaccgaacaggtgactcctgtcagtttttatgtgacacatcaagcttcttgaaatcatcatgtaaggagtaatggaacagatgatctggccccagggtttcaggcattttgaattccagacccctttctacttttagaagttattgagggaccccaaaaggcttttattaatgtggattatatttattaatatcagctttaattctcatatctaccatattagaattaaaagttaagacactttaagatatttattcatttaaaaaatgacacaaaccagttacgtgttaaacac

SEQ ID NO: 119741 - DNA, 1001 bp, Homo sapiens
agctgtgttcactgctttagaaaattggtgaacagtcaagaattgcctagattcatgttcccttggcttgatttttaatcacattgaagtatgacttcttacggatgttgcttttaatttgtcttgaaagctagcacagatactgccagcttgggcatgattgatggtttctgacaatgggtagttacttagaataaatgccagccatttgaaactctccattttctgtgttaactgagagtatccagtagaatcttgtgcaacgtcggattgtatcccatattttgacgtggcctggtctttccttcagtattttaaaatctattaatcactggtgttggaaggaactttgagataaaggctcacaaccgataatccagatggggataatggagatctccatcttataccatgacaattggactaaagaattaaatccaagcagtttaattagaaaacaattagaaggaaacttagaagattattttaccgtttgaaagcatgggtggtggaatggagaaatgttgatgaaagggtgcatgcaaagttggtttgaagggagagagaaaatctggagatctactggacagccttgtgactagtcactaataatgtagtgtatactcaagttgcttatcttacatattcttagcacaaaagtatataaggggattgggtgtggtaattagcttgattaatcactttatacatgtattaaaacatgtcatactgtaaacgtaccattttaattgttatactttcataaaactgggagaagatatacggaagggtaggttaagcacgaaagcaagaaacaaagaaatttgttagcagatttggcaccacagcaaatgaaaaagtaaacggcaaaagaggacagtatttgcaatttataagacattaatataatttaaaggactcttaaaattccatgtgagattgaatgttggggaaaagggagttttcagaaaggacagacaggtaagatgtttagaggagga

SEQ ID NO: 119742 - DNA, 1674 bp, Homo sapiens
ttcttggaacagggatatgtgtgtgtgtctgtctccacttcccccaaggaagcaggatcttgctgtcatcaactctgagaagctcaggacaggtgattgcatggcacgtggggaggtcttcattgtgaaacaccaaatttcctggaagagcaatgggaacgtgaaaatgcacccaggaaaccccgctaggaagcgcctggggcagtttgcatacttctgtgacgaaggataggtatatagtggattctgaaagtggacatcgctgcttaattcttggatgtgtattttgcttctctttgctggtatttccacatctcttcttatcacactacaggctgctggctctgttcatccccagcatccagggtcctttctcacgggtgggccggtcattttagtggcaggtactaattctgcgtttttttccacctctgcttctgctgctccacaggtttctaaggtaaacggagtcactcgaatgtcatctctgggtgcaggtgtaaccagtgccaaaaagatgcgcgaggtcagaccttcaccatccaaaactgtgaagtacactgccacggtgacgaagggggctgtcacatacaccaaagccaagagagaactggtcaaggacaccaaacccaatcaccacaagcccagttccgctgtcaaccacacaatctcagggaaaactgaaagtagcaatgcaaaaacccgcaaacaggtgctatccctcgggggggcgtccaagtccactgggcccgccgtcaatggcctcaaggtcagtggcaggttgaacccaaagtcatgcactaaggaggtgggggggcggcagctgcgggagggcctgcagctgcgggaggggctgcggaactccaagaggagactggaagaggcacaccaggcggagaagccgcagtcgccccccaagaagatgaaaggggcggctggccccgccgaaggccctggcaagaaggccccggccgagagaggtctgctgaacggacacgtgaagaaggaagtgccggagcgcagtctggagaggaatcggccgaagcgggccacggccgggaagagcacgccaggcagacaagcacatggcaaggcggacagcgcctcctgtgaaaatcgttctacctcgcaaccggagtccgtgcacaagccgcaggactcgggcaaggccgagaagggcggcggcaaggccgggtgggcggccatggacgagatccccgtcctcaggccctccgccaaggagttccacgatccgctcatctacatcgagtcggtccgcgctcaggtggagaagttcgggatgtgcagggtgatcccccctccggactggcggcccgagtgcaagctcaacgatgagatgcggtttgtcacgcagattcagcacatccacaagctgggccggcgctggggccccaacgtgcagcggctggcctgcatcaagaagcacctcaaatctcagggcatcaccatggacgagctcccgctcataggtaggtctgggcggggggtcagggggtggtgcctgccctcctgcccccagatccctgcagttccctcacagtcttcacgttctcttcccttgcgaaagctccagttccgcttccctgtctcgggagtagtgggcttctcagctcattccccctgcagcccttcttcccaggtcctgggcgttgg

SEQ ID NO: 119743 - DNA, 1005 bp, Homo sapiens
ccggcccagcttgtggatgtgctgaatctgcgtgacaaaccgcatctcatcgttgagcttgcactcgggccgccagtccggaggggggatcaccctgcacatcccgaacttctccacctgagcgcggaccgactcgatgtagatgagcggatcgtggaactccttggcggagggcctgaggacggggatctcgtccatggccgcccacccggccttgccgccgcccttctcggccttgcccgagtcctgcggcttgtgcacggactccggttgcgaggtagaacgattttcacaggaggcgctgtccgccttgccatgtgcttgtctgcctggcgtgctcttcccggccgtggcccgcttcggccgattcctctccagactgcgctccggcacttccttcttcacgtgtccgttcagcagacctctctcggccggggccttcttgccagggccttcggcggggccagccgcccctttcatcttcttggggggcgactgcggcttctccgcctggtgtgcctcttccagtctcctcttggagttccgcagcccctcccgcagctgcaggccctcccgcagctgccgcccccccacctccttagtgcatgactttgggttcaacctgccactgaccttgaggccattgacggcgggcccagtggacttggacgcccccccgagggatagcacctgtttgcgggtttttgcattgctactttcagttttccctgagattgtgtggttgacagcggaactgggcttgtggtgattgggtttggtgtccttgaccagttctctcttggctttggtgtatgtgacagcccccttcgtcaccgtggcagtgtacttcacagttttggatggtgaaggtctgacctcgcgcatctttttggcactggttacacctgcacccagagatgacattcgagtgactccgtttaccttagaaacctgtggagcagcagaagcagaggtggaaaaaaacgcagaattagtacctgccac

SEQ ID NO: 119744 - DNA, 1496 bp, Homo sapiens
gctattctaggtgacgctgggccgtgggtgcagccaggacccctacccactcctcaccagggagctagtcttctcatgacacccgcctccatgtgacaacacatgtaccagtacatggtacactgggatgttcctccctgtatgtctgtctggccagctcgcatccttttccagccaagccccagcttaaatgctgcctcctcagacgctccccacctaaaatggtagtccctcgttccacctgctcttcgtagcaagtggtcatgacccatcattttgtaacgcccttctctctgtggaccgggagtctgctgttcaccactctcaccccagagcctgtcagagtcctggctcatagtaggagttcaagaagtacaggttgaatgaggaacatcttgttcgtgtctctttcactaactgtcccgtttttttccccttcgctgtcccagggggctgtgagctcgacctggcctgctttttccggctgattaatgagatgggcggcatgcagcaagtgactgacctcaaaaaatggaacaaactagcagacatgctgcgcatccccagaactgcccaggaccggctggccaagctgcaggaggcctactgccagtacctactctcctacgactccctgtccccagaggagcaccggcggctggagaaggaggtgctgatggagaaggagatcctggagaagcgcaaggggccgctggaaggccacacagagaacgaccaccacaagttccaccctctgccccgcttcgagcccaagaatgggctcatccacggcgtggcccccaggaacggcttccgcagcaagctcaaggaggtgggccaggcccagttgaagactggccggcggcgactcttcgctcaggaaaaagaagtggtcaaggaagaggaggaggacaaaggcgtcctcaatgacttccacaagtgcatctataaggtaggggcctccgcagagcagccactcccagctgcaggagtgcgggaggaatgagagaggaagtggagcgtgctatgcactggacggtgtgttctctgattccctggggtgatgagggggcgggccactgtgctgggtgatagcgctgtattagtcctctcgtgttgctgaaatactacagactggggaattcataataaacagaaatgtactggctcctggttgtggagcctgggaagtccaatatcgaggaacctagtgagggccttgtgggtgcgttgatggggcagcaggagacccagtgagggaggggaagtccactccacgaagataccacgagtccattccgcctgcctagggcctcgggtttccttttcattaactggcttgcgtgtgcgtgttgcatgcacgtgcacacatctccatatgccagggataagtaactgggctgcatgcttcgtttcccctgcttctccagttccgtttcatcctggtgctcgacagctgcccagatccagctgaacttctcactggctggaccgtc

SEQ ID NO: 119745 - DNA, 1083 bp, Homo sapiens
caggtgttaatatggcaaggactctcagggtgtagatgtcgcaccagtttctgtctctccagcttctctcctgtgggatccctggtcacgagttccatcaggtcatagctgctgatagcttctccgctggcccgcagcagcctttgtcagctgagggattctgcctccagcacaagctgctttttcagcagagccttggaggggccttccgcgcttctgctgtgcgtccgctcagggcctctgggcggcagcctctgttcctggcagaacaatttggccctcatggggttgatccttggtggagtcttcccactcctcttggcactgcgggttcttagagaatatatttcttccttctctgcctgtcattaactcagaatacaaggtggcccacagccgcagggacgccaaggggcagcggcccatgacaggtgtctggcctcatttgcagtagggttcagctttgcttctgaagctttactgttttttgttttgtttcagggaaggtctgtttctctaacaactttttatcgaacagcgaggaatatcatgagcatgtgtttcagcaaggagcctgccccagccgaaatcgaggtgagagaaggggcccctcacgctgcctctcatggtgtgggaacccctcggcgagctggaggacatcctgtcctgccctgacccctgcagctcggtgaacggaaaggactcagatggggctgagttcgtcctctgtgttgagcgtgcaccagggcagccaaatgttttaacttaggttgatctaaacttgttcacaagccaaaaacactataatgaaggtggggagctgccgagtgcaggggacgggttctgggcacgtcccctgctccccgtcactgtctcctcctgcttgctcacccggctgtttctcaccccatcctctgtgtgtctgttatgcaagagaatgtttggaatcccttgaaaccacagttgtgctttttcttctcttctattttttatttaatgggattggcagattgccatttttgtgcttctgccaactctcttctttgagttagtatgaggttggaaagacagtgagcacttctg

SEQ ID NO: 119746 - DNA, 1788 bp, Homo sapiens
gcatgttctgacccattctttgcccccatatttgtttagatgggacatattaaaagtcacttcggaagctttatataattggcggttaccgtgcttagcataatgtcctccaggttcatctatgttgtagcatgtgtcagaactgacatccttttacaagttgagtaataggccatggtatggacggagtagattttgttcatccatctgtggatgggatactttggtggcttcaccttttggctgttgggaataacactgcataacatgggtgagaccctgctttctggcattctgaggatatgcctggaggtgacctgtcattgctttctgcattagcgtcctgctggagacactctgcaaagagagcgtctgttctgaggggtgtgtgcaccaggcattcgtgtcccagttttgttgggttgaactgtgctctgtggctgcagcaccttaggggtgctgaccagccctttcctgttccctgcagcaagagtactggaggctagtggaagagaaggactgccacgtggcagtgcactgcggcaaggtggacaccaacactcacggcagtggattcccagtaggaaaatcagaacccttttcgaggtaacctgggattctctcgtccaggttcttggggatgtgactgcatcctttccccgccagtttgtaacgtccctcgtcttcccctttgcaggcatggatggaacctcaccgtcctccccaataacacagggtccatcctgcgtcacctcggtgctgtgcctggtaagcctgactgtggccgcctgcctgtggcagctgtgtccatgagtcctacttgctgagaaccagggctgggaaatcccttctaagcactgccggggagggatggcgtcttcaggcttacaggacatacagtgaaaattgatttttagaaaagaaaggagtaacataatgattggtgaagtcagtagaaaaggtggaaaggtgaaccgcatggcagagtctggagctgggagaagcttaggggccaactttgaaccttgaaattgctgctttcaaagctgaagtcacaattccttaaggctactgcaggcttgaaatcatgaattctcaggatggtcagtaggctcgtaagggacggatggatgctttgcaaacttcagggaaagccaaggggtcatggaggttgtggtcaccatgaatgtgaaggcccaggccttggcgaaagtggctaggaacctgtccgggtcctggaacctgactcatttctgagctgagccaaggagccctgtgccctactcaccctgctcagaggccttaccaacaaaggggctttcttgctttctgcctctggccctgatgggggtttttgggtttggcgcctctggtcctcagccttgaggcttgggggcttcggcccgtgggcggccggttcctcggcattcctcaccaggtcaggttcctgcggccacctccctcatgaggccgacgtgctcctgatgttttgaagcggtgttcatattctcccacttctgtagagcaagcaggaaagagtaggtaccttctgctcactgtcttttgtctggctttgagtcccatttcttttccttcttgttttagcggaagaaagagatttttacttactgttcctttgagaccttgttgcctagcttttaaaaatgcccttttcactctttctgttttaggagtgactattccctggctaaatattggcatggtcttttctacctcatgctggtctcgagaccaaaatcaccttccatacattgactacttacacac

SEQ ID NO: 119747 - DNA, 1116 bp, Homo sapiens
tcgtttaccggcatgctgttcatgccatgctgactgtgtttattgccctaatggggtgattaaacattctttattaaaataaacaaagtcttaggactcgtgttctccctctttggagccagcgtcggctgcagcctcctcattttggctgttctggtgagtggtgctgtggacatgagggagccctcccttcccacatgggtctgtgtgccatggacggtgatcatggtgtcctgcagtgggtccagagtgatgggcccgggaagcccaggctgttgcctgtggagcggggactgacaggagccttggggcttagccgggccaggccaccagctggggaggggacagccaggactattccgagaggtgcctttgcctccggaagaagagcgtggccatttcctgtggaggagttacactggctgtggcatggcctgtgttctggggtcatccccaggccagtgacctcaggcccgagtttcttccgtgtgggtttgcttatggcttgacgttgagtcacagatagcaaaatgtgataccctgtgtgggctttttgaagactcactcctggaacctcattgacaggagagaaagaaaaggcagggataggatcagagaacatgatggtgtgtagtttttcttaaaacatgtgatttaggttagaaaccctgtatttaaattaccaatcagtaacagaatatgttggcattgaaaataacatgagcattaaaaaaaatacttccttcactgagcaactgaaaccaggatttggcctcagagagaaatgctttcatcacagacacataggggctgcagagttgctgcccgcctggacctggggggcgggggctgtggggaggggctggcggtgttgccctgagctgctggcccacatctttgtgtttaatggtggttgatggcttcactggcttagcatcctgaagacctgtcaggcccctctccacactgatgtcctcctcttgcctggggaggagcccctcagacagcctgagacacccaggggcagggcagccatccctgcacccctgccttgcggggggcctcccctcacatccccctcattcatgctgtgagcctgacaccaggggcgtcaca

SEQ ID NO: 119748 - DNA, 2638 bp, Homo sapiens
catttgtagagggcagggtttactgttcctgtctggagggccgagggagccacgtattccttgtgaggacattatcaggtgctgctcctgcagtggcctctgttaacagaaggagggtgcagtgctggagcctcagaagaggctcgtggaggccgcagtgtgtctggttctgatttctaggggtttgtgaacatctgtttgtggtttgaaggctttttggctcaccaggtgggtcagatctccataaaagatgagcatctcgcaacgcggatgcactgtggtttggctgtgtgctaggtggacgtggcactgctgccatgggaaatgggagccagcagtgaccaggcacccagccaggccagtgcgccatccctgccggcgtggagcagagcctctcgtgtgctcgggtccctgagggtgacgggggtggcccagtacatgcaggaggcccttgtcaagtctctgcttgtctcttgtgtctctcaatgacccaggtattgcattcctgctgaggaggagaacaagctggaagatgtggtccacaccctgctgcaagccaatggcaccccagggctgcagatgctggaaagcaacgtcatggtgcgtccactcagccaccgcctccagcaggagctgtaggacctcctaggcacttgaacatggtttcccatgaacccgcctttcaaaggcaatgaggacacagcaaaacaaatccccagggtgcaaagggaaaggtcctctgacacaaaagccaaactgaccttccatcagattgcacagggcgctggggttttgcacggcctttgcatctgttttggggcttgtttgtgttgtgggctgctgtgggccctgggatttcttgtgcccgccgctcctaccttctgggcatgtgagaggaatgagcacaaaggcttcttcacctgttttcaggaagtcatggggctggtgagttcctgggaagtgctgctttgagctgagttctgaccagcttctctggcctctgctgaccctgccggtcccgcctgtccatcttagagaagagatggacgggggactcctttgtaagcccagcctgtgggcctgtggcctacttggctctggagatgagcccggcagcctcctggttgtgtaaccttgtcctgtttccagccctggcattgccacgtggggacagaggggcctgtgtggtcatcatgtcctcagctgtgcatgaacctgtcatcactcttggaccagtgcagtttagaagctccttcttgtgttatgaatgacgtctttttattttccacataaaacaatcttatctccttgagagcaggcctcttagggtgcgcatacgtcacctgaagactgcaggtgtccctgcgcacagggaggggtgcctcagcctggccctgtctccccagatctccccggaggtgctgtgcaaagaggggatcaaggtgcacaggaccgtgcagcagagtggccagtttgtcgtctgcttcccgggatcctttgtgtccaaagtgtgctgtgggtacagcgtgtctgaaaccgtgcactttgctaccacccagtggacaagtatgggctttgagaccgccaaggtgagcagagccggcctcctcccgcttgctgcccccgcatccctgtgagtgccgtgcgtgagcgcacacagaagcatccctgcgtgtgcgtgtctatttgtcaatagttccttttggaatatgtctttgaaattcttaagacgtggttgaaaggtcttctaggaatgaaaagttgttagggatttgtttgtatcacaaagagttttgatcagaccgttactgacagacccctccagtattggaaaactgttgaagatgctcaaggtaattgcttagaatggacagagaacctccacccatcgtgagggagtggcagctgcctctgggtagcggcgaagtgctatgacttttcctggtatgtggtgcctttctcacagggaggcaaagttttgaagagtttttaatctaaatgcaattcaagatttagaaattcagacagcctgcctgccccctccaccaagaagaaccttgacagctgcctagtaatgaaaatccaccctaaagggatgtgactcctctttcaggaaatgaagcgtcgccatatagctaagccattctccatggagaagttactctaccagattgcacaagcagaagcaaaaaaagaaaacggtcccactctcagtaccatctcagccctcctggatgagctcaggtaacagacccccagagcccacgccagagagctggacccggctgcccttcgggggctcaccccccgagcaggcctcacttcctgacaggagggtgtgtctgcagggaggccggtgtggggtgcgtgtgtcccctctgctggtgagcatggcaggccgtcactaaaggtgcgggccgtctcccgtgtctggcagggatacagagctgcggcagcgcaggcagctgttcgaggctggcctccactcctccgcacgctatggcagccacgatggcagcagcacggtggcggacgggaagaaaaagcctcgaaagtggctgcagttggagacgtcagagaggaggtgtcagatctgccagcacctgtgctacctgtccatggtgagcccgcctggccc

SEQ ID NO: 119749 - DNA, 1041 bp, Homo sapiens
tccgccaccgtgctgctgccatcgtggctgccatagcgtgcggaggagtggaggccagcctcgaacagctgcctgcgctgccgcagctctgtatccctgccagacacgggagacggcccgcacctttagtgacggcctgccatgctcaccagcagaggggacacacgcaccccacaccggcctccctgcagacacaccctcctgtcaggaagtgaggcctgctcggggggtgagcccccgaagggcagccgggtccagctctctggcgtgggctctgggggtctgttacctgagctcatccaggagggctgagatggtactgagagtgggaccgttttctttttttgcttctgcttgtgcaatctggtagagtaacttctccatggagaatggcttagctatatggcgacgcttcatttcctgaaagaggagtcacatccctttagggtggattttcattactaggcagctgtcaaggttcttcttggtggagggggcaggcaggctgtctgaatttctaaatcttgaattgcatttagattaaaaactcttcaaaactttgcctccctgtgagaaaggcaccacataccaggaaaagtcatagcacttcgccgctacccagaggcagctgccactccctcacgatgggtggaggttctctgtccattctaagcaattaccttgagcatcttcaacagttttccaatactggaggggtctgtcagtaacggtctgatcaaaactctttgtgatacaaacaaatccctaacaacttttcattcctagaagacctttcaaccacgtcttaagaatttcaaagacatattccaaaaggaactattgacaaatagacacgcacacgcagggatgcttctgtgtgcgctcacgcacggcactcacagggatgcgggggcagcaagcgggaggaggccggctctgctcaccttggcggtctcaaagcccatacttgtccactgggtggtagcaaagtgcacggtttcagacacgctgtacccacagcacactttggacacaaaggat

SEQ ID NO: 119750 - DNA, 1015 bp, Homo sapiens
ggtggccgcctaagttggagtcctccatgttccacatctattccagcactagggtggtttcaaacacaggatctcaggagccctcagaactcaagagatgagaaatacgcacccctcactgtctttagcagcctggtggtgactgaacctctcccaggaaactccagcagaaatctggaggggacttgagggccactcccaggtctaactcagaggtggtcagttactcaccttcctagttgaagaccatgttccaggtgtttggtcagttttcgttttagtccatttccagcatttccagtcctcaaagcccttggcccgggtggtgggtgctggggctactctggcgcgggcagtgggtgtggtggctgcccggccgggcgtgctcctaccttaccctcccagggcgctgtggagctgcctcctgaccttcgggtgtcctgctcttgcttgcaggtggtacaagagaacgaaaacgtcgtgttctgtctggagtgtgctctgcgccacgtggagaaacagaagtcctgccgagggctgaagttgatgtaccgctacgatgaggtcagtccctgcccgcggggtagggcagggcggcagcgtggcgccttccctgctcccggctggatgtaggcactccggcctggcagttctgtgcctggcgggtagtcagggctctgcaggcctgaggtgccctgttcttaggccctaaacccattcaggccccatgttaggatcccagggggagcggggttcctgcacgggcatttggatttgagcaatgggctcttaacagggctgaggctcttcctgcagccgcccccccggctttcccaagggctgcaccactgtggtttagacccagacccttttttgtgacctgtcccaggcacagtgggatggttggcagtggcctctccaatctgcactaacttgacaccagccccttcaggctgagagagctggaagtgtctgcggacactggggcaggacgggccccatgatgtgaaatccc

SEQ ID NO: 119751 - DNA, 2725 bp, Homo sapiens
acaaacacagtttttggtgccgacagataaatgattctcttgagtgaattacaaggatatgtataggttgagaagtgtttgcatttacttgcatggccaggttcagtggccggtagctaaagtgagtcaagtagcttgggtatttgtgtcaccatccaggatgtaacaaagcccctgggtctctttgctgagtgctccgtggtagaggcagtgctctgggctcccctgccagccctgcccttatgagcaggcaaagcatggtggaccagggtgttgatgaggatgaaacggccatgcctgctatgtggcatcaggaggagctgggaaagggagactcactgcatctgagcctctcggggttattttaaaacctgttggttggtgtggtgaaggggaccgctgccctctgccctaaacttgcccctgcatggctctcagggacagagctcttgttaatacggtatgttaactgtgtcttcctttcacccccaaacaggaacagattatcagtctggtcaatcagatctgcggcaaagtgtctggtaaaaacggcagcattgagaactgtctcagtaaacccacaccaaaaagaggtccccgcaagagagcgacagtggacgtgcccccctcccgtctgtcagcctccagttcatccaaaagtgcttcgagctcatcatgaagatgccaacgcccgtggtcgatttatatatatttttttgtaattattatattctagtttggagtacttgctgtaggattcaagctgtctttgcactagctctaaagaagattttcttctggttttagagaactaattttgttttagcattaaactgttgaacttttttttgtacttagaaaacctagatactgcagtcagattttggaaactgccgtatagtcactgttttaaaaaccccggaggggctgtattaatttgtattgccccatggctgacaaaagcctttttttttggttttgatttttttttttttgtaactgttggggggaaaaaggctttttaacccatttttgaagagggtgaagtttggagaacaaatttaaaaaccatcagtcatgtgagcagattttttagaagggataggagacacacgcgcacacacacacacacacgaaacttgaaatggctttgctttggctgtcgtcttctgccgtgtgccagatgagcttgtgatctgggaagccggggcacccccgttttgtttctctgggcggttgtggcagctgaaggcggacgttgtttcctaaccataggtggaacgaggagacgggagcgagtgggctctccaccagcacatcactatgcatctgttccaggaaagaagaaaagcgagcgaggaagacggaaaagactgcctgccttggaggggtcacatgagggagacctgtgcctgatttcattaggaaatccattctgttattttttggtgctgttggctactttatcaaaaaacccttcaatagcatccttaagatttaaaaaaaaaaaaaaaaaaaaggaaaaaaaagtgatggaagccgtaagtgcttctttgtcatcgacgtgcaatctttctaacattccatctccatctcaccgcttcttgtttgacaccttcacaagtcagcattaatctttcttttaaaacttgtttcatttatgatcatgtagagagccactaggaggcctgcagttatttttgaatgtgaaaatgcatttgcgttcatcttgtctattttttctcttcatgttgtaacaaaaaggaaaaaagaaaaaaaaatcccatcccttttgtacatatgcctgtaaattgttttaaatacttgagcctttttctcggtggggggtggggaggggggtgagaagacaagatgaagaaaagccttacatttcagtttcttcatcggttggattggatgcttacagggtttttcttgtaacatttataagtgctgcttacatcactgaacaacaacaaaaaaataataatggagtagctgttgcccttctccggttgtgtgtacagtatgtgtggaataaaaaagggaaactgttttcacaagctgttctttgtttcataattggattcatcaatcccgtagctacccatattgcactgagcttgccagtggtgactgccaggaacgtcctatgatccactttgttggttgttgttgcagaagactgaactgttttggaatatttaacaattacagaaacagtcaagtgttttccaatgtggttgtccggtttctatggccttgctgtgtactttccctctttttgacagtaaacttctgcctatggcttacagtttgacatttaatttattagcgctgctctgcacccctcccttgggagggagacttcatgtggtttattgcgagttttttgtttacttttcaggtttgtactacaaggtttaataataaaaacaaagttttttggacatttgtctgtcttgtggaagatgactgaatggaatgagctctttcttttctcgtccacgggcagggggcagaggattccccccagccagggagcagagccaccccccacactgcagtcctgctcccacctgccactgggtccccttcagcctaacctaatggtttccatgtggcctgcggccgtccccctcatttcccatcgagctgcgcccccctgctgagcttgctttcatgatgagacgacactgggtgcattcagggtggtatggctgca

SEQ ID NO: 119752 - DNA, 1114 bp, Homo sapiens
cggatggtggtgaggacagcgactcttaaattgggacatgggcgttgtctggccacactggaatccagttttggctgtatgcggaattccacctggaaagccaggttgttttatagaggttcttgatttttacataattgccaataatgtgtgagaaacttaaagaacagctaacaataaagtgtgaggacggtaaactgagagcgcacagagctagtttgtacacaaaggcttctaaatacacatgtccttaaggccactgtaactcagggttccttagagtgaagggacgtgcaggtcattgagggccaccccgggaggttgcatgtgggcagggcctgggccaggtggtggaggctccacagggctgagttctgcatgaggcagggaatgacctaccgtttcacaagtggaaaatgccacttcctgtagaagagctgactgtagccaaaccactctggcaaagcttggggttttccgttgatcattacagaagtaagtaagtatcattagtccagtagccagccagtccaacccctactttttcacactcctgggcccaaaagaacagaaacaagcccaaagcaatcctccattctttatgaaaagaaactggtcccctggagatgtgttcctgccatcactcctccagcccaatgagagagaggggacagactccccgccgggatgagggggtctgtctgtctgcagccataccaccctgaatgcacccagtgtcgtctcatcatgaaagcaagctcagcaggggggcgcagctcgatgggaaatgagggggacggccgcaggccacatggaaaccattaggttaggctgaaggggacccagtggcaggtgggagcaggactgcagtgtggggggtggctctgctccctggctggggggaatcctctgccccctgcccgtggacgagaaaagaaagagctcattccattcagtcatcttccacaagacagacaaatgtccaaaaaactttgtttttattattaaaccttgtagtacaaacctgaaaagtaaacaaaaaactcgcaataaaccacatgaagtctccctcccaagggaggggtgcagagcagcgctaataaattaaatgtca

SEQ ID NO: 119753 - DNA, 1058 bp, Homo sapiens
caactgctatttctgatttagtggaatgagtccaaaacaccatgttcgctgtagagtttttaaaattttgattgattctcctaaattaatactaatccttggagatgaagattcctccctaagaaaggtgctgtggctcatcaggctgggaagtctgagccggctctgcacagacgtgcgatgagatgcccgattcccgtgtgtggctgtctctcagctctagctcaagagaaagctaaaaagcccagggccgccaattttcttcttcaaagctttcaaaaccatatattggcgacatgtgcctgatttttaccttaaaaaaatgagcccagcattttcttgaaacttaatctttgagatactcaaaaccacaaaaatttaaccacttcatatttccttgcaggtatttccagcaggtatctgctagacgcgttctctctgccagcccgctgacttgctagctgtggagcaactgcagtacgtgcccgtccctgtcaccaggggctggccatcaacagaagctgctccttccaagccggccacgcgtctactacttcatcatcctctcgggggtgcatccacggctctccctacaatgggagcttcctgagaggcactttcatttctctgtgcttcctctgggctcaccagcaagtgctaaactgaaggaagatagagttaaattgtttagcaatcagagtttctatgactgtccatcatcactgcatctcttctatgacatgagacattggtgcgatgtgtcattatgttcaaatgtgtgggtcggccagggtgtatctgtatggactgaatgtgtccccataaaatttgtatgttgaagccctaacccccaatatgaggatatttggagctggggcctttgggaggtaattaagttagatgaggtcagatggacatggcccctgtggttgagattagccctaataccaagagatagcagagagctccaccctactgttggccacgtgcacacatagggagaagggggccgtctataagcaaggaagagagccctcatcagaaaccgatcgcgccag

SEQ ID NO: 119754 - DNA, 1044 bp, Homo sapiens
gccaaggcaggcggatcacgaggtcaggagatcgagaccatcttgtctaacatggtgaaaccctgtctctactaaaaatacaaaaaaattagctggcagtggcagcatgcacctgtagtcccagctactcgggaggctgaggcaggagaatggcgtgaacctgggaggcagagcttgcagtgagccgagatcgcgccactgcactccagcctggacgacagagcaagactccatgtcaaaaaagaaaaaagtcattttaagtttcctaatctaacccctcctcccttgtgaaggtcgagacatgattggatttcattctgatgtagaaaaaactgagataaactgaagggccaataattcagcaacacgagagaatcaaacttttaaagcagaagtagtcttgagaaaaatgttttttatgttatatatctacagaaaatcttaattctgttaaaacaagatattctttaattaaaacccctttgatgatttctgcattgatctttggttttgagctgcctattctggaattatttttcaaaagaagattagctgaactttgaagcagttgaagcatacttaatgtattttagggttgacttattctaatgcacttggcagccatgaatcatttgaacagatatgttgacaactgaagtgaaacaaatgaaaagacatcctcttcagttcatttttttttcttacgagtacactctaaattccttgcagatttattaagagtactgaaaggtaactaattcttaagcatctgagtggggcccagagcaggtgattttcagtgcatagtgagtcctggttcttggtaatatttggtgttgctccctcttcaagaggctgttgtttaaataatgctggtattaatattagctgccagctattggccaacattgtatgcttggtgattcgtatttgctacctcatttaatcctgccaacaaccttacgaaataggtgtttttaccgcacttgtatggaggagaagttgcaactctggtgaaatcagttatgtggaaaaagagtctga

SEQ ID NO: 119755 - DNA, 1112 bp, Homo sapiens
gggcagaatgaaaaaaagttgacaatgcatagaaatctaggaagcaccaacattcaccagacaggcacgagaagagagctagttgcccatagtggaggcaaagaggaaaatgtgataaggagaacatttcaaggacatgtcaagaagcagtgtcatattgttgtggagaaggcaaactgaaatatagcctgagaagctaattggtgatcttaatgaggacactttcagcagcatgggtttgtgtgtgggggtgctgggggtagaaaccagatggcagaggattggaatgagtggactgttctgccttgttcaccattgtgactcaggtgcttggcactttggtgcttattaaatatttaaatgaatgagggagtagagacaatgctttcaaaagctaaggctaaaggaaggaaagaagaatagttagaggagagagttaggttgaagggaggatttttttttttaattttgggaggaagttgagtatatttgtatgaaaaaggaacagaagctatagagagggagaggttgaagatacagtgagagtggctgattgatggagctgtgattcagaggggaccagcgggagtgggatttagaccatactattttcaaaaaggaaaaatttgtggagaagtgtttgtaactattagaattgatgacttaagatacttattaaaaatatatagcacattccaagccactggttagtgttgctgaatttgaaaaaacctttaggctaatgctacattaaaaatgaggtaggggaaaattatagatgccttgtgtgttatgaaatgaactatatttttaatttttatgttactactttcaaacagcaagatttcatctctcttttgctgtgttactaaagcatctttgtacctagatgacaaattctgttggatttagttattttcagccttccctcccctccattttgagctgcatttggtatggtcccagaccggtgcatacatctttgcacactagagcccctgagagcttgcattttgcttttatagaggcagtagattccaatgtatatctgcttaagccatcagcaaaaaactaataggcttactacaatttctttggaaaaacctgcttct

SEQ ID NO: 119756 - DNA, 1048 bp, Homo sapiens
ataatctgaattttcagggctaggctcagaagcagaaataaaaaagcaaaacaaatatgctttggttaacacagagttggaaatgggaagacatgtaagatgggccagcaggcatggtaaccatggatgctagtgagactatgattgaaatgattggctgtggagttctgactagagagaggggaggcctgaccagaccagcagaataagcaggctgaatggtacaggtgaggtaccccgtaaaggggaagaacacttttagtggttgaggtggatcttgtggtcaaagaagagatttcagtttgaaatcttagaaggggagcaattcccagtgatgatgatggctaaatttgagtaaaaatagaaggcaccaagtcatctgacttggagacttctgaggctgtgaggagtctcacttgtttggatgactcgtggatgtggcttatgcatattactggcttggcagcccttagcatgttacagatagggatgatgatgctaggtggtaaacttcagtagaatttgttggttcacttcaagagttggcttaacgtgtgagacaaaactattcagctgccattgaacaatacttaagtgactcaggttggatgatgttactgtcctctgtcctcagggagctaaaggactgtggcaaagcttatagattagaaaggcaaatatataatttgaatataatatagaaataatagaaataagtacactaaggtgggagtaattaaccagagagaggtcatgacacttgatctgaatgacgagtactcactgggctagaaaggataacaaagacattccaggaagaggaaagaacagttgtaaagatgcatatatgtttatttcaagaatacaagttaaaatttaatttcttatttattgaaggagccacaaataatttgcctggctgaagcatatggtgtgtggggtgaagtgatgagggatgaagttggacagagaggcaaggaacaactggtacccagccttgaatgccatacacaggaacttggacatttccctttaggccagtggtctt

SEQ ID NO: 119757 - DNA, 1032 bp, Homo sapiens
tttaaaagctaaaaagtatcctttaaaattcttaacattggactagtttggggaaagttaaaacacgattttacctcataatgaacttttaagaatatttcttaattaaaatgaatgggcaaggtacatggcataccacagttaaaatattgtcgaaaaagaaagattgcatcaacattgtataatatgaaaacattgttagagaacaaatccatgattcatttgaagtgtttaacctatgtttttcttagctttttaagtaactaaggtccttgacaaatcaatctttatttacctgacttgatactgtcctctcttgacttcaacaccagtatcccagatgttcttctctgcctcaggttcattttagttttctttgtaaatgttttaatgctggtgttcacttgtgctctggtcttggttgttgcctcctctcattctgcagaccctccttgggcatgctcttctacatccttggctcatctgccagccataaggtgatcattatcaaaccactgtattcagtgcaggtctctcttcttacctgcagaaccagttgccacctacacagctattcctggacttctcaacagcaccatgcccaaaattgtcttccacagcaaaacctgacctttttctgttctaataagataccatcactacagatttatccaggccacaaatatgggagtcttcataatctcctccttcctctcctaccacctgctcagttctcagtccagcccaatatttcctgactctgtccttgcctttctgtcttcactgatcctttccggagttctagcccacgtctttgtagcctgagttacactaatagcctcttaattagtcttgctgtctgtagtcttgtgtcccttcatttatattactgttagagtgctcattttttcccaaatgtagatattaagatttctgatcgtcaagataaaaaaaattaaatgatgatggtgactatagcagtagcctttattgaacacttaatatgtaccagacactgcttaaaaactccaa

SEQ ID NO: 119758 - DNA, 1043 bp, Homo sapiens
tcttcttcaacttctttcattagtgttttatactttgtcttgtagagatctttcatccccttgatctgaaactcctaggctcaagcaatcctcctgcctcagcctcccgaagtgctgagattacaggtgtgagccaccacacctggctctttccttcccttggttaaatttattcttaagtattgtaatattttgtaactattgtaaatgggactgctttcttgatttcttcccccctgcaatttcattgttgttgtatagaaatgctactgatttttgtgtattgattttgtatcctgcaactttactgaatttatttatcaagttctgaaagtttttttggtggcgcttttagagttttctatacataagatcatgtcatctgcaaacagaggcattttgacttcctcctttcctatttggatgtctttatttctttcttgtgcctaattgctctctctaggacttcaaaaaacggcaaaaatttgcattacaataaacctataattgtaagttgaaatttgaggagtttgcctcaaacctaaatgctatgaaagctagtttagaaagtcatgtaaaaagctagtacgtaaatgaaggaattatattgtagccgtttaagtgaacccaagactggaaggctgcacagccaacttgttcttcactgctcccttccccactggatcgctgttacttcctgacttgggagtcatttctggctgagctttccctcatctgtgttagatgccactcctttgagttccttcggcacctcatgccttactctgtcatgctctgttgccattgaaatatacctcccctctcctgtaagctccttgagctccaggactgtctttttcatctttgtatcacagtgactggcacagtgactggcatatgtcagtgaataatagataactagttatgaggctctgagttctcaaatctttgacctcgaaagcttttctttcgtataagaaaacaactaatccttgcccctacaatctcagtttacttagcaccctgtcaattggaaattagtg

SEQ ID NO: 119759 - DNA, 1142 bp, Homo sapiens
tcaatggctccaagctttagttttcttgtctgcaaaatgacgatgagcatacctgtcttgtaggtatttggaggattaaaggagatgacaaacgtaaccacttagcacagtgcctggtacatgctgggcatctgccacgcaccacgcactgcgtacagactctggacacacagcagtgaacaaggctgggcacctgccatcaagatgctgacgttctaatgggggcctctctagcctttgcgaattcacaaaaccattattctgtgacacgagggtttggatggatgttaggcagtttagcttgtgctgcaaaacagtttagaatgcaaaaccacaagattcaatgtggtgatattagtattctgtacattgaaggtgtgtaagcatacaatggaatatttttatccagattctatgcactttcttattctgtgaaaaaccacagtgctttttaatcataaaactggaaaaatatgtttgaaaagtatatactgaattatcttgaacttccactagagggtagtataatcctattcctttattgaagttcaaaatgttaaagccttgtctttgaattttctcttagtttattttatatgacctatttttaaaagactgttcccttcatctagaacagaagattctgggttttgtttttgttttaaaattttaatttttttaagagacagagtctcactctgttgttcaggctgtagcatggtgatgtgatcatagctcactgcagcctcagactattcctggactcaagcgatcttcctgcctcagcctcccaaagctctggcattacaggattgagccactgtacccagccagaagatgctgttaactcttagataagaattcttagatataagagaatagcagccgtatactgagtttgtgtttttcttttggtttgacctagcctgatacagtattattttgcttttttctgtacagaattttagagggcatctaacaaagagattatcatagctctgtcagtttttcatggactagattatcagatgtccaggttcctttctgaggctagacccttcaagaggcacattaattctcttagacaccttttaggctactacatagatctcatttgttccataatggcttttgcaagttaa

SEQ ID NO: 119760 - DNA, 2087 bp, Homo sapiens
atctcctcctgtttttaatattgccttattcaaagcaaaacatgactgatttacaaggcaagtaattggcaagtcataagacagttttttgtgtgtgaacaaaatagatacgtagtatttggagtgctgttgctgataacagtagctaatgtttatagcacctactgtatgtcagagatgattagatgatttacagatactatctgtaattctcacaagaaccccacaaaagtagcttttattattcccaatttacagataaactaaggcttggagaggttgcaacttgctcagaatcataaaatttataaatgcatctaggattccaaccacattgatgatatcctcaatatcagtatgaggcagtaggatgaggtgatgaggcagtgggatgggagctctcagtaggtctctatgaactgtattcttcaagtcccctggctgttgccatgcctttcagggtcagtgttttgttatttctgaaggcagggcatggaaaagagattctgggtcttagaaaagtgtaaaatggctgtgattgccgtctgcattggtttcctcttacaggtatagtaatggtccttcccaagccttggacatagcctttaagatgttcggaacattcttcttagccactttctttcagctcatcttcctgtatctctttgagtcacttgcttttcattggttgtatgtttctttgcagacatgttctcttatgataacctcttttatttccccagctgagagtaaatctgtttacggatagttgttgtttgcttaataccactctattgattaaatgcattctgccacagttctcattattttcatagtcaattctgtttagaaaatgcagtctctataagtctttcatagaatatattgtatgttcgttcccaattaggattctaatatcctgaaaaatgtttgatgtttagtgacacatgaccttattcttcagaaactgcattttggcttcttaaatgcacaaggtaggccttccaaatgttcacttgaatcctctcttttttagtaatctgagaacatctaacactaaagacaaatgaaagctaaaacattatctgatatactgttctggttaatcactgctaaattaatttgagtcatttttttcctctcatctatgtctaaccgatattgagctctttttagagagttagttcagttttttttagaaggtatgtctggatggttgcttttcatatatattgccaatctgaattatctgttagcctttgaaatacatgcttcctttgggttttaatctattgctgttatttgcctgatatttataattagtaatgaatgactgtggaagatagcatatcaaaacttggaattttagagacctagttagtatttgttggcctagaataagcccagagagagttgttttaaaatcatgaggcttttagctaagcaatttaagctttatagaatcattgctgacgatattctttacagtaggaaaacaaacactttgaagccaaatttgatggagtgagttgtgtaaacatgtatctgtaccattaatgtactttatgaattcattttgatgcatttatgtatcagtcttagattttggaaacatttagtgttttaaatgcttactcatttactgggtttttttttttggaagcctcaaaatctctcctattattacccaaataccttgacataatattacaaagcttaaatagttaagcaataataaaaaataaaaacaaacttagaagaaaatggtaaccgattatatttagtcacagggtccccctaacttctttgaacttgttgccctttcactgtcaaatgtaacaccatatcctgtcagtccctccattttccaggctgcttcactcttttggtcttactttgctctctagaggccctgcttttattgaagggcaaaggatttatgttatgtgagcaatttggacttttgatgatgcttttagctgtgttatcccatggcttcattaatatggctcctggtacctagccccttgggaattgttaagttacaacagatgatccattcatattggcttcagtccagcttacag

SEQ ID NO: 119761 - DNA, 1109 bp, Homo sapiens
tattcatgttgatattttcaaaagatcacctcttcttgctccttctaagtctttctaggcccttgtccctcccactatgttaagaccaaaacagaattgtctgggagaaactaatgtctgtcattttctttatagtctttagcaaaagaagttagaattatcttaggctattctagaatttcacaaccttgctattaggaaccctttacatctgctgaattcctcattaacttaaatcatttcctctttttctggaattctggaattggccagtttcctcaaaattcctttatatactttatgcaataagtattcctgtttaaatgtaaattgaaacatggtatattctaaatgtattagggaacttttctttgaagacttcctttcgtaaagccaataattacccgttaattatgttttatgtttgttttctttttggttgttagtggtagttttttgtttttgttttttttttttctagatttagcttttcaaatacatggtctgcttaaaacagggtatacttagaagtgacttctgaagtcatttttaaactttctcttctgtgggttaagatgcactgatacaagcagtaattggaggtttcctgcactgaatattaagttgtttcttttctaaaaatgaaaacaacttcagtctcttttagaatgtaccgtaatctctactgagtagaggggttgttaaagataacattaaatctcattacgttaactgtactttctttgtgcctaaaacctggtttcactttaccccccttcttgtgtgctgcagctggtggatagcgaggtggtcatgctttctgcgcactgggagaagaaaaagacaagcctcgtggagctgcaagagcagctccagcagctcccagctttaatcgcagacttagaatccatgacagcaaatctgagtaagtccaatgttttcattgtacattacttttaggaatgaaaacaacttgggcagggtttggtgtaatttcagagcttttcaggaacacatgaaattctgggttaacaggattttttggaaaatcatgatttcatattttgattagttgaggattccacagaaaatgatgtaaagtgtagaaa

SEQ ID NO: 119762 - DNA, 1049 bp, Homo sapiens
tatgctaattcatacatttctgtggtgctttaaagcaatcgtcctcacctttcctaatagccaatgatgtagacagttggaaattgagttacaagtaaatgaaacgtcatgcaggttccgcacgctgttgaatcaccggcagatctcagcagtcattgtagtactcaatgcatcattctgtttatctacatctttttcttttctttttttctctgagacagggtctcactctgtcacccaggctgcagtgctgtggtatgctcatggctcactgcagcctcaacctcctgggttcaagcaatccacccacctcagccttccaagtagctgggactacaggcatacaccaccacgcctggctaatttgtgtatatttggaagacagggtttcgccatgttgcccaggcttatttacatccttttacactttttgtctaagcagttttgtgagtcacccccctttttcagtaagaagcccccattttagtattttctacaaagctcaaagacataaatatgctggtgtcaaattaaggtgaagtcgttggagctatctaaaaataaaattattgaactttatgacgaatttgaggtttagtgctttgaacttgaaagttgtcattagtagaaaatagttgtcagatggctcacttagtctatatattaatatgctcacacagcacttatgtgttcatggggtgtatggtacttgggagaagaccaagaatagggctgggcaagccttttgtaggcacattgggaacctctgctttatttcaccttagcccagtaatgtagtacattggtttctcggctttcttgatggggatcacctttattataactttcatttgaaattagctctgtagtttccagaatgccattaaggtcatatttggaattttattcaattctcatggcaaatctttatggttgagtataatactaccattttacatttgaggaaactggaatattccccctaggtcagtatttccttcacagcatgtcatgatattgtaggacattaaacagacgttataagtggg

SEQ ID NO: 119763 - DNA, 1971 bp, Homo sapiens
agaataaatacggagcatcttctcagaatagtattcctgtccaaaaatcaagccggacagtggaaactggacagctgtggggatattaagcacccccacttacaattcttaaattcagaatctcgtcccctcccttctcgttgaaggcaactgttctggtagctaactttctcctgtgtaatggcgggagggaacaccggcttcagtttttcatgtccccatgacttgcatacaaatggttcaactgtattaaaattaagtgcatttggccaataggtagtatctatacaataacaacaatctctaagaatttccataacttttcttatctgaaaggactcaagtcttccactgcagatacattggaggcttcacccacgttttctttccctttagtttgtttgctgtctggatggccaatgagcctgtctccttttctgtggccaatctgaaggccttcgttggaagtgttgtttacagtaatccttaccaagataacatactgtcctccagaataccaagtattaggtgacactagctcaagctgttgtcttcagagcagttaccaagaagctcggtgcacaggttttctctggttcttacaggaaccacctactctttcagttttctggcccaggagtggggtaaatcctttagttagtgcatttgaacttgatacctgtgcattcagttctgtgaatactgccctttttggcggggtttcctcatctccccagcctgaactgctcaactctaaacccaaattagtgtcagccgaaaggaggtttcaagatagtcctgtcagtatttgtggtgaccttcagattagacagtcttcatttccagccagtggagtcctggctccagagccatctctgagactcgtactactggatgttttaatatcagatcattacccaccatatgcctcccacaggccaagggaaaacagacaccagaacttgggttgagggcactaccagactgacatggccagtacagaggagaactagggaaggaatgatgttttgcaccttattgaaaagaaaattttaagtgcatacataatagttaagagcttttattgtgacaggagaacttttttccatatgcgtgcatactctctgtaattccagtgtaaaatattgtacttgcactagcttttttaaacaaatattaaaaaatggaagaattcatattctattttctaatcgtggtgtgtctatttgtaggatacactcgagtctgtttattgaattttatggtccctttctttgatggtgcttgcaggttttctaggtagaaattatttcattattataataaaacaatgtttgattcaaaatttgaacaaaattgttttaaataaattgtctgtataccagtacaagtttattgtttcagtatactcgtactaataaaataacagtgccaattgcagatgtgtgtctttgccttctgttgggtcctcaaggaagaggccaggaaaagagtgctaattcctcctccttattgacccccgctcacgagttctccctgggtaggtcggaggtagggaggtgtgacatgaggcattgccttcgctgctaatgttttggggggaagagtacgtgtgagatgaggttctaagataaaaggcacacagccacacctgatgtcttggtttcttcagttcatgtttatgcctcctagctgaacactgctgttcacaagaggtatacttgtctttaaacatgtggtagcttcatgcgctcgtgtggcataatctatacactccttacagatttgctctaaactggttagtggtctgtaagtggaaaatttatttttacttcctgtaattcaagctcattagaaattcagcgagcagaccgggcacagtggctcacgcccataatcccaacagttggggaggccgaggcacaaggcctgcttgagcccaggagttcgagaccagcctagtcaacatag

SEQ ID NO: 119764 - DNA, 1048 bp, Homo sapiens
caacaagtactgtatctcactttaaactctttggggaaaaaacaaaaacaaaaaaaactaagttgctttctttttttcaacactgtaactacatttcagctctgcagaattgctgaagagcaagatattgaaagtttcaatgtggtttaaagggatgaatgtgaattatgaactagtatgtgacaataaatgaccaccaagtactacctgacgggaggcacttttcactttgatgtctgagaatcagttcaaggcatatgcagagttggcagagaaactgagagaaaagggatggagaagagaatactcatttttgtccagtgtttttctttttaagatgaacttttaaagaaccttgcgatttgcacatattgagtttataacttgtgtgatattcctgcagtttttatccaataacattgtgggaaaggtttgggggactgaacgagcataaataaatgtagcaaaatttctttctaacctgcctaaactctaggccattttataaggttatgttcctttgaaaattcattttggtctttttaccacatctgtcacaaaaagccaggtcttagcgggctcttagaaactctgagaattttcttcagattcattgagagagttttccataaagacatttatatatgtgagcaagattttttttaaacaattactttattattgttgttattaatgttattttcagaatggcttttttttttctattcaaaatcaaatcgagatttaatgtttggtacaaacccagaaagggtatttcatagtttttaaacctttcattcccagagatccgaaatatcatttgtgggttttgaatgcatctttaaagtgctttaaaaaaaagttttataagtagggagaaatttttaaatattcttacttggatggctgcaactaaactgaacaaatacctgacttttcttttaccccattgaaaatagtactttcttcgtttcacaaattaaaaaaaaaatctggtatcaacccacattttggctgtctagtattcatttacatttagggttcacca

SEQ ID NO: 119765 - DNA, 1084 bp, Homo sapiens
tctctactgacagccagggtgcagacgagcaggtagaagtgttgtcagggcctgttggcaggtctgtgaggttggcccccgcgtggctatgctgcatgccgggaagggcttcctcaaagaaaggcaagtgtgctgagacctgctgaaaaggcagctagggcttcacgctgtagaaacaaaagtgcaaggcctgacgcaaccaatgatttgtcactttaccgaggagcctatcagaaatcggctgacatcatcacagctaaaatactccaccagctgtgtttgccacaagtgacaggttcagagtcagtggagactcagacagagagcatgagagggggagatgggagggagagagagaactcatatctggacttaattgaggttccaaaggctacatccttctcccctctgcagtgccttcctgaggggttttctcccctagcctgaagaatcttcctggtcttctcaactggttaggcactgctgacactgcacccacagagaaattcagaaatgtgcaaattgttgagcttaataagcaaaatcacaaatttgattggggaagttgtggaagaagagatggttttctccaaaacagatggcattgtgactctaggcagaaatcctgcatgaacagactcttgaggatgcctgaactcataagacccccccaacatcacacccccagggaaagcagtgtgatatagtatggtggtgacagacccaggggtgcggatttgggtctctggcaggacaagttacttcacctctctgagctgcagcactctcctctctaaaccaggcaaatgagttttgtttttctgtgggtttttgtgttcgtttgtttgcttgttttgagacagggtcttgccctgtcacccaggctgaagtgcagtgatgggatcattggctcactgcagcctcaacctcctggactcaattgatcctcccacctcagcctccccagtagctgggactatgggtgtgtaccactacacccagctaattttctgtgtttttttgtagagacagggttttgctatcttgcccgtgctggtctggaactcctgggctcaagcgatcc

SEQ ID NO: 119766 - DNA, 1063 bp, Homo sapiens
gaaccggtaagacttgaaatgcctcatgaagggaagtgaggcagggaaacttttaatgagagattattccattcaccatctttgctggagctgactggtgtctatgatgcaggaagtaacctgagaaagaattctagggaggaaaatgtgttttttttttttctttctttcttttttgagacacagtctcgctctgtcaccaggctggagtgcagtggcatgatctcagctcactgcaacctctgcctcccgggttcaagtgattcttctgcctcagcctcccgagtagctggaactacaggcacgtgccaccatgcccagctaatttttgtatttttagtagaaacaagatgtcaccatgttggccaggatggtctcgatctcttcatctcgtgatccaccagcctcagcctcccaaagtgctgggattacaggcgtgagccaccatgcccagcctgaaaatgtgatttttttatgcagatgaaaataggaccacagtgaaggaggtagagaagagggcctttcttagaaaataatcggaacaaccacagccagtaattgtaggtcttgagtacgccaggccctcatctaaattcttcttatgtgtgaactcacagcaagcctgtggggtaggaactagtattattcccactttggagatgagcaaactgaggcacagagaaatgaattagttaggcctggttagtacttagatcagagaaattaattaacttgcatcagatatacacagctgaggagtaaggccaccaggattccaaatcaggtggcctagatcccaggcctgtgctgtttgctgcagcagtcataggaggtagtttgaactggaaagcagttcatcatgagaggtagcattttttgaggcactactgcctgcttgcatgctaggcactgaattgtcccatgcaattctcataacaacttcatgaaataaggcgtattactatcttcatttttttttttctaaggcagagtttcactcctgtcgcccaggctagagtgcaatggtacaatcttggttcgctgcaacctccacctcgcgggt

SEQ ID NO: 119767 - DNA, 1018 bp, Homo sapiens
ttttacaagcatctcttcagagcctggtctccaaagccatccgtccagtcagatcaagagctacttgccctgtttctccatagtcacgaactggttaatgtgaggggaaggcaagaatggtctccatcgtcacgggtttctgccttggtttgaagcaagctccagcagttacatgaacaccagttacggaatgtctacagttatgacaagacacagcagggctgacccggctcacccagcaagggaacaaaggccatccacacgtcagacccagcaattcaggtgaaggaacacacagaacctcctagttcgctggatgaggagtcccccaatttcaccagataatcacacaacatgttttcatatggccacatgcccacagcctcaagaaggtgaagcattttcagagaatgattcctgacactacagaaacattgaccatttagaatcagaagaccctcagtcaaggctggcctcacaggaaaatcaaatgtaatgattcccataatgagttcaagccagacaactgaattatgcatctgacattaaaacaactgggggattgtaggaggaggagaagtttgggaagagagaggacagtgtaatcttctgggagtaaaatttattactgaacattaaaaaaagatctgcaagttaagttgagagtcattttgtttatactcgaaatgctacaatgtcctttgatttgtttatgcaagttttaggggacaagttacgtttttttagcatataatctacatttattcccaaaacactgctcctgagacaatccatcagatatttcctcaaggctgtggaaaaggggataaaaggcatatttttaaaggtgggcgtgtatgtgcaaaacatgtttgttttaaagagatctgaatgctgtagaaataattagccatgtgcgtgaacgaaaataatgaataccaaatggtacaatgtcctgcttgaatcctgtttcagaaacagaatgtgaaggaaacattacgttctctcatccctctct

SEQ ID NO: 119768 - DNA, 1031 bp, Homo sapiens
tccccgcttgctgccacctccacctcttgtcttctagaaccatgaggcagaaatgacttaagtctgatatgcttggaacgcaacactcttttcgctatttctgtctttagaaatgttgagaaagtgtttgcctttatttgacggcctgattactttaaggtgtcctcggcatagaccagtgagcgccttggccctatttgctgacagttttaatagaacagcagggaaagtcctttccaagaaagtgttggctacgtagcctaacgtcattttaagtcatcaccatacacccaccaaacctctgagataaaatggaaactccatcatctcttgccagggtaatggtgttagtaattcactagtgacctctaagaatttctctgtgcattcactgccacatttaacttttgttacacggcctccaaaatgttttccagccacaaggtcagtccattgacaatctcaaaaatcctgacaaggggacagatgggtttagtttttgcctttgtgatggttagttctgcttaatgtgttgagaaaacatctgaaggttttaaccctggctggagtcgtgagacggaggcatgtttaatggaatagcacacgatcgtcctctcatggtgagtccacgttggagggcccaaagacccatgttgtacaatcggttcaactttttctgaaagccaaagaaaacctacctccaaacaggatttagtctcaagctagagcaaaaatgtacatcatgttgaaaagtcttctccaagtgctacaattcataagcagtgttgtgtttttactggaaaagcttgccatctagccaagcattcttcacatttttcccaggatttagtcataaaatcattttagacatattgcaaggataaaatgtgtacatatctgataaaaggcagggatttttttcttcttttttgctgtataactcctggaggaggcgaaaaacaaactagacacacacatacacactcacaaaacacacgtatttgtgcatatgtatgtgtatatagagagtg

SEQ ID NO: 119769 - DNA, 1050 bp, Homo sapiens
aagaattaaattttggaattaagcaaagcatgatggctcatccatgtagtcccagctactcagcagactgagacaggaggatcgcttgaacccaggagattgaggctgcagtgagctaagaacatgccactaccctccagcctggatgacagagacctcaactctaaaaaacaggttttttaaaattggaattaaacacacttgggttcaagttctacttcagctacttattagttgtgagaaaataaatgtcaaatgtttttcaatttgcataagttatttaaccacattatccttactttccttatcattaaaaccctgaaaaggttgtaagtgacaaaatacgtgatacacacttagtgcctgtcagatgataggcctgagttactgttaacttttttttttttttttaccatcctcatcatgttcctcattctcatcttcttccagggttctcacttgatgaaggaaagtatttaagacaatacttctttaacatacttaataatggaatggatatagaaatgggagaaatcagtgtgaaagcaggctttggtgaggccactatttaaaataactatagtttatttaaaggagacacgaagtaactgagatttcacaaggccccagacccccttctcgaatgttattatcaactcccgtttctgccctgtgatgtcatgagggttgatgatcggttcttcttttattttgttgccaagtacagcagggatatgtgtcctctctattcctgagtggtgaaagttctcttctgagaccacaaaacatggtggcctcaggttctttatggccccacggtctcttcctgcacccctccccaaggggctgggttggtagatattcctaatgttatatcccctgttgttgacacccccatgcccccaatcccgcatgcctagcagatgcaccttaacccaaccactctgggtcagttccttcctcacacagcaagctgctaagaaggttgaagaattactggacttcagataccacatggcaccattatccctggcaggtttcctgtcactg

SEQ ID NO: 119770 - DNA, 1163 bp, Homo sapiens
cctgtctcaaaagaaaatttttttttaagtagcctagcatggtgatgcatacctgtagtcccaggtactggggaagctgaggtgggagaatcacttgagcccagcagttcaaggctgcagtgatctatgattacaccactgccctccagcctcggcaacagagcaaaacctcatctctaaaaaataaataaaataatatcttaggggaagttgacaaaacattagaaatattgtagggttaggtgcctgttgagccccaggatttattccattattcactcatatcttcatgtatccattcaataaatacttattaaaagcctacaccatgcaagataaaagccacattctactgagtatgcaatgatacacggtatggggtttctgctttatggaaactaaaggcctactagaggaattcaggaattccagtgtgtaccagctcggctgtaacacagtgaggaagagataggaaccatgaactaagcggtgaaaatgtgatgggattcagaggggtcagaggtattggatacagtgagattattttaaacgtttagggtgtacgagcaagatgagtaggagatttctttaggaaacatctccctatgaaataaaagtttatataaaaggaataataattacagttgatatttatgaatacttaatctgggccagggactatacttagtacttttcatgcattgtctgattaggtcctcacaacagccctgtaaggcaggtattgtactttcttatattttatagtttgcactattgtgtgctccatggttatagcaaaagctttgtctgtaaaaggccacagggatagaaggcagagaggaaagtagatgtgtgatgcagtattaattattgagccaataaaatctctctaatttagattttttaggaggaagtcattttacattttacattaatttaatctatattgagagatccttctaagaaaataagttgcattacttcaagtatacatagccatataaattattgaccaattttttttttccaattcatagacattactttccagaaactagataatgaccatttgttatcagcacactgactgcaaaatggatgatgaagaaagcctgggttttttttttttttttttgaaagcttggtagttcttcttgtgaata

SEQ ID NO: 119771 - DNA, 1055 bp, Homo sapiens
attaacatgtattctctattttaaaagggaggtacataaatatagaaccaaataaacagatctcaggaacatttccattcagtaagcaaagttttagaagggaaagagaaattaagttcacatcatttcccaataacacagatgaatgttttccatccaattctgaggacaaagatagcacctcctcgcccatccatgccaacggaggctgaggtagcacagataattgaaattacagtgaagaaggaaaggggttgattgatttgcatgccatctcttttctttaatagtggaggaattgccaaaaaaggctaaaaatgggcaacaggaaaagggagaaacagtaagaatcttggataatcttccactagataattaagacttaactgggtctgttttgatgtgtgcacatgtttctgtacatggagaaggatgaacccacaaatattataaatgccaatttccgaaggcttttggaaaatgtaacccatagcatatggtgtcaaattaatttggggttttacttgtttcagtctgatttgggcacattgaattatgagataatagtttggcatccatgtttgctgagtgcttgttgtaagtttctcaatttcacaaaaattctctgaggttagaggacgcgtcgtgaccctcgtttggcaggtgaggaggtagcggcacagagccgatccgtggctcgcctgagctccggcaggaactcctgggcggagctgctgagacccaggtctgcagactgtcactctggcttcactatttctggccttcctttgagcacttttcttacttttgttctgtttcatgcacttaatgcacctgtttcatcatgctgcctgtcacagttaaaggaatttaaaacagaatggatcgtatttgacagtaaggagctgtacagctgaattccatcaagacaatgtgcttgtagccccaacggcattaaaactttcaaatgatgctttatcacaacttcctctgggctgcacgtgacaaaggggtgcttaaccaggagggacatctctctttgcttgtaggggcag

SEQ ID NO: 119772 - DNA, 1559 bp, Homo sapiens
aggctggagtgcaatggcaccgtctcagctcactgcaacctccgcctcccgggttcaagtgattctcctgcctcagcctcccgagtagctgggattacaggtgcctaccatcacacccacctaatttttgtatttttggtaaagatggggtttcaccatgttgcccaggctggtctcgaacttccgacctcagatgatctgcccacttcagcctcccaaaagtgctgggattacaggcgtgagccactgtgcctggccccactttaattttttaatagtgcttgagaagatgtttctgctaaatactatgcctctggattaaacctcaaatacttcaaaatgaaaagtttgatttcggtcacagatttttagtaaatactttttagggacaagaaaactacaaagtgctttgaaaaacaaaacaagctcaattttttatttgtttaacatatgtagaaaataaaattaatacacgtatcttttccaaattaacacagtatgaaaccaaccactactaattcatcaaaagacacaatttagatcaagtttaggcttggttaggacgctggacgctgagtaaatggtagctctgaggctgaaaaaaaacccctgagtcactctggtacacattctgatgtcagcatccccaccccaccccaacccttattcccgccccgcccccggccccgccccccccccccccccccccccgcgaaaagaagtctctagctctgaaaattggcttgttataactttacaaatgtagttgccaaattgccattgacatcacatttttctttttggcttttagtagctagatagtaatactataaaggaactctctgctttttctattttgtcctttttaaattcttggaggcccttcataacatggaacacaggatgggcaaacgtgcttcttatagtgtaggttagatttagcaccttttgacaaagggccttgtttcctgtgcagtttaaatttagatccactgagaatctgagaaattcagtaatgaaagggtaactttggagtttcctcttttggaagctttccttattaaattctattaatgactctgttagacttgattcccatcttacacaagagattccagaatagcaacttgaattgcttcttagtccctcttacgaagtcactccttcatttggcattgatcgagtacctcccgtgtactggctgacggggcttatatacagagccactaccttatttttcattctgttattttaagagtttcttgatagtccatctacttaagaagtgttgctattaaatttcagtctatctcataaatattattctgagatcctcctggctggatttataggtataaatcattcttggataaaatatacaatataaacagtaagtggaccagttatctgattatacgtgctctgagtctacagaaagacaatatcttggtatgtttcaggagacttgtagagatgaggtgtaggacttctcatttctaattaaaactaattaaaatttactgtctacaagggagatggattgaacatcacctttacct

SEQ ID NO: 119773 - DNA, 1073 bp, Homo sapiens
tactaaatggaatcttcagacaatcttttggtcttcttgtaggcagtggttcagcttttttacctactaaaattttggacagggttgttaacaggcaatacagtttaaaatgaactgttttaagttttcctttctgactttttcatactcctacattaatgcaataggattgaaggctacaacaatgataattgcaatatgctgaaataatgaactacagtaaatagctatagtgaatgtatgcccatagaaaagaatggaaaacaaatggcttttgattaaaggtacttattgtaacagatttcaaggtgaaattgttagttcagaaaagatggtagatagagtctttaaaaatactgtcactgggatgcgtgttcttctataatgctccctccatcccccacccgaagaaacacacactcctccctcctctgcatgtaaagcagtagttttgacaaataaaaccaaacagtaaaacctgacactggtgattggaccgtgcgtccctctggtttgtggatgaggagcatatctccgtgatagaataaccacgcttcatgctaactcccggccacatcgctgcatcctcttcatacataatttgcatcatggggtgtttctgcatatgttgtgcattttgatgttatttttagctacaatttttaaaacaataacatttttttaaatagactaatcaagaaagcgcctccagagtcaagaaaacaagtgctggggatgtgtgggtgggggtctgtctccccgcccagggcatttccctttgctgctgttgttactactccttccattactttttgtgactttagctttttgaaatttccattcctttgttttcccttgtgcatcaggatgtggctgttgaagtcatttatgttatgcgaggctgcaccacagtcatttaatgcaaacactggcttttgtgtaaggcactgactattctaccctcagcgaggaagacgttattggaaacttgagttatgagatggaaagaacattaatcctttcattgaaaacattagtcttttacatggattctctgtaatagcttgaagaga

SEQ ID NO: 119774 - DNA, 1043 bp, Homo sapiens
gatacaagaaattcaagttttgttagttttaatcggacatcataagacttttaaaatcatgtaaatgtacatccctaattgcttgcaagtggtgcaaggtgacaagaggagccacctttgtgggaggagtaggtggcaacctctgatgacttcaggacagtgactctccaccttggctgcatagtagaatcacttggggagctttccaaaattctattgcctgagccataccccagaccagttaagtaaggatctctgtgggtggaacccagacattagtactttctaaatctctctgggtggtcacaatgtgtagccaagttggagaactgatgctttagggggatttaaaagtcttcactccttgcattggctgaattgatgatagccagaattctacaacctacactgtattctttttgcttaagataaacagagtcttaggtatcatgccaaaagtctattatttctcttggttatacacgatttggcatgaattagtttattaagttttctccaaagagccaatcttaatgggtgggtgtcgggcttggaaagagaacagaggtctgtggatatctgaagacaggggctgttcactagaggggcacaaacacagaggcaaatgcaacccaaagtcagcaatttcaagctactgttgcttttgaaaattagttcttgcaaaagcaccacctcaagaggtggttggcttccctgaaagctcagcatcatggctctggtgggtcatcattcatgaaaacttgctgcatctttaaaatgtgggatgaggaaaaacatttaaatagtggctgaatacagtcatagtgtaaccaaaagccagaaaattaatttttaaaataatgtatatttttaaagttttgttttttcaagagaaaagactaaaatcacttcatactcaaaatctctcttacctcttttcaacaattggtgctgagacaatggaaaaagtcacctgggacacatgccagagaaagaagttgaacccttacctcacaccatatacaaaaatgaactaaaaatgg

SEQ ID NO: 119775 - DNA, 1047 bp, Homo sapiens
atcaatgatagactggataaagaaaatgtggtaaatatacaccatggaatactatgcagccataaaaaagaatgagctcatgtcctttacagggacatggatgaagctggaagcctcattctcagcaaactaacacaggaacagaaaaccaaacaccgcatgttctcactcatagtaggagttgaataatgagaacacatggacacagggaggggaacatcacacaccagggcctatcggtgagtggggggcaaggggagggagagaattaggacaaatacctaatgcatgaggggcttaaaacctagatgatgggttgataggtgcagcaaaccaccatggcacatgtatacctatgtaacaaacctgcatgttctgcacatgtatcccagaacttaaagtaaaatttaaaaatattttaaaaataaagaattcttccagtttccttatggcataataatggaaacagaataataacatgacaaccctcctttccttgttttaaggaaaagtaagttgttaggcctgtgaacaatggcagaactgaaatggagtcttcactcaagccttgtgtgtgattgtgtgtatgcatgtgtgcatgcgtgcatatgtgcacactcacgcacatgcacaaacctacacatttgagtgcaccagtttaaaataagagaaaaaagtgacatgaaactcacttcccaatttctaccatcattaataatacattttaccaattctgatttgttctactattgtgtcaaggctagttaatgtgccccatgcattggcagacaagatgatattatgtggaaattgtgtcttgtctattataagaacctgaatatttaagtatgggagatttttgcctgatattcttcagtcttgtcactcactactgattaagctttgtaatctatatatgggcattagatgaatccataaatgaatgaattggtagtttcctcaatgttttttttttttttttttttttatcataatgaagatatttcatgaccttttaccagtcttatcacatcttggaaagaatta

SEQ ID NO: 119776 - DNA, 1046 bp, Homo sapiens
tgtgtgcagggaacagtcagtactccattggtggtaacttgtcatgaggccaggagcaaaccatagagggtctcataggccatgttaaggagtacagactcctcagctcggtggaggtcagaccacattctccagtagcctgaggatttctcagtctcccaacctctgccctgtgaacctctgtggggctgccttcagaagtacttggtggtgatggatgaggagtaggaggaaccgataaaactagatagtgtaagtagcctcaattttatttatcttgtgtattagatttctatataagattttgtttgaaggcagagttctggcttttaaaaaacacatttgaaaatcattgctgttggcaatgaggaatcataaaaaattattatagttggtgacgattagcttagtgttttaaaaatcaatattctgcattcaaagcaataaaccttctttctccatttctgaacctcacctcacagtactttgcacatactaagcattcaatgaaatgttcagtgggaattgttttagggctatgacttagggatattttcattatactactgtcataagggtccacttaaatagaatgttgcccagtaactcaaaaggaatttgtagaaatataaactatataacttgccttttattctcacttttctttgtgtgcgattggactgtaataattattttttctgagttttcttgtctatttctgagacatcaggttttataatttgatgctttggacctggttgacaattccgattctgtatgtaggattgaactttgtgggaaatagcagttaattgtattttttaatgcttaaaatgatattctgggcaagttttgtttctttacggtctatagccagaatcctactgtttttcaatttgtttaaatgcaacagcttatacagcatatgtacatgttcagttgaagataaaggatatcattatttttagcctattacaaagaaaaccacattttctcttaaatgtcttgatataaagtaatttgaacacaatttctgcacaaatcat

SEQ ID NO: 119777 - DNA, 1017 bp, Homo sapiens
cattgctgtatttaactttctattttagtaggctgccagtgcacttaaccttccatataaagcttatatgcgtttatgcgttctttcccttattaactttttaaggtttgggatgtcagcctgacctaatgatagaatatgcaaaaatagtcctgataccagcaccctgagcccacctaataagggacctttttcatactgtttacttatttctgagtaacagaaagtctgatggtttggtgctggctggttaaattcaacacatggtaagcttgcctgttagtgaagaaggttgagatttgggctgccggtatgttttcttctttcaggcaaggactgagtggcttccccatgtgtgcctaggtgtccagctgaccacagctgagagggataagcagggattgtgtccagctgagtttgggcccctcactcagtggcctacgttcctcggagggtgtgtgtaattagctgctgagtagtagaaggcagtagccatgatcccagttggaaaatagaagtagagctaaagctaaaaaaaaaaaaaaaaaggaaacaggagagctgattgcaggaggaggaggaggtgggctcttgctattttctagagcctgaaccaaccatgcaaagtagaatagcaggtgttgcagctctttcccccaggaggactcctgagcctcgtaagaaggtcagagagctggttgaatgttggtgcaggaagcacgtcaggaacagcttaacactggtttaattttcatttcccctgtgttattttacacatgaggggagtctgaggctgagcgccgtggagaggtctttgtggggagcagttcacgtcagatccaggcctggtcacctcctggcctcatcccattcacctgagtgacttgtcacccttttcaagtccttttccttctttgctttttgcttctccaagtgtgagattggcaatgtgatcattatatgaaaaacatttaaaattaaaaacgattctgtgcaaatatgaaatagataccagtt

SEQ ID NO: 119778 - DNA, 1050 bp, Homo sapiens
actgtatttgtgtgaatgaacaaatgactgaatgagaattttagaagcccagaccaaaatcattaaatagacctaaagacattagggtcaacacaaataagtaaaaatgatgagccatggttgacacagaatcaaggccatggctaagataaattcacagatgaatagctaatgccttcttgtagccattgcacttaattcctgatgatccatgcctgcatggtggtattggttaatgcaaatgaataattgttattacgtattgggaattatttcctagtgggaaaatatcaagtcatcagttatgagttaagcagctactgcttgcgaggctcacaactaaattttggggaaaatgatgagaggaaggaaaatgtgagttggagggtgaaaaggtaagccctgaaagtacaagccaaggtcactgtcttcaagaggctcttgtctcattaagtggcaaggagtgagtaaaagtgacattaaggcaattaaaagatactgagggcagtaaatataaagcctagcacaaggcattgttagacatgattcattaccaaatggtaataatagagaaaataaaagctattgtattagtcaggataggataagcttttgttgcagaaaggtcaaccctaaactttcagtagcttagcaaaataaaagtttatttctcattcatacagtgaccgctgtggatgcagtatctctccaggacaactgtcctccatgcataactccatgatgcagtctgctttgatctttttatccagccatctaggggcctctttcatgatcactggaagagagaaaaattggaaaattgcaccagcaattcaatgcttcaaagctttggcctagaagggacacttgtcacctgctatgtcctaagcatggcttttagctttttgtataactcccaacgtcccagtcctctcacacagcacacagtaggtgctcgataacgtgtagggtaaaagaatgaatgaacttaagaatgcattgtgacttgctcctgatggtgttgtagcagtaatatacctggcagccccc

SEQ ID NO: 119779 - DNA, 1046 bp, Homo sapiens
attctttgtgtgtatacccagagcttggtcatgtccccattcctctctctcaagattagatctgctgtcaaaacctagaaacaagtctttactgaactgaactctttattagcctttgattgccagataactggacttgggaaggggagtttgggaaaaagggttaactatattaaatttttttggtgctctcttatatgggctgggatgaagcatttagacagtgggagaagtataggagaggcagacagatgccagaaaaaaaaaactttggttgtttccaggtaccgaaaaagaaagttcatttgtaagtcacccacctcctcatgatttcttcacctcctgtcccctgctcatggtactagagtttgtctatattataagctctatagctctttttgccttcctgcaaaactaagcactatttataacactgtttctctgagaaaatgtgtttggagtttcaaataaatgacttacaaatgaactttctgtatacaactcattcatacattgagaactgcctgtaccgggcatgtaacctggagataacttttatctctgctttatcaatatgggcttgtcaggttgacttatgtgtacttctctctgccttcgttttgatgatagcctctctcttaaaatttaatactctctttatgtttggagaaacattccctttggcagcgtttcaaatattcttgcgaattggaatagtgattttattttatctcccaatgtatctttaataggattcatggctatgaaaatcttttgcacagtccgcctataaattgtagaaaaattgagaactatttaaaagaagggggcgcagaaataatccttttctagtattactctgggttgtcagatatctttgcaatataattactgtgttggtttttaaaggttaaaagagctctgacgtttataattctcttttgtgtgtgtgttctacacatataaggggaaaatctaacacatggaaggaaaatactttagttaacataaaggtcctgagcattttatggtttttcaatacagag

SEQ ID NO: 119780 - DNA, 1104 bp, Homo sapiens
aaagcctgacagggaccttaacaggatgtgtagtgatgatgggtggaggaaactgaggggtcattgtaggcacagtggcagcagggacaaaagcatgaggaagggacacagatggcctgcatgggatatgttggaggggccagcggagttatatgtgcattgctggagattggtatgaaagagaatttgacagctgtggggataacagagctaaaggatcactaagacctggcggaggaatgtgaagttaatgcaggaggtgacacagagttcccagttcttgtttatggaaggggctcagtgagtttgtgtgtatatatctgaaaccggtgacaatgtatgtagggtggccagagttgggagaaacaggggacaggcgagtcaggaattaaagataggtaatgggagcctattcgtttgagggtgttgggaggatggcaggaaaggaaaagggggcaacatattcaaaggtatttgaagggataaaataatataacttagtaattgttggatttggagaatggagaggaaggagtcaaagatgatttctgggtcatatttactggacaggtactattggtgtccataactgaaataatccattcagcagatatttgcatgcctacatcgaggaataatgtattctaggtgaggaaggaggattaaaaagaatgtcaacacagcatctgcttacgctggaatgtgggccagaaagcctgtggcttaggctagactgaatgaatggccaggtcagcctacttaaggagtccctgccctccacataaaaagaagggaaagattgccctactctgttcctagcagtagccatgaacagtgttagaagatctttcaaactgacacttctgtcctcttgataaaaatgtcaggtctactgttggaccatactcataaaaactctgttaaatcaccattctacttaggaaaaggccattcatgccccacttaactctgccaagatagaggatgctgtgttcccaaggtaccaaaactgaaagttaaaatgccataaaagtatactgaactttatagaagaaaaaacagaaaaagtgtatgcatgcttaaacctcaaactcttgatcttca

SEQ ID NO: 119781 - DNA, 1074 bp, Homo sapiens
tggagtgcaatggcacgatctcggctcactgcaacctctgcctcccaggttcaagcaatccttttgcctcagcttcccaagtagctgggactacaggtgtgcgccactgcacctggctaatttttgtatttttagtagagatggggtttcactatgttggctaggctggtctcgaactcctggcctcaggtgatccaccctcctcggcctcccaaagggctgggattgcaggcatgagccaccgtgcccggccaaaccacaagattttatagtaaatattgcctgtgagtaaaccttgaataacaacattaaagcagaagactgctatcttgtgtcatttgataatcctaatttagggaggtctgggcagagaaaagcggggtgtgtctgtggtctggggacaagagtaatgtaagtagcatgccacatgatgaagactgaaacggagacagtgaagcacggtaaatctttactgagtgtgggctggtgtgctgaagttccctttatgcatcagcccatctgtctcattagcttctctcttaatcacaggctccatgaagtgtctacttgtctttttttagctttttatgtcaatctcctataaaagcaaaaggaagtcaactggcctttatgctgtttgtgtatactccatgcatgctcggggtggggccagctgtatttataaatgcatgctaacatgggggttactctgtgtgcataagagcttatttgtatgtgcattcatgaatatgtgtacatttgggcagatacacaaagacacaacacatatgtgcctctgctgtatgctctcttacatggaaaagacacattgacattaattagaaaaggtgatatgaaacagtgaaagtaaaattcctttcggcagtatttactattgtaattaaagtgcatgatgtaacattatatgtgcaggagaatttgcttattcatcctttagaacaatagtaggagttacatattaacaggtttaagtgtcaataagtgtctgaatacagattctctattgtgtgcagttcttgtaataaggcagtgtattttccttgtgtctttgct

SEQ ID NO: 119782 - DNA, 1041 bp, Homo sapiens
cggcttcagcctctgcctttcactggttaccctgctatgagcttgtgtatgtagacgctgcattcgttttggccctaatttctggtctaatttgaacagctctgtatttctcagcagaagaggaatatctgaattcctaattaagacatgttagcttaagaatacctccttaatgtgtcataaatcattcccctgtgactatgaggatgaataagaaaacaaaacttggatttatacacacatgtatattatttcaacaaaattaataagttcatagagggagagaggacaacaaatgtgttagcaaatataggtcaggaaaagagttcataatgttctgccagattctgatgaggcacctcatgagtgtaggtagaaggcctcaagtaacggtagtgggaatggtaataacactaccatatggaacatttggtatttgaatagcacttagcttcctcccaaactacaaaatcaataaagactcagagaggaagaaaggattctcttgctgtggatcactggctggtgtgcagaaatgcagacgtgttggttgtcaagggcttaccagaataaatttctctagggagacaggagagtgggaaatacttaaccatattaattgtgctgtgacctcagatctgtggtcagcagtttttggttgtttccatatactgcacatggttgcccacaccatttttgcattcatgtacaagacctatctgcaagaccaggcagaatcattgttgaaatcttagttcgcaaagtcccatggggactttggggtgtcttaggattttgccagcacaaagttaaagcacaacttttgaattgtgagaaactgagacaaggtctttaattttaatcccattcagtcattcctcactcatttattaatttagcaaaggcctttttaggggcagctatgtcccagtatagggctgggcattgaagataatggaggaaaacaagattgacaaaagactggccctaatggagtttacagttctcagggagatacagtcaacaccatcataactggtt

SEQ ID NO: 119783 - DNA, 1088 bp, Homo sapiens
aacaatataattctgaacatctttcatagcaacagatatttttctaccgtatagttattaatgattagtataccattgagtaaacattctaaaatttatttaatttatatcccttctaactggacagttagccgtttctaatttttttgcctttttattttcttgagatagggtctcactctgtcacccaggctggagtgcagtggcatgattttggctcattgcagcttccacctccaaggctcaagtgatcctcccacctcagcctcccaagtattaatagctgggactacaggtgcacatcaccatgcctggctaacttttgtattttttttttttatatagtgatgaggttttgccatgttgcccaggctggtctcaaactcgtgacctcaagcagtcttcccacctcagcctcccaaagtgttgggattacaggcgtgatccaccacacccagacattttattgctttcatgatgccaaaaatattcttatagctctgtattagttcccattacaaattatttccttaggctaatttcttagcagcatactggtaaatgtaagagttttcaagttttacggcttttggtaacttgttgccaaattactttcagtaaagtcataccagtttgtatttccagaggcagtttatgagagcgtctacttaatacagttttccaatgctgagaattttgaaaacaaaaagagttttttgctgactgattatgcaaaatggtgtttccatgtattttgggttttgggggtggggggggtcatttgtaagtcaagtaaattgtactgttttgtagaaccttcctccattagacagcagcatccttgaaacttaccagatttcgacatttcagaaataatattaaatccagaaggagtagaagggtcctagggaattttaagttcttcctttctggccaagtatttttagacaactatgaaatcactagatacaatcatttttcagtggaaagcataatttttcatttcttaaaaagagcaaaaaggtatttaataaaaaaattttattagatatgtatctgaagttatactgctcattagtttaaaaata

SEQ ID NO: 119784 - DNA, 1101 bp, Homo sapiens
actgcagtggtgacacttggccctctccttccgtccgcctcttgttccagcaagggcatgcctggtcttggatgatccaggagagatttgcagggcgttgctgcttctggtgcacctcctgaatgcccttgctggtggctccagccctggtagatggaatccaaacagaagaactcacagaagcttagctagcctagaaaggaaccagcgtggccatcaggacatttattagctgttaatctaaccactaccaaatgcattaacacattttttttgacaactttttctcttttatttggctgttgcttagttcagttttgcttggagaagttgtggcaatcctgaattcagtttgtgtgaaaaagcaagcaccttcaagcccagtgttggagaagtatcttctcccaggtctctattcagttttgactaaaggaggtttggcgagcagaaaggtattaccgagtggattcttctcaaattctcatctaagtgaaggaaaaaagcccagtttgctgaagccatgttaagggcacattaggcttttaatatgtgcttcatggagaccttactagattttcctctgcgtagttctttccatctgatgggagcgagggctgtttttgggttgcagaaggcaagagccaggttgtcagctacagaagagaaaggtgccattgtctgcataattgactttgagcctttgtctaaaaggatgtcaggtggaggagtaatgaggggcgagatttttaaaaaattatagagtacaggattttagcaaaatgccagatgttggcatttctgttttggaggtctttagtggtccatgtaaactatttccttgcaagtaaccatccatggtaggaaaacagaaaaaaatgattctaaaagagcatttgtctagttagaaactgtgtcacttgtatcgtttaccgtgaggcatccttgagaggtacatgatttccaaacagccacctaaatcataggtactgcttttggaacagatgtaaataggaaaagcgccagtccagtacccccactaaagaccatcgttagaaagctctcgcagtgctttccagcttagaggagtgtagttcccttcag

SEQ ID NO: 119785 - DNA, 1014 bp, Homo sapiens
cactcacatagatgctagcaggcctcagtgatatgccatgtgggcccttccacaggactgcatcacagcctggcagtcagcctcccccaggtgagtaacccagaagaggatgcaagatcccaagatggaagccaccatcttcatgtaacccagtcttggaaatgatctcccattacctttgccacagtctgtttgctagaattgagtcactaaatccagtccacactcaagaaggctttacaagggcatgaattccaagaggtgggatcactggaagccatcctgcaggctgcttataacagtaacttgtgctttaatttatatccccttatggtctattcctgacaatcagaccaaatgagcccttaaaatgtaaggcagatcatgatactactgcattaaaaattatctctggtcttcccattttacttaaaagtcggtatctttacaatggcctacaaggcctttcatgcttataaaattatttttctatattttgtaaaataatatatatgtataataaatgctatatatgtatatttgtataaacacatgtttatatgtttagttatatatctagaatttattttccatatggtgtaagatagcaatctctttcgaaacgaagagccaggtttcccagcactatttattgattacaatacccttttcctgggccaggtgcggtggctcacatctgtaatcccagcactttgggaggtcaaagcgggtgaatcacgaggtcaggagttcaagaccagcctggccaacatggtgaaatcccgtctccactaaaaatacaaaaattagctgggtgtggtggtgggcacctatgatcctagctacttgggagcctgaggcaggagaattgcttgaaaccagaaggcagaggttgcagtgagctgagatcactccactgcactccagcctgggtgaaagagcaaaactctgtctcaaaaaaaaaaaaaaaaaaaaaaaaccaaaacaaaataaacctcttttttccctgagttg

SEQ ID NO: 119786 - DNA, 1013 bp, Homo sapiens
atgtgctttaactttttgaaaaggcagataatatagcaatcacattaaatatttatctttaaaagaaattattttaaaaattactcttaatattaccacattatgaactcaataggagatcctacagttcctttaactttaacaacagtacatttgttaatattcattaaagttaaagaagcttactattacaacagaatgaagtaatacttgctggaaaacaccaatattttacttatctttatctaatccccccgtttaactgtagtgatacaatacttaattttaaaagaggaatggtttgaatgtacagacttttacatgtgttcttccattgagttctttcttgtagtctaacccaatagttatcacacttcagtgtacatgaaaagtgcagtaaaggattgtgcagtatacataaaatcctgtgtggagtgtcttgtgggaaagccaaaggattttcaaagttaattttgactatatatgacttttgcttaacttttgaacttaaccgcccacataaaaactcactccactatatttcccttctctttgcctccctacttctgtcccccctttctcccttttttccttcctcccttgtattcttccatccatccatccatccatccatccatccatccatccacccacccacctatccatctatctatcctcccatccacctatccacccacccatatatccatccatccatccatccatccatccatccatccatccacccactaactcatccatccatccatccacccacccatccatccatctattcatccttccacccatccgtccacccacccacccatccattcatctatccttccatccatctattcatccatccacccatccattcatccatctatctatttgtccatccatccaccctcccacctatccatccatctattcatccatccatccatcttttcttccatcactcctttctttttttttttttgagatggagtttcactcttgttgcccag

SEQ ID NO: 119787 - DNA, 1043 bp, Homo sapiens
ctttggtaaataactatttttttttttaatggccagatgggagaaagcaaaagatgccttttcgtggtgttttggaaacctagatctcatcaactccctggttggttttggcggtcaaggctttttatgccagagcaactgtgagccaggtttctgaggttcttcctgacccatgttggtagcctcttaaaaataactgtcattccaagttcagctaaaatatataactcaacaaataaatacatataaagcatatgaatagaagcgggaaagtgaggattaacagactggagagtaagagtcttgccatgtaaaatactataaaacactcttaggaagtctcttgcttatgttattacttgtacagtaaatgtggagacctggatctcttcctcatggtcccttatttcttgttttcctgctgggaggtttcaagtagctgatcccttgcacatgtactttaaaacttcaattatatttgtcactggcttatcatgggcaatgtatgtgaatgtgactaagggtcctgataaattaaatgccacttttacatgttcctttctttttcttctattagtgttctttaggactttgaatgggaaatcctcaaacatgtaagtctatgtggcttcagaaaaccccagagaggccaggcgcggtggctcacacctgtaatcccagcactttgggaggccgaggcggacagatcacctgaggtcaggagttcgagacaagcctggccatcatggtgaaactgcatctttactaaaaatacaaaaattagctgggtgtggtggtgcacacctgtaatcccagctacttgggaggctgaggcacgagaatcacttgaacctgggaggtggaggttgcagtgagctgagattgcatcactgcactccagcctgggtgacagagtgagactccatctcaaaaaaaaaaagttctccccagtggcctctactgaattatccaagtgcttgggtagggggtgatgctgaggcctgggaatctttaataagaaagaagaagggaaattccttatg

SEQ ID NO: 119788 - DNA, 1069 bp, Homo sapiens
taggaaaatgaggaagttgggttatataagtggttttcaaatgtggcttcagaaaaccctggagagccactgcactccagcctgggcgacagagtgagacaggcctctgtggaattagccaagggtttgggtaaggggtggggctgagacctgagaatctttatgttacaacagctattaggcaatgtcagttcacaggaccactaaatcaaacaatccttcagaccacttccgactctcaagtttcaataagtccctagaaaacatcatccttggtccacaggaagcaatccaataaggaacttggtctcccataaagaatccaataaagaaaactttaaaatgagaggagggttatggatttgatcatctccaaggacccctgtcaagcaagtctaagatctttccaaaggagatctgagaaatatgtctgtatcccaagaaggtttgacaatagtccctgaagtttgggggatgacttctagatatccctgtgccttcaagcgtgatcatgggctggatttgttggccccatggtctgcctctgagtcacagacaaatgatgaaaaaaagaacaattttctgtcagcatgccagaccaagggaggggccaggagaagaaccgtgaaccatgaactgtgccactgctggaggcactgacagctccttggcaccagatgtgtgacctcaacccctgcagcttgggcacagataatatctcagggcaggggatgaggaatagaggaagaagggaaagttgcagggatcctggagtgttaatacccatggtggcggcagagcaatttgccaggaagaaaactctctggttaaccctccggcactagttgccaagcatgtttgtactagaatggagttcaaagttacaaacagagcactgtctgtttttaaggactcatatgaaaggtttgcttgtcctaagcctgaatccaagagtctgtctgtcataaacactttcaggtagcccaaaaatcccttcaatgtgatctccagaataggggaagacaaaggactcaggtcttcagctgtctgatgaggagtgagaaatttt

SEQ ID NO: 119789 - DNA, 1194 bp, Homo sapiens
tttaatctttccctgaaggtacttcagagtcttggagtgctttagggccatgatgagcatcaattatgttctcacggtgggtgtgcagaaggaggtagttaatagagttctgtttgatcaagtcctgggtgactggacatgtgttctgttatgattagcagttcagtgtccaggttttggaactgatgcttagtattaaattctcaggcaggagagaatggaatagagattgacctctttggctttgagaggctgaaagttgatgacgataattcacatgtacatggtatatatagcactttttagcttccaaagccctttcacataccttgtcttccattgcttgtttcttgtgatgttctggaaaggaagcaaggccgctggtatcccatttttacagatgaggacagtggagctcaggaagcttgagggacttgcctaagctcatacagtagatcaatggcggagaccactggacttcaaattcagtgctctttttagtatttcaaaggatactaaacatttgctcacatctctgatgttctttgtgctgtatgtgtagtaactcatttaatcctcacagtggccctgttagtaggtagatatcagttcttctggtactattacgattctcatcttcagagctgaggccactgagaggcacagagaagttagggcatgcactagtgagtggcggagctgaaatctgaacttagagctttggctccagagcccatgcactccaccattatgctacatggctactcagtgtacagatacactgagcttaagtagaggagaaagcttatctatccatatcttcccatctgcaaagacctctgcctgtatgggaggtctgggctcgttctgactaaggttttgaacccagatctgccaatttgagatcttgggcccattacttagcctgagcttcagtttccacatctctaaagtgaaaatatagaacatggaatgtacctgtaagaacacaatggaatacaggtaaagtgcccagcacactgcttattccttagccttcatgttttagaaagtggttgctattgtttttgttgttggtggtggcggtagtggtcttcttcttattattatttatatatttacaatggccaaaattatatgaaatgttttccaaaaattaggtatttgtacccttcatatgaatgtgtgtgttaa

SEQ ID NO: 119790 - DNA, 1037 bp, Homo sapiens
accgaccggagtgtgggaagtacttcttgttggtaagattttcaagtgctggggaagagatgtgttgaaaggacatttactttcatcagcttagagcatctgttttttatactttaaaaagaagcaacacctcaaattatggcagtccctgggcaagtaagcacttgagattttgatctgtacagattcttagagggagcgcctcgcaggagctgttagtagtgatttgtagcacttaactgattctgtagaccgacagtcaatcttggggggaaagggggttcagaggcaatgatagttaaggaactgctccgtaaaacagcaaataagccattgctcttgcacccgagtagaaatggaaactgtacttagcaggctctggagaccaaattagataggaaatgaaaataaattccatgttttttatttttaactcagtgcgcacctccaaaacattcgtacagtgtgggctccatgacgtgttttgcctgctctcttatacagatttaagtttttaaatggtagttagagacactcaacataaaagctgctgctttaaccgttgttgttattgctttgtttttttgagatggaatctcgctcttgttgcctgcactggagtgcagtggtgtgatctcagctcactgcaacctccaccccccaggttcaagcaattctcctggctcaggctcccgggtagctgggattacaggcgtgcgccatcacacccagctagttttgtatttttagtagagacggggtttcactatgttggccagattggtctcgaactcctgacctcaggtgatccacccgcctcggcctcccaaagtgccgggattacagtcgtgagccactgtgcccaacccactttaaccatttttaaatatgcatttcagtggcattaagtacattcaccatagatgtactatttattataggcacagtttcctaaactgagtaaagaaaggaaacatttacccccacagcccagtatagtcattgttaaaattaagatgttagtctccaagtctttt

SEQ ID NO: 119791 - DNA, 1094 bp, Homo sapiens
ccctggaagatgggagtggtgaagggtgagatgagaatctgaggatgagcactgtaaaggaagagaatggccaggtgaaggctctgaggccagaaggagcctttgaattgatctagaggctgcaggagcttggattttacgctaaatgtgatgggaaactctgttagttttccagggctgctctaataaattaccagaaacttggtgggttaaaacaacaggaatttgttctctcaaagttctggagggcagacgtctgaaatcaggtgtcagccgggccacactccctcccgaagctctgttgggagaacctttccttgccgctgtcatcctctggtggttccaggcgttccttggcttgtggcagcgtcactccagtctctgcctctgttttcacatggccttctcctctgtgtctgtaccaggtcctctcctgtctcttagaagaacagtggtcattggatttaggacccacccgggaaatccatgacatttatgtcaggggctggaaaaggaaggacaggtgggatgtgaccatccggagagcctatctcagctgtcatgggttgtcacaaaggccattgtgtggttaatttttatcttcttattcttgtttcctctttaatctttcattctaagccctatagccctgactggcagattcgctgtcgggtttttctagttgtagatgacatgctttttcttaaagccatcttcatttattaatctacattcgtttttaattttaatgcaccaatcaataattatttcacttgacagtttttgacagcatgctgcttgcgacatttagctgtttagcatgaattcaaaaggtgatctatcaatttgcacaaatgaaataaagttgctctttcttcctgtgctttgggggaatgtataaaaaaatgtatgtttatccttccctggagaatttttgatgtagaaatactgaatagttttctatataagaagacagaggactaaagagctttaaaatttgttgtgcttattttgcttgtatcataaattcacgtgaaaggccagatttctcttaattgcgttgatattgtggagatgaatcattcaacaaatgt

SEQ ID NO: 119792 - DNA, 1094 bp, Homo sapiens
aagaagctactttctagggcttcatcttaatatggtgattgagttctatattatggccaaaaggaaaattatgtgggtattgtggggaggaggagtcagagggctaggggcaaagcgggcagagaaatatcagctgcctttatttagcaaatatttaccagtcgttcctgcccatatgcacttgttccttgtgtacttggatctgaattgattaaaaaggtctgtatgtattgagtcttttcccttaggagcgcttaagctttcttttgatgctttttttctcttcctttaaaatggtgcaggaaaatgttggaataaacatagtcagcttgtgaaaggatgattctctcccttatctgggcataaatattgttgaatgtgagaatgtgggagtagctactgggccaaatatgcacaatgagtgcaagtgattattgaccttactgatgagaggaaggaagagaaatactttaaaactattttcacagggcatttcaaccaagatgtttttctaaattcggtttctgattcaaaaactggatttagctctttttcttgtttgtttcatctgaacaaatttaccctgaattgaatgggagagtgtttcttaatcccccatgtctttagcagtgagtcatttccatgttgttgagacattttctagcctttattgctgtgtgtagttcatgcttttctctggatgttttgactccttaaggaactcgcaataacaaattaacaatcacactcctctggaatgaaaacacgcagtatcggagtaataaatagcagttctcgaaacctaaataaacacagaaaactcagctctcgtacttaagaaggctctagaggagtccagtgtccaacattacaagcaagacacaccatttaaagccataggaagttaacatactttcattttaattttccaagggatcatgttataaaaccatatagccacttccattcttcaaaacttaataaacggttagttttagtcatctgacctgccttctctcaaatggatcataatttagtttaacaggtttgacattaaaataagttgtgtttctctgggaaactcatgttagcct

SEQ ID NO: 119793 - DNA, 1234 bp, Homo sapiens
accaccatgcctggcctgtttcttttttttttccaagaggtcagttctcagtctgttgtccgaactggagtgcagtggcatgatcacagctttactgcagccttgaacccttgggctcaagtgatcctcctacctcagcctcccgattagctgggactgccgctgtgcaccaccacacccaactaatttttaaaatttttttgtagagacagggtcttgctatgttgccaaagcttgtctcgaactcttggcctcaagccatcctcccgcctcggcctcccaaagtgttgggattacagacatgagctgccgtgcctggctgacttgtggttcttaatagtgtggctcttaaaatagcaaacatttttgggaaccaatgtgagggcacttcataacacaatcaaaaaccattaagtggaatatgttaagataatgtaaccttgttgttgtcccttaatgctttaatgcaggctttcagcaagtagtaatacctggtatggtgggtgtaaaactcagaatgggtcccggcatggcaggaataagagaattctttcatcggttggaaaatatgtttgaataattcactacatttaaaaaataggtaaagaggcttttggttttggttgcaaattgcactcatccatggaagtttttcaagggccatacaattctgtagatggaggtggcaatttaatgcagtcttagctgtttaggatttagaactatgttacttttaatttacttccatgaaattacaaaaacatgtaatgaagctaaaaagatttcaaaagaagcacatctagtcaaacataaaagtacttaataagggcatacatgtagaagtatattagtctttgcacatatttacatatgtatgttttggttgcttaatatttttcaagtgctgcatgcatttgtatgtgtaaatacagtgtgcaccctttatagaactagtgttgggggactcttttatcagctattatgatttggagctttatcaaatggagtgatttttttttgtgtgtgtgtgagatggagtctcactctgttacccagacttgagtggagtggtgccatctcggcttattgcaacctctgcctcctgagttcaagcaattctcctgcctcagcctccaaagtagctggaattacaggcacccattagcacgcctggttaatttttgtattttcagtagagacggggtttcaccatgttggccaggctggtctcaaa

SEQ ID NO: 119794 - DNA, 1052 bp, Homo sapiens
catgtaggaaccagagaggcacgatgctaccctgattcctttcctgttgtagctcttctccggggatagctcttccagtggaaggttgggaacaacttcctagggattgaattttttgaggaaggctggtctcaaagtgtgagttttagctgagtggctctgctgagctggggtggtttggcatatgatatacctcctaaatggcctgtctagatgtattgttgttctggtccaacatgtttttcctctttgaagccaaaatgaacatttgttagtatttgaaatctgctgacatctctgtttttcttaactccctccctgggttctcatggtcctcaggataaagtctagaatccttagcctggctccataggttttgaggaccttccttatctctccagcctcatcactcacatgttgccctgtattcgtcccacgtcggtcccatcgcacttcctccttcaagtgccatactctgttttttgctccagcctttagacatgttgttcttcctccttagaacccagctcctctctctgcactgtctggctacctttccctcattcttgaaatctcagcttagagtctcttcctcacgaagcccttggactagggactatgttatttgctaccttttctgggttcccatagcaccccattcttccccttgtataatacttcacaacccctttcctggcccagcgataggagggactgccctctttccagtatgtggcatctagtgaatgggcaatacatacgggcattccccctgtgatgcttatgttacaaattggatgtgattccatctattaatatggactgtgatgtatataattgtggtgtgtataattgtggtcaggaaccagcatggggtcctgtgaaccacagtggtggaaaaagctatggcacctgtttgttccactggctttgtgctttgtccatcacacagtgagtgaaaaggtgacaaaaatgtgtaagaagcctgtgctaaggagaaagaaaggtccaatgatgaattttctggaaagaaagctgtacgtaatagagtg

SEQ ID NO: 119795 - DNA, 1083 bp, Homo sapiens
gtggagtttaatgtgtgctccagaaactccactgtaggcctgggggatatgtttttcgagttctgtttagctttactgaaggaacagtgaaaccattatatggcctgttaatatttcactcaataccagattaaacaccgagcagcgtgcagttttccaaaagaaatcaaaaccaggcttctttttaaaatgtgcccctgtgcattagaaaattattaaaaaggaatttaatatgtatagaatgtttaatgatcttttgaaaatatggtttcaaatggagtagtcttccaggaccctacagagtgagtatggtgtgctgttggactggtagtttggaggctcagtttctgttgcctgccctgcaacaggatgacttgtgctactcactgtaccttgctgggtctcagttttcctgtctccaaaacacaaggaggttgaaagaaatgatctctcgggactcttctatctctgacattgtacagttccatgaatagattttattgtaattcttgctcccggctcccccaagacctttgcttctgtcaaacatcatttgctgttgtttgactttgttagattttgtatttaattagaatttatattttagctattattatgtcattatttatagagtaagtcataagcggtgcctaaattcatttatcaccccatctatattagtttcatacctgaatacttcctccgctcctttttactgttcttgctaccatgtcccaaacaacatccatttctggaggtggaatgcagtataactggaaagaatctttcagctgattgtgggattattttttgcaagaggagtgcagaagctctgcttttctaagcagtaatatcaagggccatattctgcttttaatttgcaagtagaaatcgttttgatgtcatttggttttacctgcaggtgcaggttttagtctctaggtaattccttttctcttctgcgtcaactttcccaattagtgtgtgcagcattgccttgtctttttggttaattcataagcagttcatacagatgcctcttgattcattgcaattattaatagtttctttaggcagctagtg

SEQ ID NO: 119796 - DNA, 1413 bp, Homo sapiens
aatttgaggattaagttgtggtttttttttttggtgctgagttagttaggatgggctctctgtgtagcccaaaagggctcagaataaaagcagtgacttatttaactttcatcaaagacaagaaggttaagacaggaacaagagggatggagcaaacaactccaggggcagatcgttcttgtctgcaattatttaatgagcatctaatgtatgagacgcattatgccaacaaggccctctagggaatatggagatgatcaatagttcacatttactattctgcatattaacttattgaatcctcattacagtcctttgaggtaggcatcattattttctccattgcacaggcgaggaaactgtggcacagagagggtgaataatttccccaaggtttcccagctgttaagtgatagaatcgtgcttggatcccagtctacactctcagccctgttccttaagccctgtccttaagaagcttacagtcgagtgcataaggcaaggcatggcttggagtaatatttaaagagccatgacacaggtaacacagtctaggaagtcaggatcaaggaagggtccttccttggagccttctcttttgatgcctgcctgtctgttcagtcacatatgagctttctgacacaggctgtcccatgcaggctttgtggtgttttctccctttctttcactcttactcatatctccttgagattcctatgcactttcaataattattaattgaagaaaatgatgacagtggcaatttgcttatccgtttcaggggattggcttaagttggatccaaatgttattcagcatcaagagtctcagcgagatgatgaacttttgactcttaaaagaacttcactgggtcattgctcagcttgcaagatttggcagatatgaactatttgtctctccagtgtgataggtggtggtgtggcgctgaacgcaagctctaagaataaaacgtgcagcaaaaggaggtcacgctttagtcagggtggccataaggaagcttagaactcacatcccctctgcccctgcctcgcccagtctcattttctctccttcactagaacagtgaatgaatctgagctcattcatgtcaagatgatagagaagaaagatcactttctcttagctggcttagggaaggccagattgtctttcttacactgagtgaaaaattactgaggacttttgttttttttttttttggtcttcaaggcaacatctcttgcttttacagacccacggaaatcgagaagaggatgcaagatttactattcgtgccctagcctggcagcttcagcctacatcacagctgtaatcatatgtgatgcatttttatttacagattagtaggctctgactctgacatatgactaaccgggaagctcctccctgtaa

SEQ ID NO: 119797 - DNA, 1060 bp, Homo sapiens
attagttagaagtaagaacattttggctactgttcattactttgaaaagtgctggaaagaagtggaagttattttcctttccagctgggctgtgctcttaaaaatagtgagtgtgtatggatgaaaataatcatgagtaccgagatgtgttgccatgtacccaaggataattggctcacttacctgtttacggattattcacattggagatcatattcatagctccagaatagtttctttctgacatccaatataaacctgggcctccttcttcctactgttacctggcgtgagcttaggaaacccaaactaagtttaaaatcagcctaagcaaatgtgcagatcagctccagtaatcaaagactgaaaatcagtccagcattcactagtttggggatgattttatagtaaccctgctactgattttaaaaaaatttttttttctgtttaatgtggataattggtaattaccggtatttaagaatataattttaatggatagggctaaaaaaatacgttagcagatcgagtcctcaacttcttccgtttctatgcataggttttacctcacaaaaactactacaagcaccaagctccctgatggaaaggtatatggaagattcattcattctttctttcattcatccattcacacattcactcattcatcatacaatggaaaatttttacttaaccatgtgcaaggaattgtggcaaaatgaaaatgagatgtacattcagtatttaaataaagtttagtggaaagtttagtgaatataaatgcacactttacactttttttctgcattttttcctttcttctattccattggactggtatgctaatagctgtgcactttcatcattgtgtttcaagttgcatgttgatagataatatatgccacattaaaattaggctttggctcaattactattcaatccatgcccattttcacctgatactccttgtagttaccagcatgtgtttatcagatgattggctagaatcattggagaaaagaatgacagcggctggctcaaatggggagaccatcctctt

SEQ ID NO: 119798 - DNA, 1044 bp, Homo sapiens
agagattcttagcttccctgcgagatccacaggatacaattagcaaaattagaagaccctattacacccacagaataaaaactaatgccttacagtggctttctccctgcacatcctgtcgtgcatgcacgggaatgtgtgtatgcaaataagttctcctttggcaatctagtagtcacatctcaatgacatttgtgttttataatgcaggctgtttttaatatttaaacatcattgttatatattgcacacagcagtgggtagttacttggttatttttaggcacagctagttactttttcaacagtgttagctgagacatttctgtttgggttttttaggaggctgcagttcctagaagccccccttaagcccacccttcggtttatttgatgggtaaaggtagtttgatacttgagctttttttggagtgaagcttatgtctgaggaaaccaccagagagaagagaaaatcctgcacaggaactcttggaaagggattgcaccataacggctagcgctgtggcatttaatctcctctgattgccctctcactgtgcatgcatcagtcaatattttagcagctccgcaaataaatggacttgaatgccatcttctacataaagcagaggttgaagggctcccctgaacctcctggctgcctgtcagtggtgtaggttttcggtgcacttactccagtcctgatcactcatgtaattagatcaggctgccatggcaacagacagtgttcctcgtccattcaggtgggtttgtcttgtgcctgaactactccaagtgttttatgcacagcatttatgctgcccaagccagacgagagactccactatttcaattgcatcttctttcagtcatttggatgggagacactgaatgaggcttctagctactcaacttttataaaggagaccaacaagctgttcttcctaggtgcagtatgtaaatgcatctccccagacagtgaaaggagcctgacaatcctgctggtgtttattgtgaacagatcaacaagtatttggtacttgtt

SEQ ID NO: 119799 - DNA, 1042 bp, Homo sapiens
tgcatgtgtctttatagcagaatgatttataatcctttgggtctatacccagtaatgggattgctgggtcaaatggtatttctggttctagatccttgaggaatcgccatactgtcttccgcagtggttgaactaatttaccttcccaccaacagcgtaaaagtgttcctgtttctccacagcctcaccagcatctattgtttcctgactttttaataatcaccattctgactagcatgagatggtatctcattgtggttttgattagcttttctctgatgatcagtgatgttgagcttttttcttatgtttcttggccacgtaaatgtcttcttttgagaaaagtctatttcctatttaatcttagattcatgatcttcagaagcccttggatctgggtctctcttgcagaattggaagagaaacactcactaccattatttctgtatttttggcctagtgaggagaactttcagctagcaatcaggaaacctgaaagacccacctcttttattaacatgaaaatgttatccaagtagcattatctcttacttgttttgtgaacttgttgtgaggaatttacaaaaccctttagacaatgtggagttttaacacaatttgaaatcctgaagaaaaaggagccatggaagagacccaaaggcttacattagagggagcaagtgtgctctttcaagtcatgggagggagccactgtggttccaagtaggaaaaactaatctagcatcttcttttaaatgaaaatttctcctatgaaaatctggctttcagcctgatctggaatggtgccagtgagtgggcaggcaaagaaaagacagtgagtggtagctaattaattagtcaatcaaaaagtatttatagttctctaggtatagggcaccatgctggactcagtgggagatgcaaagaagagtaagacccaacctcagcccctgaaaagcttgcagccggtctccttgggaggcgaggtgtacaggtgctgacaggaaagaaagcacaaggcaggtttttaattgggccgtat

SEQ ID NO: 119800 - DNA, 1059 bp, Homo sapiens
cactctggtcaggtgtttgtgtatatcctttgacctttccttgccatcggcttctacttaaataggatgactagagaagatctggggggacaagtttgagctgtgtcatctaacccagtctcttcattctccagctgtgaatctggcttctctttgttcttcactgggttcttagaatatcttctttcctgccatcttgctgtatccccctattctgctggcctcctgaagcaaattccttggtctatccccctggctctgactcattccttaccctgaccttgctgtctgtatttgctttgactaccctatgagtttcctcaacctaattcttaattcctggctgccacctccttgtcaaaacttggctaaatccactttggaatgctaaggcggatgggactgcctgggaagaatttggagaatctgcagctctgctctttcctcattcttgagagccaggctagtggctgagggtatatcgggagacagacagggagagagacagagagagtttggagagaaggcggcatgatcatccgatcatcttgggccccatcagtctccttgggaatgctaacatgtctcctggtatagtctttcttttatttattcttcagtttatcttagaaactgttctgaaagttttaaacccagagacatctctccaacttccttgcatgagctgtattttgaccgccttaggggctgtggcaggatttcagtcttgcttgtggtgattttacatggagtgacatctgagtcgcttttcgactgcattccacaccaatctgtccagccctgcagtttgtgggctgactcctgttgtctttcaacatacggagcactatgagatagtgcgagtttgggtcttgtcagggagtctgattaagccacagtcagagacggcagtcctaagtgtgaaatgtaacaggccttctcaagacagcttcatctgtgagctgctggaggtggctggtgccattctgttgggaatagaggcttgctaacaaagcaaacattttttttttctatcgcaggctaggtctatggtggtaa

SEQ ID NO: 119801 - DNA, 1182 bp, Homo sapiens
gaattagataatgaatggctgcccaaaggaagtgaggtggttatcacaccctggggattcaagagattatctgaggggtaaaggttaataaagaaggataatatcctttgtttgatcaactgttccatactaagttcgttagaattccagactgccttgatggcaaatgctacataaatgataaaactgtgtatgtactaatatttgactagggaattttttattctccatttagttaaatattgaggtcactttgtgtttttaataaaataattatcaacgatctatcattttacactgtgaagctcaatatttgcttgcttagccaccatcaatctgatataaaaagtgtaagagttgcaagtttttctctcatgacctgaatcaaaaagtaatttagaaagaggtcactgtgtcattcaacaaatctttttaaaagccaaacatattttgaccttttatttggatttgctacttgttaattgtttcagcagccttaacttagatcctctttgcagaacatagcttctgtcatctgtacaaagctgtatatgtgaaaattgaaggcaaggagaaggtaattccagctggcattccagtctggatctgctgtcataaattacttagcagagggcatggttcgttactttttatggtcatgttctatatttgtatgtgctggggggtggatcacatgacaaaaccatcatttgatattagtgtttatgtgcaccaaccagtgagggctcgattgaagcttcactgtgcagtacttttaatttgtatatttagctcttaattgaaaatgcaggcacttccataagtactaaaactacaaataatctaaataaattttatataattgtctttaggagaagacaaactgctgtaaaccaagctaattgaaatacactctgccttccagagatttgaaaacaaaattttgaactagctagtcaacattgccagaataataaagaccaaagtttaccattttccattttttagcccctcccctgattagctgatgtctgtttatttaagaggaaagacatttttcaaactaatcaagacagaggaaaaaaacagtctttttttttttttttttttttttttgttctattctccaaatccgttcccctagtgcagcttcatgcttaagtttatagtggcaaacacctc

SEQ ID NO: 119802 - DNA, 1032 bp, Homo sapiens
accttagatcttaagaaagtatatattgtccattgtttataaaatcatttgcctttttgatctaaaaattttaatacttgaatttaacaggtttttcttctggacaagttctttggcattcaagtataatcaatactttcagagtagtcacctgcatcacactggagtgactgctttaatttctaaatcatcaattagtgtaacccagggatactgatggccttgatacataatttagtcttagtgtgtggaaatcagggttttggggggcatcatctgaccccatttctttttaccacaatggttcctgctacaatgtcataagctgttcgattatgctgaaaaaacagcagtgtgatgaaagcagggaaaaaagaagcaattgaaaaattcttgatcaaagctcggatagtggacctaaaaagttaaaacaaaaatatcaggtaagttacacatcaaaccacatatagattaatggtatcccatcaagttcaaaatagacatttaaaacacaattgtacttctctacagaagtctacagggaaaaagacattcaaggtatagttgagagaatttttacctttgatatattttcaagtagcactgtatcatgatcaaaccacctgggctatttctaataagacttcaacaacataaaaagcagtaataaacatgtctcagaatattgaattaatggtttacagagctttctagtattttctcagaagaaatgaacattaattctgagtactttctgagtatgcttactgtagtcccatttgtctaccttatagaaaaaacatgcattttaaagtactgtgtgttctttaatcagcattttcctttgtgggatccagtgattaagcaaagcttttaaaagctttcaacaatcactcaggatggagaattatcctacttatgttagatttctgccttttagtgcactgaagggctgcagaaaagtacagtggctaggagtgtgggttctgaatccagactagttaaattcagatccatcgtctaccaattact

SEQ ID NO: 119803 - DNA, 1056 bp, Homo sapiens
tgaagtcttattagaaatagcccaggtggtttgatcatgatacagtgctacttgaaaatatatcaaaggtaaaaattctctcaactataccttgaatgtctttttccctgtagacttctgtagagaagtacaattgtgttttaaatgtctattttgaacttgatgggataccattaatctatatgtggtttgatgtgtaacttacctgatatttttgttttaactttttaggtccactatccgagctttgatcaagaatttttcaattgcttcttttttccctgctttcatcacactgctgttttttcagcataatcgaacagcttatgacattgtagcaggaaccattgtggtaaaaagaaatggggtcagatgatgccccccaaaaccctgatttccacacactaagactaaattatgtatcaaggccatcagtatccctgggttacactaattgatgatttagaaattaaagcagtcactccagtgtgatgcaggtgactactctgaaagtattgattatacttgaatgccaaagaacttgtccagaagaaaaacctgttaaattcaagtattaaaatttttagatcaaaaaggcaaatgattttataaacaatggacaatatatactttcttaagatctaaggtactttcttaagatctaagaatttgctgaaagcattttcagctttgaaatctccaaatgaaactttaaaatttattttggtttatcccaaaataatggaaaatgtccagttgtgttttgtaaacacctatgtaactcatcttttagtttacacttcctggggaaattgtctttggtgtttagaggagggaatgagaacacaaattggataatccactgtctcccatcccaggaggtggtgagttggctacaagagaaagggacaagtgaggcaggcctagcagttcccttacctgaagttttcaaatccatactgcagttccctctcgtaatgatgtaactttacaactattcttaatgcttgaacatgtatttaggggcaagtttctcatgatgatgaaaaagtatca

SEQ ID NO: 119804 - DNA, 1855 bp, Homo sapiens
agttttcactgtaaattgaacttataatttatgtgcaagtgttttcagtgccctgaatcaaactataaatgtggggagaaatcacctccatcaaacagttgcatatttactgtaaaagtattcccagtatgtgtgcagcatgaagaaagtattagtgcttctcagtgttctcagtgtaaattctatttatatacagcatattcacatactactttccttatattttatatagttctatgactgttgaaacatcaaggagttaaaaaaatcttaatatttcatgattaactctaagtactattaattaatagcttgcgaaatattagcaattttcccattatggactattctctctaaagcaagagagactagcattcccagacatcattctagggtctttaagctcattttgggtctgctaaagtttggggggaaatgttacgcaaagtgatactgtgtatgttgccattttgctttattcttctgttgaagcaaaattgtggggttttattatgtgtgtgtgcttttcctagatgtcccagttagctgtgctgagatatacctgtactatttatggtttaagttttgattcttaggtattttctccagctctgacattgttttccaaagacacactaaactgcattgcacagttcaaaatttgattacttaagggatcaatctaggtggtgttcttggtcttaaatttaacagcaaacacagcacatatctattatcactatattaattttcaaaggtttttctttgacgtttaaaactgtgacaacagatattcacatttgattatagaaacttaatgtctattaataattttagtacaaaatttcataaaccgtgtttttcaaaataagtttatgtcaaatccagcttcccagaaacactaataattaagtacatcaatgtactaaataaatcattcagttgcacccatggggaagattgtgttactgcccttcacagtgaaaaaaagaaaaatctttcatttttaaaattaggagatgttacgtaacttggcactttagtagtgtatacactagcattagtttatacaccacttttgccgctggggaattcaagttgaaatgtccctcaatcatataggtctggaatacatctttcattcataatttctgctcagataattgaatagtttgccatcgagattattttcatttatactataaaacaaaagcaaactagtccagtttaattttttgtacttagaatattgcacattttctatatatgagttattcagattagtatctatgtaggttcagtcagatccaaccatggattcgaggtattatactgtataaccctacaaaatacatagaagtattatttgccttcataatagaacccaagagtctgtttcaatttatgaattcagtatttgcaccgagattttgattcccaaagtttggaaaaaaatgacaaaacaacgagggaagaaggaaccagaccttagtgccacatatttttctcttggggttgtaaggtagtctcctgctttccagaacactttattatatttcacttatagacctgattttctgtgtcaaagtataattctcatgctgaagctgtagcctaaaaagccaaaagaaagttgtcttcattgtacaaacatattcatcactttaacaataagggaacaaaatttagtattcaagctgagtgagaatactgtttcaatgagcatgtccctaagataaaccagaattggcagttaatttaggcgtctagaaaatctcagttcccaccagtaaaattatcctgagtagctaatgcaccttgagaaaaatctggcatactgaataaataacattaa

SEQ ID NO: 119805 - DNA, 1058 bp, Homo sapiens
aatagttacttatttctgcctaagcactcaccttccgattttacccaagtatatatataggatagaaaaaaatgcattatatttgagagctacttcgcccaaattacaaaatgagtgtttttagattcaagtgacagtaaaaggatttgttcccttcagtgacttgagtgttttagttatgcataagtatttctagcaaaggaagggtagaaaggaattgaaaattaatttacactagttgctacttgggaataaagggctttttgaggggggtatggatattaaatgttttcgttatatacttatccctattaaaacaggcagttgtttctttgaatatgcctaaataacagtattcttaaaatctgacagacaagtaacatgtcaattacttgatattccttgtctccagtaccacaggccactcttgacatcccatgtttgcctggataaagttcctcatttcaaacagtatacatacttctttgcagttcattatagtaaggcttaacctgtaaacagtatctgatggcccacctataaataaaattcagcattctatttttaataatttgtatgccaccaatttgtattatttgtctcaataaatacttagtcatcaatgcatctgtattttgtctatttctttgagacagtttgctctagaatctgcttagggagaccttgcctccaaatacaggttttccagtgggtttagcagtaaactagaatgctttcagaaatagagatctatgaaaaaagaatcgcccatctttaaggatatattcttttagcaggcacactcagaagttacctgtacatgaattaagcttactattaaactaatccagtccttcaagagttgttaaccatcacaaccaccacacaagtctcatctgggcaatttaaacccagttctgaccttaaaagcctttcccattctaacaacttttatgaacaggtccagagagaaggcaggaagcaaaacaacgggttcctcactcaacaggggcaaagataataaaggataaactagactgtagctaaaagatggtcca

SEQ ID NO: 119806 - DNA, 1550 bp, Homo sapiens
aaatatgttctccaacataaatttaccatactataattctggaggattatattacagtttgagaaaaaaataacagtagcgtgtgtgttaggtgtagcagaaaatgtatataccaatgtgagtctactccccccccacccgaccccccttacccttgtgctgctcatggtaaatgttagcatttggaaattttgctcagagcatcatgtcacattatgaagtttttatttttcacaggtcaaatgggaaaaatgtgttctcttcttctggaacttcattctctggtcgcaagataaagactgctgttagacgcaggaaataaaggtcacattggtgttgtactcaattttaacaacagctggtgccctgctttcagatactggattgtactttgtgctggggttatctgaagtcagatctgcctaaggacttctttaattttggaattttcctcctttctctttcgttacagaagccccaccctgcctcacccacccttttttaaataaataaatagctagactggtgactgattcttcagcaaaaatattttatgatccagcagattattcactgatttgacatagtctggctgtacccaggaatggagcctgcacggtgaatggctttgtatagaacctctttgtctacaccattatgtgcgctgataagcgttcatggaacgcgttgaaattgtaattatatctgaggaattctgtatagattagaattctgtatagattagagagtgttgaaacggatgatttctatgctgagtttgtgctggtgtatgtgtgaagtgagtgagttgggtgtattgtgcgctaaacttttctgatagaggaagcctgattaaagaatggtccgtgctaaggacttgttagatctagttcactctccatttaataattatatgctatttctatattttcattctcctatcacctgtcttgcctttttcattattttattatgaaacttgtgtaaatacaattttgtttctgtactttttggcataacataaatctgtgaacttgaaatttgaattttgtgttagagatttttttgttgtttgtttagtcttgtctcagattttattatgtaaatcccattattcaaagttgcctaaatccatttggaaatctttaaaaaaaaaattggggattcttaaagttgaatttattggcttttctgatccagttttgtttggaccaaaaaccagtattgtacaaagtattaagcatatatttttatatttactaaaatggactgtggtgactttggataataaggaaaagtttaatattaaagccatgtttattacagtataattaacatgttaaaccatgggataaatgccatcaataaaaaattatgacatactttttgttctagttttacctcataatgaaggcacacagtattattggggggactttgtaaaataaagattaacagtgtctcattagaagaatacattgacatgatttagacaactcctaagagaaagggaaagtatctgaaagtatctgaatgcacaacatatagaa

SEQ ID NO: 119807 - DNA, 1072 bp, Homo sapiens
tgtatgggttttgtgtgtcttaaaatattttcctttgagcttggaaaccattcatatgtctaattttaaaattatctcttgtacttggcagaatagagaggtaatatggttggatttatatataaacaacattcgcaggtttcacagacttgtaacttttttaaggtagtaatgtattttaaagtgttaatttttactctgacttaagtatgggattcattcactctcatttcttctcaactttgaatttttgggcttgcaaggctagctttgaagtgcattttctgatcctgtttatgattggatttgcgttaggaagttacccccaggtccagtgctctctcctggggcagtcccgctgagttgtctcatgacactttctatttactgatgataccagcctttccatttgaactgcatatttaaatatgactaatcaaattgtattataatcctatattttcttaaaattgttgttgatttttttctaattgtgaaatataatattatgtagaaaggggtgtaaaatataagtgaacagtgtaatattgaagcaaatgctgtataacaaccacctggaagcccctcatgtatctctttttgaaaacactcctctctttctccactctaatgatgaccaccgccttgtcttttatggtaatcactgttctttgggttttattactgcatttattggctaatagatgcatccctagaaaatgtagttttgcctgcttttatataaatggaatattactgcatgcagtcttttgatttgtgattgttttgctctaaggcttgtaagggtcatccatgttttgcatatagtttgtttattgtcattgccatagagtaaatcattgtatgaatatactgcagtttatttactgttgacatatgtttcagttgtttttaactactaggaaatgctactctgtacattcttgtatatgtaccttggtgcacatatgtatgtttttctagagtatatacagtggcatgggattgctgaattaaaaggtttgtatatcttatactagaagataataaaaacttttcctgatggattctg

SEQ ID NO: 119808 - DNA, 1002 bp, Homo sapiens
atcaaaagtttttcttcaaatcagcatgtctcatttgtttttcctaacatttctaacttgtattttataaaagcagcagaacttgtaacatgccaaataactaaaagaacacaaaaggcatacttgttgctgggtgaaggtattcccttcctcctcccataattttagttcttaggggaatttttgtagagcttgacaagctaaacttattctaaaattcacatggaaaggaaaccacacaagaaattttgggaagaagggcaggcacacaggcagctttgtcctactaatatcagtccatggtataaagttataataattaaaacagtctagtgataacagtagaggaaacaagtatatgcattttaggaaatgtagtgtgtgataaagacagcattgcaaattagtgcacaaaggctgtactagttgatgctgtggagaaacttggctatccatttagataaattgaagttatgattttgccacatactgtaatataaattgcaaaataaaacatataaaagtacagctgtcttccactatctaagcttgctattcaactacagtatccagttagatttggattcgaggtgtatttttattaacctgaatgccaaaggccttcctatgaaaggcctaaaatccataagctataaaagaagatgaatgtatttgactttgtcaaaatctaatataaacagatgtccatttgatgaagtaatctatataaaaaatctattttctagcgaattctagggtaggaaaattctagcaattgtagggtaggaaaaagtactttctgagactattcttaaggatttatgtttgtttcttaatttctgtcttacagatcaaggtgcagcaaagccagtttttagtttcttgaacaacagttcctctagttcaagtacaccagccacttctgctggtggtggcatatttggtagttccacctcttcctccaatccacctgtggctacctttgtgtttggacagtccagc

SEQ ID NO: 119809 - DNA, 1516 bp, Homo sapiens
agctaccacgcccagtctgatgtttaactttataaacattgcttcaactctgtaattcttctgtttttctgttgccttccttttttaaatgcttgagtgaataacacatttattcacaagatttaaaaatcaagaaattgtgacaaggttcaatctcttctctccattgtctctttttccaccttccctcccacttccaaatgtaactgtggttagtttcttgtaaatctttcaaagtttctttatgcccatccaaggcaaacatacatacccctatatattcttacttccttttaccttgttagaaaagtctgtataccgcactccctttctgcccctttgattttatcagggattatcttggacacatctttgttcttccttcttcgtttatagctgcctggattgcatatggcattttgcatgtctatgagtttatctttaaaacaaactccagctatagaattgcaaggtcaaagggtatatgcatttgtaattttcggtaactattgacagattgctctctatgagttttgtgttcatttatacacccacctgcaatgtgtagcctgttacttccagtctcatcactagtacaaactttatcaaactttatcgcagccagtctgataaatgaaaagtggcttgtcaggatagttgtgaggattgagatatcattctcataccgactaaatataggtcaccttggattatgtttacagctgctggtaatactcttcaaagtaggccctttcaaagttactcctatgtttctttggctttcacagtgtttacattttgtttgagaggatcagtacattgagtgtctatgtggtgtcttttatatttttgtaggctttgacacatcttcctcatcttcgaactcagcagcctcctcatccttcaaatttggtgtctcatcatcctcttctgggccttctcagactttaacaagcactggaaattttaaatttggagatcagggaggattcaaaataggtgtgtcatccgattctgggtctataaaccccatgagtgaaggctttaaattttctaaaccaataggagattttaaatttggagtttcatctgaatctaagcccgaagaagttaaaaaagatagtaagaatgataattttaagtttggactttcttctggtttaagcaacccagtttctttaactccatttcaatttggggtatctaatcttggacaggaagaaaagaaagaggaactgcccaaatcttcctctgcaggttttagctttggtacaggtgttattaactccacccctgctcctgctaacaccatagtgacctctgagaacaagagcagcttcaaccttggaaccatagaaaccaagagtgcttcagtggctcctttcacatgtaagacatcagaagctaaaaaagaagaaatgcctgccaccaaaggaggattctcttttggcaacgtggagcctgcctctctgccatctgcctcagtgtttgttttgggaaggacagaagagaaaca

SEQ ID NO: 119810 - DNA, 1116 bp, Homo sapiens
attttatatgttaggatattgcctacaatttacatcttatgtcttagaatgcttgctgctttgaagaaatttgaaaaagattcttaagaaaaatttagtctttgagcccctaatttgcgagcatgattttttttcttaaaccacagcagttcaaacatgtggttaagggggagctcaccagtgagcaaggtgattatgagctgctcatttataaggttaaaagaaatcatttataaggttaaaagagaggtctattcttttttttaaacaatgtaaatatgaacagttgtctatttctggcacattctgtgttttaataggaaatattattagaaactgaacacttaaacttagcagtgccattaagatactgacatactgtaaattaaaattttcatgaaatctccccccactccccgtttttttttttttttttaggaagttcagtacctgcttcaagtagcagcactgtacctgtctctctgccttctggaggctctctaggattggaaaagttcaagaaacccgagggaagctgggactgtgaattgtgcctagtgcagaataaggcagactctaccaaatgtttggcatgtgaaagtgcaaagccaggcacaaaatctgggtttaaaggtaaggccaaaaaaataaaaataaaggtgatggtaaagcgcctttttgtaaggccatttaaaaatgaagtatttgagaacagcttcagtgttcactcattctctcttgaaaattaatataaaatgagattatcctgagatgttttagttatatctgtttctgaatattgtaaggtcatattagttgcttgtcaacagtgaggtatcttttctccaggtgggaaaaaaaatttcttgtgtcattgagcctcagagagtttttgttttttgtttttaactgctagccccctaggtgaactgttctttgtttttttgtttgtttgtttttttgtttgtttgtttgtttgtttttgagacagttttgttcttttgcccaggctggagtacgggggcgcgatctctgctcactgcaatctccgcctcccaggttcaagcaattccctgcctcagcctcccaagtagctgggattacaggtgtgagcca

SEQ ID NO: 119811 - DNA, 1222 bp, Homo sapiens
tatagcaaaatgtggatggcaataatacatatcagtaaattagtaccattgaaagcatcaaactagaaattccttgaaggagaaggtgatatcctgtaaacaaaacatcttttgtagaattttaaatggtttaagtgtaacttattaggtaattgataaatatgattacttaagtgaaaaacaattcttaagtagttcatcttggattgtagtaagtgtgcagtgaggtaaacgtcttctcagtaataataatcaaattaatgctttgatttataaagcttctctaacgttgcactctctccttcgttcattgtaggtttcgcatcgccgaagatagattctgttgctgctcagcccaccgcaacaagcccagtagtttatacaagaccagcaataagtagcttttcttctagtggaattgggtttggggagagtttaaaagctgggtcatcatggcagtgtgatacatgtctactccagaacaaagttacagacaacaaatgcatagcctgtcaagcagcaaaattgtcacccagagatactgctaaacagactggaattgaaacaccaaataaaagtggcaaaacaactctttctgcatcagggacaggctttggagacaaatttaaaccagtgataggcacttgggattgtgatacctgtttagtgcaaaataaacctgaagcaataaaatgtgtagcctgtgaaacaccgaaacctggaacttgtgtgaagcgagcccttacattgacagtggtttcggaaagtgctgagactatgactgcttcatcttccagctgcactgtaaccactggtaccttaggatttggagataaattcaaaaggcccattggatcttgggagtgttcagtatgctgtgtttctaataatgcagaagacaataagtgtgtgtcctgtatgtctgagaaaccaggtatgtttttggctttatggagtaattttgcttattacttctgttgaacagtttaatttattctaagaatccttgttttagatgtttcaggatgagcatttctcatacatattaatttttctaaactatcttgaggtaaaaatgtcttgtttgcagctagatctttatgttcagttaggataggttatgtgttaactagtctggtatatatgacgacctcctctttttgtacagttttatcagaaatttcttgttcaaagttgactaatacagattctgaaagatctt

SEQ ID NO: 119812 - DNA, 1243 bp, Homo sapiens
tatacccttatttaatattttaccatataggttttcaatattataactgaaggatattttcaattatattaatagtgtgaatttctaaaaatgaaataattgctcagttgaaaattactttttttgattagttttgtaaattgttgtgtaatcagatatttcatgcagtggatgggcttgccctagttgccatatcctctccagttttttagtttgattgttttgattatcagtcagttaattggacgataattatagtttatatttttttgcctttttattggtgggggaagttatatagtatgggaatagtgtttttatctccttgtaatggcaaattatccctgtaaagtcatttgtttattgaattaaagtgacttttttcatgaacttttagaaattaatccaaaagatggttttgaaagatttttaaaaatgcatttgagagtccagtgttttatttggcataatgttattaaatttaaaaaaattacagctcatcatgtcactacagtgaacagtacaaattgtaagaagacaccacctgaagattgtgagggtccttttagacctgcagaaatcctgaaagaaggaagtgttctagatattctgaaaagccctggtaagataattaaaagataagccttttgattacaaactcatgatctcaatttaatgtcattttgtattatactttaggcttttaaaaatttctgactagtttggtaggagatttacttttgaatagagatgtagttaggtgtaattcttttgctggaaatatcttacaagccaaaggactctatactaaaatgaaatttctaataggcaagtgtaggaggaggaaatggattctccattaatagaggtaggtcagtgaggaataagagtaagtaaacctgatgatacacatagacatgtctttctcttatgagagcactgaactgccttcttgaattattccccagtttggtaaatatggaacaaggccaagtggaaagcatctgctgaattgtaacatatacatagggagcagtactcacttgaattgaagcaagatttgaaagctagtaggtaataattagaaaggggataaatagttctcagataagaataattttttgtttgaaaacaggatgttcataattccatttatgatacatagtataagaatgtaaaacttgccaggcgcggtggctcacccttgtaatcccagcactttgggaggccaagacgggcagat

SEQ ID NO: 119813 - DNA, 1049 bp, Homo sapiens
aggaacacaccatcattattttatatactgttttgaaagaaaaagtgcctgagaaatttaaaatgctgcctgttaaactgtgacattgccattcaatataagaatctcacttttagagatagtgaaatattataaactatatcttaaaataggtgaaagtatgtttttgacttgggataaaaataacctctatatttgggccaggcgcggtggctcacgcctgtaatcccagcactttgggaggccgaggcgggcggatcacaaggtcagtagatcgagaccatcctggctaacacagtgaaaccccatctctactaaaatacaaaaaattagccgggtgtggtggcgagttcctgtagtcccagctgctcgggaggccgaggcaggagaatggcgtgaacccgggaggcggaggttgcagtgagccaggattgcgccactgcactccagcctgggcgacagagtaagactccgtctcgggggaataaaaaagctctatatttgatacttattgaaaacgaagtataaggatattctttctctttacagattggatttacatttagtgtgcctgttgcaaaaacagcagaactttctggttctagtagtactttagaaccaattataagtagttcaggtaagtaaaaatttcttacattttaacatacaaacaattgcatacagtagattagtatttcagcttctttcacctttggtaattcttataaatgccttcatttggatgaaattagctctgaaaagcaagcaggcactattatttaacctttttgacggtgctttttattaattatctttagagatacttagctccttaaatggaagtgtcagtttggttttgagagagataggcatggtagcaaatttatccactatctttgtttagtcaaaacaaggtgacaagttagttataaagcaagtctcattataagaaatttataggttgtctacattatagttgtagtagattttatttctagtttttacctttcagttcacaagcatttttatgtataaaggttatgcaggcc

SEQ ID NO: 119814 - DNA, 1041 bp, Homo sapiens
tttatacaaatatccacctctaagattgtgtgtactccttagaggaagccacattttataacacagttctgtgtttttcagaatttaaagtgagatttttaaatttaaaaggaaaaaatacttagtgtctttggaataatcagtttgcttaatgtcttttttgtcactttatttttctaaaaagctctttttgtatcatttcttaataatttggaaaaccaggtacaaatgacctctccgagcagcactggcagtcccatgtttaaattttcatctccaatcgtaaaatctactgaggcaaatgtactacctccatcatctgtaagtaacaagcaaggaatagtatatatttactgatttcaaagccatgttatatttttatcaaatctaagatgccactggtggtgagaaacactgttatttttcttccaacttaaaaaatactctgtgtaaaaaacttttgaacaatcatgtattcttcactacataatgtacatatgtatgcatattcattttcttctgtaccatttgaaagttaaaatgcaaacaactggatttccttaattcttctccatgtgtcccttaagaaaaaagacattcctttgcatccccacaatacagctatcatacccaagaaatttgacatgatataataacgacatggtccatattcagatttccccattatccccagactgtcctttaattgctgttttatttctgttggtcctagagccaattaaagactaggacctaatcaactacatgatattgcatttagttaaaacatgtgtcttgatttacctttaatctagaaaagttctgggcatttttttctttcatgattgaaaagtgaatgtttggggtaagaataacacgtagtttaatattcaaattgccccagatttggcatgtttatattattttaatatgtcattttctagttttgactgtgtccttgtcttctgacacaagtagatgttacagatcaaatgtaatttccttgccacatgctgaaatccatcagttgccccagaagtg

SEQ ID NO: 119815 - DNA, 1292 bp, Homo sapiens
gttactaaatgcttgtttcacatgccaagaccatataatgctccccctcacccccttatctgcaagggatatgttccaagaatcccaggtcatacctgaaactgcagataatattgaaccctgtatatactgtgttttttcttatacatacatatctatgatgaaatttaatttataagtaggcacagtcagagattaacaacaacaataaaatagaacaattataacactataatgtaataaaggttatatgaatgtagtctctttctctctcaaaatatcttattgtatataatatctttggatcatggttgaccatgggtcagggaaactggaaattgaaaccatggataaggtaggctactatatataactttatgtttcatattagtacaactgtagtatatcgtaagaattactatcttttttccctcagttttaccaattaggaaattggtacagaaggcagttaggttccccaagtcaaatggctggttggtggcacagctgggattaaaaatcatgttcagtttttctgattgaagaacccataatgttaacactacatggtaccatcttcttcctgtatactttcatgctgaaaataagtagagataaaagaatgatgtgaaagatgaaatatatcatgcaacatgttatgttttaggaaatggaagttccagtattaccgaaaatctctctaccgatcaccagttcttcactgcctacctttaattttagttcccctgagatcacaacttcctctccatcacccatcaattcgtctcaagcattaacaaacaaggtacaaaaccattatataaatacaggtgacatttgttctttcttaattctttatttaaaaaaaaccctatattataaacagtgtttaattttcattatggaaattaataacatagtaaacagagaaatggaaatgctgttttgcttttttaaaaaaatgtacaaatatcttggatacattataatggagtgttcctcaactcttatgcaataccatagagaaggatattcttgtaaatttgtttccaaataatgtttccagtaagatgctttttgggtaggagtgcactcaatgtttcatgtttttacttctcagctaggcgtaacatcttttaatgtgctcctgaatttttttttttttgagatggtgtctcgctgtattgccgaggctagagagcagtggtgcaatcacagctcattgcagcttccatctcctgggctcaagtgatcctcccacctcagcctcctgagtagctgggactacaggt

SEQ ID NO: 119816 - DNA, 1135 bp, Homo sapiens
attaatactatacgtattcttctttttttaagatacagtcttgctctgtcgctcaggctggagtgcagtggcgcagtctcggctcagtgcaacctctgcctcctgggttcaagcaattcctgtgcctcagccacgcaagtagctgggactataggcatttgccaccacacctggataatttttgtatttttagtagagatggggtttcaccatgttggccaggctgggtcgaactcctgatgtcaagtgatccacctgcctcggccttgcaaagtgctgggattacaggcgagagccaccgtgccctgcctgtcttcttcttgcttgcctgtttctccttttttgatgttgtattgtgaaaggtaactgtaagttttttaatttcactgcttatatatttatccagtttgaagatttaccgtaatccattctgccatcaggatacattttggtagatttctaatacacattaaagtgaatatgcacttttctgtctgcacacgtgcagtattttctctagagtatttatctaggaatggaattgttggattataggggatgatccacatcttctgctgtattagatgttgccatgttttctcttcaagatagttttgcagttcaacatttccaccatatgacaatagatagatcttggggcatccttttgtgtgttttttggacatttgagttttctcttgatccatttttttcctatggggttatttcctgtagggatatatatataatttcttatatgtatattaagaaatatgtatgtatatgtatatataatttattattagaaagagttctctatatattctgaccataaatgtttggaaaagatagggacagatttaagattggttacattaacctttctgtctatatattgctctttttttctaactactttaagttgaatgcaagtctcattttagttgtattataaatgcatttcagcttagcttaaccatttgagttttgatacatagtccttgtatttgtcatttgtttctaattaaaatttcaccagtgactccctcattgaccaatgagttttaggagtatatttttagctttttaaacatgcttttcctatttatattgacagaaacaaaatcatgttttg

SEQ ID NO: 119817 - DNA, 2359 bp, Homo sapiens
tggtggcgcacgcctgtgtacacaggaggctgtggtgggaggatcacccaggtctcacctacagtgagctgtggtctgggtgacagagcaggagtccgtctcttaaaaaaaaaaaacaaaaaactgtaaaaggtttgatctgtagtgctgttttgaatatagttccattttgtatgcatgcatgtgtgtgaaaagtcattaagtctggaatgaaatatagagtatccgtgaagccattttagaattatatgtgtgtatatttatgtgcataggtatatgaatacataccttaggttccattattatcagtttttcctcttatttgtttgtatctactgtatatttctctgggaaatactcatggtctttaggtcatgttagctattgtcaaaatttagatatgaatcattgatttatatgaaaataaatgtttttgatttctctttacctgtaaggtggattctcaatatcctcctgttcagagacttatgaccccaaagccagtttccatagcaacaaatcgaagtgtttattttaaaccatctctgactccttctggtgaattcaggaagactaatcaaagaatagataacaagtgcagtgtgagtatatgtatatttctaccagtctttgaatattgattagaataagtaagactaaataatgtaaaatataactaccattgtattctagcaactgtataacacataaaggttgtgaattagtgatgattatgaattggtatgcttttaaaatagctgtcaccttgatcaaatttttttttttttgagacggagtctcactctgtctccaggggtggagtgcaatggcatggtctcagctcactgcaacctctgcctcccgggttcaagtgattctcctgcttcagccccccgagtagctgggactacaggcatgtgccacctcacccagctaatttttgtatttttagtagagacagggtttcactatgttggccaggctggtctcgaactcctgacctcaagtgacccacctgccttggcctcccaaagtgctgggattacagatgtgagccaccgcgcctggccactaccttggtcagatcttaagttagtgttgactagtaaactctagcatgtacccattgtttaggttacataattttgccggatttgctttatctgtttctttcatgtggtggtgttgaactatctgcaagtaaatttcagacattatcttttgaaccctaagtactttgatatgcatctcctaagtactttgtcctatattatcccatctaagaaaattaattctaattccttaaaattatctaatatccagtccatattgaaacgtttttcataattgcttttttgaaccaggactcgagcaaggttcagatactgcttttggttttgtttttccagacctcaaaccctcaccctggccacattggtttctgtttcttgagataattcacatatcatacaattctcctatttaaagttttcaattcagtggttttagcatgtttggaaaacactttataaataaagtggtgtctgtgagttgttcaactgttaagccatcataatggtaaattttagaacatttgtattaccatctctcccaccctttgaaaatctcatacccatacccgtcagtagccacttagcatagtgttttcaaggttcattcacgtcgtagtatgtatcagtacttcattttttccctttttatggctgaataatatttcattgtaaggaatactagattttgtagatatttcattgtatggatatactagattttgttttatccattaatcacttgaaggacattggggttggttttactttttggctgtaatgaataatgctcctgtcaacatttatgtataagtgtttttttgtgtgtttgtgtgtgtggacatgtttttatttctcttgggtttatacctagaaatagaattgctggatcataggtttttgaagagaccaggccagttgtcttataaaatgtcccataatctgggtttgtctggttttttgtgtcatttaacttgtatttattttgtttacttaacaccttattgtttatgcctttagttatattttatctcatttctaacaactcaatttattgaaaaccttgaaacttagaaagattagtacagtgatttgccatgtatttctttatgttgattcaccagtcattaacattttgtcatatttgctttatctccctccatacttttaagttaacattaaaattttgaaaaatattttgaacatagtgtgatcatggtggctcatgcctataatcccagtgctttgagaggctcaggcagaaggatcacttgagtccaggaattcaa

SEQ ID NO: 119818 - DNA, 1033 bp, Homo sapiens
caccatgcccggcccatactttctttaaaatggtgcatgctgtcttatcattcttttgttattgtaaaggtaatttctcaatcagagaattggatttccagtaaaggcataaagaaaaaaattgaacttttaatgataccacccaaagataaattgctgttaatgcattaaatcctgttttactttggacatccattctatcttgtaaatattttcactgcatgaaatatgtgccttagattttatgttgcaacaaataatatagggtttactttacaggcaccagttagaagacaaatgaaagctaagcaactcagtgcacaatcttacggtgtgaccagttcaacagctcggcgaatattgcagtctttagagaagatgtcaagccctttagcggtaaatttttaaaatcacgattaatacaggagtgtaacaaaacttgatattattgaaaaatcttaattttgttattttttcaactttaacaggatgcaaaaagaattccatccattgtttcttctcctctgaattctgtaagttgagatttaaacctttttacaaaatattgttcatacaaaaattagccgggtgtggtggtgcacacctgtagtcccagctacttgggaggctgaggcaggagaatcacttgaacttgggaggcagaggttgcagtgagtcaagatcgcgccactgcactccagcctgggcgacagagtgagactccatctcaaaaaaaaaaaaaaaggtatttttcataactccccatctattctaatagtgttttttttttttttcagcctcttgataggagtgggatagatatcacagattttcaggccaaaagagaaaaggtaaaacttctttagcatttagttatttaaactgtctacaattttgttgtgtttaaagttcacaagtatacaaattggatttagtttagacattagggaacatgtttgaaaaataatattctttttttttttgagtctcagtctcgctctgtcatccagactggtgtgcagtggtgccatct

SEQ ID NO: 119819 - DNA, 1050 bp, Homo sapiens
atcctttctttactcctgcatcataactaatttcagatgggagtcaagattagacatattgaaataaaagcaacagtatcaaaatacgggtaaaacttattttttatggtctcagaatgataggactataaggcagaagttactttctgtattacaaaatacaccatcaaaaaagtgaatgggtttaatcaactggcaaaaaatagttgtatttcaactgttgtatcgtatcacatcactcttactggtttaaaaaaattagctcttatttaaattaattttagttagttgaaactttgttttgcctaggagtatgttatattgggcttattatgggatgccccagtgatttgaattgaagctattatatactgtaatgtgttttcttaaagtaaaaaccatttgtggtagtgtatcgctctaagttgtatattcataatattaatgcttttcttttaagaaccttcaacaactagtactgcttcaaattatccagatgtgttaacaaggccttctcttcatcggagccatctgaatttttccatgttggaatcccctgcattacactgtcagccatctacatcctcggcattcccaattggcagttcgggattttcccttgtaaaggaaattaaagattctacctctcagcatgatgatgataacatctcaactaccagtggtttttcttcaagagcttctgataaaggtattcttgacatgtggtagtacataatttgggtagtaacattaaattttatgggttttttttctgacttggttgtaatttttattttctatttataaaaatctaggctcttgtattggtgttattactatggattatgtaattttgtttcagatataactgtttcaaagaacacttcattgccacctctgtggtccccagaagctgaacgttctcactcactctcacagcacactgccaccagctcaaaaaaaccagcattcaacttgtctgcctttggaacactttcccctgtgagtactaactgggttggatttaatcacattagttttgagtgttta

SEQ ID NO: 119820 - DNA, 1234 bp, Homo sapiens
tggatgccttttctctgagattaaaacatgtattacatattaataaatctaaaatcgacattgagtatttgatggccttttggggtttttttaaggattagaataatgcagccatttgggacaattattgccttatgtatgcatatagaagaaagaaagaatttcacatctgtagaatttgtaaaaaccattatgttagcagtaactgtagtaactgaattttggcaaacttgttggacaccattgtgttttgcttggcctggctttcagtgagtaggtacttattttaaaaagataaatttctaaaactgtcataatatgttttttctctcaacagggcattcttagcagggttacagaatctgttaagaatattgtgccagggtggctacaaagatacttcaacaagaatgaagatgtatgcagctgttcaacagacacaagcgaggttccacgctggccagaaaataaagaggaccatctggtatatgccgatgaggagagctctaatattactgatgggagaatcacacctgagccagcagtcagtaatacagaaggtaagtaaaatgtgaatattttgtcatgaatgataggttttcatgccctaattttgaagacactacctagttatggtaaatctaatcaggcggtacataaaccatatgggaagaggatgataatcaggttcaaattggatgtcttttttatttatcagtgttttatttattaaggaaggttgataaactatatcagttaagactgcaagctctgatgttggattttgggttttaattttcttttctttttctttttttctttcttttttttgttttttgagacggagtctcgctctgtggcccaggctggagtgcagggtgtgatctctgctcactgcaagctccgcctcccgaattcatgccattctcctgcctcagcctcccaagtagctgggactacaggcgcctgccaccacacctagctaattttttttttggtattttttatagagacggggtttcaccgtgttagccaggatggtctcgatctcctgacctcatgatccatccgcctcagccttccaaagtgctgagattacaggcgtgagccaccgtgcccagccaagcctatcctttaaagcacgtgttttaaatttcgatgaagcccaatttatctctcagtgtatgtttctttcagtatatacattttttctttcactacatgttttgaaata

SEQ ID NO: 119821 - DNA, 1089 bp, Homo sapiens
ttaacagcataacacctatgatccaaggtgtcttagagttgatacgacttcaggctgtgtagttttgttttaaatcttgataatttatcattgccccttatctaaaatacttttgcttcttgtcctatttaattaaaaaagaaaacatattttagcttttgaattgggaagtaaaggtatttaggggtttcttgatcaacactgtaggtgctatttaatattggcagaaactaccactacccaaggaaagtattcaggtatattcaaaagaatactctccttttttttttttttaatcttaaaaataaggactttctttagtccttattgaggctttggtggacatagggtctacccacttgctgtttattatcctaggctgtcaactggatgttttgcagaagctgctgagtcatcatgaagcaagcttcatgacatggcatgttttatactaatgttatttgattaagtgtccaagggtttctgggcaaaaattaagcttttggtagtatagcagaaagttggagtaagaaacaatgagaggtctggcgctgttagttaatggatgtttgccagtgcctgtcagggcaacttggctagtacagtcacccagtacctatgacttctgcatgtgttcatttgacttgtaatttcctgttttgacttctgggtttagctctcctgggaaatgctgtaagtttactactttccttctttaacttattttttttttaatttttttttttttttttgagatggagtctcgttctgtggcccaggctggagtgcagtggctcgatcttggctcactgcaacctttgcctcctgggttcattccattctcttgcctcagcctcccaagtagttgggattacaggcatgcgccaccacgcccggctaatttttgtatttttagagacgggatttcgccatgttggtcaggctggtctcaaactcctgacctcaggtgatccacccgccacagcctcccaaaagtgctggtattacaggcgtgagccaccgcgcccggcccaaattctgatctttaaaatgtcatcttgcatgaagttgtgcagacaaattcattgt

SEQ ID NO: 119822 - DNA, 1169 bp, Homo sapiens
gcattccagggaggcacaacctcacggtgagagcagcaagcacccctcctcaggccacagcttggcgtctttgttcgcctggtcaccttgggcaagcaccagccccatctctaaaacatgctgccgcctggctggacctcagaccagaagctggagaatccacaccgtgcacttcctgggccacctcctttcccctccccagtgggagaagcggcactttgtcacttgggtgaatcaacagcctctgctttttccagaaagcaagagaactgaaaatcctggattaactaagtgacagtatttttttttgcacttactacacacctccactgtatagaaacctctacagattccaacagactttattcttgtacaattttaatcagttcttactgtagaatctggagtcaatgctctaatctgttttttataaataatatatattatgtatatgaaatgtgtatctatagtatgtctggagacagacaaggctgcacactaaaatgcagataaaggtgatttgtagaaaatcataaggtactggacttcgttacaaagcaacttgggcgatctcttatacatgagcagatgaaaaatattttattgcctaagaatgagcttgcaaatccctctttgcagaaaaggttatagaatgctgttctttataaccaaagaacttacataagacaacatttttgctgtccactcttttgtgtgaacatgtatgtttgactgcaagtttggtgccataattcccttggctaccaagccacgtgctgccattctctgtcctttgtttcataagcacactgagaaatctcacagctatattctttggtcttccacctgcccctccacctgctgacttgacattgtattataactgttgacaatgactggggtcctgactccacagttgcctggaccgtggctcagcccagctgggcaggtggaatgaagagagccgtattactgtaagaaaacacaaggacagccaggagtagtggtggggtgggtggggtgggaggtgttgatttttgtgtgtttctgtgtgtgtggttttgttttggattggtaggtttcactgtggcgtggttttgctgttgttattttgcttgattctggaaaatgctgaggagatggactgagctatgaagttcaatggttca

SEQ ID NO: 119823 - DNA, 1835 bp, Homo sapiens
ttagcttcagttttttctgttatgctgagtattctgcatttcaaaaacatagtaacttgtaatgcttctacaatttgtaaaatacaaaataactggctgggcgcggtggctcacgcctgtagtcccagcactttgagaggccaaggcgggcggatcacgaggtcaggagatcgagaccatcctggctaacacggtgaaaccccgtctctactaaaaatacaaaaaaaaaaagttagccaggtgaggtggcaggcgcctgtagtcccagctactcgggaggctgaggcaagagaatggtgtgaaccccagggggcggagcctgcagtgagccgagatcgcgccactgccctccagcctgggcgacagcgagactccatctcaaaaaaaaaaaaaaaaatacaaaataacttacatttgtcacatagcttaatacagcttttttttttttctactagagtttcacgcagagtttgaagaggagaatatccctgaaaaatatattttattcctgtggtgtaacctatgaaatagtatccaatataccaaaggtaaaatatatgctactttaggccgggcgcagtggctcatgcctgtaatcccagcactttgagaggccgaggcgggtggatcacctgaggtcgggagttcgagaccagcctgaccaacatggagaaaccctatctctactaaacatacaaaattagctgggcatggtggcgcatgcctgtaatcccagctactcaggaaggctgaggcaggagaatcgcttgaacctgggaggcagaggttgcagtgagccgagatcgcgccattgcactccagcctgggcaacaagagcgaaactctgtctcaaaaaaaaaaaaaaaaaaaaaaaaaaaaaaatatatatatatatatatatatgctactttaaaaaatatcagtatctaaataatggagaatgtgttcattctccagacttctaaaacgttttctcaccacactttggatgaaaacgttgttcacatcaaagtattgtcacttccttcctgtcctcgtaggcaactgaggagatagaggaccgggaaacgctggctctcctggcagcaaggagtgaaaacgaaggcacatcagatggggagacgtacattgagaagtacactcgaggcgtgctgcaggtggaaaacattctgagtcttgaacggctccggcaggcaagtaactgaatatctggaccgaggatgaaagcaccagccttcacccccaatggacagatatgaatttacttaccaaacacctcactaaatctatcagagaaggagcacttgagccatctctattgaaaggactctggcaaaatagtaaccaaaataaaaataatgactaacttttattgaataacccctacttgccaagcactgagcctgagtaatttaggtatattatttcatttaatcttcaagataaccccctgaggtaagtactgttgaaatccccattttcaaatgagaaaattgaggctgatagaagttagctaactcacccatggttacacagctaggaagtggtacaaagtcggatgtaaagccaagtagcttgactccaaagcacatatgcttaaacacagacttactatctccctaatttttagacctgagttaacttttgaggtgacaacaggtcattcaagtgaaaataatccactaagtaatgcaactataagataagatatgtcatttcataggagcaatagttgacattattgggggaggtgttgattaataggaggaatgtaattggcatctgtcagaaaaatcttcccttagtggaaatcccacctgaattgctgcatgagt

SEQ ID NO: 119824 - DNA, 1306 bp, Homo sapiens
attaattaatttaaaaaatggatgatcttaaaatattgcagttatccatccataatcttttagatagactcttatctttcccatgctaaagtgcattctgctccttacatccaagagctaatattgttgtaatatgccattttactttacaagacttttgctgaataggaaaattggagacattttatgcgcataattgtgttttgtttagccagctttcttttctcatttgggtcacacttagttctccataacctatagaatttaaatctcagctttttctggttgggaatctagaaaaaatatatagatgtgcaaattgagattgtacctagtcagcactgactggcctgatatcatggagtgtggggttacgtacaaatagtcaaagcagcaaaccaagatgaagctttctgggttcggttcccagtctttgtacggattctccatacacatcttcaaaggatgttttcccagtgtgccttcctacatgtaaaatgtgggtacagtggctgggcgtggtggctcacgcctgtaatcccagcactttgggaggccgaggcaggtggatcacaaggtcaggagttcaagaccagcctggccaacatggtgaaactccgtctctactaaaaatacaaaaattagctgggcgtggtggcgcgcgcctataatcccagctactcgggaggctgaggcaggagaatcgcttaaacctaggaggcagaggttgcagtgagccgagattgtgccactgcactccagcctgggcgacaagagcgaaactctgtttcggggaaaaaaaaatgtgggtacactgttggtaaagtttcagaggtccaagggctctattcttgatgtaacgtcttaagtcttaaactagaattaggcaagtcaaagagcatttttaatagaattgatggattttctttccctactcataattccacgaagaaaaacctttaagggaaatatcagtatccccttgaatctcagcaatgccattgactaacgtcctgcggctgtttgtgcgcttcctggcacatttttcacagtgcagtccaatggctgcctaggggatttcttaaagcatggctgactgcatgttggagtttgcatgggagatttttgcttagcctcgtggtggttggaagtaaaatgtttgtggcaagtttgaaaagttctctgctgacctactctttgcatttcagaaaatctatgttatcagaccactgaactatggagctatgaaaatgcctgtcattttccattccatttgttgttacttggtttgggctctgttcatgct

SEQ ID NO: 119825 - DNA, 1035 bp, Homo sapiens
ttattcacaaataaagtattactctgcattaaaaaagaaaaaaactgtttatatccatatggatgaatctcagaaacattatgctgaatgaaagaagccagacacaagaatacataatgtgtgattccatttatttggagttctagaacaggcaaaactaatctctgagagttacacagttgctacgggaatgtggggattgaatgggaatgcatatgagcaaactttctgaggtgatagggcaggttacactcatatgtgcatttctcaaaactcatcgagctctatactcaagatgtggacatttcagtctacctcagtaaaataaataaaaagaaacaatatgacaggttggttttgagagttaaataaggaagtaacttatacaagataaatggcacagtgcctagcacatagtaagtgctcagtgaatggtggcttattactattactaacagtatccctggacgatgacgctcttgcttgttggaatgtgtttctgcaggtggaatgaagtaacgcgaagaatagaaatgtggatctccatattagaattgaatgagttaggagagtatgctgcagtggaacttcatcaggcaaaagatgtcaacacaggaggcatctttcaacttagacaggtactgagtttgttttgggtttttttttaatgttttctctctgttccactcttacacattgtttctggggattttctaactatttgtatctttattctctaatccttttccccttctttatcccgttccttttcattatcattcctggcacccatactcctccccaccctcttcagggtcattcccgtagagtacaagtcacggtgaaacctgtgcagcattcagggacactgccacttatggttgaagccatcctgtcagtatccatcggctgtgtaactgccaggtccaccaaactccaaagagggctggacagttaccaggtaagacaagcagacttaaaatagtatttaacaaagcttggttaatgcaggtcccagggggacctctttgccaa

SEQ ID NO: 119826 - DNA, 1130 bp, Homo sapiens
caggctggtctcaaactcctgacctcaggtgatccacccgccttagcctcccaagaggctacctaattgacagagaatttgtaacgtatagcatatcataatttttcaatgtatttgattctttgggcttgttaggaaatgctgtatgtttatattttaacttttacttaagttaaaatataaaggaaggactaattctcggggttatgtgcattatgaatttctctacattatatatttcacgaacatttttaatctcattgatcatttggaaatattggaccatcccaatcacgtagcttaacagcagtcactggaacccagtccagccttctgctgatgtgtttcttatagatatcgttcacacccacacatacccctacacctcactcactgtcccgcttaacattgctttatgtttctccatagtacttaacaccattggaaattctatgtaccatattgacttaactgttttcttatggcctgtctcctcccaccagaatataacttttcatgaaagacgggacttcattgggttcagtgctgtattcccagcccgagatcaatacctactacattgtagactctaataaatatatcttgaatgaatgaatgaatgagtgaatacaaggccttccgcagtagagacccaaccttctcttccagccttaactctcactgctttctgatatttgccaggggttcttggcccctgaaatcatctagtatgtccagaacctttctttagtgtgcttccgtatgccatgccccaagaacaccctatctttatatttctgttgaaattattcttatgcttcaagaactatctcaaatatatcctctttctgcagcctttcttggtctcttaacccatcatgatgtctctcctgggaagcccctggcattttgtacccttcaatagcacaacactctcctcttttgtgctctagttatgtggtcttgttccctctactagattctaagctccttaagagccaaaatggtgtctggttcatccttggtgcccctatcacgcctgccacaagatgtcatgcactgtagactctctgttaatgtggttgagcagagtagcatgtgtaatcccattggcattgtccccagaaaca

SEQ ID NO: 119827 - DNA, 1041 bp, Homo sapiens
gatcgcttacaaccttggggttggttatatcatcactggctgaccaggcagctggcaagggtaaaagcaaatttgtgccttatcgagattcagtcctcacttggctgcttaaggtaatccattgctctagtgttcttttccaactaaaaattggctattccagatgtgacagagtaaaggtgtgtacaaagctaaccaaatacctaaagaactctcctgatgacagttattctaattcctaggaacacagaatgaaaactattttctactcctttttattccatttgaatgctgtttgacaggccttattcattgcttgaatatagagaggacacatttcatcttgtcatgacgttatttgtgaaatgcaagtccatttccacataatgtttccttcatagagaataatgtcatacctaacacatttagtgcttttatcatatgtgttgtccatggaatgggcttcctaagatgctgtttgaaatacttggcaggacaacttggggggcaacagccaaacctctatgatagccacaatcagcccagccgcagacaactatgaagagaccctctccacattaagatatgcagaccgagccaaaaggattgtgaaccatgctgttgtgaatgaggaccccaacgcaaaagtgatccgagaactgcgggaggaagtcgagaaactgagagagcagctctctcaggcagaggtaaaagcagcctggtactccctgctggtaaagttccctggcttgcgggatttgactggcaagggtgtgctcatttgcaattgtaggtcatctgatatggtttcgatttatgtctctacccaaatctcatgttgaattgtaatcaccagtgttggaggagtggcctggtaggaggtgattggatcatgggggcgaacttcccccttgctgttctcgtgatagtgagttctcatacagcctgtggaaccatgagccaattaaacccccttttctttataaattacccaatctcaggtatttctttatagcaatgtgagaactgactaatacatca

SEQ ID NO: 119828 - DNA, 1012 bp, Homo sapiens
ataataataataatagtacctacttcaccgatttgttagggataaaatgaccataatgtgcttagaaaaatgcctagcacttagtatgcagtgaataaaaattaactgttatagctgttgttttttataatcaggataaccattatcatgattccaagttcaacagaaagtagtttagtgtgtacttgtaatctttttctgttgagctgtaataacttagggtttcgtttaggacagaatgtgacaagaggaaatgtattcaggaacatgtttgcacagcttgcatttaagatgatgttaacacattattattttcatatacaaaagtttaaaaattagaagtaaaatagtggcccctctatcagatggacacagccgtactcacagggaaagaccactactataggaagttaatcatccagtcattctgtctcctgctctgataacaaaggattttgctgtatttcctgacaaggcattgcaagattccagactggcactgcagccctgcatgccaaaatgagttcagaaaccaggatggggaggcagaaatgggagtgtgaaggagcaggtttcaaagaaaagattgccacgcctcgtggagattcatttgcaagtgctgggccatgcctgccggtggggcttgtgggatcacactagaaagtctgtagacttgttggaatttagagtgtgtgtgtgtgtatgactggcgtagatgtggaatgaccactaactttattgagctcttgctaatgccaggcactattctgaatgctccatatgcaatgtcacatcagcatcaaggcatgggtccgttatccccattttacagatgagaaaaccaagacagagcaagtttaatgatgtctcccaggtcaccaagttctaagtgtggattttggaaatggttgccgtcaattggtctccgagcccaggctcagccactgtggctacacttgtggggatggctgtgcattctgtttgccaggcagcatctagatgatacttttgt

SEQ ID NO: 119829 - DNA, 1026 bp, Homo sapiens
actccagcctgagcaacagggtttgaggctaagttggccactcttctgctatgttaccatggccagtatatggggaaaccttgtatggttgaagcattgcattttgctccctcctctacctgttcttctttttccttgctgttctccaggttcgggaaaatccttttccatgatgggccatgctgagcagctgggccttattccaaggctctgctgtgctttatttaaaaggatctctttggagcaaaatgagtcacagacctttaaagttgaagtgtcctatatggaaatttataatgagaaagttcgggatcttttagaccccaaagggtaagttagtggtcaagattaagtgtgttaatagggggagataattttaaatgattctaaagttaaaattggaagtgaatatacgtatttaagctcttggtgactacactggttttcattcatttacagaaaaatcatcagcttctcaaagccttttggtatacccagtgtttatcctacattaatgtataaagttgcctatgtatgccctttgaaaagatgtttttactattggtatttttttttgccaccatgaactattcacaaaaattgagttaggaataacacattagttcttccatttacattggaaagtggcactaatgtgttaagggtaaaagggttgaaggattgaaacatcccagccaaggcaagcaatgcccttccctggctgtgcattggaatcatgtggggaacgttttaagcatccacttgcctgatgtccacccatagagactgtattcagtagacccagggtgaaacccagggatctatattttttttaactaggtgatttaaaaatatatttatctgattcatagaggaaggggggccatttactttttctcaattaaaaaatttggggccgggtacagtgactcatacctgtaatcccagcactttgggaggccaaggtgagcagatcatctgaggtcaggagttcgagaccagcctgaccaacatgacaaaacccca

SEQ ID NO: 119830 - DNA, 1397 bp, Homo sapiens
ttccaaagagaagagatagggaaaggaaggaaaactgggggctcagtttaaactgatgaaattattgatcgtgttcaaatattggatgcttttctatgtagttactttagaaaaacaagaaatactctgtgcatatgccaggtctgatctgtgcatcaccatgcttagtgttttattcagccatgggccataggtgtctgccttgtttaatgcagattttaaacaagatagggcgtatatcctcccatttcattctctcactttctagaacacagcccactgtgactcttttatcctgtgcctcttcagtcatcagatgttgggtgtaggaatgatagctgcatttttccttccatccctggtttctttcttgctatagaaagagatttgccttggttacccatctcccagtacacacacatggtggctttgagcctattgctgctgttctaagtagggacagattatgcacaagtgtggacacccaagggtgttagcttttcaaagatctctgtcaggctgggtacaatgactataattccagcactttgtgaggccaaggtgggaggctcacttgaggctaggagctcaagatcagctcagacaacatagcaagatcttatctctactaaaaaataaaaataaaaaattagccataagtggtggcacacacctgtagtcctagctactcaggaggctgaaacaggaggattccttgaacctcgaggagttagaggctgtagtgagctataatcacaccactgcactctagcctggtggaagagcaagaccctatctctttcaaaaaagaaaaagattcatatcgtatgtgactcagggttgggtgactcaggtctgtgactttgcttgtagaaattccatacaggagctctctctgttgttctgacattgtgttatgggttactttgggcatgcctgtgttttaagacttgttcacatgattatagaaggtctaatcataaaccccagaggaaattggcattgtggtcatggttattaacaagtgaggtcaggcttgccctgtgaatttgctgcaccaggcatgtggagctaacatctgcagagtggccaccgcctttttggcatcggttctgctgaaaagtcacaggcctcttggatttgacaatgttatggctctgctcggattgtctgggatagaaacaaatactcatagatcctcctgcttcccacgggacttaacgaaccttcgtttatgggctggtatgctttcccctagacaaatagcacctcattctatttgagtgtaaactagtcggaaaacgtttagggtggagatattgcgtcttttatgggatccacccatgcactgtttgaattccctgattcccaccactcagcgtaaacagctccttttt

SEQ ID NO: 119831 - DNA, 1084 bp, Homo sapiens
aagcagtctttgtaaatgtttaagtcactgctgattgcaattaaagcattcttgacaatgaatcaatacattttttaacatttctaaaatgtgccatgttagtagataacagtgacttccagtaactttggtttttattttcttcccagctctacagaaatcttcatatcaaaaataaaaaaaaagcagtctggtagtggcatatctggggtcagtgtggatgtgaacattccctggcctgagagattctaaactgttgactcagaaattatataacagttcttgccatatggcatgttgctcaaatgtgctgaagccatgtgtcttcgagcattgttaatgccctgcaactcaggagaaaggttgtacatctgcctcttattctgctagcattgctttatactgtgaggggacagaagagcacctccaatctgtggactaatgcagtgggaagagcagccatgtttgattctgttcccatcatgggggattttatgtgctcagagctagaaatgatttctgcttcatattgcttaactaaatattaacttaactaaccagaatcgtaatgagacaaaacatttgtgcagcaaaatttacattctaaaagccaacagtagccaaaatagaaccaatttcttagctgagttctacaatattaatttgttctagcatattgtattggttcattattttactattcaggtggtctgtttgaatgaagtcttttttctagtagttaaaagcacaggctctggagtcacacttcttgtgctcaaattctgcctctgccacttcccaactgtgtggctgtaggcaataataacagcacctccttattataaatcttgtgggttgaaatgagattatgtatatgaagcactcagcaagtgccttgcacagaggaaacactcaataattgttagctattgggtttaaaccataaaagttttccctatagttatgagcaatgctagtagttgctacttgaacagtttgttaaagtagggattcattataaatgatgcatgccattttaaaaaacatttatgaaaaaatatgccaaatcctcccagatttttgt

SEQ ID NO: 119832 - DNA, 1090 bp, Homo sapiens
atagcctaaaatttagtaaattttaggttgcatgatcacattgagtaccatgtcccagttagccctgaaattggcttctgccagctcatagagcactgtctacttaaaaaatttgggaggatattttcttattcttcagatattcccattatcatacaaatactatgatgctccttctccttagcaaaaggtaaaattcatgcttactattctctcaagtttacatctattgtaaataatctgcctagtaaatacgttacgtgtagattagttgatggtttccatactaatttttctcttcattaaaaaataacaattccttcttaattgggaataaaaacattaagatagaagcattcattatctggtggaaaacaggggaagtggagaaggggaagcacatatttcctgaaaccgacctatttgtcaggctcgatgaataatggcatcattgatactgatcaggactctcaaagccgctctcaaaactggggggtagcagggagagagacagagaaagataagtgcatggattgagaaagcaaagagaagcaagggctcttaagttttgtgtggtgtgtcaaaatgttaaattctcaatcatgtcttgctatttattaaaagctataggaagagcctccacgctcccactttctgatttagaaacacgtaattctctagtgggggtataatggcattgtagtgggttggttggagcagttgaagaatatgggctcttaagtcagacttggttcaaatcctggctctaacaccttctatctgtgtaaggccgggtgagttactgaatctcacgatccttctgtttcctcatatggtaaataaggatactaatagttctgatctcatagggttgatctgagggctaaataatgtattcatttaaagtgcttaatccagtaagtacctggcgacttagggaggaggaagcactgccttaatgtttatcgttgtctttattattgtctcattgtgacaggagtcagcactttggaaagaaaatgcaatgtactgagatttatgacaactggttttgccacaaactgctagaccttgggcaggataatttctg

SEQ ID NO: 119833 - DNA, 2671 bp, Homo sapiens
atttatgtaaaaataggctgccgtttaagtacaacttgtcataaatggcagtgtgggacatttacattcttttggtctacagttctgagactattttttatgcatgtatgtatttattcagtaaacatttatcctctgctgcacgtcaagcactatgccagacccgataggagagaacccagggtgagtgtgacccggcctctgcttggaacgagatgggtgtctctagccaggccaggtgcttaccatgtgcctggtgtggggtccatgacaccaagcagggcagacctaggcatcctgttggtgcagctctgtaaaggggacaagacagacaacaaaccatgactccgagaaagtgcaacaggtgccacgaggaaacagaattccaggacaggaaggtcagggaatgcctctctggaccaagggggagaaagaaccagcaggggagggtattcctggcagagggggcagtagcttgaagcctccaaagtggaagtgttatgaattcttggagggtggaaaggaaatgggagctgggaaaggtgggcagcatttaccatatcctacagacgacaatctggaacttggtatttgtttatcccaagtgcattaaggcattgttgcaggattttaagccaggtaaatgataggaaatttatttgaaaaagataattctggttgcaaagttagctacgttgttaaggggatatattaaaggccctgaactaggttttaatcctagttttgccttttacttagtcttgtgagcagtttactcatctgagaaatggagctaatgagtccacctcaatagtggtaaggattgatgaataagataaggtgtcaagaaccatgtgtaaggccaggtgcagtggctcacgcctgtgatcccaacacttggggaggctgagtcaggtggataacttgaggccaggggtttgaaaccagcctgggcaacatagcgaaaccccgtctctactaaaaatacaaaagttagctgggcgtggtggcgggcacctgtaatcccagcttctcgggaggttgaggcacaagaatcgcttgaacccaggaggcagaggttgcagtgagctgaggtcgtgccactgtactccagcctgggcaacagagcgagactctgtctcaaaaaaaaaaaaaaaaaaaaaaagaatcgtgtaaaatgtagaatatgctcaataatgttagttccccctccgttttcctccttcccgtagagtagaatatgtgagtaaagtgttctggcatcatggaaatgcagcacagtctctagtgatcttggggacagcaacaccaagcccagtggcagctccatgaaggttatgggcacagtgtctagtggggaattttttttttttttttgtaaagttgacctggtccattcaagtattgcaatagtaatggtggctttatttatagcttgttgtattgagattatgagtttcgaatatttaacagattcttcccttcttcatgccttttggaagagagaactaagttgctaatgcagtactacactactgttacttcaccaataatactcagggttatattaataggagaatctgcaaagtttaatgccacttgttcatacctggggctctcctctaaactaaataaatttcttaacctgtccattcatttgtattttcctgttgttgtgaatctctaaatatcttgcacaaataatgagtttcctatacaatttgaggagactgtgttattctgaagaattccatcatcataatggtgttcattgggtctatgttgtgagtttgtctaatggaaaaaagatttgtttctttttaactgcataaatagtagattcaaataaaatgctgttaagtggaatgcaggtaataaaaaccgattcagacatggcagctagcctgatggggtttgtagcataacaggaagagaaacttgcaaccttattttagccatccttagattggtctcaggtttgcctcatagtgaattctgctctgggaaggtaacaggcgttataggaaagtcatatacacagtgaggtttcacatgagggcaagctccttattacctacccatttatttattctgtaatgtggttggatgtaatttaaaatgggtccttggatccccccttgactgcttttaggtttatgtaggtctagaatcaaaatccttgtattcctagtttgctgtccacaatgaagatttttaatgtcatatttcctaacctagagaataatactgccatgaacgcttgccactagtgtgacttttgtcacagacatgtcattggcagagactcatttgtagctcccaggtctgtattgggaatcaggatgagaaacgccatcctgcccagttagcatgcctcctaaaatctcatttgtaatagacatgggattcatttgaactgtaatttattttattttattttatttttatttttatttttttttttgagactggctctctgtcacccaggcttgagtgcagtggtgccatcttggcttactgcaatgatcctaccacctcagcctcttgggtagctgggactataggctcttgctaccacacccagctaatttttgtctttttagtagagacggtgttttgtcatgttgcccaggctggtctcaagctcctggactcaagtgatccacctgcc

SEQ ID NO: 119834 - DNA, 1049 bp, Homo sapiens
ggatcgcttgagcccaggagtttgagaccagcctaggcaatgtagtgagaccccatctctatttttttttaattaaaaaaagaagaaatatgtacaattaaagaataataatagaaatgaatatccacataccctctatctagctgaaaacacagataacccatgttttagaagagtggacccaaaggagtgtccttctaaataacctcactttcctgatttttatggttatcatttctttcttttttttttttttttaagtttttcatttaactatttatccccaagcaatatatttttagttttgccctttttggtgaattaatgtaatagaatcatgttgaatatattattcacgggcttgctttcttctttcaacattatttttttcagattcatccacattgatgtgtgaaactgtggttaatgtccttccactgctgtaaactgttgcattgtatggagtaccatggtttatttttccatcctccaggtttgtttcttcactggtgtttggaaaacaacatggactccaaactcctcaagtcaccttgccacagatcccttgagttgggggttgggaatttccaaattgttggctttccttagtggaaatactagatgttctcatttctggagaccttctagagaatggactgtgatggacttttgcaggggctgttagctgttgacctgagtctcctgggtctggagttaaagccctgtgtctgcaggatcttgtcgatgagccctcccctggggtcactccttctagtgacttgaaataagttaaattggacttgaagtgagttaaattgttgtgggcccaaaaatgcttccagtgttgttaattaaaagttcaatgtattgtgtttgatgcccctttttacctgatttaaaagcttaagtttctctttggattaatcaataaaagtacttctataagtaaactctgcagattttttagtcactcaactaataggacttgcaggaaaagtgaaatgtctataagcaaaaaacaaaacttctactgggggaagctttggagc

SEQ ID NO: 119835 - DNA, 1032 bp, Homo sapiens
aagttcaggtttaaatgattcatgtgaccaaaggtattctgaagttgaagtttaggactttatgtgacctctattatgtgttttctgtgaacatctttttaaccatcataattttttgcatggttatattctgatgacatttaacacatgtgaccttacttgaagcagggaaatacagtttcttactttgtggtgttctaatggtaaactatcttggacagcatgatacagagcagcaaagagaaggtatttatagtgaggcatttgactgctttgtagtctccttgtagcataatagatacagcagaataaagtgaactccggatttccttttccctcaatccctttgcagcactttggtccatgaagtagaacccattgtggctcctctgccctttggtggtggcctctgatgtggctagcacctggtattcccaggttctgtagctgtctggatccactgacaccaccaccttagggctctgagagtgtctagattctctcatgttactgattccaactggtgtggaaaggtttccttgaacttcatctgagacaggtttggagtactttgaacattttagaaaataaaccccaaaaatatgttcacacaaaacacctacgctatagagaagcatgcacatgaggggtagtcattttggttcatgaaactgtactgtgcaaagtctgatgaagatgggatgagttggcccaggtgactagcttcacagacttcagtttatttttccatacttaaaccagcctgggaagtagatacctaaatttctgcaggaggtcttcagctttcatatattgcattttctcgcagcctgtgtgattttgcacagtatacaggacagaaagattctagactgcctttctcttgctgaagcctgtctttcacatatcagctggctgatgactgtgagtggtcagggtgttgttgctgtctgctggtgccagcctctggagtgtagggggtgctgctctggtgctgcacgggctcacgccaagaggcctgccaggtggaag

SEQ ID NO: 119836 - DNA, 1013 bp, Homo sapiens
tgggtgaccttgagcaaatgaaaagcttgactttttcctctgctttaccgtattgtgatttccttggggttggcagagatttggaaagggatgtattccagaactggaaaaataatttggccaaattaagcaaaatctccatgggatgttggtgccacttaccccagttttttttttttttctttccattctcacagacttcctcctcgcttcaaccctctctctgctatctgagtcaaggcctctggcctgcatacaagctgtaggagcttgcatagcgtttctggaatctgtacagtagtgctgtgctgtggtggggtggggagaaggcaaatacaagggtgttgaggtgacagttccggtgtgtcagattggtgggtcagagaactgtttgctcagtgccagaatgttggaaaacaaaagcaagtttctaagtaaccccaaaatagattcacaggcaggatcaagaagctaatgcagatgttccttattttttagaaagaagatctaaaagccttatgcaactatgcagaatttctaaaatggatttcataaggtcgcaacgttactaaatgacttgtttattcagccagcaatgctttagtctggctgactcttggtgtttaattgcattagttctatgaagcattttgtgatgttgttcaccgatgtacaaggcattcgggcatacaatacagtatttatgcaatatttaggtgattttcaaaatataagcctggtgccaaatatggatgtaaaattttaaacagtatgtctaccataaccccatttgggaggggaaaagttatgtgtgtgtatctgtgtgtgtgtctagcatgtgtcggtggttctcaaactttgacatacatcggagtcacctggagggcttattaaaacacagattgctgtgtcttcccctagagtttcttattcagtaggtctgcagtggggctcaagcatttgcttttccagtgagtttccaggtgatgctgatgctgttagtctggggacca

SEQ ID NO: 119837 - DNA, 1158 bp, Homo sapiens
tttgtgcttagatttgtttaaatcccttctggtttgtttgaactgaatcagcttgttctcagctcttcttttacttatatatgaggaagcagagatttgtaattttgtatttatggagatcaacaggaaaaatcagatactcacactctgagactctgccagatgtaatttacatttgaacaaggatttacaaaataacatggattaagttaaacaattagagcagtatgccacagactatatatcctaggaaaactatttgggtcagtagtttttgttttcaacagacccttgcattgtgagtgcccagtaaattggttgtaattaataattgtcccagtacaagtctttgtttaggaataagggagctagctaaagtaagtttgtgactgcattttgtaggaaatatgttagttaatcagtgtgttttatgaatgtgaaaatcattataattattacttttaaaaccaccaatagtgcatttgttatctcttaactctgtttagaagacctcttagtttgtcattctttaggcttaaaaactcgagttggcacttgtttttttattactgtatatgcagtataatgactgtgtagtgcaggacatttaaactgaaggcagtgaaccccctgacattaaaagtaaaagtgtgtgtatgcatatacaatttctaagagtgagacttcatgtctttgatcaaaatttcaaaggcttctgaaactctagaaaattaagaactggtgacaggtgtattttgtgatgttgtttagaagtatgtttttcttttcctttcctgtctcctctttaccccttaagagacctgcactaacaactaaatacatttagagaccctgtatgcagttaaggtctccagacagtcacagttgtttatattaaagtgctgaaatatatcagcagctacttactatttctctaatcactcagtagccagaattaaaatgttgatggtgtctttaattcatagcaggagggcttttgtggttactgtaataaatattaaacagagccttctccaaagccattggtcacatgctttgtcccactagtaattaacttatcattgagctatggtacactctggcgactttttcctaaaagatttattttgacaaaccagggcacgataaatttttcta

SEQ ID NO: 119838 - DNA, 1039 bp, Homo sapiens
aatgatacgttatactgtgaattcactccttgatgacgaagtcagtaggggcttcttcccagctcatttcacttttactttgctgtttctcctgcactactatatgatagacaccacaattctttacattcctttattctgctgggaatatacctctgaggaatgacatataaaaatatttctgaaacatttaaaacccatggtccctttggatcaacttaaaaatctcacctcctcctgagagatgatgctctcgatatatcccctgggtaaaggaaggagctgccctgtaccccaaccccaactataactgatataagaggatccctctttgggtaatagtattgaaggttattaccccaaaatggtcactgatttgttagccaggctgatcacattcataaatgcatagttaatacatagaaagagatacctatttgtggggagagtttgcttagcaaaaacatcttggttttaaagtttagcagtgttatttttagttataattcatttgttaagtttagtcaacaaacattggtgcccagaggctggtccattagtgtttccagttaaggcaaaatccaaaattattttttatactcgctctctttttgctactctcaaagaatgtttacttttttttagttactaaagagtgattttccctttgactcataacctttttttatgattttaccttgttggcagatttttaactcctaaaatttccccatgggttgaggaatcacaaatgccattcaaaatgaatgcatgataaacctttttctagccaccatttggggaggacatgttaattggtgagaactgagagttttgttttttgttgttgtttttttttttttgaggtggagttttgctcttattgcccaggcttgagtggaatggcgcgatctcggctcaccacaacctccgcctcccgggttcaagcgattctcctgcctcagctcccaagtagctggtattacaggcatgcgccaccacaccaggctaattttgtatttttaggaaagacgaggtt

SEQ ID NO: 119839 - DNA, 1059 bp, Homo sapiens
ctgaatcagatgcatctgagtaagaaactttggggctggctgataacatcagtttgattctattcattgcattgtcattaataagccagaactaattggagaaataaaatttgagtcaagcatgaggaagattccaattaaatggaaaggtgtagattggctgtgttacacctccaatgtatggaagctcagaggaaagggagagagagagagaggaccacaggaatttgtctggccagagtagatataacagaagtactctgtggttgagctgcctccgggtgcctgtggatgttgtccagactcagccttacttgcacacagcccccacaccagcatcagctgttcctgagggcagggccggtacagatggttgtgtcctgccccaccctctttcaagtggagcctctctggctgctgcctcttcctggctgtgctcatctctgtggtccgtgtcatctgttccctccgttgctacttgcctgcacaaattttctcctcgctctgcttttttaacggtctcccttatgacttattgcttcttctcctcagcctttgcagcaaaagcttgaccttttatggacatttcaagcctgttcttcaatttattaccatgttttttttttctttgttttttgagacggagtctttctctgtcatctagactggagtgcactggcgcaatctcagctcgctgcaacctccacctcctgggttcaagtagttctcttgcctcagcctcccaagtagctgggattacaggcacgccccaccacgcccagctaatttttgtatttttagtagagatggggtttcaccatgttggccaggttgttcacgtgatccacgcgccttggcctcctaaagtgctgggactacaggcatgaaccaccacacccagcctattaccatattttcagtgcacctaaaataccatcaattataagacacattggtatgtaggtgccacacaaaagaaaaaccattgcccgttgaactattaaaccttgattgtcaaatgtatcccaattctgaaattttaagatgtggaaaatagac

SEQ ID NO: 119840 - DNA, 1036 bp, Homo sapiens
cagaattctaaaaacattgacctgggttatctgggataaaatcaaaacaactgtgaagctctactgacctaagcccatgaaaaatttgccagactagtatcatttttgtccaattgtctatgttatttcaaaaaaaaattctttaaacttctgtctttctcttcgagaaagcagcattggtgcatgcttattttgataggattccacctacactttcttcctcaccgacattttctactgtttttataaagtagataacactgacttttctactgatttttataaatttgatttacttatattttatccaatgattgggtttagtacttattttaatttttgctttctaaatatatatatatatttgagggcaatagagaataaagtacaattacttgatgtcaacctttgagaaccacagacaagatttattacaacatccttttaggccagtgaatgatcacagcttgtaaaaagtagaaacttgggcttttctgattatcagttatatttttcaagggtgtttgttttataagaattagggcgatggctacgatatgagctgctgtaagagaaggaagagagttgatggagctgatttactctaaactgaataattagttcttggctaatatactttaaaattaaccttattgagaggtgtgggtgtgtgtgggtgtgggtgttcagagacagggtctcactctgtcacccagactggagtgcagtggcatcatcatagctcactgtaaccacgaacctcctggaatcaagctatcctcctgcctgagacttccaaagtgctggaattacaagcatgacccattgtgcctagctgaggtgtaaatttatctacgataaaatgcacccattttaagggtacactttcttgagtttttacagttgcatatgcctgattaaccactatcaccattaagatatagaacatattggccaggcatggtggctcacgcccgtaatcccaacactttgggaggctgaggtgggcggatcacaaggtcaggagtatgaaacc

SEQ ID NO: 119841 - DNA, 1061 bp, Homo sapiens
aattttcattttagccttacttttggtttgttttgagacagaatctcactctgtcacccaggctggagtgcagtgacacaatcttcgctcactgcaacctttgcctcccgggttcaagcaattctcatgcctcaacctcctcactagctggaattataggcacacgccatcacatccagctaatttttgtatttttagtagagatggggttttgccatattggccaggctggtctcaaactcctgacctcaagtgaactcctaacctcaagtgatccgcctgcctcagccacccaaagtgctgggattacaggcgtgaaccaccacgcccggccccattttagccttacttttatccaaccacctacttatttgagaaataaataaagattgtacgtctttttaattttacaagcaaataatttgatgagtttgtggttattccttaatctaaaattatgactaaagataatgtgttatctatcaccaaaaagacaaacataaattaacaaggtcaagatcaaccctgttaataaagccactggataagtaatgagatttaacatcacacatatctttattgctatgctctgaaaacatctcactaatgaagcacagttaaattgctttgttttgagtcacttgtaataatttattttccttcctgctgctaaaaagagaatggaacttttgactcagtaaaagctatgtgaaatcttgtaaggattggagaaccatttctgcatgtgaactctgagtttctctcaataattattgaaatactggttattaaaatggtctgtaggagatttgaatcatatacaacaaaagccttattcatctctacctatgatatttcatatttgaatactattcttagtaaagttctagatggtttgtatggctagatggttgtatggaaacaacacttatttatcacctaagtaaatttgcagacagaacatagctaaagattaaatatgattaggatatctaaacatgatactaagaacaattagagaaaattaatccagacttcttggaaagcttgtaaccttttca

SEQ ID NO: 119842 - DNA, 1055 bp, Homo sapiens
agcctttgaggaaagggaagctttgctctttactgttggccctttgtattgtcttggggagacactccctagactgcacacccaccacaaatgaccataaatatttctgtatctcaagctggagcctcaggaaaaccagaaagcgcaaaacgacgaactgcataggcatctgttgcgagtgttgaaaagatctgtcccggattttggaagggccacattcaataaatccacatgtagtttgttgaacagattaacaagcctttaaacatacttacattctgttctagggtttaataaaacaagtcctcagaattgatgcctttggcgcccacctattttcccagctaaagagagaatgtgtaaagatttatagctgagcttgcagttgtaattggacctttgtaaggtttttaaatgaaatactgtttttggttttgttttgcctttttgctctctacttctattcatacagttaattaaagtttagtattcactatgcaaattgtaacagggaatggttacattatgacattgagaaagatccttaaaattacttgtttcaaggataatgttttgaataaagaggaaggaggatagtagtggggaaggtttatcaagataacggtgttaaatttgagcagccttatccacttttaagcatctccttttgaatctagacttacaaagagttacagtacaaataggtaacattagcatggtaatatcgctttaagttttttgaagccttgaagtattgttggctttgatggaatagtattcttctttctaggattacagcctagtctacatttttatgatgaattatgcattggaaatagtgttcaaaaattgctggtctactgtaatcctagggacattttttttaagctctctagctagattattatttaactagttttggtttttttccctccaagagtgactgttagctgcccttgctcattggttctcagacttaaggatttttaaaaaacagtagaaataaaaatttggataaacagagagttcccagcctcttttaaatatgccgagta

SEQ ID NO: 119843 - DNA, 1420 bp, Homo sapiens
tttcatggtgatagtaagtaaactcattgagtacattaaatatttacagattaaattagatgcccatatcaccaacgaatgtcccctccccccacccccccgcaaactgcatattgtttcgggaaaaaattctgttgggtcagattcttgaaagcagtctgggggaacaggtagaatactttttagctcctgttgtgtagccgttacttgttttccttgctggcttggcacctgctccttgtcactcttaaccataagcagtgcgactgttagctactgtttaatgacatgaagtgttgtcatttgtgaagagaaacagatttgattttgtgggatttggtacaatctataactgtggacagttggttccaaatgctaagtaatcagttgatcatttttcgggctgaaccacgttagttactaatcaggatcttttaggtaaagatttgaagggtgattttgggatctattcatctgcttacttacgatagtcccttatctggagttataaaaatagcattgaaatatgggtactctcgtgttttgtccttctgacggatctaattctttgaatagcagatgagctttctgtgggattctgtcttgagtaccggtcatttcatttacagacaaactgagtagtcaacaaaacagtgctccttgtacattaggattactgtctttgcacagatgaagacaccaaatgcatttttattttcattatgcagcttggtttcatatttctccacagacttttcccttaaagtaacagtgcatttaaaaatagaaacaattcctcccttgggctctgggttgattaattgcagcagtgcttcatgctatgtttgcaattcatttctgtcattggtttttagatagtgctcagggcagggcaaaggtgaagagtagaatactgagaatgttattatttttcatatctgcaagtccaaggtttgaagtgtaagaggtctttaaatgcatattggcaaacctgtgtcaaattgagaattactgtttttctgaaagttgcaagaaattaccaatgaattagccatggatagaaattgaaggttagtgggtgaaagttttcagtcttaccagtaaaaacaagtgagaatgcattgacgtccagggaaaaaaaaaaaaaacagatggggtcagctttcattgtttccccattttacaaaaccaaagccaagactgtgtagctaggactaaaagatcagaggatctctgaggttaaagatgtttgttttgttgctgaaattctagtattgtaatacattgcataggtccaggttagtagttgatatgtatactgatcaccattctgaaacattaagacacatggatttgtttcttaaaataccattgcattgctctccaggagacatttatgaagttcagatcatttcagtac

SEQ ID NO: 119844 - DNA, 1071 bp, Homo sapiens
attggttatatttaggtgtgtttattaatttgaaaaatcaagaaggaagacattttagtatactaaaaattttttcttcattttaagacctaaggacccagcaagtggagatatataaattacatcaagtgccaaaagttctgagaatggattcatataaccctcaattgtataaagttgaaaatatgctatcataaaaaccctcgataagatttaataatggcttttatagctcatgttttcatttccttgttaaccatttcttgaattctttgttgcattaagtacctattttctagtattcagttagattaaaatgtttgatgaaatttcaggaaactatactttcttttgagaatgcataccttcccaggtgacagggtcaaatgttgcatgaacctaggctgattcatttatgttcctaaaccacacatttgacttcagatatttttgctataatacttacatatactatacatttacaaatactatatatttacatatatttgtggttcatgttatgaataatgtcaggtatattttatatataaatgaagagatttgtatatttatgtatataataattaatatttatatgtgtctatgaagagatttgttagagtggacagccttttgaaaataaagtccaaaaagccttctttgggtataacaattataggtagatagtccttttttttttttttttttttttgagatggagtctcactctgttgccgaggctggagtgcagtggtgtgatctcggctcactgcaagctccgcctgcggggttcatgccattctcctgcctcagcctcccgaatagctgggactacaggtgcccgccaccacccccggctaatttttttgtatttttagtagagatggggtttcaccgtgttagccaggatggtctcgatctcctgatgtcgtgatccgcccacctcagcctcccaaagtgctgggattacaggcgtgagccaccgcgctggccggtggatagtactttgaacatcattagcattttctccaacagtatgatagatgttgtagaactaaatggcagtttatt

SEQ ID NO: 119845 - DNA, 1054 bp, Homo sapiens
ctatagtaaatgcttatggtgcccattttatgtgtgagaacactgaggcttagagaggttaagaacttgaaaatggtggcttgagccaggtggtgtggtgacgtgcacctgtattcccaactacttggagctgaggtgggagaatcgcttgagcccaggagttccaggctagcctgggcaacatggcaagaatgtctcaaaagaaaagaaagaaaactgtagctttgtatttaggcaatctgacatacattcttacctaccaaagtgtataataacttgctccagactgttaaaaatatttgcagatgctaatatttaatggtctgatttttcttttgcagattatttaatgtaatggcaactccacgggggaggacaaagaaaaaagcatcttttgatcattctccggatagccttcctttgaggagctccggtaggcaggtagtgttcatttattcattcaacaagccttttttgagcatgcagaattactgattgggactggagaattagagttgaaaagattactccagccctcaagttgcttgtattctaggggagaaattctcagtacggtcataacacagtgtgataacatgatagaatatacaaaatagaagcattatctggcagagggaactgtaagtataaaggcgtagagtgtgaatcagcataggatgttcagagattcacggctgtgtggttgcttccagagtgtgaggctggggccagatcatgcctggcttggatgtcattcataggaatttggacttcagcttggaattggttgaatgctattggagggttatgtatagggctttttgggtagggcttttattcttttaaaagaaaaaattgaacaatgtaattctttctctataatttttctagctttttatttaaaatagagggggccaggcacggtggcttacaccacctgcaatcccagcactttgggagtccgaggccggtggatcacaaggtcaggagatccagaccattctggctaacatggtgaaaccccgtctctactaaatatgcaaaaaattagctg

SEQ ID NO: 119846 - DNA, 1069 bp, Homo sapiens
aggaaggcagaggccacagtcttctttctttcagagtcccactgcccacctcagcactgagattagtctgtgagggctgtcatcacagagtaccgcagactggctgccttagacaacagaaacttattcctcacagttctggaggctggaagcctgagatcgaggtgtcggcagggttggtttctcctgggtcctctctgtttggctggtagatgctgtcttctccctgtgtcctcacatgggcttccctctgtgtgtgtctgtgtcctcatctcctcttcttatgaggacacaaatcagattagattaaggctcaccccggcgacctcactttaaagtaattacccattggagaccatgcgacgaaatacagtcacattctgaggcactgagggttagggtgtccacatgggaatttgagggagacacggttctgcctgtaacagtgccctgtacctttttttacacaattgtcttccttcctttttttcttctcacatcatacacacttccctttttttttttttttgtaaggatataaaaggctcggtattttctacgtggattctatatttactgaagccctagaagctttgactacagctttccttttaagaggagccttggccagctttttttaatatcgcacacatgcagatagtctcttttctccacggagctcaggatactttgtttgccagtgtactaaatctcaccatctctggagatttgtaaatggccatggcttatatctttttgaaataaaggagcagaaatagaagtgaaatgactcaaaagttatgtaagttaaagagaaaggggcattcagatatgttgcttattttatttcattttaatttatttatttttgagacagagtctcactctttcgcccaggctggagtgcagtggcacaatcttggctcactgcaacctccacctcccgggttcaagcgattctcctgcctcagcctcccgagtaggctgggattatgggtgtgctccaccacacccagctaatttttgtatttttggtagagacagggtttcaccatgtttgcctggctgg

SEQ ID NO: 119847 - DNA, 1083 bp, Homo sapiens
tatactggtttgctttaaagaagggactaaatatgactttaaagagacttcaaaatattgagtattttaaaaatttaaaagtaggtcagtttataacgagtaaatacctaacacaccaagaatgtgcagtgaacctcaggcatttaagacacctcccccaccgcccgccccccgccccccccaatcaaagtgtggtcccaaaacaagccaacagctgtatatctcaaaagttaacccaagacaactctgatatttaggttatttgttgagactcattggtactgactggcaagtattctgctttaaagtatcatgtattaaaatgtttagacagcatgtgttttaaagtgataaatgcaaaatgttaagtttgaaatggttaacagtaaattattatgttagtttccaggcacttgaactgtgctacaagtaggggaaaacctactttaaagtatggtaaatgtgtgttttaaacttcctatcaagtgacatacttcatttgattttttgtttaagaagccatggtacttttttcttgagttactttggatatgttttttcaatgccatctgaagattttgtaattgagtagcagtaaatatacagatttacaatgttttaactacagttcatgaatagctggttgtgtaaaactaataaaaaactagactttcacatgtactctgtactgtagtggtgatacatccatttaataagtgtgcgtactcatcaagaactttcatacagaacaactccatttcctcacttccaaatactctatgcatgactacttaccttctttatagcaaatggtcataaaattaaccttaattattcagttttgtgaagtcactccaagaaaatggtccattaccacaaaagagtattccaaattgtataggttatagggctgaatcaatttaaaaatcccttttcagaattattccccataaggaaatgctatatacacctataagatatcaaatgcaagtgacttaaaacaccagtgatttagatttatttttattgacaaggtttataagaacaaatatttaaaatcgaaggccaattattaggtctcat

SEQ ID NO: 119848 - DNA, 2983 bp, Homo sapiens
acagctcactgcaacctcaacctcctgggcccaagccatcctcctgcttcaccctcctcagtagctgggattacaggcatgcatgaccatgcctggctactttttaaattttttgtagacacaaggtctcaccaggttgcctgaggctggtttcgaattcctgggctcaagtgatcttcccacctaggtttcccagagtgttggaattacaggcgtgagccatcacatctggcttgtttatggttagttaattcattccagactctcagcctgaaaacactgagaatgtttgcatgctagttttccacatcatatacaatattattaaaatactcatttggaatagaattccatatgggttaaccagagtactgttgggatggttgtggctatttgcacgtagcagatttcctgcttttattcaaagacaatattactggattttaaaatctgcttttaacattatttttccttttcactatacataggtctatgaaaattatcctacttatgatttaactgaaagaaaagatttcataaaaacaactgtaaaagaggtaaatatttcagtctttcaagtttgactttagaaatataagacaaaagtaattacataaaatactccatatttttcaaaatattcatgtcactaaatatcacatttgatcctcacatttcttcataatagggaaatttatttcttctcattcccactttaaagcttaaaattaaagtttgaacagttagtgataagacctgaactcagattatgatgtggcctcatggtgtacctgggtagctgggcatctcaacgttgctctcacaaatacttgaggaagttcctgtctacgaggcaaaggtgaggggaagatcagcaggtagctgtaattctgtattgatctcaactgatttttgaaggacaaaatagtaaaatagatgtggaaaaaatgggataaaggtttatgatttatggcaaaataatgtttctctttcattacagctaatttcttgagatagaggacagagaagatgactcgttcccatagatttgaagatctgatttataccattataccagcaaagagaatgtatttccttttctaaatccttgttaagcaacgttagtagaacttactgctgacctttttatcttgagtgttatgtgaatttgagtttgctgttttaaattgcatttctatgccatttttagtttaaaatcttgcatggcattaattgttccttgcttttatagttgtattttgtacattttggatttctttatataaggtcatagattcttgagctgttgtggtttttagtgcacttaatattagcttgcttaaggcatacttttaatcaagtagaacaaaaactattatcaccaggatttatacatacagagattgtagtatttagtatatgaaatattttgaatacacatctctgtcagtgtgaaaattcagcggcagtgtgtccatcatattaaaaatatacaagctacagttgtccagatcactgaattggaacttttctcctgcatgtgtatatatgtcaaattgtcagcatgacaaaagtgacagatgttatttttgtatttttaaaaaacaattggttgtatataaagtttttttatttcttttgtgcagatcactttttaaactcacataggtaggtatctttatagttgtagactatggaatgtcagtgttcagccaaacagtatgatggaacagtgaaagtcaattcagtgatggcaacactgaaggaacagttaccctgctttgcctcgaaagtgtcatcaatttgtaattttagtattaactctgtaaaagtgtctgtaggtacgttttatattatataaggacagaccaaaaatcaacctatcaaagcttcaaaaactttgggaaagggtgggattaagtacaagcacatttggcttacagtaaatgaactgatttttattaactgcttttgcccatataaaatgctgatatttactggaaacctagccagcttcacgattatgactaaagtaccagattataatgccagaatataatgtgcaggcaatcgtggatgtctctgacaaagtgtgtctcaaaaataatatacttttacattaaagaaatttaatgtttctctggagttggggctcttggctttcagagtttggttaatcagtgttgattctagatgatcaacataatggaccactcctgaatgagacttaattttgtctttcaaatttactgtcttaaatcagtttattaaatctgaattttaaaacatgctgtttatgacacaatgacacatttgttgcaccaattaagtgttgaaaaatatctttgcatcatagaacagaaatatataaaaatatatgttgaatgttaacaggtattttcacaggtttgtttcttgatagttactcagacactagggaaaggtaaatacaagtgaacaaaataagcaactaaatgagacctaataattggccttcgattttaaatatttgttcttataaaccttgtcaataaaaataaatctaaatcactggtgttttaagtcacttgcatttgatatcttataggtgtatatagcatttccttatggggaataattctgaaaagggatttttaaattgattcagccctataacctatacaatttggaatactcttttgtggtaatggaccattttcttggagtgacttcacaaaactgaataattaaggttaattttatgaccatttgctataaagaaggtaagtagtcatgcatagagtatttggaagtgaggaaatggagttgttctgtatgaaagttcttgatgagtacgcacacttattaaatggatgtatcaccactacagtacagagtacatgtgaaagtctagttttttattagttttacacaaccagctattcatgaactgtagttaaaacattgtaaatctgtatatttactgctactcaattacaaaatc

SEQ ID NO: 119849 - DNA, 2872 bp, Homo sapiens
tgtaaatgggagaatttaaaatatcttggaatgtttaataggaagcttttcctttgggaacattaattaaactaagaattaatgctttctaatttcacaggctccacatgagacaaagtatgaactctgattttgtctttttttttttttttttgagacagtctctctcctggagtgcagtgtcatgatctccactcactgcaacctccatctccagggttcaagcaattctcttgcctcagcctcctgagtagctgagactacaggtgcccaccaccacacccagctaatttttgtatttttaggagagacagtgtttcaccatgttgaccaggatggtctcagtctcttgatctcatgatccgcccgccttgacctcccaaagtgctggaattacaggcatgagccaccatgcctggcctgtcattttaatctatccatatttatgtattttgtttgtgtctaatcacctatgggttagtgtttaagaacacaagttctggagtcacatctatatttgaatcttgcatgtttattaatgtgactgtggacaaggtaaccacactgagccttagtttcctcatatagtcataagtatttattgagcaactactgtataccagagactattttaggagttagggaaacatcagtgaacacaagattctaggccaggtgtggtggctcatgcctgtaatcccagcactttgggaggccaaggcaggcagatcatctgaggtcaggagttcaagaccagcctggccaacatggcaaaacctcatctctactaaaaatacaaaaattagccgggtgtggtggcgagcacctgtaatcccagctactagggaggcagagacaggagaattcgcttgaacccgggagggcagaggttgcagtgaaccaagatcgggccactgcactccagccagggtgacgcagcaagactctgtctcaaaaaaaaaaaaaaaaaaaaaaaagattccagttgaaagagagagaacataaataagagaagataatattatctatatttaggggtcccccccaagattaagtagagtaatgcatatgtagtttatccatagtgttgaataaatatgggcaactcttgtgtgtgtgtgattgtgatttgtcatgcttagacttgtgttgggataaaattgttgtatattagtcatctctcaaaaagaatttttaattgctgataccaaatatattggttttctctaatattattaaggggcataggggaagtagagggatgggatgggatagcattgaatctcatcaatatgtgtacttttactttcttttgtaacagccaccaaaaaagacagccaaaagagaaaaacctaaacagaaagctacttctaaaagtaaaaaatctgtgaaaagtgccaatgttaagaaagcagatagcagcaccaccaagaagaatcaaaacagttccaaaaaaggtatgttagaaataacattaatcagcaactttaaagatatagcatatattaatatgttgtacatagtatttaagtgtgtgggagaaacaggtaaactgcagagaacattgcggggagaagtaatacaggttgaatatcccttatctgaaatgcttgggacaggaagtgattcagattttgcaatatatatatatagagagagagacagagagagagatatcttggggatgggacccagtctaaacatgaaattcattcatgtttcatattcatcttaaatagcctgaaggtagtttaatattttaactaaataaattatttattgcagtggtgccgttacagctcactgtagccttgaactgctggactcaagcgagtctcctatcttggccccccagagcactgggtttacaggcttggaccactgcccttggcctgaaaccaagttttgactgcgacccgtcacacgaggtcgggtatggaattacctcctggtggtgtcatgttggtgctctgaaaagctggattttggaacatttcaggttttggatttttggattagggatgcctaacctgtataccagttttttatagtttttgatttttcaaattgactaaaatttgtatgcatgttttataggtaactgtagagtagtgatttataatttttttgatccagtacccctttgagaatctgttgaaagcttaaaattcatctcagcctttgttaaatgttaatttactatgtaagaaaaattattattattatattacttttagaaagtgagtctgaggatagttcagatgatgaacctttaattaaaaagttgaagaaaccccctacagatgaagagttaaaggaaacaataaagaaattactggccagtgctaacttggaagaagtcacaatgaaacagatttgcaaaaaggtaattagacaaatgtttagattattttgcttttgctagaaaaattctttcacttatctctgaatttgaagctaaatacttacgtgcattcacttattgaagaaagatttattgaactactatatgccagatctccttacaggtgctgggataccacttaaaatagtcaaagtctctgtcctaatagagttattttataaacaacattaaaatgaataaagttagagtgaataaaattaaagtgacacattccaaaccacataggaaactttttctgatctgtaggttgtttctattgatgtatccttagtttatgttagtttaaagaagcagaatctcatgaaccgtcttattctcttcttagtgtgataaatgagctgttatagattaggttcttaactcagacttctgcagcgtctttctaatatttctaatacttctcaggaaataaagtggccttgtcttgaatatgattccatagggatt

SEQ ID NO: 119850 - DNA, 1033 bp, Homo sapiens
tgattgtttaaaaaaatgaatatgcaacaaagattatatgtagccgggaaagctgaaaatatttactatctggcacttcaaagaaaagtcttggtgacaaatctagtccataaatgtgcttttcattttatgtggtatagctagatgagtcacctctggagcttcaaaaacatatacaggtgctcaggaatcaggatgtttggctgtaacacccttgttcttacagcttcacaataccttccataaagtagggataatgaattgcaggccaagtactttgagagtatggattaatcaaattgatggtattgtgaaagatttagaggaggtaattgttaagctaggtttagaatcatgagtggggttttcctaagtacaggggaggaatgaaagtaatgaagatttgaaagttcatgtaaaattaaaggggacattgtttaacttgccttgtcagctctccctgtgtttttttctgttacctccaaattctggttacccatatttaccttgacagacaaaaattgtccattgtgtcctaataccaaggtatgtcctttgagatgcccccattttccagagacctattcctcctatacctaataaccttcagggcagccgaagtgatgaaaacctgcaggactaaagcacaagatacaaattcattagtagttttactgttcagctttcatgatttcttaactcagcattaatctaaaaaagagactttaccaaattcctaccttaactttgtcacagaagaatttacagctggttgctaaagataaatgaaattctgtataaatgacatgacgtattactatagatgtttgcgggccatgtcgtatctactataatgtagtgaagtaagtgcgatatatcatggctagttaatacagttgttattgagtttgtctcactgtgtttataatttccagtctgtgtatctgccctgcttttaaaaaaaagaaaattagttttttagagatagggtcttctgattttgcccaggctggtcttgaacctctggcctcaa

SEQ ID NO: 119851 - DNA, 1096 bp, Homo sapiens
gtatctcgaaagtatgaaacaaactgtggagttttacgagtatttagaatttatctgaatgttgccatatgttatcaggaatgttttctgctgaaataattgtcagccttactaataatgttcgaaacaggagtttatttttctttcatgacaagaagcccacagacagggacattctagggccagtacagcagttcaagaaaggaattgaggatgtgggtactgtcctttcctgatctctcatctttagtatatggcaattaacttcatgatcacaaggtggttgttttacctttagacattgtattcatgttccagataaggaagagcaaaaggttttcttctagtgatgttttggcttttttccctgaatgggatgccttttaccagagatctccatatacatggcatcagccagcactttgttgtctgcccacctaactgcaagagaagctctgagatctaggtgtcagctttcctacctttataagaggaaggcagatcaaaagtgggtggttcagtgagccatcttacaatgtttgccaagtcagagaaactccattataatttttggtaaactatctatttggaccattcaagggattatctggtagtggtaaggtgaatgtgaaagttttgttagtcctttcacattgtgttttagaaaactaaactatctcttcctctcacacgttgatcagaggaattgcaaaatctgtataaaccatttaaacctttcgttggaaggcagaattgaataatcaccatactaaaacccatttaaacttgctttcataatcttctgtgaaatataactagacttgcacattctttcctcttggcattctgagttttctcagccaaattgttgaaagaatagtgtattttaagctaatttttattttgttcatctgttcacccagtacaacctttctgctgtgaggacagaattctggctctgtgacaggcgtcttttttggagaccctccttcaagagccctgctgcctataaatcataggtaagccttgctttcccaagattttttttgccttccttcaaaaagtgcttatgtcattcctctgattctgtaccttc

SEQ ID NO: 119852 - DNA, 1802 bp, Homo sapiens
agtgaactctggtattatatgatatgtgtgggtgtttagtatgtatgtttgtcttgagttatttacaattcatgcttgttttagcgtcaaattttataaagacttctataaagctaagtatgaaatgcttcatcatttaagaaagagggttacgaatctagtaggtgcttcataaatatcttaatatatatttggcacaaaggaaaataagtaatctgagcattaaggtctttatggattggatatccgggaggaaaacatgtttgtttgtatgtatatatataacagtggaaatttttaaactgatagtatcttcattcaggaaatatttggtgtctactgtgtgccattcagattcctaaactctctttatgggcagagttaaagcacgaaacattatcatagaatataaatgtctaattttttcatagagacgttagcatgggctctggaaactgagttcaaatctgacctctatattggattattactgtattagtataagcaagttatttaaactatacctcagtttcccatctgtaaaatggggagtgataatagtattagcctcatagggtcatattaaaggattttatttaaaatacttagagcggtgcctggtgcatatagtatgtaagtattagttgctattattattagaattaaaatgatgttttatgacaagtaaaacttctaaatcgaatcttcttgtcattactaggtgcaggttaaaaagtgagggcaggccgggcatggtgacccatgcctgtaatcccagcactttgggaggccgaggtgggtggatcacctgaggtcaggagttcgagaccagcctcaccaacatggtgaaaccctgcctctactaaaaatacaaaattagctgggcgtggtggtgcatgccgataatcccagctactcgggaaggctgaggcaggagaattgcttgaaccggggaggcagaggttgcagtgagctgagatcgcaccattgttctccagcctgagcaacgagcgaaactccgtctcaaaaaaaaaaaacgagagcattttatactcacttttaaaattcgctttctaaattgttgtcccatagttctgtagaggtagttgaacttggtgtatgcagatgatacctgatttatacccatattggttccaggataataatcacaagtggaaccatctcactataaatcaaacctttaccttctgtagtgccctaatctagggtctgtgactagaaacccaggtcaattgatgaaaatccatgggagaagaaaatgtaaaaatgctttcagacattaggtgtatgaaatcacacaatataaaagctatatcatattttattagagggatttttttgctacctttgctagtacttgacagattttataaaatgtaaaataaaatttggactgagaaattgtttcccccccttttttttccctgataaatgtctctccaacaagcattgttgctttaaatttagcactgtcttcagctttttattgctgattcagtttctgtgaaaggcctttgaaaggtaagttctggcaggaggaacagtgtatctgtggcaactttgtttttccttattccattttatgaagactcagttctaaatgtcagccatgttaggaacttcataaatggagctatttttggtcattactatggaaggacctcttttctaagaagccataaagaaaagttgcaagttagtcacagaagttttggattgcctgtagatttctttatgataggaaattagtgagttaatattctgtttattttctgacacag

SEQ ID NO: 119853 - DNA, 2513 bp, Homo sapiens
gcagccactttttcttaatttttgtgtaggtgacagtgacccctagactggaggttcctgggaggtaaaggacctgtcgttctagtctctgcaagaaaaatattgcctaaagttatcacaaacatttacacaattggataccttaaggttatgttatggaattttaccttaatgtttctgcttattgcagaaaataaagtaacaaaggtagaaataaaagaatataaaagatgctcaatcccagaaataaatattaattctgtaatgcgcattttaacattcttgatgttaggtaattttatggttttcaattttagaatttagcaaaacttccttgagaaagcacttaaaaattaaatttattgtttactgtaatcaactcattttcatcaggtgatctctgcttttaatatacatggtttaattgattatcagaataatagcagcatattcttagtttcataattaacatacttatcatttattgtatacttataggcatcagtgataatatgagcctgacattgttgaaagtagaggccagaagtaatgaatataaaccgtatagttcattcataaattcaggatgtataattggtaataaagttatacattttttttatgggccaggcgtggtggctcatgcctgtatcccaggactttgggaggccagggtgggtggatcacttgaggtcaggagtttgagaccagcctggccaacatggtgaaacactgtctctactaaaaatacaaaaattagctgggcgtgatggtgcatacttgtaatcccagctactgcacaacagaatgagactctgtctcaaaaaaaaaaaaaaaaaaaaaaaaaaaaggtttttctcccattccttcgattggagtgttgggccttctaaagcaaggagcttctttggcagtgacagttttttgttttttgctttttgtgtttttttgagacggagtctcacactgttgcccaggctggactgcagtggcgcgatctcggctcactgcaaactctgcctcctgggttcacgcctttctcctgcctcagcctcccgagtagctggggctacaggcgcccgccaccacgcccggctaattttttgtatttttagtagagacggggtttcaccgtgttagccaggatggtctcgatctcctgacctcatgatctgcccgcctcggcgtcccaaagtgctgggttggcagtgacagttttaatgcttgtagggatgaaataaattacaaatctaacttaaaatattatcatgacaaagtattaacagccgttggagcttaacataatgtgtcttgagcttctagtcccatgtcagaacctagaatacatatttctctacaattgagaagggtcttgctaggtgtttagaacacaaatggtattagtaacacagttttaggttaacctgacacggttaaagattattctctgcaaagctgctgggcttgtaaatacaatttcttgagagaggaataagaaattgagttgataagttttcaagaagagaattgattgaaatattatacctcattggtgttatctttataaatttttatgcagccattgccgaaatctaaaaaaacttgtagcaaaggcagtaaaaaggaacggaacagttctggaatggcaaggaaggctaagcgaaccaaatgtcctgaaattctgtcagatgaatctagtagtgatgaagatgaaaagaaaaacaaggaagagtcttcagatgatgaagataaagaaagtgaagaggaggtaaaatattttactatatttttaaatcatttctttccatggggagagttaaatatttctgctataaggtacagccagaaaacacttccttattggttgtttttaattctgaagatgcagaaatgattaagtatgaacccatttcttttccttaaagagcttttagtttcattaccatgtcagagtatgagtcagaaaagagtgaggttggtgtggactggatttgaagtgggccttgagctggacgttgaagactagagtagataaatgggaagggaagcggaagtggtgcatatcctgaataggaccacataggagcagattcttcgaggatttttttcgtaatatattgatactttataattgacttggatcattttattttacggaaaaagcaagggacttaagggcctttttccccccctcaacctttaggggactatgtagtgagaataaacagcatttgaagtttatataatgagtggataaattttgtattacctgtcattttcttttatttgggagtatttgtaaaagttgagactcttagtttccaaagtgaaacttcatgaagaagagaactgctgaagcagttaaataagagggttaacctcttcagtcaggtagatcatggagagtgggtacaggagatgggtttctattattgttaatgatgttttggtagactgtattttaactttgatgttttcgttcaaaggttggaacttgctctatagattgggta

SEQ ID NO: 119854 - DNA, 2125 bp, Homo sapiens
gaaaggttttagtgacctttaaatgtattgaaagaaattcatgtttttggattttctcgacattcagaataagtgaatgtcggtatgatttgtatgagatcatacatatgatctcatttgtatctcatacaaataagaggcaaaatcatttgtatctcatacaaatctcatacaaagtgaatttggtgtaattgtatctcatttttagcaaatacctgataaattggatgatagttctttgctaaaggattgttattatactgtacatatgacttagtatattatataatcgagggaactgctttaggttgtacgtgggcaaagtaaagttgggtgttagaatgtctgaagtagaatagaatgtctggtgcatgacataatttattttcagtgagtctgttaatctcatttaatccttaaaccaatttaatttacacaagtcccataactagtgaacggtattagctttttgtggtactcgctattctttactttgaaagaataaagtccttcttgatttggaaaagaagaattactagtaactttattacttatgaaaaggatatatttttaaatagtaactttccacatcccctggtactgtcaggtaacttttggttgtggtaaaaactccccagtgaaaatttgttcaaattgttcttttcagagacttaagtttgtaggatttttataatgttaatatgttaatgacaaatacatttttcagttttgaataagaaatgttgaatattgaacccatattgaattggttgactgttcagccagtattgtaacttacagacaggtatgaaaataaagatgttgactttgaattggctttgaatttattcttgtgtacattactgggtaataaataccattaataataaggaacattttcaggtgtcctcattaaagaagaatgtgggtcagttcagtggctttccatttgaaaaaggaagtgtccaatataaaaagaaggaagaaatgttgaaaaagtaagttatttttataaatactgtattttgatcaatatgctttaagtttattttttaatgttaaatcacattcgggccaggcacagtggctcacacctgtaatcccagcactttgggaggctgaggcgggcgtatcacctgaggtcaggagtttgagaccagcctgaccaacatggagaaaccccgtctccactaaagatacaaaattagccggctgtggtggcgcatgcctgtaatcccagctacttgggaggctgaggcaggagaatcgcttgaacctgggaggtggaggttgcggtgagccaagattgggccattgcactccagcctgggcaacaagagcgaaactgtctcaaaaaaaaaaaaagaaaaaagattcatagaagcattggccacttttttaaatgtatgtaactgagccaatttggttggctttccctttatattgtggagaacatatgtaagctttcctatattaacaccttggtttcttccattttctgtttcagatttagaaatgccatgttaaagagcatctgtgaggttcttgatttggagagatcaggtgtaaatagtgaactagtgaagaggatcttgaatttcttaatgcatccaaagccttctggcaaagtgaggatcaatttttatttttttcataaatcagttattcatagcctctttatatgaaacaaaaattgattaataacagcattgctgtcagtattcgttcatatctacattcaaagactataccttctgttgacgtatctgcagtaatttcctgatagaaataatatagatgccataggggtatgttgcttcggaaaatcagatacaagggatataaggttaagaatagtgaattaatgtcagaagggacagaaagtactagtagtcagggttaggtatctagaagacactggaagaataggaagaggttgggctgaggatgaggtgcaaggctggagggaaggggtgcaacctgtaatcaagtgaagacaaaatagggagtatattagaactggatgttttcctagatcctggaataaagtattaaaaagtgacatttaaaagctaactcttacaagtttcctatattgggtttccagaatctgcagcagagccca

SEQ ID NO: 119855 - DNA, 1068 bp, Homo sapiens
acttcaggctgttctgcctggaagtctttatttgtgtttcttttgtcagtttactaaattgttattgttctctatatatcttttgaagttcttaatctcccagtctaaatttgattattcctgaagtacagcaaactgaatctcaattattaaatagaattatgtccaaagattaaacagagctagatttttttcacaaacgaagtgactggactgtaatggcaataattttagttggataaaaattagtttgctttctaatttttttttttaactgagtccctgtgagtgccaggtgagtaaaatgttactctgaaaaaattttcatggtgctctattaattaatcaagtgttttcctcttttatgtcatttgctttccaaaaccatgctcagaagaagaataaagtattaggttttggggactttgttctacatgtgtatctaataaagttaatacaatgtttaagctttttgttaattaagaaatactaaattaatttctagaaaagagtctcatcgtggaaggcaagagggaaaagaaaaaagtagagaggttgacaatgcaagtctcttccttacagagagagccatttacaattgcacaaggtaagtttattctagcttcctttcattttgtggtgaaagtgcctaaatttgtgaaaatgatggtttgtagcttagtatcagcaaggtagtgttttatacttttggtataattttatttaatttgctctgtaagagcagagttacatgtaaattatgctgtgaaaataattctcattaaattaactttgtaaatgtattagtaagccataggtatttaattgtgatttttttttttccccaggaaaggggcagaaactttgtgaaattgagaggatacatttttttctaagtaagaagaaaaccgatgaacttagaaatctacacaaactgctttacaacaggccaggcactgtaagacctttttacactttaaacctacttgtatattacttcacaatggaatcaatttctgtaaatgttagtgatccactagttcaatttccacactttatgactgagca

SEQ ID NO: 119856 - DNA, 1719 bp, Homo sapiens
ctttccactccacactgccctagtagaggttttctttcttttttttttttttttttggagacaaggtctcacttgtcacccaggctggagtgcagtaacatgatctcagctcactgcaaactctgcctcccaggctcaagcaatcctctcacctcaggaaccacaggcatgcgccaccatgcccgggtactttctgtattttttgtagaggcagggttttaccatgttgcccaggctggtctcagactccttagctcaagtgacctgcccgtctctgcctcccaaagggcctggattacaggaatgagccaccacgcctggccctgagtagcagttttctgtgagagttccacccctgcaggaggcttctgcccaggcacccaggctttctcatatatcctctgaagtctgtcctaagaaaggggtcagattagccaaaattggcagtgattttggggaaaagggaagtgagagaaatgactagtaaaagatgactcttaggtttctgtctttggcaggtgggtggatggtattaatgttttttgaaaaaaattcacaaagtgagcaagtttggagatgattatgatttttcttttgaatattttgagtttaggtgcctgtaggacatgaattgtagctgtccagatgacagacaggcatatactgttggctctccatatctgtgggttcctcatctgtggattcaatcaaccacaaattggtaaaaatggatggttgcatctgtactgaacatgtacagatttttttattattcctaaacaatacagtataacaactatttacatatcagttaagttgtattagtcattatgagtaatctacagatgatataaagtatatgggaagatggtcataggttacatgtaactactacaccatttttttaaaaaataagggacttgagcatccatggattttggcatctgaggggcgtcctggaaccaatccctcacagatactgaggcaatattagttaatatgaatctcagatgaaagttgtggcttggagattgactgggaagtcattagcttgtagttagtaatcagagacaagcaaatagtttaaatcactaagttgatgaagttgagtgatagtaggggttgttttagtgtgtttggtcttcattctgtacaacatggccagaatatacctgttgatagccctttctcctgaagtattctttctgtgcgaatccttacattactaaatctaagctgtctttaaaagccagcacacgtgctttgttcctttttctctagtcccaaaataatcaattcctcctcagtgcacagcaatttatttgtgtatctttcttaagatgttttgttatcttttatattggcgtatatttatgtctcatttctttagtagcatctttttcaaaagatacgcagtttttatcatccatttatcccctcttagtattgagtgcagctgcacaacacaggcattaaataaatggcagaacctcgagcagtatatagtattcttttatctgactttatttcattcaaaaaatgattttattttagataaatggagcttaatgttttgaattttgaagtatatgctacctgttttctagatttttttttttttttttttttttttttttttttttttttgagacggagtcttgctgtgtcgcccaggctgaggtgcagtggtgcgatctcggctcactgcaagctccgcct

SEQ ID NO: 119857 - DNA, 2297 bp, Homo sapiens
ctatgggaggaggcaactttcagggcaggtgtcccgcgggaagggtagcatcattcagggtggccgcccggtcctgcctgcgggagtaggaggaccgagacgtccggctttcttcccgcatgcaggttcacagcatgtccgcctcggcccctgctgcggagggggagggaacccccacccagcccgcgtccgagaaagaacccgaaatgcccggtcccagagaggagagcgaggaggaagaggacgaggacgacgaggaggaggaggaggaggaaaaaggtggggggagtcgcatcccaactgatgaatttttcagaccgaagtttttttgtatttttcacccaggaaacagttttcttgctcttttggtgtttagaggcgtgaagtcggagtgattttcagcgagaatgtgtgcacaatttatctgcttttgttttgagcgatggcgtagaattgactttgtgtattccggtttttaaagtatttgttagcgtggtagagatgtattggagtgcagccgacttctcgtccgctctaaacgttcgttaacatttcatcatttgacgggaagtttgtaggtcttggatttgatttttttttttacctgtgtgtgtgcacctttgaagttgctaagtggatgttctaattttgtccttttcattacacatcttttgccttttgaagttattgtaaggtcttggtgcagcccgttaagactgaagttataaggctagacccggaagtatttgaatactttcgaatatttttacatttaccaaaaagtttccctccctggcaaacagcggtgaaagctgttgctacttgagaaagtagttaaaaatgaagaaagtgaactctgaaagaaagttaaatgtgagcccagcactgtctcggtttcgaacctgtgtctgttttaagggagggcgatatgagccctgatttgactggaggtgtgaaacggaaacttgactgaatagaggagtgtgctgcggcagtttatccaggatgcatgcagtgtctgtttcaggtgtacccgcttcttgacatgtttccaaacatttaaaaatccgagtcgcatctcttagcattctttgatattagcttagtctgcggttatttcgtatatgtttacgactcagccacacttgggaagaggttgaagcgctcttcctaaacccggattttttttaagcctcaaccagcctgtggtcacaatctgggttaagattacaaggtgtgccttttgtttgtttaaagtggtatgtgccctaagaagggcatatttaagtaaagcatggctttttaaatataagttttcacataaactattgcttaacaacatgttattttaaaattatttttaatacaacaacaaaattggctgcactatctcgctgctagccaaagaggctctgcactttttctccaattttttgtttgtattttggtcttctggtgggggcagggttgagatgccaaagaaatggtgaattttcttcatgtcaggaaaaaattagagaagtcatgtaaatatactgtaagtggccaacacagtaatgcttggggaagagttggtagttgaaagaatcccatgttttgttctagacaaattatttttaaaaacatgatgttgtagaaattttatcccctaatagttttattgtagctgtgatttattattctttttactaatttgaggtgtttgtgggacaagtagaattgtgaaagtttttattttacttaaccctgaatatttaactttagaactgaggcatcatggaagccagacagtgaaatactttctgtattaggcttttttttttttttgcgttactataaagaaacacttgaggcagggtagtttataaagaaaataggttttattgattcgtggttctgcagacagtacaagaagcatggcgccagtatttgcttctggtgaaagcctcaggaaacttccaatcatggcagaagacaaagggggagcaggcatttcatttgggagtgggagcaagttgtagagggaggtgccatgctcttttaaacaaatcttgagagaactcactcaccaccacggattaccatgctaagccgttcatgagggatctgcccccatgatttaatcaccttaccaggcctcacctccagcattgcaaatcacttttcaacacgaaatttggagggggcaaacatccaaagcatatcattgcacccccggtcccccaactctcatatgtttctcacatttcaagattcagttgtgccttcgcagtagtcccccaaagtccggtcttgtt

SEQ ID NO: 119858 - DNA, 1032 bp, Homo sapiens
ctgaagacccactaggttattccaaagaatgctctaaagttttggatgtggggcacgagagtcaggtagaaatcagtgatgaccttggggtttttggttcaacaactgtgagaacaggagtagctattcgttgagatgagaaagacttcgggggtgggggtgggcaggatggttttagaggggaaagtgcaggaggtgggaatgagttgttttgttttagacatgttagttttgacaattcaaaatggagattcaggagtggcagttggatttgagagtctggcattcagcagaagaaactctagctcaagaaataaatatagcagttgtcaacatgtagatggtatttaaagccctgaaactgaatgaaatcactaacagggaacataggtagggataaggggatattcaaaattgtaccttggagctctccagtgttgagaggttcaagagtgagaggggaaccagcaaaggagaagagaagagcaactgtagccagtgaagtgggaagagacttacatgaaaattgtgtccgagaagccaagtgacaaaggagtgtttttgaaggagggtgatccactgagtcacatgctgataaaaggtcaggtaagatgagaactgataattgaccactggaaataccaatgttgtgttatcagtgacatggactattctgtggggtggtgagtctaaatgttccaggagtgggaatacagagagacaggtaggcaaggaatggattcagacactctttccaggaatgttgctgtacaggaaaacaaagaaggagcagtagttcaaagggagtttggttttgaagaaaagagacccatgtttgtatgatgatgagaatgaatcagtggagaggggaacattgatgatacaagagaaggagacagtagctgaagccaatctacagtaggtaggtcaggttgggttctctgtaagcagaagctgaaacagaatttgggacaccaggtgattattagaggtgaagaactgtgaagggaagggggaagaagtaagattggg

SEQ ID NO: 119859 - DNA, 1125 bp, Homo sapiens
ggcttaatcagttttcttctctcaaatactttcaacgtcttcttctctattgactcttttccattagcaaataagcatagtctactcacctatcttaaaaaaaagcacaggtcagctgggcacggtggctcatgcctgtaatcccagcactttgggaggctgtgagggtgtttggtcaggagttcgagaccagcctgaccaatatgatgaaaccccgtctctactgaaaatacaaaaattagctgggcgtggtggcgggcacctgtagtcccagttacacgggaggctgagacaggagaatggcctgaacccgggaggtggaggttgcggtgagctgagatcgcaccactgcacaccagcctgggtgacaaagtgagactccgtctcaaaagaaaaaaaaaaacacaggtcaaagttagtgagaacctaaatgaaagttgtggcagaggggattgggaggaggggctagatgggatagatgggatataaatagtgttaatgggacttggtgactgattgaatacggcaggtgagagatagagggaggaatctaaaaataaatcctagagacctggtttgggtttatggtacacggtgcagtcatagaaaaggaggagcagggctgggagaatgaaaacctgtaacttcagtccaatgtgccttagggtgtgtaggtcaggaactctgactctgcctttgaatcctgctcctgtatcctcctaactaagcttccattctacctcaacacccattgtcatgactccttttcatagttggcccttaagccttcatttctggggttatttaactattgggagttcaaaccctgcttcctagagtttgtgagccaacagaatgtgtttgtttgtttgtttttgttttcatttttgttttctgaaaacaaatgaaaatgaactagttgatagaaatatgagtacacttgtaaatagaggatgttaaaatggaactgttttagtttccgtgttagctgtggcctaagacaatagaagccgccttccaaagtcaggtaagaatacaaagcaggtggaaaaggaagcacaggagaacaggtcagcattgtcctccaaccaggttagctcactgaccacatccagccaatgaaac

SEQ ID NO: 119860 - DNA, 1005 bp, Homo sapiens
actcaaaatcttattattgaaaccctaacccctaaggtgatggtatttgagggtgggacctttgggaattgattagagtatgggagcagagtcctcatgaatgggattcatattcctataaaagagataccagaaaacttgctgcttctgtcttctgccttgtgcaaacacaataagaagtcagtacctatgagccagaaattgggccctcaccagacactgagtctgccttgatcttggacttcccagcctccagaactgtgagaaataaacttgttgtttataagctacccggtctatggtattctgtaatagcagcctgaatggactaagactctctacttctccacttctctgggatttgtttttgtgcatctagtcctggttttttttttttagactctttctgtttagctattgggcacagagtccagtattgctaaggcctcagtgtttgccccagggcctggcaaatagcattggacctccagaaccctggagctcaggcaaatttccttgaggctgaactatagtgtgactcttcttagatgggttgtttgggattggcatcacgtgatgtccctaagcaggtagataggaaaaagctgatgtttaacagccatttaccattgttttccctaaagacagtattttcaggccactggccaaatgcttaaaactccttggagtaaggcattgggtttgcagctcctttctccccctgtgccactactcaggaagaaacctaaggcaggacaaggaaattgtgttgtgtttccctgcatgagttagagacatcagattctttttaaaggcagcatcatgtcttgtcattccttaaagtgggtggacctcagccacttgtcctgacttgttgagatttgcactgagaagcagtatgtctgaatgaaactcctgtcctctactgagacctcaggaagccctgccttttctccgagccaaagatctccacagctccaccacctccaagaatccttttacagc

SEQ ID NO: 119861 - DNA, 1049 bp, Homo sapiens
ataaatgagagcactgtagctagagaggttaatgactggctcaagatgtagaggagactttagagcttgtgcttcaacctacatggctggaatccagtttcattggctatagattataatgctttattttttcttagaaaaaaaaactttaggtagggcataatttagtgatagagaatgaggaactatatagtacgtttttaaaaatatacatatattccctgcccactcctgtgatttgttcttgggtaggtacatagtagctttgtcttaacactgtgaccctttttgccatgtccatcataataggtgagaacaccttatatgaagaatgcctgtgactttggtacatcggaatctgatacccttgaaaggggtctaggagacacctgtttctgagtagattccattgcatacaattcatagactctcagagttggaagagacaatatgagtcgtctggttcaccaggtgtttggttacatttttggttagatcccatatgaatccttaaaggttgtggagtgagtttgacgaacaatccttattattttgcatgacccttcatggcctaaaaataattctgtgttttaccaaactaagtaaaatgttgactatacaaaagaaaaaggtttttttcccttgggtcatttgggttttgagatgttctatttgaaacattttccttacaatttgttacctgttaagaaaattgcttatttaaatatctgttgaatgctacttaataaatgtaactttcaaaatgtgactaaatggtggtagttttctttgttaatagtgattattttattttgccattgttgcattgctataatttgttttcattttctttgtttctctctttataagctagatgccagttttcccccctagaattgttaaccatttacctgtgttttgtatgacatgcacatgggattcatgtgaacgttttcacttattttgcactttttagccagagatacagaagaagagagggacactcgagattaaatgttttagtgaaagttaatgggcagcatataaca

SEQ ID NO: 119862 - DNA, 1098 bp, Homo sapiens
ttgaaggatttaaaaggaggtcatcagtccacaaactattttagatgagggtgagtggggtacaagactgtcttctggaatcaaagaaggtggtggttaaaaaaagattcatagaatattattgaggtctcttgggcccagatggtatcaccccccaagtcatgttggtccagaagctgacgtagcatttgtttgtcctccacccatgatgaattagcgacaaagtcaggaactgaactctggttcctaaatgcctcctatcacttcatttgcttgtaccttctgtctccaactctgaattttatttgagacatctttgtctttcaggaaagatgtctgggtagcattataacagatgaataaagttgactttcagtgtaataaaagtccaaccacactgttgaaagaactatggtaaaatacatataacatgatattgcgcataattttttttgtaaagattgctaaggagctttaaggtaccagatgaaaatgcaacattttctccccaactggagaaagaaaatttggataaaaatgtttttataattaaagttatgttttaccacactttacttggaatgaggaagaccaaacttgttttgtggtcctttatacattttagctaatttagattcatttgcgaaataaacaacttgagattatttataagggaaaggattagattttgaatgcattataaaaggtataatatttgttaaatacaattttagctgcatcattttcttactccagttttctcaaagcagatgtcctttccttagttgcaagaacgtcaatgtaggtgtgttttgtgccaaaaaaaggtgatagtttagagttggagttgtcagggctaaaactctgtcctgtatgaacttactggatgtctggaaggctaatatcaaatgtgatttgatttgatttatatatgatttatatatgagaaaatctttattttctcatatataaatctttaagttatgtcaatatatttacatttgacatcaatggaattaaaatgtttagaatgctggtttaagagcagttagcttttcctgcatctgcctttaaaaataactaatttgaaatgtcatt

SEQ ID NO: 119863 - DNA, 1046 bp, Homo sapiens
aggccaaggaggagagaaatagacaagactgaagctggaggagcagctgctggttcacccgctgccaagacttggcagcaggttcctggggaagcagtaggcacctggttcacacaggaccagcacagctggtccagcttttgactggcagagcgtggcttccttcgtcaccaaagtgactggccctgtgattttgctacagcctgccgaaaccgagagggacacagtgaaagccgtacacctccgcgaagcaggtgcaagtcacatttcactaatgaacaatgggcactttgcacacaggaggctttgatctgaatgctaaaaagcccttctgttggacaggctgttggctgaggtaggcagcagtgagaagcattgggaaggattctctatccaagaaagttggtgcaagagctgtcatcaaataatacttgcagaggcaaacactctcattctcaggaatttccttggaggaaagcaatgtgtttatgggggtaaaatgttcatgaaaccatagatccccatgattgacagatatagtccagacctccatttatgcccctaccacccatgaccaccatatcagtacgatctctttgcctaccccatgcttaaatatttctgataaacatggatcctggtaattctattagtccatcaatcaatggattctatatttggaccatcccccaaatgaataaaatatttcttccatattaaacttaagtctgtcttctacctattagttttagttttgtctcatggagtgatacgggacaattcatcttgagaaagagggcatccatttgggagcctttcaggtatttgaaagccactctcgtgtcttccagcaaatgttaatagggtatcttttaataaaagaacaaaagtaaatacatttataaatagaaataaaataagataaatgggtacttttatgtactaaatggtacctttcccctccacagtgatttcaaaggctccatccaaatatattgtctcctcccctaaaaaaatcagcataattgcaggctttttacaatgca

SEQ ID NO: 119864 - DNA, 1343 bp, Homo sapiens
tcccagctactcgggagcctgaggcaggagaattgcttgaacccgggaggtggaggttgcagtgagccgagatggtgccactccactccagcctgggcaacaagagcgaaactccatctcaaaaacacaaaggcaaaaggaatagaagagattgctaaggaagggaatcatctcctaccaactgctgaaaagttattgtttggggaatagtaatcaattctccatctctactgaaggtgggaggagaaacaaaatggactcaaagcaaattagaagacatagaaatgatctctaaggaagaaattctgacaaagtggtaagcatatgctctgggctgaattatgtccccccagtgttgacatgttgaagtcctaacccccagtgcctcagaatgtgactgtatttggtgaatgggtctttaattgggtgattatgttaaaatgaggtcttgagggtgcaccctaatttaatctgactggtgtccctttaagaagaggagatgaggccaggtgcgatgactcatgcctgtaatcccagcactttgggaggccaaggtgggtggatcacctggggtcgggagttcgagaccaccctgaccaacatggagaaaccctgtctctactaaaaatacaaaattagccaggcatggtggctcatgcccgtagtcccagctacttgggaggctgaggcaaaagaatcgcttgaacctgagaggcagaggttgtggtgagctgagattgtgccactgtgccattgcactctagcctgggcaacaagagcgaaactccgtctaaaaaaaaaaaaaaaaaaaaaaaaaaaggagaggaggacaaaagcacagagagaagaccatgtgaggatacagagagaagacggccatctacatgccaaagggaagggcctcagaagaaaccagcctgactgacactttgatctaagattttcagcttctggaactgtgaggaaatcaattactgatgtttaagccacacagcctgtggtatttttttaggacagccttagagcccacaatactgaagattcttgtagcatctccctgctttgcaatttttaagaacagactaatcaaattatgaggggagagctcatcaaatcttcaattaacatttttattccttgatgacagctcccatcattgttggtccagaaggttctcttgttcagagacttaatgtgattttcaaatagttcgagttatgctcagcaccacagaagcaaatgcccccacctttgccatgattggttttctggaatcacagaaaaacagaacacaaaatggccttcgagagtactgtctaaattcattatgtagcttaattggg

SEQ ID NO: 119865 - DNA, 1044 bp, Homo sapiens
atcttcagtccaagtttcttccacttctttcttctgttctctgtgtagtcagcccaaaggatatttgagttcaatttgcagagaaatgccatagatagaaatgataatgtcccttcaacttaaaagggccgagcatgttttgaaagtgttttatgaactggaaacctttctatgagatattccactgtagccccataaaaccttacaccctgctggaatttcatcctgttaaatttggcagtgtttccttcctcaagtaatgagttcaattcatgttttcatttaagttcatacccagatacaaatcagtgtcactgccacaggcaacgattcgcagaattcccaggcgccaaggctgagggatggcgggttcagaagaatgaatgccaaattctctttttcactgagggcagtgtagcatttactgtcataagcctgcctcatgccaagtcccatggaggcagttggctaagtgggcttccggcttctatctcaacgcaagctcgtcttctaaagcctctctggatttcctgtggtaatccttctttgtgtacctctgagaaagaaacaataatagttcagtatttttagtttctttcttttttccaagaagagagttcaagagcacaagtggttttagttaaggattcaataaacactttggcaagaatgaggaaagctgtgtagaaaagacctagcagttcttccagttgtattaatagcttaagggggtattttcccatgaggaaaatagggcatagtcaatactatgagagcccacctctgtcctttgctgatacatcaggtaattaaaatcttatacttactcaatggctcttttaaacatggtattatcaaggaatgattgtttttgcaacaaagatggtaacaatgacagcaagagcaccagtgtggaaagttcttctctgcctgtcagggaatctatcctgatttgcaatgacactatgacttcttgcaagcaaacacctggagactgggtctaactacctgggcaggtagtgctgagcttcaaggcaatgctat

SEQ ID NO: 119866 - DNA, 1065 bp, Homo sapiens
attaggggtaaaagggttaaaaacttttttttaattggcacaaggcaactttcaaaggaaagttgagaacaccaagctggggcagaaacagacaagtcactgggcagaggcagaagcccagggattagcagtagctggcatggtgatgctggcagcagctgcagcaacattcattttactcaattcatcttatttcagctatcaaaccaggtggtcacaggaacaatgagggtacgaacttgttttcaggatgttgccaaatgttttcctcaagaaaacatgattcagatatgttatatcattggagtatttacaaggtcaaggaacacccatagcgcttggtgacacatcagaaaggaagtattaaatctgggttaaagagctggactgactgtgtgagccccataaagtgtgttctgttctgttaggcatcatgaattttgttagaaatcagcccaggataaagaacatgttaatttgacctccaaaagccttcaggcactatatgcatttgtaagtagtaaaagtaaaccacagagattttgtttcgggaccagatagaaacatgaggcagaaaaggaaaagttctgtatttcaatgtctttattttcagtatgggccgaggagtgcagatcactgcttttaaaatcaccagtcatgaaatcaattcagtggcactgacaaatattattttaaaatgaactacgatagaaaatagcagagtatattgcctatagtaaaagtaagaattgtttcattaaaatttccttcagttatgtacatacaggcacacataagtttgtgtgcactgggacacaatatatagaatttcttaatgtgtgtcacaaataaatttgaaagccactggtctagatgacatctaaagtggcttctggctctaaaaccacatgattctgctttcatgcaagttggtggcatctggcgcaacttattgcagcctccaagtttcctgtaggttgcttagagatggctacaaatggtctcagaggggctgacgtgtcagagctgcaatctgccaaatccagggcagctccactttcatct

SEQ ID NO: 119867 - DNA, 1027 bp, Homo sapiens
cagttctttttagaatgactctctgaaaaacaaaggagaaaaagggagaatgctgaattcagctttcacaaagtcatgaacagctggagtgtttctgcatgatttatcccaatgtaacaagtttggaatttttaagttttgggaaggagacatgaaatgaagttcatgttagttttgggttatctttgtaacagttaccctttgatgcctaggaatcttcaatttggaaatctagataatatgttccttgcacagcgaagatttgagaatcatcccctggacttggaacattaaccttcctacctcaggactactttacccattgaaaccagcctcttttgtgtggaggcatttcttggctttcttgctagagtttaggactctccaccggcgttgtgttagcatttcgatgaggacaacagttcacgggagacctttcttcaaacactgagtttctggttcattcaaatttctgttttgggctcccagaaaaataccatcgagaaaggacagatgtgccagtgaactaggaacatcctgagtgggtcaggatatgctccagaggtacaatgaccttcccttatttgtggtgacaagagcttctacttcgagattggcaggggccccagaaacctgtcagtttacattgctaggcaaacgatgaatggtactgttacagtcagtgccacattttaaagaccttgtttggacagtaaattggcttgaaataaaacatgaagaatctggctgtgatttcaatgcccaggtgagatggtttcaaagcctgggggaaagggcaaagagggtgtgaatcttcaatcaagaaactaaatagcagctgttcccataggcaagcagtacaaatgattctgctactgagataggcttacaacagatccaaactaatcttggtgaaactgtgctctaaattattagtgttaacaagcatttactaagacagttgcattattttctctcctcagaatttcagagcctagcaaacccctcctgcccccctgcccctctg

SEQ ID NO: 119868 - DNA, 1034 bp, Homo sapiens
aacctgaggcaaacctggtttattaataaattagggacctgattagggacctattgttattaactaaataataacactcactgtgttttgaaagtttgcaccagcccgaagaaaatagagataagtaagatactcccttggcttgaaggaggcaaatgagagtttgtaaagcatgaacgattgcacagcactatacctgaaggattcacttattgttgtgtattgggatgagcttcagattggattttgcagatcggctcacaaaatctcagatacatgggctaagagacttaaggcttgttcaaaataaatgtgcaaaaaatgaaacattaagtggagggtagtaatatgtgggccccattctccttctgctcaatgtttcgtaccagtcatagaacctttctggttctctgtaaaaactgtgcctctgagtcacagagtaagctatgcctgcataagaatcacttgaccatttcccaaaaatggaaaccatgtcaatatgagcttcttggcatttttactcttgctaatgatgtgtaattaagtagctcaaaatgatgctattggtcaattatcagaattgtgttatgatttttagaagcaggttagagaattttttaaaatgtattattttaatttccactgatacgctgaatctgagttggtttttattttagaagttggcagaaacagaaactgctgttattttagatattatttctacattggaattttggtgacataatctaatcaaagtgtttgctatatttccttcatgctctttttttatcctcacttgtcaatgtaaatggtaaaacaacacattgaaactgaagttttattctagtgtccatttaatgttatttgacctaacttttctacagttatcattagctcagataatgaggcacaaagataacaatatttacatagtgcctttttctctgtggtttacaaagcagagatttaaaaggcttattacatttatattcctctgtaagtttaggacaacattgtcaatcctattttataga

SEQ ID NO: 119869 - DNA, 1647 bp, Homo sapiens
cggcgcgccagcctgatttccgaggacaatccaggaccgtgtcgagcgcgttgtttgcgcctgctaacctttcccttggtgttcggttgctgttccaggccggcgcggtgaacaagcagggcgacagcattctgtgccgctgagccgcgctgtccaggtgagcgcgcatttcccgtctcgggtggccggtcaccagagacgcccgtccccgagggcttccggggccaggcaccgcggtgttctttgcccccagcgtttctgagagcaaactcccaaggaagtaaatcccctctctccctgccacctaagtagcaagtaaacccgtacttagccttagaactcgaggttcagtctcggtggagacgggtcagcccttgtccccgccgtccccgtgttttttctggtggtcagcgggctcttctgccttccctagttcccgagggagggcaccctcgtgggcatgggagctgccccggtgtcctcccgtgcagtctgtcacccacaaagggggacgcgggcagggcgccggagtgggtcccctctccgggcttcccgagggccgcagctgcctgctcggcgcctggcccggccgcgggcgggtgttgtctgacctggtggtttgttttgggttgttgatcaagcatgtcttgagtttggtcggtggcgccagttagtctgcagcgagaaggttcacacaccccctctattcattcctcttccacaggtgtgcggccgcctgagcccgagccaggagcactagagagggagggggaagagcagaagttagagaaaaaaagccaccggaggaaaggaaaaaacatcggccaacctagaaacgttttcattcgtcattccaagagagagagaggaaagaaaaatacaactttcattctttctttgcacgttcataaacattctacatacgtattctcttttgtctcttcatttataactgctgtgaattgtacatttctgtgttttttggaggtgcagttaaacttttaagcttaagtgtgacaggactgataaatagaagatcaagagtagatccgactttagaagcctactttgtgaccaaggagctcaatttttgttttgaagctttactaatctaccagagcattgtagatattttttttttacatctattgtttaaaatagatgattataacggggcagagaactttcttttctctgcaagaatgttacatattgtatagataaatgagtgacatttcataccatgtatatatagagatgttctataagtgtgagaaagtatatgctttaatagatactgtaattataagatatttttaattaaatatttttttgtaaatattatgtgtgtgtttttttttaatctatgggaatatttcttttggaaaatcatttttcagctcaattacagagctcttgatatcttgaatgtcttttctgtttggcctggctcttaatttgcttttgttttgcccagtatagactcggaagtaacagttatagctagtggtcttgcatgattgcatgagatgtttaatcacaaattaaacttgttctgagtccattcaaatgtgtttttttaaatgtagattgaaatctttgtatttgaagcatacatgttgaaaatacaccttatcagtttttaag

SEQ ID NO: 119870 - DNA, 1064 bp, Homo sapiens
cgtgctctgttatttagtgatataaaaccttgcggtggcaaggtcagcaaagttaaggccagagtgcatgagaaatagctgtggagtgtgaggtgaagaggctgcgtgtgtgcttgtacagtctcctcgttgctttcaccgagtctctccaatgagcgcgaccctcctcacaaagtgtgcacagtgcttctctcctgggtaaatttacaggatgtgggagacagtgagtctctctgagattttccagcacttccagaagaaagaaagtttgtgttaggaaggacaggccccagctccctgggacttcagggaggctggggggagctgcagtggagaagaggaggaggttgctgaaggagaagcagcctgaagttctcaggttgaaaatacaaaccttagccccatcctgcggaattttgggatttcattcctaggatcaccctatagacctctttatgattcagtttcctggaaaagatgatattatggtatggatcctaaacacagtttcacaaggaagttctgtgtcttttggcaggggaagaatagtgaacaaagtgcaatcttacttttaaaataaatcttgaaatgatattgcaagccttatgagatctctgataatctttttttatttgacctggttttaagtaattctttttattcttgatgtttttcttaaaagcattttagaatcattcaaccttctaagaaagcatcaaaccatataagcaatctaatctaaaaaatgatacctctaaaagttgaaacttttgtttattttgactactttttgattactggaaagaataaaaaaattttactctatcaacattggattatataaactgtaaagagcttctactaagacgtgtgaaaatgcacattttctttttttatataacttcaaaattaacagatactatactgtttagatacatacctgatgctagataaagagttcctgagaaacatgccctaaacttttggactgatttaatatgaaacaattactacagagctgagttaatcagcccctttatagattttggcgaagatgattctct

SEQ ID NO: 119871 - DNA, 1010 bp, Homo sapiens
ataaactggggccattagctcggagaaggaaaggttaaggtcagccattcagtgtgggtgaaagggcccagggttgggaggcagatttgggctttggttgtgcaccaaccagttttatggtgttttagcaaatcatttaacttttgggggcctcagttttctcttatatgtctgttacacaaaataagaggggttgtactagtgtcattcattcattccctgtatattcactgagcatctgctttgaatgagggactctgctagggcatccgtgtccactggagaggacaggaggacctggtcctggccatgctgaagcttacagcgtgatatgtcatcctgctgttctccaaggtgccttgctggtctctggttttctcatctgttttcatcttgtgagcacatagggcttccttccttccgtctggcactgaattgcacttgccaaatagcccctgtgagtgtgtcatcacccttgccaaatagcccctgtgagtgtgtcatcaccccacagactgtgaatcccagagggctggaggccatgtcttggaccatcttcagctaacggtatacattacacaaaatatatgctcactaaatgtcttcctggcttatgtttctaattgtgaaagtaatacagtgatcaattggaaaacagtggatagcagaaaagcatcaggcctagatggaggctattgctgtagtccaggagaaatgatggggcctgaactagggcggtgagcgaggagaagacggaagctggggggaatgatacttggcaggtggaattggccagacctggaaccttaagagctgccggatggggactcagcaggcgaagctgctggccacacccacagggctggggtgagcggaacatcttggccagtgggtggggcccactgtgagggagtaagaggcaggtggcaggtggaagcactggcacctggtgggcgtcaggagatgcagggctgtggagggcggggtgaaacacaggaagtgaggggaca

SEQ ID NO: 119872 - DNA, 1030 bp, Homo sapiens
tctcatttcattgccccgagcctagaaataactcacagagtctcttgagcagtcaatgaaatagcggccacgggaagtgagtctgttggaggttaacctcatgtgttcacacgcccaacgcagttagcttagtttgtgtttatgacttttgtaaatttggttctctaggatttttcaggagcctgtagtttctctagattgttctgcaatttgcttgttgtagagcaggataataaagaataaaactctcctccaagaaggagacgaacatgcatagaagtaattgcgattcagtgctttcattgccaaatacaggagttttgtatttaattttgttttaatctttgattgtgattgtggtcttccttatttctgatgccaagagtttttattgacgttggttgagccatattttggatgtgaattcaggagcccccacatagctatccactcaccctttaattcatttatcctgtgaagatttcaggagccctactgtgtgctagtcagtgttctaggcgctgggataccacagtgaacaagacaagagtccctcccctgaggatctcttgttttagttagacacaggtgtgctggaatatatatatatacatatatatatgtatatatatgtatatatatatgtatatatatgtgtatatatatgtatatatatgtatatatatgaacaaagtggattactgttcatgctggctaggatacttttgaaattaagtgcatattgtacatatttgtacatagaaaacaggggagacattttcttctctcctgttcatgtaactatttagattataaaagaaaactaaagaacaagtggtcaggccaaattaagaaataaaacttagaattctgtttgctaacatatccagagtattattccctcaggtgtcttttactctatggtttcaactggcataaaggctcagatctgtgtagagcttttcttttggatggcctggaaacactattcgcaaacgaattaggtagcggatagagaggagagagttga

SEQ ID NO: 119873 - DNA, 1026 bp, Homo sapiens
aataatatagaaattctttgatactagctgataagtacctactaccctgacccctttgagtgttcctgactgcccttgccccggcccccaggcctccttgaccttcagcaactagaaggataatttctaaacattttgtctattaccatggccttaatgtggtgggccacgcattctgattggtcacatggtaaagactatggatggaaaactgagaattctatgccctgttgaggttagttcaggaacaactttttgtgaatcttgaggaatgaacattacagcagagctgttcctggtgatgcgtgatctgttatccacgttacttcccgggagtttagttgtgttctctgcaggcagcctgaggtcagggacccaagctccccagtcaggttggactgtacctccttcagtgagttgttggcaactaggcagtgaaatgagggagtgaccgctcatggctcatgaactttgcaagttgtgcaactcaactgtcccaccttgaaagggctcaggaaggtaaagagtgttgttttgggacacagggattgttgcatttaaatctttgtgactgtggtttggtctcagactggtttttcatgcataagttcttcttaccctcaggcatctgggattttacctgtttttcttccagtggtgtgccctctccgccacattgtggagcgtgctttctcaatccttcaggaagaaattcaaagactttgttttttaacaatatgcaggatgggcgtagtggctcatgcctataattccagcactttgggaggctgaggtgggtggatcacttgaggtcaggagtttgagaccagcctgaccaacatggtgaaacgctatctctactaaaaatataaaaattagctgggtgtcatggcaggcacctgtaatctcagctgctcaggaggctgaggcatgagaatcactttaccctgggaggcggaggttgtagtgagctgagatcgcgccactgcactccagcctgggtggcagagcgagaccgtctcaaaa

SEQ ID NO: 119874 - DNA, 1065 bp, Homo sapiens
attgagaccctaatatatgccaggcactctggatgcattggtaaaaaggatagacatggtttccgccttcttgaagttttttgcccaggtaaagaggtcattacaatacagagtgagaagtgctgtgactgcagaagctgagcgtgttcccacagcactgcagcagatcacctatcttgcacttgggcagaagggagggcttcctggaggaggtgacttcaagctgagatcagaaggactaagggggaggagcaggagggttgtgcaaagtcagaggcatgttgtccgggtgaaatgaatggtgccctgaattcaggtagctatatggagggaaatggatagatttaagatagacttaggaggcaaaagaaataatatgaggtgattgattctatttaatggggtgttagagagggagatacaactctagtttctggcctgaacagctggcttgttgaacaaccccaccgttagctaagagacctggaggaggaatagtcaaagaggaagatgatgaactgttaaggacagagaaatttaggtgtctatggtttatgcaagtgaggatttctgtaggcattgggctatatgcttagggttcactgtgtgtcttcaggagagacatctgggctggagatcaagatttggaaggcatggtatttggaggcataggagcgagaaacgttaccttggcatgtaacatggcatagcagagacactggcctgggatggcccctagaagggcatcatcattgcagggggggataacaggggaactgccctcaaaggagagggataagcctggtcagagaggtaagagaagacagctgtgggaatgtggtgccagggactcaagaaggaagagcagagagtaatgtgcagtgtcagaggctgccaagagatcatggcaggccaagactgggtgttgttcattggctttgcaagaaaggagatagtcgatgacttggctggagtagttgtggcgagttagggatatgttgccatttatggcacaaagggaggttaaaaatgaagtgtaactttagagattctgtggggttaaat

SEQ ID NO: 119875 - DNA, 1072 bp, Homo sapiens
cggccgcagcacccgggctgccgccgccgcctcgcaatccgttgcatcggccgcccccgacgcctccatccccgcttggggcccgatatccgtgcggccgggaccctcctctctccagagccccgattatttttggcccccggggcctgtgcggtgcggaaaaataaaaagaaaagagagagagggggctcggaagcgccgggcggggaggagagaaggaggagagacttggaaactccgactgcaaataataaagaaattgaaaacaatacattaatataccataacactaaaaagagcaggagcgagagatgagaaagggaatccagcccgctctggagcagtacctggtgaccgccgggggtggggagggggcggctgtcgtcgccgccgccgctgcagcctccatggacaaaagggcactgctagccagccccggcttcgccgccgccgccgccgctgccgccgccccgggcgcgtacatccagatcctcaccacgaacacttccaccacctcctgttcctcctccctccaaagcggcgccgtagccgccggccccctcctccccagtgcccccggcgcggagcagaccgccggcagcctcctctacaccacgccgcacggaccctccagcagagccgggctgctgcagcagccaccagcgctgggacgcggcggcagcggcggcggcggcggccctccggtaataccctccctccccaccgtccccagccccggcgggaggtgggctcgcaccgcgcggggtcgtgggcgcgctgcgggccgctcggggagagcactgggccgagcatcgtgggcctcgggggctgcccctccaacgagggttcattgttagacctgagtgctcttcccggcgccaggagggtcggggggctcggccaggcgcgcggggcggcggggattgccttggcgcgaaccacatcaaacactccaaaacttttcgcggcccccccttcttttcctgcacttttccctacccccactctcccttcccctccaactcgaagcttcctctttctcgggcgtaggaaggggtcacgccccggatgg

SEQ ID NO: 119876 - DNA, 5508 bp, Homo sapiens
gctggagggggagaggggggcacccacttcctcctgctcgccggctccctggcctgggacggtcccggcgccctcgcacccgcccccggcaccgccaccctccctctcctctccccacccccccaccggcgcccgccctcgccctgcgccgccggtctgttcggccctccgggccccctctccagccggccccccacctccccccggagccaggctggtttcggaaatgcccttacagcagcaggttagtgaccgggacggctcgggggccgccgacgccgcgggggcaccggattctgttgggggctgaagcggtgagggtaggcggttgagcggggttttggagtgggaacggggggttgggtgctcgagggaaatgagtaagcaagaaaaatctaactaagtaaatgccccggcctccggttctaggaacctcggggcgggagtgtctgccccagggggtgggtatggtgtttacgtggattttttttctagggggcggatggatgggcgatagaaaaccggagggggcttctcgccaatggccgagttgagctctgttttctgtcttccttcccttgtgctggagggggaggggggtgggtcagagggtagggtgtctgtaggattcccaggccacccgccaccccctccctttgtccctgtaatttataaagcgcctttgagagatgatttaggtcagtatgcggcttctctttttgttggtactagaaagaagtgtggcccggaggtctcccctttctccttttctctccttcattcccttcctccatgcctccgggtcttcaccctcgtggtgaggcttggcctccacggggctagaaccgaaccagactcagttagatccatggtagcctgattataccaggcgtggacctcaccttgtctcagctccaaatgggtttaatttttggagaatcaagattttgcgggagtctttaagaaagtcagcacataggcagcactttgggaaatgggatgggtttgggaataatgaggcgttttttatttctttcctgttcccagtttctccccgggttcggtcttaactgctttccagccccagagatacttgctgggcatgtgtgatgtagtcttagtcaaagaagctcatcgttttttagtgactagggtctgccagcaggggggaaacggagcacagtacctgcttagacatagcagtatccggtgtgctgggttttcagtcgcaagaatattccatgcttttattagcttcagatactcttactgacttgacctaagcatgtttggacatattttaagcatatttgacccctgcacagttctgttactatttcataaacctaaccttaaacaaccagctattgacatacttcttggattagattcacagatttgcagggggtagttttgataatgggaaattatgagagcttcaagttgatttttaaaaaattttaacagtgtttgttgggccaggtccctaagactatctttcaagccaggtttattatatctagttcattgtatttaagtatttaaagtatactaaattaccctcaccatcttccaagttatttcaaaactttattctccttgacatgaaattattattccaggaataataatatccttttgagtttatgtgcacacaaaaggtttttcattacaggaatataaatgttactcatatacatattcagaagcattttttatatgattgcaatgtatgctgaatcattggttatctgcattttttttttttttttttttgagacggagtctcattctgtcgcccaggctggagtgcaatggcacgatctcggctcactgcaacctccgcctcccgagttcaagcattctcctgcctcagcctcctgagtagctgagattacaggcgtgagccaccacgcctggccggttatctacacttttaagagctatttctactggccgggcgctgtggctcatgcctgtaatcccggtactttgggaagccgaggggggcggatcacgcggtcaagagatccagaccatcctggccaacatggtgaaaccccgtctctactaaaaatacaaaaattagctgggtgtggtggtgcgcgcctgtaatcccagctactcaggaggctgaggcaggaaaatcgcttgaccctgggaagcggaggttgcagtgagctgagatcccgccactgcactctagcctggcggcagagcgagattccgtctcaaaaaaggagctgtttcttctgggagggtgtaggaaatttatctagtcaatgcatacaaagtcttaagcactgaatataaagtttgatttattgtttttcttatcgaaattatattagacttccatgtaagtcttcgaattttgaattttgttgatattctttccctaagcaggaaagacaggatggggaaagctaagtgattggctgaacaaagaccacctaaacactctgtgtccaagaagaggttgaaaagtcttcaggtggccagagttgcagacctatctggttctgatcccaagttctgtctcaagaatatctaaggacttaaccagaagcaacttcttcacctttttttcaatgggggtaaaaatatgagtactaccttaccagctgtaaagcatctattatttacaaattgtatgttcattggcaaataacttaatctctcaactcagtttcttcctctgtaacatagggacaaaaacagtgtcacctttaaggttcttttgaagagttaaatatgataatgcatgtgaactatttagcacagtgcctggcaaaaagtagacacccagtacaattcatatttattatacaaatgttaatttttttctgacttagtgaaatagtgtaaggccaggtgcacattgtccctttgtttacatatatgaagagaactgttaaaagtctttaagtgatctgtaattaattatttatgcccaattaatttgggcttttaaatatataaaacatggccatcctaggggtaaaatagggacatttcagtaagacacgcctatatagagatagtggtgttgaactgccaagcatatgccttgaattgtgacaattcaaggccacatcatcctcacttttttgcctgagttccactccgtccatgattccacagacctgccaacttttgggtgcagtttatgcttagcggcttttgttagacctgaactctcaatcttcaccatgtcagagacatgcattagacaaattccatcttagttggtgaactgttggaaatgtaagaactccagagaaaccatagtcagaagtgctactcaatggagcagacaaggcttcatcattttctgctgctgcttctaaaaagaagctgaaattattttattctagaaaatttgggatttaataatgtaagagactatgtcctgtcacagtcatagcaacctactgattctactttgggaaagagccctcagtgcttgaaattttcatctaagaatggagaaccataggtgctatttcagcagggtctcttttcctgtacaattataaaaagaaaagtgccgggttcctgtggttctatactcaataatcttgcttctgctgagatatatggttgatgccaagtttaagctgggagacaatttttagtcactacataccccaaaatggaagttttaatataatgcagtgcccagacttgggcactacaggtagctccactataatcagtaccaagggcgccactctaatcatcctctgaaacaaagcacccttaaatatggcactgtgggctgaagaactccaccttgtgaacaggaaaggattttttgtttttctataaatcgccaccttgtgtattacttggaagaatggattctgagattaatgttatactgtgtaaagctaacttgaaaacagaaaataatactctaagcctagacgtgcataaataacattacctggagattgacagacggggtgaaagcttttattgtggtttctcagaaatatataaagcagtagttttcctttaactcttctgtctttaatgccatctgcaaagatatatcatccatacctttaacctctttcctagggatttggacccatttggcaaatagcttcaagtactcatagttaattttctggctggttttcctaagttaacctgattttacaaatattccatttgtaggaccagtttacatctactttcccaagctagccaacttcaattcccttttagtcatctacttcctactaacagctgtaactaggatgagtcaaaatcaattgcctatgctcaccagatccctgataaattcccatgaagccacctgaaaggtggtaaaagcaaggtaaaacgtggtgaaagcaaggtaaagaaggtagatttcacaattttgttttttaaaaaggggaatcttccctgaattctttgaggtactaagtacgtggtttaatgcatattttcattcttgttagcagtttaaaaataatgtttcagagactgtattcacgattgctaaaaagcattttttctactaatcattgttcatgggacttaacaatggaagataactgggaaagcagtaaatataggaaaccactaatagtgtctccttcttcctaccctgaccctctctttggcttcagaaagtgacgaggaaaatgtatctttcacaaagaaaagttataccacagaaggtactaaaaagcaacaactgcctttggggacaggaaacttacagagtggggattattatagagggataacataccgagtttctatttcaataagagggaaattggtttatattctgttcacacttgtttcaaaccctctcctctaaaagcaatgtgtttttggaattcaaggaatgtacgttctttccccaaccttaactgggggtcagtcttatggccaccatatttgtctacaatataacttttaaaaaatataatttttgccctcaaatactctcctatccaatgcaatgtaactttgaaggagaagtgatgaaggccactggttgccagattgtatcacacagccagatgcactttgctttgatgaagaatctaagtgatgcaggcccccacttagctttgtaaactaaggcaggggtttatgtcagctcgaggtagaaagcagtgagaattggcagctgatggaatagaaaggggacaaaaagaataaaaaataattgactttagtctgctttccattaccgtagcccaactctctggggccatttgtgtggtctagacaacattcttagaacttgacagtccctgagaacgatattctaggttggcatgggcaatagttggcatttacactggtcttggaatcataacatttgagaagtgtaaggcacaagagtcctcatctgcccaatccccttcatgttgcaggtgaggaaattcaggcccagtgctgttaaattacttgcccaaggtcacaggtctttgctagtggcaaagccaaaaccgaaacgggagactcttgaattct

SEQ ID NO: 119877 - DNA, 1040 bp, Homo sapiens
cctttaaacagttggctgtgggggtaatgacttattcccaaagatacaaaataagcaaggctactttggatgttaaatgaaagggaattatttaaaaaaggaaagaatgactcttcaaaacgtgatagtaatatttttaaagatttatttgatattcgcaaatttgtcttctgtggttatatcaattctgttgctcaaaaagtgacacatgcttcatagagaatagaatctaaaaggatttttgagactttcttggggagaaggacacacagtgcccctctggtagtaacggagttttgtcctgggccaccaacatcctgagtgactgtcatgctttcagaggtccccagcccttgcccagtaacattgaacaaggtgttcttcctctgtggttagctccaagatttctggtttagcaaagtggctaatcagttaactctttaagaggaaattgtcattcctttagccaacgctaatttccttaaaatgccttcttttcctttttggaactgagaaagcttaaaaatagaattgcttcaagccctgaggcctgaaagtgaaacataatctaacgtggctgtagtgcactgactcgttaggggcagcgatatatggcttatctgtaatccacaaaccagaaaggtgcccagtgtagatacggtctaacagccagtgagcattaagtaccaactgatgagagtagtaatcagtgaagctgatttcctctggaaagttttttggcgagtagagtttgtcttagagagtggaggatttgaatgcctcttgactttctgctgaggagagcttctgcctgctctagtttttatgatcctgaagggtggtagctctggactctgagaatgatgggcagtgaactcagggtctgtatatttcgttccactctgctcttccccatttctgatgctttgggggctccatttctgatacataaccagagcagcatccctgaggcccacactatctcctgtgtgcctttctgcatctggcagtcccttggagagaaggaggctcatgtgttt

SEQ ID NO: 119878 - DNA, 1477 bp, Homo sapiens
tgcacctctctaaaaatggtgatgatgggaaggagaagtaaaccgtggaatggctctcgcctaatgcagtctttagggtctagggtctttgtatttctttataagctgcccattgacttgggaaaaagaactgaagaataagcttcttgtagtagtgctatcagtagtgatagtgtcatgaataaaacctttatttctgtgattaaatgtattaataaagtgacactactagcatgaatgacactattaacataatttcaatcctgtacagtaaaccatggcttaagactgaatggcaagaatcagggtgtctgagctgctgggccctgccagactcggagcccctgccagtgtgtgtatatcaaggcagggcggggggttgtcttgctctccagaggcaatggaacctgcctctaggcctcccttttcccttctcatctcctcacccctccttttttatgttagatctattcctaccccttccccttcgccttgccctctgcctggctcttagaaggaagcagacttgccaccttcagtggctgcttcccggacttaccaaattaattaccaccttttcctgccatcaagggatggtgaaatcttgccttttcggtcttgcttcccattcctctgcactcggctgctgcgacagtgtggtgctgcaggcaccgcagatttccctctggtgtgtttgctcgtagcttctccctctccaccttactccttttgttgccctcctcccactggcccattgaggcccacatcaagggaaggcgtaggcacagcctcccccagtttcccaggggcttgggcctctcccttcccttgggttactgcttctttcctgtaacacctcatggtctgcctcgtagcctaatcttgcatgttcatgacttactcctcctccaaacctgtaagctccaagaaatcggtctggcttgctttttcatcatgtggtccctgcagtgcccactacactataggctcagctacctgagaagaggcattttcattagacaccttccatgtgcttggtaccccattagtcctattggggatacaaaagaagtatgaggtgtgatccgcccactcttgagtttacagtctgttgaggagacaagctttaaacacaagttgatctgcaagcaagactaaacaggcggtagggagaaaacaagactcatctagtcctcagttgtgtggtgtcgacagaaagtgccagaggaacaggtgagagtcaccagactccagctgggccgtgagatggggaggccacggttgtcaatcttggagtacattagggcacacatgtgaatctcccagggcgctttttaaaaatactgatacctaggccccacccagaccaatcagaatgtctagaggtgagattaagacatggattttttttctttttttaatgtgctcagttggaaccactgggcttggtggaaagggaagattggggaggcccttt

SEQ ID NO: 119879 - DNA, 4048 bp, Homo sapiens
agtgtttttcaagtttacctgattgcctgtagcacttgttacagattcagattcccaggctccatccctatcctctgtcagaagccctaagatcttctgatgaaacattctggaagcacggctagttgagcacagggaaaagttactgaaactagattgtccaggtgaaggcaggagccttctgccacatccattcacataatgcttatctcagctcttcctcgtttggaaagaccccagggccccaagcctcatacctgctctcgtggttccaaaacttgcagactcccaggttgtagcccaggcaaaccatacaaagatgggtctcccaaaacttaaaagatgtgaaacaagaagtggtttcttggattctcaagcggttgagaatccgagctcaggaggtcaaagtgggcttggtggctagacgccaggcaccagcaccagctgggtacccttgagtggtttttctgccttaacagtaggaaggcttttcattctgtctggtctggacctgcctgaaacacagctaaccaagtggacagagcgagaaatgtgaatacgaggaccagagcacaccatttagagtacgggcgctattgagttgatgagtctggaagcaggatggcaacaatgatggtgtgaaaaggcaggtggaagtgaagggcagattaagggagaaaagaaatacaagacctttgactcccaaatatttaactccaggggctggaagaatgggtgaggccaagcttctcctctgtctggggtgtgcactgtgtggaaggcatgattagtcagaatggatggggtggttgtgagtgactccatgggccatcccgttttctgaggggctaaggctgagcaccggaagtgggactttggcatagaggttatagtggaagtcttgatgaacaatagcaggccaagacctggtctccctagcttacaaataaaagaaatttaacatggtgccacaaaaacctttcatcattttcacttcttcctctgtaatatgaaaacgagacaaattcatcaggttgatttttggggatcgatgctgtcagggctcgcagagacgagccatcagatgttatttattacatgctttaccccgtctcctagctgctgtgagaaagcccacagtttgcaacctcacaaagcaaagagccagctggaaagtactgtgcatccagacaggtcacatagtcatgtcctgaaccaagatagctctttttgccatgatttcctacactctctgatttttctcattaaaaaaaaaaaatcttgaatttattttcttaagctctagcattctaaagtttaaacatatgagcctttgaatactcctgtctaggaaagagccgtgtaaattctaagtatctctataattgacttttgatatgttacttgtgtttaaacccaatttgcaacaccccttttgttggctaattttgtcgctatgttgggtagcagaacttgtgacgatcacactaataacataaagtttcccacctttcttgttgctgttttccttgttagcatctcagacttcccaattctgggaatagtctctaggaggcaaggttttcagctttggaaatgcatgcgtgacacagtagtgtggtatggaaggcgtgtggacttgaagatccggctccagaaacacgctctgccaattaccgtgtgtgaccttttataaattacatccatgagctgtagttacctaaaatagtgatcctctctccttcactggctggaaggattaaatgagatagtgtttataggaaatgtactttgtgttccttagttgcctccccccgccactccccgtggtaggaactcttgagtacttgtcaaatctgaactctcggcatttttacctccttcagggaaaactattggacaggctcttactgaacacccgcttttgtgcagaatgcacttcctgatactctgggagtttcagaggctactaaggtgtccttctggccctcaaggagttcatctggagacagggagacgacacattttcttcaataactaagaaaagaaagggcaatgaagaccataaggaaataacagtgaagtttcttaggcatccaaacttgatggaggggacaaaggaggcttcaggaagttttaaactagaacaggacttcagcgctcttaacattttggtcagatacttctccgtggtgatagtttgtgggcagttaacagtggtggagggctgtcctgtgcattgtagcaagtttagcaggatccctggcctccgcccacttagatgccattagcaccactagttaacaacaatcgaaattatcttcacactgtcaaatgtccccgggaagcaaaatcacccccagctgagaaccaccgaactagaccttgaagaaagggtagaagaggatatcatgtttgcctcttctatatatagtacatatttaaattttaaaatatgatatacattttaaaagcaacggatttctcatagctggattaactttggaatgcctaaccaccccatggcaccccagaactgggatccactgcccctactcttggtagtgctctgtgcaggccacctaagccctgtcttttttatgatgaggcatgatattaattggctgctggaagcctctctaacttgcagaagaaaggatcaaagtctgcagttcagggaaggaagttttgcatttatcattgacccaactgggtaatttaagagcgactttctgctcagggtcaacttctcagtgtggtttttaatcccacttcatagttagatgatttggtcacatcactttccctccaaaccccatttcctcgtctgttaaatgaggaaaatcatggttcttacctcacagagttactgtaaggattgaatgcaataatgcctgtaaagtgctggctccgtccctggccatgtgctaaacactctgacatttgttgtcttcctcatgtatatcattattgtggttgtcattaagttgggcttccgtttcaggacagttcaacagtaagcagccattccctttgttgctggtgcttctgcagctattttccttgctcacctatacccacgctggccccagtttcaaccacagggccggctgacccatttatttagcagataggtgttaagcacctagcatatgccagccaccattctaggtaccaggaatacagcagtgtcagaacagacaaaattccctgcctctgtgtggtttgtgtcatagttggtgaagattttgccacatcataaataccctggtcttgtctttgatgggttctttttcttttattttttaaatggttctaagtatgtggtgctggaccagcagcattacttgggaacttgttagaaatgaaagttttcaggttgtactccagacccactgtcagaaactcaggaagtggaagtgggggtgagcagcactggtgtatggcttaacaagtccccaacgtcattccaatgcaccaagtttgtgtgtgaatcagtgtttgggaaaagaaaggagtagggggaaacccaggccgtaactgggctgcaatgttatatggtaacatcaaataaggtgttgctcatatcatgagattctagtaacatcagagtttacaaaggatagtcttaggtacaccaagacacttaaaactagcagtaccctttgatctctttcctgggcctggccacccctcctttaaatgggagggctttgggaggcctcctaagtcaccacagcacacgggactcagcaacagaaattcttagccttccctaggcttttccttgcctgatatacaaggaagttgctttccccacttttctccagacttctggcatgtttgacaattattttttcttttaattccttcagtttttattggcttcttacctggcatcattaaaaaatttttatagctgcaatcaaattgccaactggatggacaaggcttatctgaaaatgaaatggtagctctcctttgtatgtctggtaatttgggtatttaaagatacagtgaaaagtaaatgaaatgagagactatggga

SEQ ID NO: 119880 - DNA, 1104 bp, Homo sapiens
agtgtccagtgtggagctgggcacagggtgaccgtttgataaatgctggtacagtcttccccccaatcccaactcattataaaaaccaataaaggcattaaatagacaccacggttctttgtgtgaaaagctttggattacatacagtctgaatgagtgaataccataatgtaaattgtaaccaaaataatagaatccaaaatcttaagtaatgactttgaataaaaataagtgttttaaaagttagtaactttttaaaaaataagtgtaattaaataaacttttaaatttaaaaagatgttacttgatttttatttcctgataatggatttaaaaaaaaaaaaaaaggcccagatcagactggcagaaatacttttatttctgcactagcccaaagcctggatatgcttataaggcatataacctgtccatttaacagctgtcatttaattcacaaacactaattaattacagccatgttaaaaggggtgtttgggacggtttggtagttccttttgaagaaaacctgtgtcttgaaaatgcatatgaaagattaccaggttctgttatatatagtccaggttcgtcttggtggttctattcgaaaaatatctctctgaccatcggtgggcatttcctctctctttctgtctacctacagccaaaacaagttctggttacagtgacagttttaagtttgccatttgtggttggttctattatagaggctgggggaggaaggcaagcagtcctcacttcttgcttcctgccttgctctagagtgtaaggatcagcttctctaatcccttgacttttcactgctctatgtagtcagggtagacaaggggtggccctcaaacaacagccacctctggaggtctagcgtgactaaaccactgtcttcttttccaaatccagcactggggaccgacgtgtgggcctcccatctgacttgtggagtgaaagaaatgggaatagagcagcgctgtccatatagtcgagttttgtaaatatttgtcagatggaactagagatgcattatcacattcgacagtaacaagtggcaagtgttgagctcttttaagtcttgctttttatttctta

SEQ ID NO: 119881 - DNA, 1142 bp, Homo sapiens
ttaggaattctgatttactgatctggagggcggctttgtgttaatcagagttctaaaggcggacaaactagactgtgaacttaatacttaccctgagaagtataactgccaagtggacagttgcagaaattggttattgcctgtgttctcgatcagaaggttattagctgtgtcagagtaaaggcattgaatgatcccattagtaccttccagctgtggtctcctctctagagcgtacctgcaggggagggagtactgctagccacttatggagcatatggacactgtcattcacccacccaggtgtccagttccatgactctggtgtgaaacactgaatttgtttgttacctttttttttttgtaagaaaatacttgtttttagtacctgcttattatttttttaaaataaaaaatatataaggaagtggagtgaaaatgaaaatactttcttcattccctcttgatcttgcttccttcccagagataaccacaatcacagcttggcctttcctttttataatcatttgcaaatctatattttatttatataaaagtaaaaatgattcaaaaatacaaaagtgcacatcgtggcttgcccttttgcttagtatttccagagacgtaattccctatctgtatatattgttgctcattattctttgtaatagctgcgctgccactcgttatatagatatgccagaatgtgtttagttattcccatttgatggtcatttctgtcatttttcattttaactattgctattatgaacagtgctacattggatatctatgtacataagtttttgtgcttgtgtgtatttctgtaggctgcatttctaagcgttgaatttttatatcacagggcatgtatattaaaatgctgatagattagataggtccaaattaccctccaaaaaggctgaacaaatttatattcccaccacaagtgtagagagttgcctgttttctcatactttttccaacactaggtaacattagtctttttgcagttgctgctcatgctagatagtacctccttttatttatttatttatttatttatttacttacttacttacttacttattttgagatggagtcttgctctgttgcccaggctggagtgcagtggcatgatc

SEQ ID NO: 119882 - DNA, 1317 bp, Homo sapiens
ttgtattacacaatagaaggcacctaatcaaagatttcttgtttttactgcatgattgcactcttaattttgtgaaagcataggtttacttccagactgagaggtaaatgaataattattttgtgatttatttagcacttgccgccccaatcttgtttttcacgtctgcagttatggctgaaatatcttattccattcccagcctctctgttggtggtatctgcctgatctccacctagtgtcattgtgggatcgtggccacacatgggccttccagggctgtgctgttggtgaccagtggtgcttgtaaccctgaagtgttggcatggcctcagctgactgggctttccctcatgcccagggcttaaacttgaactctgcctgctctgttagcagtttttctctacatttcttttaaaatagactttcacttcttccttcccatcccccccaatacaactgccctggcatcctggctttttccattcttgacaaatgatctgtccactgtaactgtagctccactgtgctgatatctgttgaaattagacctagaatctaaatgtggctccatgaaactatgggtgagacattttttttcttcaaatagtctatggtttattggcaccccaaaccacctatccataccttctccactgtgatgctgggggaagaaaatggggtaatatatgtgtaaaagtgactgagaatgaaaagttctgcataaggtacaatgttagctggggtttttgcatatataataagaagacaaatgttcactaccactcctgcctgccttccctgggcatatcgaactgattccagcctaatagcatttcttatcatataatgggaatcacaaaccctccctatgtccactcctacagcgccttcttaccctaatgaggctttgtaactcaaagatttaaacatctcatttatgctccattgactgagttaaccaaacactttgtatttggccctttcctcttagaagttcagaacaataatatggtcctgaaactactcctgcaaaatctgcttagggaagaagggtcggccagggcaggggttacattggggtttgcagtgtagtcaggcaccagggacctggcaggttgggtgggatcaattcttttcacctcagggctccagtttctcatttgtcaaataaaagtgatttctaaggcccccttctgctcagaccttctgtgactgtccactaagccacagagactcactgtggccattgaattcttggggacctcagggaggttttgctgccgaagtgactgcccattctgccggcatacattt

SEQ ID NO: 119883 - DNA, 2336 bp, Homo sapiens
gcacacctgtcatcccagctacttgggaggctgaggcaggagaatcacttgaacccaggagatggaggttgcagtgggccaagatggcgccactgcagtccaccctgggcaaccaagagagactctgtctcaagaaaaagaaaaaaaagaattagattatctttggaaaatagcaaaaaggcccaaccaaaattctcacttaaaacacagaattcacaagagtgtgctgaaaatgagcatgccggagacacggtattcctcaacacttctcgtcatcagctgacacctgaatctacccggtgggaggaatgcaactgtctctggatgccactatcattacatctctgtggcctcaaatgggtccattgcagaatcttgctatcttcagtgaccttaaagatgtttttgcttctggagaaggaaccagctgcatcaacggtgatctgctgacttcatacagtactccgtctgctcccacctcgcatcccatggcccagtgtcccgtgagctgagatttgccttctgctgacggtgtcctgcctcaggtgccaggagcactgctttttgcttttttgtctctctaggagcagactgaacatattgcaacctgtgagtcggaggggggtcaacaccccagggccaccctctaccagtgggaatggaagccagtggataaatggccctacttcctagaaaagttccagggggcattctggatgcttcttgggaggcctcagcagaatgaagcccctgttacctgtagccatgaccttctacacacactcttcaataatacacccacctcactctccctcctcctaggatcacttcccaataaactacctgcacacaactccttgtctcagcctctgtttttggaaatatctaaatttagacacctattacattagtctggtagggctgccataagaaagtaccacagactgggtggcttcaacagcagaaatctattctctccctgatctggagactggaagtccaagatgttgtcagggaggtttcctctgaggccgctctcggctccaagatggctgcctcttcacctggtcgtccctctgtcataagctcaccgggtgtcttttccttcagattggatttgggcttaccccaatggcctctttcaacttaatcacctctttaaaggttcattctccaaatacagccacattctgaggcactgggggttatgacttcaacataggaatttaacggggacgtgggggtgggcgtttagcccaaggcacctgtgaaggagaaaaatctgatttagaatacaagctaccccaacataattggcctcaagattgtggctgttttcaaaaaactcttccatcttgtatagaactcacctactctggggccttggggaggggggtctgtgaacatggaggccatggtgttcgttggccacctccttttagattaactgcgcagcctgtgtcttcacttctgctctgtacatggagaagacagggaaggcaaggctgctgcttacctgaaggagttcaaagtgtaaataagacaagcccattagatctatcaggggaaagccgtttaggtttgtttgagacaagatatatggtgtagaccacagaccttacgtttagggaaagcgtacttcttcagtgggctgagtttcttgtaacagaaggtgtggtcggatgattacagctggggttgaattagatgatttatggaacagcttctgccctgaaattttctgattgagagatggatgtggtctggagtatgtgaaaatgggatagatggagggaaggttaggggagaggtgaacagggcctcttccagggtcttgtggaagaccctgttcgacgtttcctcacgtagactgtctgatgaggctcttccagggtgtggtatggccagggtgtgttaaatgtagggagcacaaggcaagaaagggctgcaccaagctgcttcctgcctcagggcctttgcacttgctgtcccatctgcctggaatggccttgcctcacatcttcatatgaccttggctccttgtcatctattgactcacctgtcacttcagaaaagcccttgctaccatctggtctgccagtcactctttatcctattttcatgttttattaacattcatcaccatctgcagttagactcttttgtttgcctagtgcccacaatgttgcccgacgctcactaggtgctctgtgaatatttgctaaatgaatgaagaacttgaaggaagctggcagtgggtggactcgctgagattaaggggcatggaagattactcaaggcagcctcagcccctttctaatgttttgttttgtttt

SEQ ID NO: 119884 - DNA, 1129 bp, Homo sapiens
tacagaccagttctatggttcaggttgttaatgtgggcccctggatagaattctagatattacttaatttttttgtgtgactaccctctaactgaaatttagcgttttcttctagtatgaacgtaggcactaaaccacagtagaactggcagtgtgtttgactgtcacccatagaaatagatattttcatatcacattacacttgttgcagctgtcttgaaatattgtttatgctcatcatgacttcaaaattacagtaatttttgacctgctgctggatctttttatttcacgcactaacacagaagaacatagattactgtatgataaattgctttttaatattttgaatagctatatttcaatacaaagtgtttcctttgtaatcccatatatatatatattttcttttttaagacataaaaaagcactagcctgagaaaaggggtccaatagacttcatcaggaggccaaaggaggcgtctatggcacgaaaacatgaattctggtggaattatgtgaaaagagaagtcctatcactccttaaaatcatgttaatgaagattcctatcaaatgtggtccccaccccctgctctgggtttactgcttccctgtgaatcttctccacacttttgttaattttgggatggaagtttgagagagatacttttttcatagataggttggaagtgatgctcaccttatcaggactgtaagaggatattgcaagctttgatgattgagcagaaaaatctttgcacagctggtcagaacaagcttgtcctgccttgtgggagggacagagttttccaaatgatcttttggttaagaccttaattaaaaacagcctaaattcacttgtggcaagaatttattaaaggaagataaccatgagcaaatccacgttgtggtataagaaaagggagcaccatcgttaaaaaagtcagaggcttgaattctggtgaacttagcacaaagaagcaagaaaactttagactggtttcttaacagtttgctatctgtataactaggggtgaattgatctcaaagacctaagaatctgtggacttaaagacactgatttgtggcataattcgaggtagtttaaactggaatatcaaggtgtca

SEQ ID NO: 119885 - DNA, 4248 bp, Homo sapiens
gaaaattcatgaatatagaaaattcaagatcatacattaaagaattgtcttttttttttcaaaaaaattttttttctaaaaatgtagtgttatattaaaatgtagtgaatattataataattctaaaaatgtagtgtttatattgttttcctgcttaagttaggccaaagttggtaaaatgcattttagaaccctatttttgttaaggagagcacagagccactggtttagagaagtttgtaatatccagaggatgaagaaaacggacacttgtcattctgagttcacgggaacgggagaaactgaacccttttaggttgatcatcagcttgatgtgaagggacttgagagattctctaatctattctttcctttaactggttaggaagcagagtccaagagaaatgccctgcccagggtctggcagaactgatggagagcagccttcgtggctaccaccttcccataaagtctgtgctctccagcggcgcttggtaataagatttatttaatgacacgtgtaactctaagactatttgtgatggcgaataccacagatttgactgggtaatgtgatatttgttatttgctttaagttaactttagcctttagcacagtgtgatggaaagggcaccaaacttgtgatctagaagacttgggttcaagtttcagatttgaattagctttgcttctgcaaatctgaggaccctattttcttaatccatgaaatgggaataataatactcacccaatttaccttacacagtcgtgaggattcattgtaatgggctttgtaaaaatataaagtgctatataaacataagggtgttaatctcctgtctttggtgacaggctaaaaagacatacttgtttcaaattttggatactctaatttgcataatcttacacattctctttctctatttttaactctatgttttccccatcagatttttttctgttaggagttacaatatctctcttcaactgggctttgcctcaaggtgtataaacttaaagcattatctccggtgcagtttgtcagtgtctcggcatatttgaaatttttagtactgcatttggtatatgaaagctgcatcctatgtaagaccataggatatttaaacagatgttcaaatttctattgtgaaaatcctagctcattccttgctagagatgaagcactgaggacagtacaatcaccaccttaaaacaaaccacctaagcacagctttggctgcacagattggaagggaatctggtaattacactctttagttcttctgtgaatataaccaatctgggcaatttgggcaccagagtggatttttaggcatgaattatctggttaagttagccagataattgccagctgtctcccgtgctttctgctctggagaccccagccggagtaattgtcttctgtttactcatgcaagcaagttgctggtttccattttcaaacaaaaactaactgcatgttagaatggtattttaattgagctatttttgttgctgattcagagattcccccaccctttgccaaaggagttgcccagattagaacccattaatttagttgatttggggggttccttgttgactttggggaagacataaatattataaaagagatttagaagttgatggtataaggttttccgaaacattcaaaacttatctcaaattctgaccaaacatttttctactaattttcctaactaaatggaaactccagctgtataaataatgatttttgtttgaaaacattttttctcttgattttagaaccatcgagggaattaaattataaataagtagcaggaaagaacaactttgtcaatgtgaaacagaatgcaaaattactcacattttgaactgagttccagaatgtaaagcaacgctttagcatgggctgctgaagcgagctgctctttagggaggaggaggaggcttactgagacgttttgtttgtttctttattttatttattaatgtatttgccatttctccattagatctgattttaatactgtaagtctttccactgattacaagtgcagtgacatgtccctctgcaaccatcattttcctcccattttttcttttctcttttttaaagagacagggtctctgtcacccaggcttgcatacagtggcgtgatcatagctcactgcagtctcaaactcttgagttcaagtgatcctcccacctcagcctcctgagtaactaggactaggtgcatgccaccaaagcctggctaattttttaaatttctttgtagagaggggtctcactatgttgcccaggctggtgtcaaactcctgggctcaatcctcctgcctcggcctcccagaacattggggttacaagcatgagccactgtacctggccctcctccaattttttcttaagaaaaaagagaattcatacttcatttacctgacagtcctcatcccatttaagtgtatacaatggaaatacgtacatttatgaccaatattggtctctttctttctgtaggtttgagttttgattatagacttcgatggagaaagcaatggcgccacaacccagccagggtgccctgccaggacttcctcatctcttgcagtgaaacccccttatcaaacattacgtgctatctggccccctttgtcatactttcttgcactccacttactacatatcaaggatttgccatgttgtggaaaagttggtttcataacatattttgaactcttatttaagggagttgtttttcttatattcttcattccacaaatacttaaccaaggcatattttgccacaggtacatgacttccaaagaaatcataactatagttatccaaaaaaattaaaataatttagtaatgtccacatcgtcttaaacactcttccagaatgttccaaaggaacaaatggttgcagtgacttttaactttagccccagcctacttccagctaaggcagttctcactgcagatatatgtattcattggtccaaagaaagagagaggaaaacttggctcccgagtatttagagtgaatgattcacgattctgtacatgggagtcttggctccttctctgtctctcaggctttttggtaggaagtcaatgataccagtagaaaaaaggctgtttttctgacttaggatttggtccgctctctgcaacccactagagaaactgaagttttctttccataatgatctgaagtgttgatagttaccatctctgtaaaagctcattaaaaaatgacttattttcctttggaaggagaggtcacatgctggagctagcagtggaatatcaggaccaaggatcataagcctcctgctgtaactctggtttccagatttatttgagcctacttctgccagaagtaaatttggtgggcatcttgaatggagaaatgaacagatgatcaaggagagggaaaagggtcaggagtaggggtgggaagaccccaaaatccagtgaaaagggtcaggggtaggggtgggaagccccaaaatccagtgtggcagataaggggaggcccaaaatccagtgtggcagacaaggggtgagggcatccgaaacacacagtttactattttaaccatttttaggtgtatgattcagtagcattggctacatttacaatgttatgcaagcatcatccatgtccagatttttttcaccgtctctaacagaaaatctaccattgaacaataactcccctcccatccctctagtccctggtaagctctattctactttctgtctgtatgaacttgaccactctagatacctcatataagtggaatcataaaatatttacccttctgtatctgccttatttcacttagcacaatgtctttaagtttcattcatattgtagcatgtatcagaatctcattctttttatctctgaataatattccatggtatgtataaggccccattttgtttatcttttcattcatcaatggacatttgagttgttttcttctcttggctatcgtgaataatgatgcaatgaacatggatgtatgagagtatcttctgtttgagtccccttttaaaattcctttgggtatatatccagaagtagaattgctggtcatatggtaattctgtgtttagcttgtgtttttgtttttgtttttttgagatggaatcttgctctgttgcccaggctggagtgtagtggcatgaccttggctcactacaacctccacctcctgggttcaagcga

SEQ ID NO: 119886 - DNA, 1431 bp, Homo sapiens
gaggtgctttctctggctgagggagtcaggggctgtgcaactgtattctttagtgtgaaggtgagccaacacagcgaagtatgctcgccctgcctcctccagaaacaatctgcctttgagtcttttcattctcctggtaaccgtcttcttaatagctgtggcttcatctaaatgaaaaatttatcttgtgctgcttacccaaaggagaggctcctcacatgtcagatattatttcaccaattatctcagtaacttctgtgctttttattcctgaaagcaaagttgagaatgatgcaggtttccacaacatgcggtgtttcgtgcatttttatccttacgtagttacaagaaacaaagcaaaatttagaattatttgaagtacttttaacaccctcaatttgatatgttgtgtgtatatttatatctggacacaattcttttcattgaacagtatagacaaagcatttagaggacagttaagtttctccaataatcatgtttaaacatatctcaggccgggtgaggtggctcatgcctgtaatcccagcactttgggaggccgaggcagattggatcacctgaggtcaggagttggagatcagcctggaaaacatggtgaaaccccgtctctactaaaaatagaaaaattggccgggcatggtggcaggcacctgtaatcccagctgtgcaggagactgaggcaggagaatcacttgaacctaggaggcagaggttgcagtgagccaagattgcgccattgcactccagcctgggcgacaagagcaaactgtctcaaaaaaaaaaaaatctcaaatctattttttaaatttaacctttgaaacatttgtgtaacgcaggtggctcatgggcaccaccatcttcttttggcagatgaggaaacaaacctgtctgtcaacacagaaagctgggtctgctcaagaattgctgtggggtacagtggcaatagcagggacaagagggatgcaggggtcctgtcttcgtgtctgtggaccagcccttctcaaagtccacggctgcccctcttggctccattctttgtctcttcatggaattgttctgtgggaatagtctgcatatagtgattctgcattccaacatctaacttccctgtgccttcctatttacaaaagacacagtttcttgacctgaaatccccagtttgggattattaataacatttttttgtaacctgtagtgcttcagatactgtctcagcctatgtgaattctggtagcattattgccttatagaaattatttgacaggccagatgcagtggctcatacccataatcccagtgctttgggaagctgaggtgggctgattggttgagcccaggagttcgagatcagcctgggcaacatagccagacccctatctcttcaaaaaaatttaacagggcatggtggtg

SEQ ID NO: 119887 - DNA, 1293 bp, Homo sapiens
aatggaaagtgaaatttgcaattcatcccatgttatttatttatttagagacagagtcttgctgtgtcacccggactagagctggagtgcagtggtgcaatcttggctccctgcaacctctgcctcctaggttcaagcgattctcctgcctcagcctcccgagtagctgggactactacaggtgtgcgctaccacacctgctaatttttgtatttttagtagagacagggtttcaccatgttggccaggctggtctcaactcctgggctccagtgatctgcctgcatcggcctctcaaagtgccaggattacaggagtgagcaaccatgcccggccctctgtatttttgatgggatggatggttcaacatttaaagagaacctaaaaagttaaaagtaaaagcaaagaagtcttaataacaaaaagcaccttcatgcaatgtcactgttttactgcatcttaataaagaaatgtggccaccttagacccagaatataatcaatttttaattgtctttcttggataatatcaagatagagtgtaataagttaggttaacatattagcttgcatcttgtcagggaaaataggtagatcctctgaacacagaggaaggagggacgtccacgtttgtcctgtttagtgtcatactgaagaagagtatgaccagccagtgctgggcgttctgcagcttgggacagatgttggggggaagggcactgcctttcttgtgaactttcttgcccaagggacaaatgagctaagcagtactacgttattagtgggatgtgtatgtgtgtgtgtgtgtatgagagagagagagagagaaagagaaagagaacagagcctgtaagtcttgccattttgccttttcagacaacccacccccacccctcagcataggaatgtagtcctaaccccaagccactgcttcttctgcttgcagctctaaacttgagcaggtcttgggggcagttcaccagtgcaccacactacactactctcagcaatcttttttttttttaaacagtgatttgcactgatctagcctctaaggggtaagggccgagatgaagcagagaatttatttttatattatgtcgtctggtgcagagactgctacaaaatcaggagtcaaaaatctaagggaataggctgtgaagtcattttgtccatgagttgtgttacaacacattcattcattgtaaacaatcaccaacagtcattgccataatttattcttggcagtaaattgggttttctagtgacagagtaagccatcagaattaagcaa

SEQ ID NO: 119888 - DNA, 1033 bp, Homo sapiens
ttcttgtctgatctgaggaattttatattcctgaagtctataattaggtgcttgtgttgattgtttattgaaacaaagctgaaggtgggggtgaggggagtgccacatagtggaaaacactctatggcaaacatctgagctttacttaaaagcatgggctgcaaagaaatgtaaattcattggcttaattggaagagagtatttatagaaattgaatgatccagtaaaactaaaagcctggcttctttcatcttcagagacctgccttagtaaatgctgttctggaaatcccttgcctgcaaagtggactttgccatccaatttctggcctcctggcagtcagtcactttgacctaaccctattgcttgactcgtatttactacgtactttccttttttggcttagggttgtactgaaaatgtacatgtaaagaaaaaaatgtccatgtacactgaagttttctgattttttatatagctccataatttgatttcaataactattacaaagaaacttttataagaagatacaatttgaaaatcttgctgtgcagcctcttcccatctactctgcctgcctactacgccttttatagttcaccatatccattaggttctcgaaaattcttccactgtttatgcaaatctttaaatttttaaatacttttattttccttcttagaaaaggtgacaactagatgctattctgcaccttgtttttacatggaatcatataccttaataagcttttcagacactctttcaatcttctgctattatgaagttgcagtgaataaccttgtatatcacttcatacatgtgcaggtatatctgtagggtaatttcctataaggggatcaggatttgggccagcagatatgtgcatatgtatttgtgatcgtgtggctagcccctcctttttttaacttttattttaagtttaggggtacatctgcaggtttgttatatagggaaactcgtgtcatgaaggtttgttgtacagattatttcatcacacaggtattaagcctag

SEQ ID NO: 119889 - DNA, 4051 bp, Homo sapiens
agctacagaatcagagaccctgtgtggacaagcccaacaatctgaattcaacaagcctctcaggtgtttctgagcatgctcaagattgagacccatgaccttagaggtaatatttaatttcataatggcagtttacaaccctatagcactgccttgtgggcggatgggtttggtcctaatcttcttgacatgtaaaaatgtagactcacagcaggaagtgataatatctgttctttaaaggtggtattcttagagtaggaaacttttctgagttttttccaggagtcacaaagatacctcactaggaccgctagtgctttggactagaacaccttacatccagaatcttgccactgggtcagtgcttccctttgtcatataataaaaaaccagcaaaactggtttctataatatgctaaggagttttgtagcgttgaagacttgtcttacccccacaaaagcatcattgttccttctcatcccttgcccctctgcctttaaaattaatttgataccagaatggcaaatacttctgatgactgttagccacgccataatggtgcttgtatttggcaggttaaggcagagttcccatacctctgagcctaattgccagccagggttcagctcagagcagtagttctaaagtttttctggacattagactccactggatagcttttgaaaattcaactacccgggccaaatccatgtaactaattctatatctcaggggtggaacccagggatcaggatttttttttattacccagccgatgacaatgtatatcgaagttagtttaagaacaaaggatgtgcgcacttgttttaaagtagttttggttatgataataagaattataagagggaccaaatatcaaatgcaagaaaatggtcctgaatgccaatacaatcagaataagaaatgcataaatagcgacttgcttgaagctgaaatcaactcctttttggatgcctttcttgtcttttgaagaacacatgttgtagtatgtgtttctctccatatcctgtgtgtttcattgtaatagtcttgctgattgattttgttggctgcaagcaaagtgataaaatgccagtgggtgcctgtgccagggaggtcaggactggactttcccacttggctctgttttgatgcatttagcagattgattccaaccctctttggagactctgacctacaaaagtgtctgttatctttgagagctccagggaaagctatggacctttctagatcttttcccaccttttggcccatcagatattgccttgtccacagcagaacttgacgattcatcatagaagcctatggttttatttattgacactgctgtacaattttccctgtagcgagtcatagttggctgaagagagagtcgaagattaagtacaaaactttctaaacatcctgttttccctcaagacagggcactgttcttaataaactgaacattcttttgcactggccctggggcaagggtgtcccaaaagctttgacaggggtgccatttggtcataaacagtgtggtaatagggtggagtcagaaagaaattctctcatcccttttacaactccaggcaattctagaaccaacccttgggaacccagggaaagaactctgaaatgatacgctggctgaggtttgccgtggccacacctcagggttaagcattgaaggagctaggcaaagagtgtgtgtgtttagctacaaactaagtcacagatcaagaggcttttggtattcttccatttttgcttagaattctatgatggtttttgaaatatattgtccttactttatgttcttacctgtaatctcataagtttctggtaaatttagcttttgccaggttccggtgggtcttacccagagatggtcagagtaaatgaacaaaagaaggaattgattaggatgtgaaacttcagatacgctcacaggccttcaagccctagaaagtagtatgccagtgaattttctagtcctctctacactttgtacagatgaagaaaccgagacccagggaactcaaccaaggtttcttgccattcctccagtcccccagttaaaaaaaaaaaaaaaattaggttctattttgcaaactgacaaggagaattatacaatggaaataacactcattttaatgtatctgttcttgtagtttcttattttattcacctttataaaccattctgagaacattgtcataaagagcattctcctaaattggaatgtgattcaaatagtcctgtctcctttcctccttgctttttatgaaatgactgcctacacgcactcgcgcacatattttagtgagcaatgcaatgtgcgaatacaaatagaaatagattttgttaaaaaaaaattaatgtcagtccactagttaaaaaagtaccaaagtcattacaagattcattaactatgtttaagaaaagtattgagggctttttgggggattaaataattttaatttataaataatggcctcagattcataaaccttaactgattgtagagattatgaaggtttgtttctcacacagttaattatttgttgctttttaaataaccagataattactttgcatttgtaatgattaattgcaaaaagttggttataagaatccctagatgaattctcaggtaagatctcatgcagaattctttgaagttcatttggggtcatttatcaagaaaagcaatgcatttcaggtttatgaactcactttgcccacaggtgaggtttccaggcttcgaaccagcaggaggagagtcagtgggaggatctgacgtaggtatggcttcagagatgaagagagtatttctcctccgcaccccctttgcctacacctagaaataagtttagcctagggaaaaaatgttccctgacttgtcaggttcagctagtgtaccctttgagatccttcattctctctttttctttttgagaagaagtcttactctgttgcccaggctggagtacagtggtcccatcttggctcactgcaccctccgcaccccaggttcaagcgattctcccgtctcggcctcccaagtagctgggattacaaaagcacaccatcatccctagcttattttttcttttttttttttttttttttagtagagatggggtttcaccatgttggccaggctgctcgatctcttgacctcaggtaatccgaccacctcggcctcccaaagtggtgggattacaggtgtcaaccactgcacctagcccgttctctctttaatctcccaattaacgaacatctactgcgacagcatccattacctagaattgtaggaaggtatataggatagacgtagcaaagaggtaagtgggtaagaaaataaacactcataaaaaggagacaaactgtcagagtggtcccctagctacacctgccacaattgcctcctgagaagtccttgttctgcacgagctaaaattcccattcaaataaattgttgctcttcctataatcattgagctgctgaatagagccagggtccttgatagacgtcatagtttgttattgactttatcaccagtaaaagttaatactgtcatccctttcctgcagcaacacactaccatttttttttccaaaattaatttaggtaaagaacatttttcttagtataattttcattgaattcagtattatcaagtttgtatatttttagagcttttggatcgctattccagcccacatttttcatagcaatttgtctagtatttcttcaagatctttttatgttcatttgaaaaatgaacatgacttcatatgtattcattagcaatcactgccgtaggcctttctgtttgatttttcttctgaacctcagagatagtggctcattatgaagtagaaaaaggctaactaagaccttgttctgaacttacagtgggtaagcaagaggcttcagatccataatctctatcaaaatgtttgcccacattactgtaacagggagtcattcagaatgagagtggaggaatttgactccttttaaagaatcgcgtgtgc

SEQ ID NO: 119890 - DNA, 1064 bp, Homo sapiens
tacctaccagagttggttgctctgcccactggctcctctctgcacctccctcccagaccatttctccacttcctcagccttagaaaaaacagctcactcatggtggtgcttgccggtggaccttggagataagcttctattcttggttgtttttaagaaaactgaattctcttcttagagccaacccatatcttatcagtgtaactttactcactctccaagccctaattccattctgtcctttaaacattaggagatttcccaaaaataggcttgtcagtaaaactctggtgtgacaaaggggcaaaagtgttgcttttttgtgtggagattgcatttttaatattctgttccccagaagtggttccaggatgcttccctagaagtctttgggaagaacaattagagtaagaaaggttcttccattatctgccccaggctgggtgtcttcggatgactctgtcacctcacaagttgtttaatcctgtatttagcttgtcagggatcatacgaaatggggtctacatcagattttccacagttgttttttttctttagtgatatagcctggaagggctgggggcggtggctcacgcctgtaatcccagcactttaggaggccaaggcggctggatcacctgaggtcagtatcacctgagaccagtctggccaacatggtgaaaccccgtctctactaaaaatataaaagttagtcttagcctagcgtggtggccgacacctgtaatcccagctactcgggaggctgaggcaggagtctcacttgaaccccagaggcagaggttgcagtgagccaacatcgtgccactgcactccagcctgggtgacagagtgaaactccatctgaaaacaaacaaaaaaaggtcatatagccaggaagagcttcagtgggaagaacagcaggaggaatgaagtcccacgggttatctgaagagatgtactgatttcagaacagtgatgccagctatgaaaactaactaccacttatatcattagatgaagagcctgttctgaaacctcccgttaccactatattatgtttaaaa

SEQ ID NO: 119891 - DNA, 1045 bp, Homo sapiens
aaatcactggccattggggatcaacttaaccttcagcccctctcctctccttggaggtttagagatgggtctgaaagttctgaccctctgatcctgccttggtttttccagtgaccattgtccatcctgaagccacctaagggcagccggccttcattcaaatcatcagcacacaaaaagatacttcatcttctatagtaagtgggcctaccttacaccaagactgataaagtgaggggttttctaaacataggagagaaagttcaggtgctgggcactcaaatcaagtgacagatgttcacctcgggcatcagcacagtgtatgcagtgaaggaaaactgcagaatgacagccatgcagcagacctggagaacccctagctagtctcaggtctggatatcaggaggccagagagcttcaggcaggaggaaaagtggagatttggtagaatatctgatatgatggagagttggaaaaaatttgaggatttggtgagggcaaatggtgccaacgagctagaaagacaattggaaactccaaagaaaacaaacaagctttacaagaaaggatatatagtctcagtatattatttgatactgcagtgaatactgtttatacagtcatgatgtatagcactggttttttatttaaccaaaactaattatgtaactattggggggaaatggaagaagtgagatgggtatcgtatcattgaaggatgtcagtacattagaactaaaatggctaaaccagaaatagctgtgtgagcatatcacttagagatacagaggtgaccaccaggagaaatagtaaaggtggttcccccagcaaggtagccattataggctctctgagctagtgggttttgaaaaaccatgtgcatctatttgttttttaattgtcttaaattattcttaaaaacaaaataagtttctataggagggaccgcagtcaccagttcataggttaaatggcttttattccaaaagttctaagtcagtgagattgcttttcctttagaaacattcatatatatgtggttaga

SEQ ID NO: 119892 - DNA, 1012 bp, Homo sapiens
tttaagcaaaaaggagagtttattggctaatgtaactggaaagtctgggaaagaccaacagttgcccccagggcatgaccagagccagagttttgagtggtggtctcagacccctctctctccttctctccactctgctttcccctgggaaggccccattctcaggcagctttaggctcctcacttaccaaccttactggaaagacatacctgcttcttgccagatagttccagaaacattcctggggttagcctttgctcctccagccttggtcataagccattcaacctgttcgcggtgggggcggggagggcaggatgggccacaatgattagccaggcctggatcacctgtgtgcacagatgcgcttagaccaggaaagggatggctccccaaggaacaaacagggagcttctgcctgataaagagtgaatgtttgctggaccaaccacagcaggcccacacaaggacttgacagaatggctgggaggggaagatgaagtccagcaagcagattgtccttccggagccattagaatgatgtttaacttagcactgcagtagaaagataaggtgtgccactgaggcaagccacatcgtaaaatatatatataaagaaacagatgaaataattttaatgctacatctgacccattaacaacattggggttagaggtgccctgacacagtcaaaaatttagatagatcttttgactcccctaaacttaactaatagcctgttgtttggggttttcattattattttagtgatggggggtcttgctacgttgatcaggctggtcttgaactcttggcctcaagtcatcctcctgagtagctgggattacaggtgtgatccatgcacccagccctaatagcctactgttgactagaagccttaccaataacataaacagtcattaacacatttcatatggtatatgtattatatactgtattcttacaatgaagttagagaggaaatgttatcaataaaagaaagtttggaat

SEQ ID NO: 119893 - DNA, 2584 bp, Homo sapiens
ctacagagtcacactggtaccataagggaagacttcttttaactgtatgtagtttcatttttcaactcggaatacgaacttttggcaccattctatatcaaatttaattttaacttcccttaatggacattgcttcagagtctgaggcaaactggatgtccacgaactatgccagagtcaccagtgtctgtgccgacctcaatctccagctcagcatatgatagcgtaagaattgattgagcccgataaattgcaggctgtttctctttctatcaaatactattaccgtttcttgtgggagagagagaaacgtaggttagaaatagccaactagtcccattatgtatgtgtttgcatttaacataagggctaaattagactttgttctctctcttcctttagttcatgcattaggcaatccacaaattgtgtgacactaaattaaaaccttgacctgtgcacctatgggggaacaagtacaatattaagtaaggaaatttcctttaagagagatggggagatttggcagaagacttttccaggtaattatttatcaaaatgaagcattgtttggaaaattggtgaacaggtgatacacgcacacacagataccagagcctgaaaggccatttgagatgggtctgtttaagaccttgtcctgcagtgctagtgagactcatagcctggctccatcaccgtaggcctcgtgtgtgctggtcccctgaggccacagcactctttcattcatttgacagatattttttagcgcccgctatatgtaaattcttcattggagccagggaatggtgtaagtcaaggtagaaactcttgagaaattcaaggtgaaatgctttaatcaaaccctggaatttttaccttcccttcctgctctaataaaaaactttcatagctttctatgacttgccaacaccaacagcaacgacagccttgcttcagatactaatactttggctgcagtgggaaagagagcttgcttgactgcaaagacacccttcatttctttacctttccccctatcccccacccgctcggtttttgtttttctttaagctccaaaatctccctcagaaaaaacgcggtatgatacgtctcttggtctgctcaccaagaagttcattcagctcctgagccagtcacccgatggggtattggatttgaacaaggcagcagaagtgctaaaagtgcaaaagagaaggatttatgatatcaccaacgttctggaaggcatccacctcattaagaagaagtctaaaaacaacgtccaatggatgtgagtaggagtcctccccatgccccggctctgagggggtcgtttcaaactgcctggtttcttagttcctcactttcacatccacgcccacacgttcttttcttttctctcctactgttttcttctctctcattctctcttccctcctcagcttctaagccagaagtttgaagtctctttacaaagagactttgtttagatactgtcagagataaaaggatttatatttgatgagcatccagcaacggcatccttaaagaggtccctgcagttggaaagtggactgctgttcatctgttacatagatgtctgtgtgcacccacgtgtgtatctgacagatgtgtacacgtcttcagcttgtttctaataagaatctggaaatgatggcttatgggttatctatgtgtatacgtacaactgcatagttacagaatatctttatccatggttctaatagcagattaactcactttctgggtaaattaaggcaagacttaaatgcctccatttcgtctgtagagcagggatggtagcatgatacttatacagccacacgtatgattacatatgtaatatattttgtgaattttagagcatctaaatagccactataagcacagtattgaattattaaagcattttggaaggaataattctgttacaggagggctttgaaaagatactaattcagatggaagatgaatacatacctttttttgcacattttggaattttgttgacagtttggtaacccgttttggcctctggtttagagaaacatattgtgcactagtctcagttcttgcatacatcacatacatctgtttcctttactttcttttctttttagttgttgatataagaccctcagtaattacctgagtttttgatgcttttttggatgggttgtttttttgtttttttttttttttaattttgaaccattccatcttctctgtctttctctatctttttatcctttttcgcctttcttcccccaccacctgggagccatgaggcaagggaggaaggtggttgccttcttttgccctctgaatttgaaccttctgaagaagtagacctcccctggaggaaagaatcctgaaaatagcagtgcgctttcactaaatttctatgctgtgaaaagtgcagaactgtatttatgaaaaaaaaaatatatatatatatatatatatgtgtaaatgttctaattttaacacttggctaacaagcaatgtgacctcctatgtcaagaggagacatttacccaaaggatcatttctccttcccctc

SEQ ID NO: 119894 - DNA, 1049 bp, Homo sapiens
cttagttttttattttcttatgatcatttattttaactgttctgtttctatgtttaatattttaaatagccatagtctttttagaaatgggcgggataaagctattcatttctttagttgtttagagtgtcaaccagaaatgaagattcatgggagaccctaaacatttgcacatccagaaggggagacatacacatacttttttgagaaggagtctcgctctgtcgcccaggctggagtgcagtggcgcgatctcgtctcactgcaagctccacctcccgggttcatgccattctccggcctcagcctcccgagtagctgggactacaggcgcccgccaccacgcctggctaactttttgtatttttagtagagacggggtttcaccgtgttagccaggttggtctccatctcctgacctcatgatccacccgcctcggcctcccaaagtgctgggattacaggtgtgagccaccgcgcccggccacatatgcatacttctaagtcataaaatactttaaaatattccatgcatctattttgtcattttcatcatacttatatctgaggtaattagatggaagattccttgacactctttacgttagcttatgttacatatcaagatattcgaaaaattagtggccttaaagaccaaactgttatagttgtgaaagcccctccagaaacaagacttgaagtgcctgactcaatagaggtaaggagacagcgtctttgttcatctgcaaagatctttgtggaatgcctgaaattgaatgactcattgactcatagttaaagtctgtccccctcctatgaacttgatggttctttcccatttattttacttaaccatacatttgaaaacatttcaatggtttgatgttcattgagtattcaaacaacctaactttgacctagcaggatgttcagttcaaagtggtatatgatgcgctgtccctctcatactttctctttttcataatttgtcatcaacggttttgatcaatttgaatcactttggaaagtttatattgattatcctgtat

SEQ ID NO: 119895 - DNA, 1798 bp, Homo sapiens
aattaataaacaaattgtctaaacgcacagttgcaggctcccttgggaaagccctgctttgctccaggctccaagatctcctggctaagtcagcaagtgagaaaatgtgcaatcaggtgtctctcaccccgaattgtccttcctccttcctccccggattggcttgctgtgcctgacggatgggctgtagaatggggtctggccacctggcctgctgggaaacagcaatcttccttaatagcatttcaagccgtgccttctccgcagaatgcatgtctttgaggtctgctaatatggaatggaactgcagcaaatgcaaacttgaagtcatgcaaaagtatgaaatggatttcttcagctcttcttaggaatatttaaattactgtcataattcagtttaagctatgaactgtgtgtcccagtaggaggtcaagaaaacctccacagccttctggatgaagaacctgttttcaaatatacttgttgcagatacagaagactagtagagttctgccactctaagctgttgtggattttcctgtctccatgaaccactcccattcccccgtccccaatgtgtttgtgagtttccagttgatttgtagcaaatgcctacttagttctttgtggattgttctagacttttaatttttttagctgccatttaagcattcctgtggcacccatcaccatttcaatttaattgtttactttgaagcggtttttgcaaattcatattacttaagcagagggagagaacctctactgatcagagcatctaaacctgtgtgatctaaggtttatcagcctctgcaaggagctttgtcccatcgtgcttccattcccaggagggggagcttggagcgagtcagtcctggggcttgctgacatgggtggcccattggaaaggagaaccaggtcagatgatgtaacagccccaaggagcagcaggcatgggtccctccatccttgggcttcccgggcccctgtgacaggggaaagggctctcttacaccgcactcagggagaccacttctcaggatggggtcagatggagagacctctagggagaaagacatccccattgtgtgagtggcatttccttaagctggcaggaacagggagcagccctgtgtcgggggctggaatagttctggccagaccccgttccccttcctctatgaaggaataagttggaccaagggaagtcggggacgtaaaaaatgaagcaaaacaatgccagggtgtctcccgctttactcttcaggaatggtgtcccaagttggaggctttgtgtcagctgcaaatcctaccagttatgtccaagaatggctttccctcgggcaggtggcagcggccatctcccactgggaatatggcgtagtatctccggtccattccttggatgctaaggactgcgggaatgagggagtcagataaagaacaaacctcgaaacgaacagttaaattgaaatgctatgtgcctgacccaatggtaggcacatagtaggcactcaactcatatgtttaattgaattgaaaatatcccttaggaaaaaaaaaaaacacacaaaaaaccacaagagccccagccagtttactccaggtagatttccacaatatgcaaagtggtggtggggtcaagacagatgacaccagcactttaaactctttgtgtgggtatgcgtgggtgtatgtttgggaagaaaaacaaaggtgcagactatcttcctttttttcttcttcagcctccatccctggcctcctcccctcacacacactggacttggtacaaaat

SEQ ID NO: 119896 - DNA, 1195 bp, Homo sapiens
cttaaaagttccttcatgcataagatttttttccagttactgggtttaactggtgtacattaattagatgtccatactgtattttgtttgcattaagtaattttctttttgacttagtatccggcacacaaagtgggttagtactacagtatttgcgttactttaagtactaagtatgcaggtttcctggtaccattgagttgctgctattaaagctcacacacgaaatggctaaaagttacaagtgtgcaaattatgactgcgtgagccttagaaaataaaatgtataaagggcaacacatgagctgtcaaacagtgttaggagtgtgtttatatgtacagagttgtgcatagcaatcgttttatttaagttgatatgtagtctactcacattttcattatttagcaattttgtacaaaaatagcaattaatttgtaaacactgccagaatactttctagctgctttgtaattttttaagagtgttattttgtttttgtttttctgttctttgttgtggctcttgttttcatttttgttgtacgtgtagatctgtaaataaaattgcagtatttaaagcttaagctttcaggaaaaagaaaataagaattcagtgtgtgcatgacaactcgtgtgtatgagaaggagggatatgaaggaagatggcttgcagagtaagtcgggtggcaattgtcagggtgtgggaatttcttttcctacggggtacgtgattttgtaaaaaggaagtatttctcccaaaattgggagtaggcaaactactaatcagtttagctttgtgttgtatgctagtttaaaaaagaaaatatgtaatataatgtaaaaaaaaacaaaaaaaagcttttatgatggattttgtaaatagatttgttacagggtgacctgttctctagctgtgatcttaccacttcaaatgggtgtaatttgaataaattttgtatggtaaaggatcaataaaatgattttttttaagagttcaggcttgtggatgggttttctttaatattatcttgtgctcctctattaattgaatttttttcattttctttttcttttttttttttttgttttgttttttgaggcagagtcaatcactctcacccaggctggagtgcagtggcacaatcttggttcactgcaacctccacctcccgggatcaagtgattcacctgcctc

SEQ ID NO: 119897 - DNA, 1049 bp, Homo sapiens
cttcttcatattatctaatatccagcttatattctgatttccctagttatacccaaaatttcttatagcttgacagacaaagaagaaacaatcaagaacatgaactgcattttgttgttaggcttttacgcttcctgttatctgaaacagttcctctcctactttttcctacttgacattgatttgttgaagaaatagttcctgttgaaccttggaatgtcccattgtcattagggttttgtctgattgtttcattgtgtttcttttttcaatatacccaagatagtacttcatccttgtgtttctttatctcttgtattttctataaatttgaagttagatccaaaggcttgattagattcaaatttggtgagaatatttcataaatgatgctacgctaagcagattttcataagttgattttatttataacttttatgtggtagagaatatgccttctgcatcctgtgatacactactggatgacatcgaagatatcgtgtctcaggaagattcaaaaccacaagataggcattttgtaagaaaggatgttgtcccgaaggtacgaaggcgaaatacccaaaaatatttgcaagaggaagaaaacagtccaccaagtgacaggtaagcttttttccttgaaattatattcattttctttttttttcttttgagacagagtcttgctctgtcgcccaggctggagtgcagtggtgtgatctcggttcactgcaacctcctcctcctggattcaagctattctcctgcctctgcctccctagtagctgtgattacaggcacacaccaccatacctggctattttttgtatttttagtagagatggggtttcaccatgttggccaggctggtcttgaactcctaacctcaggtgatctgcccaccttggcctcccaaagtactgggattactggcctgagccactgagcacggccgaaattatattcattttcattccagggagaagctgacgctactggtctgtgtgatatatataatgtctcttcattagaatctttgaacttttgat

SEQ ID NO: 119898 - DNA, 1307 bp, Homo sapiens
atattaaatatctaatacattttaattaaattttaatccattagcagtttgtgtttggtcttgtaacagtacttgtctgtataaaataacagtcctggtatgtttatacaagaatattaggttttgttttacacacctaattttgtttcttatttgggaatagttaaaaagagaaaataaggaagtaattacttgaatgggaattttttttttttttttgctaatgtagcatagtctgttgcttttatatattatatgtatttgtattaattttataaactattgattgttcctactttagaaattcatagttgttaattccagcctggcttgcatgcagcagactgtgggaatactttcttcactagtctaggtgctataggcccaggaaatataaacagaattagctttgataagacatttaagaagtaaatctctacagattttatatttaaagatttgatatgaatgacttctggattacctatgccagtagtcactttcattactatggaataatgagaatgtataaagtttattatggcttactagttgataatgttttcgttaatcaaatggaaacctaaaatattaaatgtataacataaaataggtataaaatataccttatgtataatgtatagggagtttattgaaaacagtatgcagataaattatatcaaaattagttctcagtagtcatagatatttttatcatttggggaagaaagattatgtgggtatgtatttgaaattgctgcttttaaatatgcaaattcaggatataattattctgtgttaatacttcataaggccaggtgtggtggctcacgcccgtaatcccagcacttaggaggccgaggtgggcagatcacctgagatcaggagtttgagaccagcctggccaatgtggcaaaaccccgtctctactaaaaatacaaaaattagccaggtgtggtggcacacacctgtaatcccagctactcgggaggctgaggcaggaggattgcttgaacccaggaggcggaggttgctgtgagctgagattgccccactgcattccagcctgggtgacagagtgagacactgtctcaaaaaaacaaacaaaaacaacagcttcataaagcgaactgtcagagcagtttgctgttgttcattgcctcttttcaaacccttttttattttgaagaaaaaggtggctcataacttttttgttacgtagtctcactccgctgcccaggctggagtgcagtagcaccatctcggcttactgcaacctctgccttctgggttcaaatgattctcct

SEQ ID NO: 119899 - DNA, 1975 bp, Homo sapiens
tccggagtagctgggattaccggtgtgcgataccatgcctgactgattcttgtatttttagtagcgatgggggttttgccatgttggccagactggtctctaactcctggcctcaagcggtctgcccaccttggcctcccaaagcgctgggattacaggcatgagccaccgtgctcggccagcttttaaatgattctcctgcctcagcctcctgagtagctgggattacaggtgtgcggtaccatgcctgactaatttttgtatttttagtaacgatggggttttgccatgttggccagactggtctaactcctggcctcaagtggtctgcccgccttggcctcccaaagtgctgggattacaggcatgagccactgtgtttggccaacttttaaataaactattacaaaatcgtgcctgcttgtctctcattcaaagaataaaacttactgaggagaaatgatgttagcccctaaaactcagaacaattacttgtatcgtgggtacatggatatgtgatataattagattagtatcttgggaagcaattaaactttccctgtgagcaccatggctttttaaagaaatgaatgtgttctccaagtaggcaatttttatagattaaactttttttccagtcatcctttgtttattgtttttggattatttctttgggagatgttggtaaattgttttcagtgtgctcattggtggcaaatcttcatatcttgagaatacatttagtattagaaaatggccacaggtcatttgaggccaaatctggtgaataaaatatgtgctatgatgttgcacaatgctgttctagttgagaataaattttgtcttaagtgattctgaaatcagttcttaaagagttctgaaagagtagctgtgattcttacacgtttttggtctcttcagaacctcacaatccttacacaattttgttaaggaattcgtaaccactccctagcctgatagtggaataaaggtttaggcttccaaggtgactgctttgggaacagccctcatttagatacagctgtgttagatacagctgtgttatgtttagtttgcagccatgcctggtgtgaatgaatattgtatgtgttttttggttagttggaaaaaaaagtccatccaaagaccattgactgaggctgtggttcataaacactgaagagtaatggtgttatgtgtacgaaatatttgtggacatgcttacctaagtcagaatagagtgtttagcctgggtgcccacattttcagagcagttatttaaaaattgctgagctgttaacattcttgatagtttctttgtatatgtgtttatagtttattcatttggcaaacattctctgaacatgatatatgttacagagtagagtgctaaagaggtgtaaagatatgaaattgaaccagccatggattccagcagacaagaagtttattcttttttggcaaaggaaaggccttcatattctgtgttaaatcctagaagttgttttaggaaatacttaagctcataatgtattctttcactttttgtaatatgggaggtaggacctgctttatttttttatttttatttatttttattattttccgagatggagtcttgctctgttgcccaggctggagtgcagtggcacgatctgggcttactgtatcctccgcctcctgagttcaagcaattctcctgcctcagcctcctgagtagctgggattacaggcatgcaccaccacgctcagctaatttttgaatttttagtggagacggggtttcaccttgttggtcaggctggtctcaaactccttacctagtgatctacccatcttggcctcccaaagtgctgggattacaggtgtgagccactgtgcccagccagagttgtttttttttttttttgagacggagtcctgctcttttgcccaggccagagtgcagtggcgctatcttagctcgctgcaagct

SEQ ID NO: 119900 - DNA, 1142 bp, Homo sapiens
atttttctgatctctacattctattttttttctttttaaaatggagcacagaagtacttagtttctgatgtttttccatcttggcccagtaatttcctttttttttgttattttatgaagcacaaaactaaatatttttgaaccaagagactactgtgtggtattaattttgattttgtactaaattcatgttatttacacaaatcaaatagtgtcaaccttaaaatttttttaagcaatatttttcttatgtttgagagttaacatgtatggttgattagaatcttcaccttctaaagggattaaggaaaaacctcgttcactgttgtgaattctaaaatgttttggttccaagtcctagtttttcttaccctggtattatgtccaaaatgaatgcccactaaaagttagtaactctcatggcaattaaagtattttgataatgtttataagttcttgttctcaattttgccactagtaaagatgtgggagaagttaatctttttttgttgtctttcttgtgaacttaaagatcatttttcatcctgttcaacctttggcctgaccttttcaggtcactaaatgtctggtttgcacttcttgtagcatgtgagaaataatacttcaaaattcaagtgtaattgtattaatttttgtgaataaactgctatggagtgctgaagtgtgttaagatgcctagtcttttcagaattaccggcattatggtattgaacttaaaatattttatgtttataatattttagaattttcatgagtcagataaacatatacccagattttcagaaacttgacatttgcttaattgcttaataattcacatcaggcttagagatttgtgaaatatttttgggataatttatttagaaatagcgtgtgtttaaatattaattttcttttttaagaaaatgggcagatgataaattaccatgaaagcttcatttaaaaatctgttgttagtattgtcttctttaattttggggagaaaaaacttctgagatgttaacaattgaacatgtagtgttggctctttttggccttcaatttaaaattgtcatgtgtttggattaaagacatgatgtatttttagctattgggcaagagatggcaatattgcattacat

SEQ ID NO: 119901 - DNA, 2196 bp, Homo sapiens
ggatcacctgaggtcaggagttcgagaccagcctggccaacatggcgaaaccccatctctactaaaaataaaaaaattagctgggcttggtggtgcgtgcctgtaattccagctactgaggaggctgaggcatgagaatcgcttgaacccaggaagtggagattgcagtgagctgagatcacaacactgcactccagcctgggcgacagagcaagaccatctcaaaaaagaaaaaaaaaaaaaaaaaaaaaaaaagaacagactgtagccagctcttaatattaagccagactgtaaaaccaactaccaccatttattagctatataactttgataatatctctgtgtcttagcatccttattaaatgaagatggcagtggtagtcctttctgaagattaaatgaatcagtatatgtaaagtggtcaactttgtattttagtattataataattattagatatgatacctggcacaaagtagtaattcaggtgtttttttgtgtgcattagtgaacaagtaaaaacaagtatatttcttgaatataatgtatagaagtaattttattctttttatctttaagttagaagaaaaattaaagtatattccaaaggttagataaatgcagtgtgtatgggaatcccttgagtttttcagtaaaattctatttgggtggctgtcaagtccagtctgcatagtcttgacatgtcttggataagatccttatactatcacttttcctgtcatggacactacaaattatattgaatcagaaatctaatttaatccattcttattcaattggaagcagtaattgctttcaatttaatgggattggattcagtattagaaattttgatgttccttcaaacttaatacagtatggttatatatatttccatttatttgtgtgtgttcctgtgccctcgcagagagattatcttggagtattacttgtattcacttgagttatttgcaacggttggtaaagaggcatattgtaagggtgggaatgagagtggcattctctttgttttttttcttttctacccatggaataatgaagagagaaataataagggccttcaaaatgggatttccatccactcagaaataaggaaaggaaatttagagtctctggagaagatctggaatgctatttactcttgagggtagacagcatccagccctactaaagatgaaaaaaggagagcctggggatgaaattaaatccatcaaaaaattcactgttggtcaggcctggtggctcacgcctgtaatcccaggctgaggtgggcggatcacttgaggttaggagttccagaagagcctgaccaacatggtgaaacctcgtccctactgaaaatacaaaaaaaattaatcggctatggtggtgggcgcctgtaatcccagctactcgggaggctgaggcagaagaattgctttgacctggaaggtggaggctgcagtgagccaagatcatgccactacactccagcctgggcaatagagtgagactccatcttaaaaaaaaaaaaaaattcattgttagcatgttatttcaatctttcccggcaaatcatacttagagacagctaagtttatcaattctcatgtcctatacggtgctttttcttgaatatacggtagacaagaggtaaggcctaatgggtgaagtaactacatttctgagttagtgtctaattgtttttgatcacctagttccatttgacagaagatgtagtgcttatggctcatcccattgactctttctctgctttcactccttcagcagtgttttcagtagcctttttggtgatcttattgacttgtcttttttctgatgttctttttaattgaattgctatatgatataagatggaatgattgtgttttaaccatgatcttcaagtctgctgtgtaaagaactaatgattgcagtttgagtaaaattcttagtaacaagtgaatcaaagataaagatagatcattgagaatattttttttctctccatgaggaagttcattattagctagcttacaaaaatgaaggaattgtgagagtgttctggaataaatgttatggcttaataaaactattcagaaaatcactgaacaatacaaaagtggaagacattgaaaatggtatatggacacatctaagatcaaaattaagccagagaagctttagggagag

SEQ ID NO: 119902 - DNA, 1056 bp, Homo sapiens
agggcttttaaaaatatttttgttaatttttttttagttttatagagatggtgtctcactgtgttgcccagtctggtcttgaactcctgacctcaactgatcctcccatctcaaattccctagtcactgggattacaggcatgagccaccacacctagccaacgagggctttttttttttctcattaacatagagatatgaagaatactatattggattaaaagtttttgcatttgtgaagtgtaagcagctgtgtgaatgtagtcaatgtgtattcttcatttaataaacataagtatcttttcctttccaaattatacaaaaaatactaaaagcaatcaaacgatttttacagaatcttaactaatataaaaatttgttcattgcttataatacagaataattatataacttggctcattatctaagcttaatgaattaatgttggaatgtaaaaacgagcaattttaagccagcgatggctcaatcatttttaactgagggattttgggatcaattactaaaatgttctgagcctcagtgtctttaaaatgtaatgatgctctattaatctcatgaaattgaagtgaaaacaaatgtgaggtaatatgtttttggaaatatttataagtttaaaaatagcctgcttggtacttgtgcctgtaatgctagctactcaggaggctgagacaggtgaattacctgaggccaggaatttgagtctgtcctgtgcaacatagcaagaccccatctccaaaaaagctaatatatttataaagcttaaatgttataaaatgataaactgatggtttttgaattctttgctctactcacctttcatctgttaaagatgtttttgtacaatttagctcagttcctaaatataccaaaagatggcactgtttacctatgtttaatattttaatttgcattttttgatgaaaaagtgtgttgaatgttttatctacaaatgttttaaattgaggttatttttttacatttaattttctgttttgtaaatggatctttaattcatgtaaagtttactaggaccag

SEQ ID NO: 119903 - DNA, 1556 bp, Homo sapiens
tttgattttttttcttgatttttgtttaatatcagtgagaaaatattacaagaatgaaaactagacatcactggcagtttttactttattgcatccatttttctgttccctaaaccttgagggttatgcatctaaagattcccatggtaggaaaatactgtatgtggttcataaattcatgaccttaaggtagcagagaccaaggcctaaaatagatgggagaactcaactgtttaaaaaaatttgttaaaataaaaattccatagaaggaaaacaatttatgtaccttaaatataattcatctttattatctttcctcatctacagaagcttctccttattacttatttgtgttctttctacagagaatatactaggaggggtatttttccttatttttagctcttgatctgaaagtgtaatgttcttttcgctttgtcttgaaattgttgcctccccatttttgggtctcatctggatctgaaagacattgactgactcaaatatccgaaaaacttggtaactttcaaattggtatacgtggcataattaagaatatgttggtgcaaaagtaatcgtggtctttgccattgaaagtaatggcaaagaccacgattacttttgcaccagcctgtatttcacaaacgtctctgtgcctgtgattacttctctctaaaatggtttatggagtagttgttatgattaataaatggttgataaatactagctattatggtattaagcattaataaggaaaattcactattacatgtaaatgttttgagtccctgaaattaactggcaacttaatgaaatttgatttaagcacacatttagtccatttcaatctatttaaacgtgtttctctcttgcacatctttttctgatggagagcgtgagttaggaaatgagccaaaataggatatataatggatagcctcttttggtagccagtcagacagaatggggtgatgtcttcatagaaggaatatggaattaggagttggaagatttggggtcttgctccaaagatcactttgattgttggtgaacttatttatctagtctcagctttttaattaattaattaattaattattttaatttagagacgaggttttactttgtggcccaggctggagtgcagtggcatgatcatagctcactgctactttgaattcccaggctcaagagatcctcctgcctcagcctcctgagtagctgggactacaggtgtgcaccaccatgcccagcaaatttttttttttttgagacggagtctccctctgtcgcccaggctggagtgcagtggcgcgatctcggctcactgcaagctcctcctcccgggttcacgccattctctcacctcagcctcctaagtagctgggaccacaggcgcctgccaccacgcccggctaatttttttgtacttttagtagagacgggggtttcaccgtggtggccaggatggtctccgtctcctgacctcgtgatccgcctgcctctgcctcccaaagcgctgggattacaggcgtgagccaccgtgcccagcaccc

SEQ ID NO: 119904 - DNA, 1012 bp, Homo sapiens
gagatcgcgccactgcactccagcctgggcgacagagcgagactccgcctcaaaaaaaaaaaaaaaacaaaaaaacaaaaaaacaaagaaatgtgaggtgtgaaatccttcttgaacatttttaacttcactcctccctatgctgccactctgccccctcatcagactcttccttaacacactgctgtgacccagattgtctttatttcttcttgtagcacttgttagactctattgcaattatttatgtatttgtctcattagactgatcttgagtacagagatggccctttattcttgtattcaaagtacctaccaccatatttggcttataataagcctcagtgtttgttgaatgaatttatatcaatatccatgccattcatgagaaacaaaacttattatatagagcatagaggtggtttctaattcgtgttgctcttatttttactgttagatgtaaaacgttgaatgatttgttaccacttggcataattaaatttagcatttttctagtttaagtagttcagtttttgagacacttttatgagcctcactatattaatggccttattggtgctttacagattttgtgattcatgggcactgtaagtataaatttcatgcttacagcaattgaataaaataggcacattgttctttgttagtttcttcagttggttcttttaattttcctgttcttactggtgattccttgaggcatctggccagtgttgagtatttcttcctgactcatcatcccttctgccacctgccaaaggaatgcttttactttggtcaagagcatttcgagtgagttagatttcattattggtgtaggctatggaccacctgataagtctaagcatgtcatactaattagcattgactgccagccaccataatgcttaattcaggtgctatgctgttttaattctaaaggtgttgtgaagtatggaaaaatcctttacctgaatatgaaactagctactaaatttggagttctctccct

SEQ ID NO: 119905 - DNA, 1049 bp, Homo sapiens
aaatgtctttggtataagtcaggcctattatcttgagatttatgcctttattctggaaaattgaaatttttatctcataaaagaggaaaataatttgaatggagttaataaaaatgaaaggagtaaaatttcacttagaaatacagtgaggcatccaaaatgaagaaaaatcccttatttggcttctagatctaaaatgatattctaatctatgcaggttggttcaagagcactttacccctgttggaggcagccaggttagctttattgaatgtaaatctctgacttctcccaagatacccatgaaagcaactaaattcattggttattaggcagcaagagtaagttcaattttctctacacttgtgacaattagaggttggttctagcctgtctaatgcttaagtttcaaggctacctgtatttgagagctgttttggggagataaccttgtaacacatacattttaatgagtacattacttttaccacctgctgaagtcgacttggagtgactactgacctgaagtgaatgcctgtgttcaatattaatatggcatgtctggatccagacagcaatctttcattttgacatgcacatagtcaaagtaaattaatgtttaaaacccaaacactttaagttcagccagtgtgtgcattccataataatccttcagaagcagtttacatagaaatgctgagtgctttcttatactttatttatcatatgtattgggtccacattgcagtacttataacgagatttatccagtgctgtttttgttccttgttttgtggaggctaaagaagttaatttatttcaggatttagtctctgcatattttaagcaaaattatacttaaaaatcttcatgtgcctggcaagatagtagtctaatttcagttatattatttttagatggaaaaaaaaaatcaagctaattgcatactttatttctgctcaaatgatcaccaatttttgaaagtatagtagtagtttaaaaaaagaaaaaaactaggcccagatatagtgtatgtttgtgactacatg

SEQ ID NO: 119906 - DNA, 1050 bp, Homo sapiens
accataatgagaatagtaggtgattggagttgtatgcaaatgacagttttcataacacttttgcagtttaatttcaacaaaaacctcaagttatatttattagcaaacatatttcagctaaggagttttttatgctccaaaaagatggcagatggaaatgaacctaatatgtgttcaaagaaagtatgctgcatttatttcaaattgtatctgatacatcagcatgatgatttatatgttgtcttagaattaaagtagatgccatacttttactgtaaaagtcaaaattagatttcttctatatttgacagaatttattttctgttcataaataaatatagtatttggtttaggatgtagaacatcaaataacaactgttagattatgcttaatatatttatcattttctgaattttggatgttcttaacatcagaaaaatatgtcctttacccatacagtgactttagattggatttggaagcattgtacagagaagacctattgttcctattgaataaggatgccgtacagagatgagctttttgacccactgctcttccagtagtaatggatttgcactaatttgagcagagtatgccacttggtcctgtttttcagttgtcctgtgtgatggctggctagcaaaatcaaacatctgcattttgactgtggaaggcagtataactagctggctcatactggttcaaatttgcaacactgatatggttagtattatggtgtcactacctgaattaagtagttgtggctaaattgtttatattatatgaacatattcgttattattctgcatggagaatttttgtcctcatggattgtttcataaagtgttttattagcttggattaattggaaaataagctttttaatatggacctctcccctagtcagagactttgcaaatgatttctacaaaaataaactataaaatagatgatataatggggcctattattcctgatttgattttaatttgcttccttttataatttttccacaataaaacagagcctctcagaaagtaaaagga

SEQ ID NO: 119907 - DNA, 1018 bp, Homo sapiens
tcagcatttcattttattctgtagcatttttactcctgggtaatgcatttatttgtgtgacctgtgaagatggtaaattttgcaatgcttagcgccttctgtttccccatgttccttgtagcaaactctatgctagtccttatcatagaacctacctattgtactttaggagtcagctcacaggactgacacctcccacttgactgtagccaccttggaggcaggagcttgcttttctctgtgtgtggcgtggagcaggtgttcaataatgtttgttgagagaacagtggtcagaatgaatggaattagttgtttgtgataatgtttattttctctatatggcacaggtatatatatattttaattttttactgtgtatgtctaaaatgaggttgaaatatgttctccatacccattttgtatttaacaatttttttgtagtgtattttgaaatcttggtaggctatttccttttgccttttcaggcctccatacactcctattacaagaggacttctgtctctgttccacatttcccttcgttgttggcgacctaaccttggtgaccgcaagcgatcggttgtgagagaaagagctgtaagtggggaaggctttccgagtctataggtactacctggtggcagtattaacacattttattatgaactatttgacagagaaaaggattaagagaataaggaccagttatatatcacctactcagatttagaaatgaaacattactgatatagctgcagccctccatgtagggggcgggggttaggtgggagtatatttttcattttcactttgtacctttttgctctacaaaagcttcagacttcaaaagaaatctttccttgctctgtgctttcatagtactaccccaggcctaagtgtattattgaacctgccagtgtattataaccatctgttcagatgtctgtcacctctaccaggctgtacttcatctttgtattttcagtaccgtacataatagctagaatggaataggtgc

SEQ ID NO: 119908 - DNA, 1068 bp, Homo sapiens
gtgtttctcaaaggagttttggcaaaatttgcataatgacttggctcatttagctttgtgtattgttaagagttcaaattctgtggatatgaaagtttacagtgtataccaaataaaaaggtcgtgtggtaggcagtgttctcaggataagcctgtgttaggtattcaaatctaatttgcatattggatctagacctatgactattaactccatttacagttgataaaaatttgcataaaattggtcatcttgatagcttaaggtatactgagcaaaatgttaactccttgggtagcatgtgtgactgtatgattgtcaagatgaaagttaatctaagcacatttggtttactgataatcatttctagaaatgagctgtagtatcatgtcagaatgtcagaaacatgtctgacaatttaccttttcatactagaaatggtggatgacatgtttcaaatcctggcagctgtgctgtatcaaatcctccctatgtgaatatcatgcttggtacttagatagtttaggagcagtactgtggcttgtgatttgttgtataattctgaaagaaaatatattaattttgtgcactttatattggctcttgctttattgtagcctttatccattaatctgctactgatggataatttctcaatcatttggtcctttttgtaatggctatgtggagttggcaattctttttattaaatattgcatgactgtatatgtgttaataatttattggggtagtgagctgatataaatctctttttagatgaagtttttggctatttacaaaggttgattactttttagaacagtgattgcctcagatttgcaaaggttgaggaaaagcacacctcttattttacctttttccatttgtggttaaacctattgtaaatatattggaagggttttaggcccttgaagacgcctctgtatttgaacagtttgattctgtcaatttcatttaaatcattattttttgtaagacctcaggataaataccacttttgaggtagtgactgaacaaacatgagttcttgaatagtttctattaaaatg

SEQ ID NO: 119909 - DNA, 1041 bp, Homo sapiens
ttctgccagcaccaccatctgtagactcacataaaactttattcactgttagggcattctgcattgtattgcttctgatcaagaattccttctctagcaaagaaggtgcggctatgggctcgtgctcttggaattaactggtcttgccccataccccgtgatctgaaagtggctagcctaattgaaaggtagaatggcttactgaatactcctaatgctaattgaaaggcagtaccatgaaaggatggggttctgttttacaagatgtagtatacaatttgaatctgtgaccaatacatgtgctgtctctttgactctgggattcaaggggtaagtgagagtagctttgctcattgttacacctagtaactcacttgcagatcttttatttcctttcttggaaatactgagctttgctgagctctggtttggagaccttggacttcaaggggatagtgtttccactagaggatacaacagtggttctatgagattggaagatggggctgcttcttggccattttgcagtccttacactactgagcaaatactcagaaagaggagctaatttagtcactggagtaattgatactgataaccaaggggaaattggggatttgatacactgcagtcaaagagacaatatctgaaattcaggggattctctgggcacctcttagtacttccatccccaacagtgaaggttaatagaaaataataccagccaaaaaagggcaggatgattaatggctcaaatatttcaagaaggaaggtttgggtcactccaccaggtaaagaactcagagcagctgaggttgtttcatctctggagctttgatctgggtcttctttttaatatcctcgagttctatgcttaatttttgggtacactaataatggttataataactttttaatgatttatctattctaacatctgtgccaattctgggtcagttcttattctccaatttttcttctcattatgggattcctttttcttattttttacatgcctggtactttttgataagatgctaa

SEQ ID NO: 119910 - DNA, 1159 bp, Homo sapiens
gaagctgaatgtgtagaatttcaagaaggtaattgagaagtccgggagtagagtttatctcaacaccaaaagaatcatttttaaataaatacagggtgagaaaagtgaagaatcaaaagagtagcttttgaagcacagtattcctaaggtcttgttttaaggatatgtttctgtgtttgttttttattgatttgagatcatcttaatgcgtgttagaaaatttatcaggctgaacgagttgatcctaaaatgctgcagaaaagttggatgtgaaatgggaaagaaaactaactttcatgagatgcttcgtaaaatctatttcaattcagggtgaaaattgcaaaactgtctgccaatgcgtttttgatggacattctggctatttgtgtgagtcttctgcattgaggttttatttattgagcttccttttgcttcactctagaccaggtggtttacatatgttatctcatcttgtccttctgacaaatcctgtgaggtatgtggtgttaatctcattttaaagatgaagattttcaggcttatagggtttaggtagttgacttaaggtcactggtagtaagcagggattatggctgggtctttgactgctaggcaagtattaacacctcatcacacacatgggctgctttttctgaaggtagtaggtggagatttctttccttgagtaaaagggcaaaaaagaaagaacgtaaagtagtttttagaagtagtttcttctggtcaccaaattaacaggaaaagggaaacttgtctaacctaggtgttgtgttttccccattattctgactacagtaatttctgttgaaataaccacagtcattttgttgaaaagccatacgtgtttctaaataaaatagttacataattttaagtgcatattttaattaattacacattcttttaaattattcatagactatcatagatttttatatcagttggcatctggagtcacaatgtaaatattagaaaaaagattcagaggacctttttcccaaataaaatcatgtgaccctaaagaacaatttaaataacactataaaaacagagttatcaggagagggagtggtggctaccgatatttaccattttttcttggtggggatttataggaatagaatacagtcagttcctctat

SEQ ID NO: 119911 - DNA, 1056 bp, Homo sapiens
ctgggattacaagcatgtgccaccatacccggctgatttttgtatttttagtagagacagggtttcaccatgttggccaggctcgtatcaaattcctagtctcaagtgacctgccctcctcggccttccgaagtgctgagattacatgtgtgagccaccatgcctggctgcgacaaagtttcttattttattttttgaagtagtagtatattccattttgaggatatgggatatttatatacagtaaatatttatatatttatatataatatatattatttagccattccttttattctagacatttttgttgtttcttttcttggcttttgctaataacaaaactgctacagtgatacccatgtctttgtatttatgtatcattttgcatatgcataaatatatttttagactatctggaagtgtaattactgggttaaaagttgtgtacatttctaattttgatagatattacctaattgccttgtgtagagattatattaatttatgctcccatcaacaacatatatgcttgctggtttccccagaaccttgccaacatagttctatgtatcatgagttttttttgatctttgcccatctgatgaatgaaaaatgggatctcagtgtcttttagtttgcatttcttacaagggtgattttttgtttcattttctgtgacctgtctgtatccctttatcatttttctgttgggtgacgcttactgatttgtaggtactctctatttgggaaatcaacccttcatgatatgatttccagatttttccccctttgctatatttttatgttgtttatggttgctcttgccatgaagaaaataattactttttacatagttcactttatcagtgttttcttttactccaaggtgatgatggtaattctctgattgtttctgctgttactttaatggtttcattttcttacatttaaatctttgagttacatgaaatttattttgatttatgcatcattgatggttccagctctccttcccctggatgactagccatttctcctgataccatttattaa

SEQ ID NO: 119912 - DNA, 1024 bp, Homo sapiens
attttcaatagttactggtagagctttgccagctattatttttcatttaaaagaaaaaatcgtctttcatataatgaacagacttcaagttgacccttggtttcctcatcttatttctatgaagcactcagggggactattttaagagaacaaactcattatataagtaatctccgagaataactgcttcttcctagtagcttctatttcctttagtcagagactcactctacagacaccaccaccatacaaagggccagttcatactcttgagagtttcagaatgggagcataggtactctttgtcagtgtcttcctatcatttctcctctactctttcctccttttcccccctttttctgctcgttctcccagcgctccaaccctagctggcttaaaggaaaatactttatcatgaatcacttttattctttttagaaaacagattttgaaaacatggttactccatgctgagcattgtgtaagtccaaataaagaaaaataaatgaaatgtaaagaaaaaaattaatctattgaccagaatttttattttgttttctttttgttttttgagttggagtctcgctctgctgctcaggctggagtgccgtggtgcgatctcggctcactgcaacctccgcctcccatgttcaagtgattcttctgcctcagcctcccgagtagctgggattacaggcatgtgccaccacgcccaactaatttttgtatttttagtagagatggggtttcaccatgttggtgaagctggtcttgaactcctgacctcgtgatccgcccgccttggcctcccagagtgctgggattacaggcgcgagccaccgcgccgaccattttcattggttttaagaagttatttttcaagttgtaccttaagggtgctttcgaattctcttattaaagcatactctattctcagtttttagtaggcagtcaatgatttgtgttacgtaaataaaccctctgggtatgggtaaacgtactgcacacttaaaatgtttggact

SEQ ID NO: 119913 - DNA, 1044 bp, Homo sapiens
gaaccagcctcgcatccagggatgaagcccacttgatcatggtggataagctttttgatgtgctgctggattcggtttgcccagtattttattgaggatttttgcattgatgttcatcatggatattgacctgaagttttctttttttgttgtatctctgccaggttttggtatcaggatgatgctggcctcataaaatgagttaggaagaaatcccttgttttcagttgtttggagtagtttcaggaggatggctttttgaagggttttttgtgtgtctatctccttaagagtaatactttaatgggaacttttctaataagtaatttcagtatttgtgaagttagctaataggtgatttttgagtatttgttaagtgttaactatgtgttcttctcggagaatcaatgcatactttgtgaagttgcctgacacagtccttgcctcttttccctgcccattagcactgttctaagtgctgcagtacctggctttcaacggaattgcactttgttgaagggaggtgggcatattaagtccttgcttctttctttgttccctcaagttaacgtggaagaagtatccttttttcacattttctctgaatcttatctccatggatcttcttagaaaccttcttctagaaattatttcctcattccatatttccaacctctccaactcccctggaaccttttcattggtatttaaacatacctgggtctaatcggccccctgtgcccctgttagctattgtcctacattttttcttgccttcccagccagacttttaaaaattcttctcttcttaatttcattcttatactcattctttttcccctttattggttttattgtgaaatatattaaacatacattagcgtttataaaacacatacagtttaaataataataaacacttaaacatctgccacccagtgtaagaagtataacattgtcaagaccgtagaaactgccgtgttttcaatcataactcccaagaagtaacctttatcttgacttttgtgagtcatttccttactt

SEQ ID NO: 119914 - DNA, 1042 bp, Homo sapiens
aggagcagaagaaggacgaattaaactaaggcagagaatggtattcaccagatgctgtccgttttcagagaatgctttttttttttaatgagaagcctgtgattgtctcaaattatgtatttttctctgtagaaaggtaaacaagatacaaagatactttactgctactgataccccctatgtactgaacctagagaatatagtttctgtgattatcaactttataatgtaattaatggacatagttctagagtatttctaaaagtttaaaaactcaaatataacttgtgtcaatgggttttgttatatatgtgttattaatatggttcaaagtaatgaaatgctgtttgaatgattaagtagaaatggcaagaaaagtttgccatttaaacactacaaagctagtggtagcaagcacaggttcctttaatgtactattctgcttgattgaaagaaaatttaaaaagatattatatatgattaagtatttttaatggccttgaagacttttgatcatcacaactaattcttattaagataacacttaaactaacatttgatttctttccagaataaatacaatcctgtaaaaggtacaataacagttaacattgggaaaatatcagattgaggtgacatttatacatataaaatctttcagtgatggattactcttgtcaagcattttgctttattcagatatttttccagttgtcaccattgcctaacacaaaacagcaaagatgagtagtgtaacattgttaaatgttaagtcgtgctacacatgtgccttttctcatcctccagcaccatcctttccctttgctgtcctctcttgcatgcgttttggttttccatgagagtgaggtaaagcttagattcaaagagagcctgataagatgttgcttctccttctgttgcacccaatcctttatacccaaatgtaaagatttacagcagtggggtgggacctgtctttttctaacctggactctttacccatgattgcttcactttgctacttattcctgtgtgtcatcat

SEQ ID NO: 119915 - DNA, 1053 bp, Homo sapiens
acttcataagaatagagaagtggttaccttttcagttagtaattatccagtttaaaagaattaaaaaaaaccctttccagttctcttgttaaccacattcactagtaattttcttttttaactaaacttctaaaagttacttttatttactttttgagaccgggtctcgttctgttgctcaggccggagtgcagtagcacgatcacggcttactgtagcctcatcctcctgggccaaagcaattctaccatctcagcctcatgagtagctgggactacaggcatacaccaccacacccagccaatctgttattattattattatttttttttagtagagagggggtcttgctatgttgttcaggctggtcttgaactcctgacctcaatcaagtgatcctcctgccttggcctcccaaagtgttggggattacaggcatgagccaccttgcctgacttccaaaattaatttttaattaaaaaaattttgtcattagaaggtaaaaaatcacagggttttgatttggccttttgtgagaaataagttagatgatgcaagttatttgagttatactttaaataatactatagtttgttgattttttgttaaacttagatattttaattttaactcttctaattatatgaaatggctatagtttagtatcagtttcatctttttgtttaaaatgttagtggcagattcagtgaatcattgtgtgcttttaccagtcacaatctccttttttcagctatccttgcccaccaaaaagtatccttttacatggaaagttagttcaaaatattagactgaattaattagtattattggttgggtattgtctaataagattgtctcccaacagtgctatgcttaatatgaatttacattttcctatcatttgtcatctccttccactgtttggatattgtctgtatgctgatttctcccaaatcttcgtctttgatctgtatatctccttacaggctccagccttgtatatcccactgcttccttgacttcgccatttggatgaccttgaccatggacacc

SEQ ID NO: 119916 - DNA, 2211 bp, Homo sapiens
aaatcatgtgtttacctgctcatggacatgtgttcaccagatgcaccctgtttacccagggctgctgatttcttaaagaaatatgcaccttctggatagagttgcataacttaggagaataaaagctcgtcaagccggagctctcaatctctgcatggcagaatcagctgtagcgagaagaccatttacatttcttaatgagtggtcaatttagatcacagaaccatgtacagcattatttacctttcttcttttgatttacttagtagtttaattttacctgtctactgagttatttaacagatagcctcccaaattgttgactaaattgtagcagtagtgactaaccagtcttttaagatgatggtgttttggtttattatgttatttttgaaaacatgtttttcagaagacatattaaaaatgtacccatccctccccgtttctaaattctgattgtggaggtccggcttttggattaggcattttttttttttaacacctcatgagtaattcttatgttcattaagatggagagtagttactttaatattttatttactaactatcaaaactgaatttattttttccaccttgcttctgttttattctgttttttaaaaagttaaactgatgagccaggcatggtggcacatgcctgtaatcccagctactcaggaggctgaggcaggagaatcacttgaacctgggagccggaggttgcggtgagctgagattgcaccattgcactccagcctgggcaacaagagtgaaactccatctcaaaaaaaaaaaaaaaaataaataaaagttaaactgaatgatagtgactcccctaacatgtgtgccttaaatgttcaattttgaaaaggagtacatttaactctctataaacctagagaaacaaggaaagtcattgtttcaggattttgacaggtgcaaaactgtaaataattacaggcctgggcagaaactagaacagaagttgcacagcagctggcaggcctgacctgtgacaggtctgacctgagttaagtagcctaaatttcatggcaagctcagatttgttttatggtatgaaattcaccttctgctacagaaagattctactgattgaggctagatatttgccaaaaagggagtaacatacagaatattgagaaagaaaactgcccactgagccacctcttgtatgacttcaggaccagatggaactagtgtagatgcattttaaaatcaatttacatttggactgaaataaatcactcaacaccaaatggtatacagtggttatagctgaggagggtggtctggaggtttttgggtttttttttttttttacactttttatgtaatctgtttctaaaacattttaatttttagacttaggagcatatctgactttagtgaagaggaaagcagttttaatttaatatcttgcgaatacctgaattgtatttttcaaggtctttgtagagaataatacaaaatttcgatgagattttatcaccttcaggttccattaagcagttctccaccttaggacaccagatttgttcctggtccataaagaagccggctagcagcttccatccccacatgctgtgttgcgaccctggaaagctgcagtttagaaaggatagggttctgatgacttatgggctcaatctcacctatacatgaagttgtttttttttttttttttggcttgcccagtgtcttgaaaatttgacaatttcacattttaaaaaatctgtgtttctagctttcttggaaaaaccgatgaatggcagtgctgggcctgcactgtactattgctggaaccaagtagtagctctctgcttttagactctctgatttgctccagtccttatcattccctgttgtactttcatgtctattaccttcctgtagatacatgagttaatgacccctcgagtagaggatatgtgcctcagaagtggagacatgcagagagaagacagctttcaggaggatgcttgtggaacctttatacagttaggcttggtgtgcccatgtcttctgccccctcccactctgtctaaggtttttccctttttttctacgtaatacctcaattttccccttcaccattagggaaattatacctaccagaactttgagttatgttcccccagccacccttagtaaatatcctatgtacctggtgtgtaggagttttgtgaatgt

SEQ ID NO: 119917 - DNA, 1024 bp, Homo sapiens
gtatttcatggacctgagtacagtacccagcacatggtagaaattcatcaaaagggttttgagtattaaaataataaagatagaatttggaacagatctccttaatactagcatgttctttttgtgtagcttgtcgttttatgccattttttttcctgaagctctgtgtgagaagacatgtgttaattaaacttaagtttctgtctcaggatatgttgagtatatgttgataggctatcctaaaacaactccaggcagtttatttaaatgcaatatgatatcttcagttatcattggaggacaggagagtgataatttcatacttcattgaaacacaaaatattaatataggatattttttatagtgtctccaaatacattaaaggaaacctgcattgatgtgcttagaaaatgtgtaacattgactcaagcataaggataaacacaaattttgtttcttcgtgtaaattacttgtgtaatcgtttttttttttttccaggttcagcagatagatcgtgtggtagaagttgtggaggagacaattaaaggtaatcgttgaaagtgagataaacagatgtatatattttctgaactacatagtagaaacaccactcaggtaactcttgccaggcacctttataaaagttattgttttagatataaaatcataaaatgttatccttggcttcatgaatttgccagtctaatattggaggcaggcactcgctgtatatttgtttggcttataaatgaatcaggcaaagagcaatggcttactcctgtaaccccagcagttggggctggggctgaggctgaggctgaggctggaggattcctgaggccaggagttcaagaccagcctgggcaagatcctgggatctctgggggagaaagtcagcttgatgctgtggtgtgcacctgtagtcccagctacttaggaagttgaagctggaggatcatttgggtccaggagttcaagtctgcagtaagctataatcatgtaactgcactccagcctgagca

SEQ ID NO: 119918 - DNA, 1048 bp, Homo sapiens
gctgaagatgtttgtggcagaggtaccatgcatttttgtttggtgtacctctatattttttagtgaagagggtcttgagtaatgcccagttcttggactcttttgcccttcctccattcagttgtaatgcagttctgggcagtgacagggagcgtgcttcccagtgttgctcagaaacactgtgcctctttgaaggagctttcatttccacccgggagcatgtttattttcaggactttgagagaggtagttttagtcttggtaacttggtttgccgagagaaaaagtgatttgaggggatttaatgtaggtaacattacctagagcagtgattctcaagaatgtttgctgggagagggatggtggctgagaggacccatgacctgagaggggagatggcagactgctcaatccagactattgggaaactgggagctggggagttggccctgcagccactcacctggattcattgccatggtaagcccctgttctagacaggtaaggatcatatcactcaggcgtcctgaggtggaaaaacagccttggctctctgacatggtccctgaacacacgtgcttatactcacccaggaccatgtacggttccaggttcattacctatgcctttttcccgtaactcacacccgggaaagtacatcacaatgcaaatgagtgacttcacaggggtgacctttaatctactttaatttgtatatttaagatgtcattcacaaacttgtgatcatcttttttttttttttttttcaagacagagtcttgctccgtcgcccaggctggagtgcagtggtgcgatcttggctcactgcagcctccacctcccaggttcaagcgattcttgtgcctcagcctcccaagtagctgggattacagacatgcaccactatgcttggcttatttttgtatttttagtagagaaggagtttcaccatgttggctaggctggtctcgaactccttgcctcatgtgatctcccccgccttgtcccaaagtgctaggattacaggtgtgagccaccacaccggcct

SEQ ID NO: 119919 - DNA, 1014 bp, Homo sapiens
ctcctttcatctttggccagatataacaagtgactgttacgttatttcctactttgtctttagtgtgcaatagttttcaattaaaaaaaaaaacagactattgttaggtctgctgctctttaatgaatcattggattggaaaataactcattataccatcaggcagagatactttcctttatttgcatgtagatagtgaaggtgaataatttatcaaatgttattagtgcaggctgcatattactggagtcgcagcaggatataatgaaatttgtctcatgcaagtatgaaaatagcatgcctttgcatagtcattattgaattcttggcatctcttgaagaactattatgttagcatgccagtcttgctcacctcttcattaactgggcttttgattggagagtttaacttatcttgaaaatctgtggaatccaacatgccaaatgcttgcttgactttagcatgtttccatatcagagcatacattttcagaacgaataaagtactaaatgtttcttattaaagtgagtagtgcaaagaggctatgactgatggtgttattacttttggttgtgaaaagttgtaccggagatatttaagcaataaagctttctgaaatgacaggcgatgaaacatgtatataactacttagaatcttagagctgtacgaattatgtatttgaagttattttaatgattgctttttaaaagttgcatttaatatgcttctgtcgtgatggcatgaggaggtcaacaaaccttctcaaaagcaatgctaaagctgcacaagcagtcaaaagcaaatcatgtcagtactctggaaatcaactaaaagcattcaacaaactgaaaagtgtttattcatgaaaaaactgaactttggataaaaacagtgtaagtctgtggtattaatgctggggctgctccattttccctcctctattcggtgagtaaggttgcaactagggcaaaacaggccatgaaagccagcagcttctttgctgctcccaaga

SEQ ID NO: 119920 - DNA, 1055 bp, Homo sapiens
attctttaaattatgagtccatcagaaaaagaaacattttctgaaaatttgatgagatgaagggcttctgtttcttaaatcacagggagcacctaattacccgtacaaccacatctcattccccacagatttaagctgttctgccccttttacttcatcctccttcccttttatttgaaattgttttccttctgttctgctctttcttcatgctccttctcattgagaaccggtgaacagcttccttgtccaccatctgcctgtttctctgaatccaatggctttacttcctccaggacagtggcggttgtgttgtcagtagccctcttttctgtagtctcaccactttctggtttatcctccacactgctgtcaaagactagagaaggttgaccaaagtcattcggtttttcccaaaaaaccccatggagtggcattcagtgacttggtgaatttgttgtagaccagcatctggccttcagcgttgaagattcagaaacccaaacttatcaagctcagaaactagtaattaaagcagaatttaacagtgagaagtacagttgtcgcttgactggagtacctcacatattcattctgtctgtctagcctgagccgaattataaatgcaaggctgtttgctttccccttcctcagttcttttttccccttcattcaaacattataatactttcccgcaactcctgattatcctatttaaaattgcaaactttctaacattccttctctttttctcagttgccttgttttcctctgtaactttaattggcattgaaatatataaatgatcatttatttgtattttaatggtctctcctcactggcatatatgctccatgggggcagggcctttttgattgtgttatttaccactctatccccagtgagtagaaaattatacacagtagggatttaatgcatatttatttattgactgaatgaatgaataagttttaaaatttgacagtttagtgggactatgctaaattatcatcatggtacagattgccttgcaaattggacaataatatttggag

SEQ ID NO: 119921 - DNA, 1379 bp, Homo sapiens
agtaaaaatcctgctctgtcactatatatagtttgagaaacactgatttaggctagtgtgtgttgtaagattctttattctgttttggaaaatattttacccaatctacttatcttgagtgtcccttctttaactgagaccctatttcgactgtcttttatgctattaactacttgtaattagtagttgaccagtactttcaaaaatggaaacttattatttacatgctaattagcaaagcttctagtattgactaaagataaaagatagcttaaacatacagagcaatctcctctggaaggtggcctttctgattaaatactagctaagagtgtgactgtgcctaacagttgtagcttacatcaagtcacacaatttatatgatgttcactacattatattctttcaaaagtaaatgtatagttttcctaacatggctctcatgaaacttaaaatctaggtattataactgctatatttgcacaccgtaaggtgagtacagagctgtggttattattcatgttcttctgtaagctttatgggtggcaggaaccttaatctttgtcatgagccgagaatgtgacaccagcctattctggagaaggtagtagaatctataatacattggaaagagctctgcacttggagtttgtagtcatagacactttattttctagctgcatgacttgagtaaattaggtgagatcttagagatgatgtcttttctggcatgggtatagtgctacctactgaatgtatagcttagcacattaatacatattttctttcaaatcttgatgctgctgtatcttctactctaccgtcattctctgagaccccttctacccttgatttctttttattctttctattatttaggtaagaaatttgctgggactagaatgtgaggttacgactttatgctgttcaatgttggttcttcaatttcctatttcacctgttcagttttaagtgaatgtttgacaaacaaaaaaaattcatcttagtctctcctgtagctttcagcgcagtgtctttctcacagtattcactccataaatgtttgttaagtatttcacttgacagcagtgtttcttaaatgcagaaaaaattttctggctaacctggaatatagttcgaattgcttctcttactatagatgattgttttgtagaaaagagaatatgatagtttggactatgaatgaagtgaaagttatatgaaacaattaaatgtgtgaaattgaggcatttatggcaattgtgaactgcgtttttactcttttgtccacaaaccagttgtcctaaaatttgcagccttttttatgtcttcaacggaatcccaaaatatcttattttcactaaaatattatacaaatg

SEQ ID NO: 119922 - DNA, 2842 bp, Homo sapiens
ctgtgtgtctgggtctggggctttttagggtctcagaatggggagtgcatgctgattggtttgtgagtacacaaaaaaggttaaaatgaaggcaccattcaaaggtaggcacgacagtgtagaaaaccaataaggaaagggtaggttaaagtaaaattggtggaggaggggggatcaatcagagggaagtgtgccaaatgagaagacaggttctcaatccggtccgtggatttgacttgtagcttggctttcaggctttaaactgtctttggtttgaaagtggggtttcactggggacccgacaccctctgcctaggcatttgtctgcctcctgctgctatcattggcataagttattcaacctctctataggtttcagtttcctcatttataaagtgatgatgataataatagtgttgtgagaatgaaaagaggtcacaggtttaatcagcacaatgcctggcacatagtatctgttcaatatatagtattattaactttattactatgatagctatgagaaggcaaacctcaggcttacgtagactgctatttgcttaaggccacagagctagtaagtggcagaattgtgactcgaaccacatcatctgaccagtttttttcaataaaccataacgtcagtggcctctagcctcattttctgcttctgggtctgtactgtagttgtttagttaattgaaaggaaagccacttagagctaaagtttgagactcatctggaagatagcctattaaatctgagaaacatgccgtacgcagcagagttttacagagagaatggggaatatggggctaatgtagtgagtctgtcaagtggaggtaggctgggagaatttctgctgtgtatctatgttgtattgtcagatgactcctaagatgcatccattttgtccaatggaatggaatttgaaattcctattatggttattttaaaggagggactgctaaatcatatagagatgtatgaccattgtgccttcctttcttgcctttttttttcccacttctactggagctaaggtgcatgaaagtgagttgcacttggaagggcacagtaggagcagatcattggatgtatccaaagagccaccatctgtcagctttcctgttgctttaagaaaacttgttttccagccctatcaagagagagaaaaaaaaaaaccctgaaacttgtgtagcccaactttaattaagtataattgaacacacatgtgattgtggacgagggcctgtcagttttttccaatacaagaataatatatatcccatatttatttttgaaaccactttgcttttatttgactgcatctcagcatggtagcaccagttgttttatttttttctaaccctgacaaagcagaatgttttgtttggctttttaaaaaggcaatagtgcatgtagttaagacctcatttactttatctgatgaaacagtctctgaggagtgtctattttttggtaaatccactaagaaaactgggtttaaaacgaggtcatttttaaaaatactggtttcagtttttaaacaatgtatgtacctttgtgatttgtaatgtatatttttgtggttctttttaggttaaccttaaagtaagtattaattgtgagatcatataggtttacaaagttctttctcccttgtgaaatatattttatgtactgttctgttactgctcttgcggaaaacataaactttctgaaatggaatttttagtccgttctcctcccccactttctcctgtctctgttatttttttctatataagtttatgagaacaagatatgcaagtatggatttatttatttaggaccaggagccccttgtaactggaagatatcctctatcaagattggtggtctgttttattcattggtttgttttattctctactcattcactcatttactcaacagaaatttgcagaacatctctatgtatctgaaaatgtactaagtgcaataaaagaaacaagacctagtaatgtatcactgctcttgggagccttacagtctagtgtagtttagttaactgggaaataattttgttttagtctacatggaatataatagtagttttatatgtgtaggacttagagttgtgtacctagaagtttaccacaaatatggggaatgtatcagacttgtttcaaatgtgatagctgaaaataggctcatacaataatggtgtacaacatgtatgtcatgtgaaccagcagcacgttctttggtaatttgccactattgagaattctgtcactagcatcacatattgttctcactctggaattcagtcaacccgggatcctttgagtgtagatttctgtgcttactcctaaaattaacgcccctaatttcacttccaaaaaagattgcaattgttaaagcccctttctgtctacttcaactttctcattcttatttctactattggtcttatttttaaaattttcctaccttaattctcaattatatgcaaaggaagaggcaaagcaacaaaaataatgacaaggtgtcagtagcggcgttgatgttgacacattgcacgcatcttggaaaaagagatgtcaaatgcccatgaggatggagtatggttgagattctgctactgctgaaggcaaattttcctgttgtttccatgatgcctaataatggcaacgtgatggttggcataatgagagtcttctgtataagtgagttgacttgcacttaaatattttgcagttatttgtcagttatttatcaaatgattgtttatcaaataatttatcaaataattaattttcttaattttattggagatttgtcatccaaatgttacatt

SEQ ID NO: 119923 - DNA, 1053 bp, Homo sapiens
aaattttctatcctcatctaccaccttaggcttgctaacgaggctctgcagatgaaaccatagcaggcttttacattttttcccaaaattttattatgaaaaatttcaaatggacagcaaagtcgaaaaaattttacagtgcacacctgtctacccaccatgaagattgttattaacattttaccatctttattatgtcatatctttcttcatccatttctattcatccatcagtccaacttatttttttaacatgtttcaaatgaaattgcagacatcagaacacttcctctaaatactacatcagacgtgacattatagacatcagtatttgtaggattttatgtaaaattttgaaaccatggaatatatacatcttaagagcaagcacatggctgagtttcgacaaatgcgtatgcctgtgtaactcccatctctattttttaaaaaacctgtgaccagatagtatttacataatttcgcaatggaaatatagtaatccccctgatttataaggatgtgttggtaaatagtctgcattttctgtgttgagatcaaagctgtaatcccctccctgtctttgtccctatagtgatggaaataatagattattttagcccaatgtgtaacatccttcttaaatgtattaagaattttaagtgtgctattatgcaacaacttgataaaatattttcttaaaatatgtgtttttaaccacatgcaatatttgctgttaacctttaaaaaatatgaatgacggccgggtgcagtggtggcaaacgcctgtaatcccagcactttgggaggccgaggtgggcggatcacaaggttaagagattgagaccatcctggccaacatggtgaaaccccgtctctactaaaaatacaaaaattagctgggtatgttggtgcacgcctgtagtcccagctactcgggaggctgaggcaggagaatcatgtgaacccaggaggcggaggttccagtgagccgagattgcgccgctgcactccagcctggcaacaaagcaagactccgtctcaaaaaacaacaac

SEQ ID NO: 119924 - DNA, 1049 bp, Homo sapiens
tgtattattagtatgaggtagtaacagaaaatatggatgctattttgatgtatcctgtacattatacttatttcgttcacaaaataagtatatttttctactgtgttttctattttgaaacaaggctgatttttcactgggctcctgaaatagactctggtcactaagtaactgctgtctttgattttgtgttgagggagctgtttcagattctcttcttgactacatggcataattctcttttactacatcaaactttaatttttagctataacacttgaagtaaatcttttttgaaggcaaagaccatacatgcattttggctctattaatattgcttgcagaaaccacagtgtttttatcagagggaaagcaaaaacttgtttacagtggaaagcataacaaaatctgtgatctttttgcctgaggactctttccaaaacaacttactgtaacagacatctaaggtcagtatttcctaattaagacttttcagctacagctcccaaccccagtcatcactcacagggccattccttccttaacgcagtgggtatttcaagttattagcacccaggggccatgcgtttcttcacttaatatgttgaagaattttgttctacttcatatcactaatgatttttaacttttttgggtgtctgtttccaaaatcaaatttagaagtacaacaagctgattaggtatcactttttgtagccatctgagagcagaggtatcattttttgtaaccatctgagagcagagaatttaatgtattgatattttactacacttggaatgatttttggatctggagtagttgggaatgaaacccttgcttcctggccttagaggaggcaacatacttttttccttttttttctgttctcatatgctttccccagaatgcatcattctagtgaatactcagtaaatatttgttccattgaattgaataaaatgagcaaaatagaaggctaacaattgaagaataagtaaacgtagaaaggaagaagtcaattcaaagatgagttgctctacttcttgaa

SEQ ID NO: 119925 - DNA, 2030 bp, Homo sapiens
gaacatgtttttcatatgttttgtcacattttaaaattccttaatgtaggagggtaaatccagtccctgtcactttattttggccagaagcaaaagtcttctgccagttgcatttagcatttttgcattggtattcttgagaacggttgcaggcttttaaaaaattttttgtcagatttcagaattattaccatgtttgtttcctaagaaaagtatcagatactttgtttctctgtttttagtagtttatatagtacttgtatgatctagtctttaagggttgagtagaagaagtgttttaggttctctgtttctcctgtgctaattgaacttcttagacttttctgggttcagttttggtaaattgtatttttctacaaaattatccagtttaactgggttttcaaaatcacttacagaagtttgtataatctctttttctcctttttttttaaataaactttctcttttttgatggttatctgttttttgccctttctaatttttcatgtttttttctttatgctttgcttcctgattagtttaactgactacacttaaaaaaaaattagtcatctttattggattttgttctgattatgaaagtaaacatgttcattaaaaaaaggtttagaaaatttgaaaaaagcacaaatagttggataaaaatcagctagtctaccacccagagataaccactgttaacagtttggtaacttctggtatgttggtatgcatataattgcatgttaattttaacacaactgagatcagttttctgtgcacattcttgtattgatttcctggggctgtcataataaaatatcacaacctgggtggtttaaaataacagaaatttattctctggcagttccaaagaccagaaacccgaaatcaaggtgtaggcagtaccatgttctctccagagctataggagagaatcctttcttgctgcttctagcttctgctcattgctagcaatccttggtgatccttggctttggcagcatgactccattctctgtgtccatactgatatctggacacatggccttaatatgtccccccccccgccttttttttttaaggacaacagtcattggattagggtctcaccctgttctcatctgacttcatcttaacttaattatatctacaaagaccctgttttcaaataaagtcacattcacagattcctggcagatgtgaattctgcagggatactagtcaacccaatacagcattctattgttactttcctttctgttaatgtcaaagctttctttgtactttcatttctatcagtgaattttagtgtctgctgctaggcaaaattggtactagagtgtatcagcattgcaatgtgctagcatttagttatacctacagtttgcccataaacacagatttccatcatgacctgacagtgcttcatcatagaaaagcaaatcagaggtcattaaattttcttagagcttatatcctggttaattttagaaaatgagaatgctctttgttacaatgttcttgaaaataatttaattgtattatatctctaagtgaatagaatatgttttcagacccaaattgtgaatcataaagaactgaataattaatctaattggatcagaaaactaagaaaaaaaaaatagtggcatgagtgtttttgtttggtgtggtatataacaagacattcctggtgctcatcctggtccttatataagctagaacatatctggtcatttttctcatttgttgaacaaatgtttaccacctccagttttatttttgttatctcaagagtcagtagctattctctataataatggtgaattaagtattattgtggctgtgtttaatttaacacttagattagtttcagattttcactaatctaaacagaggattgtggagggcagggtttggaagaacacccaaaattctttgaggacattgtgtgttatgcactgcgctatgttgcatatgctatttttctttaactcctgtaatgctatgaaaggtaggcatta

SEQ ID NO: 119926 - DNA, 1051 bp, Homo sapiens
atgaacacaatgtgcggggtggccctggcagactgttcacaacctgcaggaagatgtcatgtttttatgctactcatttttttatgttattgctttaaatgacatggagaattttaggtgtttaaaaaactatctgaaaagagttgactaattattgttgtttgaagcaatagtgatatggtgtcttctacctccggcaagcatacaaacaccatttgtctaaatagctctgtgtgatccaagatatactattatttacttagagtttttatggtttacatcagtaaggaacttttatcatagggtgtttgtgaaaaaagaactgcctgatctcaaggaatgctttatgataataatgacaggctgtattagcatgattgtagcctgaagcctcccattcctgaagaaggggccactactatttcttgagccttttccttccactctgacccccatcagtcctctttaccaagtactcatttacattatagttcatagtgtggtgtcagctgttcccaaaggtgctctcctcaagcgagtgaatcatttctaggataatggcttgtttcagaacttacacaatgtcttttttggtcttgggagatcaaatgacaaactatcacaatcaagggctagattatggttttttgataacatgtctcaaactagggttagcagtttcttcacttgaggtatatttctggattgaattctataaactgttccacagtagtaatgtcacgtggctcacatttttgcttttgttactcacatactatacagcaataaactcaaattattatgcattatcagattgtattataaatagcaatccagcatcaataattatctcttttgagtgttttgtcttgaagaaaagtgctaagatccttcttagtaaaatcaagctaacataacttttctgtctcctataattgaaatcaattacttcaaaaataaatatagttctatattatgacctaaaaaatatagttctatattatgaccattgaaaataatgaagtgtggttatatagttgcccagttggga

SEQ ID NO: 119927 - DNA, 1456 bp, Homo sapiens
gtttattgagggcctactgtgtaccaggcactgtttgaggtgttagggatattgtggtagggataaagttcctgtcttcatggagtttcaattctagtggtggagacagacaggtaaacagcagactagattaaaatgtcagatagtgaacagtgtaatgaggaacaataaagcaggagatgtagagctgttttggacagagaacttttaggggtggccttcgagatagtgatgtttggtctgaaatatgcaggaagtgagggagagagccaggaggatgcctagagaagagggtctcagcgaagcaaaaggccttggggtggaaaagcaaagaagccactatgagcagagtgtttggagggagagcggtaggaaatgagactgggaggcaatcaggaaccagagcagactttgcattttattcatcatgcaatgggagttggcatgagcaggggattggcatgacctgatggagttttcagtcttgtgtggctgctgtagggacgatatcctgtcgtgaagtccgaatggaagaagagagaatgggttgctcccgtgatagtctagatgagacatggtggaaacagcatcctagggtaagcccctcctctggaggcttgtagtccagaacactcttctgccagctgtcctgggcccaatctgatcacattatttaactttaccactcccttccttccctggcatcccaaagcctggttactcttctgtatttctttcctccatagcacttattgctctctaatgtgtggtatcatttgcttatatattaggtttatttatgactttcatcgcttaccagagcttaagctgctcaagggcagggatttttctattttgctctgtaatgtgtcccagatgctttggaacagagcctggcatagagtgtgtgcttggcaggtatttgctgaatgtatggcttaagtgctgatggaggaggtgagaggagatgtaatttgaagacaaagccaacaggattttcttctggatgttcttgtccatttctggaagttattctagtagactggaggtaataaacttaacttggtacctgacataaaatacaacctcaataaaccattaatatatcattataaggccaatgtgcagtaaagggctacattttactctttcatgggaaaataaattaatagaagaaagtatagattagaggtcagcaaactctggcccatgggccaaaatagcccattgcctgcttttgtaaatagagtttaattgcaacagaaccatgctcgtatgtttacatattgtgtatggctacttttgctctatgacaacagagttaggtagttgtaacagagacctatgggtcctcaaaacctgaaatatttactgtctggctctttccaggaaaaatatgccagcccctgatatagagagcattatactgagtatatggtattatatattttgcagt

SEQ ID NO: 119928 - DNA, 1128 bp, Homo sapiens
tccccaatgttgttctcatgatagtgagtgagttctcacgagatctgatggttttatacagagctctttcccccttcactcagcccttctccttcctgctgccttctgaagaaagtgccttgctttcccttcaccttccaccatgatttaagtttccaagcctccccagccatgctgaattgtgagtcaagtaaacctctttactttataaattacccagtctctggcagttctttatagccatgtgaaaatgtacaaatacactcagtgtgtttaaaatttttctgtgaatcttggataaattaaatacaaacttctcagcctggtgttcacttgcctttctaaccagactctgtcttaataactcctactctctaataagcacacgtacacattctcgttttctctctctctctgtctctctcacatacatatatacgacagttgatgtccgtccctttctgaagagagatgttgtttctttccctacccttggtatccatttgtgaaattccactttcttactcaaggcctgtctaaaatgctgtctcctttttgaaggcttttctggttccagttatggttgttaccttccttgatttggccattcatatggtccttgtcatgtttccttacagttacctgtgcatttgtattattctaccctattagattctaacggatgacatagtgttttgcatagaatgcgtcttcagtaagtatagaatttaattgaattgatacaaatgtttgtgtgtgatgcattttaatatttgctaatctaaataataaaaagtaaaatgctgataactcataatttagaaaactgcctttcctgttttgaaaaaaagagtgcagcttgctgccagtgctcatttaattttacataaacatgctctgtgaggctgaagcaaatctgactgattttcagtgtgaaaataaaacataaaaaatgttcctggagttacttctaaacagaattaacatcagaactgtctgaattatcagaatcgtctatttcagaaaaattggattcatcaaataactcttcggtgaacaattatttgagaacaatgttaccatcatacaaacgaatgctgcgttttctaggatttgacattttcagcg

SEQ ID NO: 119929 - DNA, 1051 bp, Homo sapiens
tcttttgagccacaggtaatcatataagtagactggcttgacaagtctaaaggccctgaattagttatctattgctgtataactgcgaacgttgctgcttaaaacagcacacatttattatctcacagcatctgtgagtcaatagctcgggcataatttagggtcctctgccaggctgcagtctaggtgtctgcaagaactagagtcttacctgaaggcttgactggggaaggagattcttccaagctcacatggttgttgggagcatttagttctttacaggctattggattatgggcctcagtctcttgttggctgtcaatcagaggccacccttagtttcttgccatgtggcctgctccatagggcagcctacaacatggcagcttcttcaaagccagcaaaagagagagttttctagctagatggatgttataatgttatataatgtaatgatccaagtgacatctgtcacttttaccatacttaactggttagaagcaagttacagatcctgcctacacgtagggggaaaggattccgcaagggcgtaattccaggagtcaggattctggaggccatattccagtctgttgttaagaggctcatataacatttttattagagctatctgtatagaagtgctatgattttcttatttgtattttaaaaattcttgactgttaaaatggcatgtttgtgataattagctaatatatcttgcttctttttcctcttatagcagataagttgtagttaattggtagttcatgttaaagttttatttatatttctgctttttcctaccatttcttctcatgagtaggctggagagagcatgtgccaaatcccgactccttggtattatctgaaatgattgattagttctgccatctttaactcttcccttacattccaggtagctcctcttctggttcttcctttttcctttttctttgttcctttccattcttcccctttggatcattttctatttcactctgcagtttaatgacttttatattccccatatatattttatatgctctat

SEQ ID NO: 119930 - DNA, 2271 bp, Homo sapiens
atctaaagtaataagaccacagtaaataaagttatctcccccaatagcatgggtaatgttctaccactgcaccctgcaggtcctccttcccttttctctaccccttctcccctcccctgtgcccctacacctctccttccctccttctctcctctcctattaagaattactgctattcacaggactggggcatatctcagtgttgtctttggcaaggaaaagtagttgagaactattggtgtggaagtattaaaccgcatttcagaaaatgtgggttttgcttcttcaaactaattagctgaatcacttggtctgcatttcttacatgtaaaatgaaaaggttgaactagacaaatatatgtttttagatttttttttttccaactttgattttttttttcttatgattcttgagtcttagcaaaacccagaatttggaagcctaacagattgtctgcataatctattttatatagtctctatattacgtccaccctataatattaggttggtgtacaagtaattgcggtttcataccatgaattttaaatcattataactaggctcaaacacacctttattaatcaaaataggaaccattacaatcaatacatttttgccaacgagaagtgtgtttattccagtagcataaaaatctgtgcttcagggtgtgatgaactcttggaaaacattttctgcatcctgctggtggtggaagcaatttcactgcaaacagtcgtcaagatacttaaagaagtggcagttggttggcaagaggtcgggtgaatatggcggaggaggcaaaacttcatagcccaattcattcaacttttgaagcgttggttgtgcgatgtgcggacgagtgttgttgtggagaagaattgggccctttctgctgaccagtgccagctgcaggccttgcagttttcagtgcatctcattgatttgctgagcagacttctcagatgtagtggtttcaccaggattcagaaagctgtagtggatcagaccagcagcagaccaccagacagtgaccatgacctttttttggtgcaagtttggctttgggaagtgctttgcagcttctcctcagtccaaccactgagctgctcctcatcagttgttgtatacaatccactttttatcgcacatcacaatctgatcaagaaatggtttgttgttgttgcatagaataagagaagatgacatttcaaacaatttttttgatttccggtcagctcatgaggcacccacttatcgagctttttcacctttccaatttgcttcaaatgctgaatgaacgtagaatggtcgacgttgagttcttcggcatcttctcatgtagttgtaaaaggatcagcttcaatgattgctctcaatcggtcattgtcaacttctgatcgccggccagtacgcttctcatcttcaaggctctcctctcctttgcaaaacttattgaaccaccgctgcgctgtctgttcattagcagttcctgggccaaatgtgttgttgatgttctgagttgtctccgctgctttaagacccattttgaactcaaataagaagatttctcaaatttactttatgtctaacatcatttccattgtctaagataaacataaacagcaagtaataagtcattagcaaaaaaatataaggtgagaaatgcccattaaaatgatttataacataaccatatttatgtaagaatgtattccaatatcaaatggcaaattccaacaatgcaaaaattggaattcctttttcacttttctaattttaaggcagggactatctatttatcttgtaaatctcaaatgatcaaatgaaaagcattttgcaaagttgacacctagaaagattgcaaattcaaagcaatttgttagcctggttaacatagtgagaccctgtctctaattaaaaaaaaaaaaaaacaaaacacgtgaaaataaattagccaggtttggtggtgcaagcctgtattcccagattcttgggagactgaggcaagaggttagcttgagcccaagagttcgagggagcactgagctgtgatcacgccactgcattccagcctgggtgacagactaagaccctgtctctaaaaaaaggaaattgttcagattaaggaggatataaaattattttggcaaacaccatttacttggttctttgaagttcttattgcctttaataggtacagtttttatttagatgtataaatttcaatggcatatcataaataacttaatgataatgacatataatgac

SEQ ID NO: 119931 - DNA, 1031 bp, Homo sapiens
attgaaaatggatggtctttgatagactatcaggccctttatttctcttgttgcatagtctgcttggaatggtgtacagattgtagtgtgtttataccctgtgtagggtcccttgtcttacagctctcgtctccaagctttactttcctgttcccagcttcctgacctctaagacaagattgttgatcctttgtctggcaagatctgcattattgctctgtaccttctcgattcctgacttccatttccctgcttcattgtattttactggatacctttctgcctagcactcctcctagctgtgtagcccagtattggcttgtcaactggtctgtccattatgaaatcaccaagagatttgtgtatttattgttattctaatagtatacaagtcactgtgttaaatgctatagcagatagtaaataaggaagataatacctgttccttaagaatattgagataagcatgcaactaatcatgtattcttacacagaataagtcagtgtttcttaagagaagtacagagtacaattggtgataaaggaaattcaaatgcaattggaaggatctttgacttggctggctgtataactttgagcaagtttcttgatctttttgagcctcagtttcctctacggaagaataataatgcttatatcaagattgctgtgagggtaaatgaaacaattaatgtaaaatgcataactgagtttctggcaagcatttggcagctgtcttttactatcactggccacttctcccctcaaactattttaaagattgtgatgattttttacagggattgagaggtgataagtataattctttcaagtaaagtgaataacaaaaaaaggtacagagttaaaatatgctggaacaacattttggagcaaaggatgtagctgatgggaatagagtaagagcaaatacagctgcaattgtgtttcaatttagtacacatattttaatgcaggggaaactaactccgaaagttcacaattgaagatagagacaggagagacgattgagt

SEQ ID NO: 119932 - DNA, 1834 bp, Homo sapiens
gatagggaaacccaactctgaaagggttaaatgagataaggcatataaaatatcagtaacaggctcactggctcacacctgtaatcccagcactttgggaggccgagaggggagggtcgcttgagcccaggagtttgagaccaacctgggcaacatagcgagaccccgtttctattaaaaaaaaaaagaaacagaaaaacaaaaacaaaaaaaagaaaatatcgacaacagtgtctgatgctcagtaagggctaaacaaaattgagttactctaccaaggaaacgacaatagaatggttttccctttccccttgttatagaaagggcagaatatgtaaagagaagacatagaacaactgggagactagaacctctatttgtaagagaagccacaatttgtgtttattttaaaaatgtaaattacttaggaggaaaagagtgttagcagttcaagattatgtggtcggttaaatagttaaacacgttttaaaatgtatgttactttacttaaggatcccatgcgaaaattctcagaaattaagcattgcatatttgactgctgagtacagtgattcatatgtatcttaaagtcacatattcataaaattacacatggatcagattcaattgttaaaagtacaatttttctcaatatgaaattttaaagcatttgtgtactatggtctttttaaagccttgctactcattatagcaatcgaatcactgaagaaatgttcctttttgtttggttcaatgttattgagtcttatctttttgatataggactattttttattttgtaactgtgtcttttattttgtaataaatttgtttaaggtatattttaatattataagagtagaaccaatattttagttttaaaaagacaattctatatcatgtctaaatactattgggaaatatgcctattttttaattttttaaagctagtattgccattctactttttttactttgattaatgtagtctcagagaattattcattgaacatgctttaatattttttcctgatttcaaggagtgaaaaaagattatctaaaaatttctaaggttgtattttcttatgagaatgctatattatctacttatttattcttatatcattagttaaaagttaaatgagtatgtgttatcatttctgaatactatagtgtgtataaggaataccagaactttctagttatgatggccaaagtaatgtcagtagtttatgaaaaagtaatttaggtcttgaatttcttttgattagtcattgtaagcatttttaaactttcttcctcatagatttgtgcacttttagataatgtgtgatttgtacagtcattcttgagtagttgaaacttaaaagaattgcaaatttttgtgcctggtggagataaaataactctgaggcatggtagatacttggtttttgaatctcttgtataaaccaagcaaatgtttctgaaagagcacttttgtgtatgttttgaggtatccccatgttaagtatatgctatctttagaaatttgagtcttatttattgttatcatttgaacaggtgtctcaatgcttgtacctactgcaaaactaaacacgccagaggaaatttggccagttatccaattgatgaactagtagatagagccaaacaatcttttcaaggtaagagtttctagaattatatgtgaaattagtcttcttaataaattatgttagccttctaagtaatacttcagtttagagaccaacttctttagttttctgaagagttttacaaatatacgaacttaattaataaaagatgtgaccagagttaatcacttagttta

SEQ ID NO: 119933 - DNA, 1043 bp, Homo sapiens
agtgaatggatggtttcaaagtccaaaggtacttatttaagttaaaaggctcagctgtttttgttatcaaccaaggcatcacaaaaggatggctgacatttatggagtacttacagtgcatagataggaattacgatgaaaaccacatggtccctgtctttaaagatcccctcctagtttaggagagagagtagcaagttggactaatgaaaattgaagtatgcagaaacagacaccaaatttgggataacagaagtcattcttacaaatcagccaggtttcctcctcagaatccctctcactaagtttttgttagccactgccattgattatgctgagtattcaggatgagatctacttgctgttctgaatcccgaggcttctgttatgccgaagtctctgaaagaaagaaaccaaatggtgactctttaactaaggtaactattggaactatgtagctgttatttttccattcattcaacaaatatttattgagcattcattagaagcagttcttatttctgctaataggcacatgctttagaaaaggtatgataacagtacattatcacaatcaataattgattacttctgccagtaaggaggacagaaagagaggtttgctgataatggggcagacagcttatccttgccatcggaaacaaggatgtgatcccaagtttgttacatttgttcataattctgagttttcatagttcagagtatgtatagtccaacgcacagaaaatctgctgcttctggaaataccttgttaaatctatccttaatgaaaatcatagtgcagtcatccctcactgctattggtgagttttatttacgttttactcttttgtgctctataaaacagtttacaaacatgcagttaagtataaaagttatttaaaataatgaggctctgggaaaacagataagaatagaaagtccaaaacttggtggaaaattggaacacaggaaagttggccataatcacacatgtggtttttaaaatcaagcaacagttttgactcttagcttcttgaaca

SEQ ID NO: 119934 - DNA, 1021 bp, Homo sapiens
gagacgtttggtttgaatagggcaacagacttctgtgttctctatcaagatcctgaggtgcccatattctgctttgattgagtgcaaatccacctgcttttgagatcaaataagcaaataatgaagtttatgtcctttggaggaaaactgatgtatttaatgaagattcttgcctgcatctggtgagagccatgcgtctctgctcagaggtggagagaaatgctgcttactcaggagcacgtgtttcccattgcttcatctgtattttaggacatgggaagacttaaccaagaggggattggggtcaggcgtatgtggcagtgtgaatatgggtttagtaggtgcacaataaatgttgaatgagtggttaatctagaattgattatgcctgatgaaattccatgtatgacttggaacccataatgaaaaagtagtatggaaaaaccatactttttaagtgggcaagagatattgcttagtttcagctgctgttccagcacaattgaatgctgtgtcttatgacatgggcttgattttataacaccagatatgtagaggtggtggctttccaagatttacaacagagaaataatttactttgggaaatcatctgatagttaatgggtatctaacgttttaccaaaggggtatgtccacctagttccacacttacagttataagtaatatatatttgctttgatacctttactaaacaaaattctacaaatgattcttgtgaccaggtacaagagttaaccaaatgtttgcgtttaccatttgagctgaggctgatctgtctctgggatgatgttggagaactttaaaggctgcaagttggttttggaaggttgtttaatggaattttaatagccttggaaagatgtgaaagtgatactgctacctggtggtttgtaaacccgacctttgtgagatattttctgggcaaaagtactactttgtgatgccagcagcctttattgattccgcagagtctgcagttttctaacactggctgtcaat

SEQ ID NO: 119935 - DNA, 1259 bp, Homo sapiens
aaatggtgacatttaaaatagcttactttgagttaatacaagcaaattattgagtttttttctagcacattagccaaggttagtgtgcctgttaatcctaattgttattactattatttgtttatttaacaaacatttgtcaagtgcctattaagtggagagtttctgatagtgaaatgatgtttacattttacatattctactatgaattctggaacattagaagaagcaatttgtgatttctaactgtgactgatagcaagttatgaaacaaatatatttttctcttcataaaatataaaattgctaaaaaataaagtgctacttaatgatggttggcttgttcagaataaataaagagaaaactaaatggaaacttggaccagtgtattttaggtaaaatggtatttctcaaattgaatatcagctatttcttgacattttatgatgtagtcaaccactctattgctaagtattcttaaacatcgacttcagaaatcaaaattatcattcctaaataagtaaaagtttattgtacatgctgcatgatatttattatatcctaccatcgataaacataaatagcacatggctgattttatctctttatttttattcttttcttatttataatgattgttttctgtgagcacaggtgtgattataaatacaattcaggcattttgccgttttatggtccttatataaataaaattttctaaagtgtgtatcaaataattttccttgcacttttacatctagcttttcatttcatctttatattcacctcatgaattattgctgctggtgcttgttatctctgttttgctgaagcacagagaggttacgcttagagtctgaagaagagtagtaaaattgagatttcctgattgattggcctctgcactttgcactatagcatgctgttcctcagggaaaatgttgggcttaaatacttggtattgcaaatgcatttgttgctataggtgcaatttagtttattatgataactggggtcatttcatcagtttggatcattttgagagaagcccttagtggaattgccatcacaatgctcttgaatggtggccctgacaatatttccccagacctcagtttcgttgtccatagctgttgcaaaaagattaaatacctgttaaatacaacagaatactgaaaatcagagccaagcaaaacttctaggctctaggaaccttaatatactaagagaaaagtgttttaatatttgtattagtaaa

SEQ ID NO: 119936 - DNA, 3046 bp, Homo sapiens
aaataaaagtataatttaaagagtaaatagtaaaccacattgcattttccttggtcattttttaacgtgtgtgttttatttctacaggccgatgtagtttttgtctcaaatataacaaaaacttgtttattagtgaagcttcagaataagaaagtacagtgatggttgcccagcagtataaacatactaaactccactgaatgcacagttaagaatgggtaaaatggctaaaaacaaaaaaatagtatttgaggttatatattgtgtaaggaagtaaaattcttaaaacttgccaaattaattttatacgaatgctttcacataacattaaaaataagatttctagcataatattagtaggtcatatatggttgatttccttatcaatatgaatattaatatcatgaaacatttttaaagatccatagtatatattcatataacacaaatagtcacaatgaagtagcatctgatggctgattttttaatgctgtataatttataacggggtgcagtgtatcaaaataagacgatctagcatctgtgattgtaggtaactgacattagtgatttcacgatttctttaataagtacaaatataacatttatatggtctgagtgcttgaacacctttctataaataatagaaatgtccccattaaaatgttccacttagagaatccccgtgcattttgtcattttatttccatgaatgttccaaaaatggaaaacgagagaaaaacctattcgcttcttccaaacactacatgaatgctccctgtgatgcccttgaggtcagtgtttgtcagtgtagtgccacaaagatgtggagagctgttctgtcagtgacgctgctgccatctgaatttcccatcactcatttccaacctattgtccagatactgcaggcttcatgagaggatagatttataagctactttagtactttaaaatgcccaactaacttttttccccatttactttgaataaccctactataagaggttaacaaaatgtatcttatttttctcctattatatttctagaaactcattagggcagcaacaagagttggttgaaaactccttttaagttacatcttgggaatttacttgattattacttaatatacactgtgatgatagaaagcataccagcagtactttccttctttcctgacgtttacttgtttgttttcaaagcattaaaatatcagcatttttttcccctcatacattcagtagacatttgctctgtcatctgtttctttacaggctgtgagtataggaagagcctgggtagtgagattacactgttgaatcctggcttggccactagccaggtatatgactttgggcaaataatttaacctttgaaattgtcaattgaaattgaaagtgtcaattgtttcaacatgtaaataataattctttgccttgcataaattgtgagaaatcatcataatgattgagcatgagcactcagtagatggtcaggactgttatggtgcacatttaccaacaaaagatccatagcataaaaatgatcaagaacccataaactcatatttaaattatcttcaaagaaatcattacccaggaaaaatccaagagtaagttgttatatttactaatactgcgcattcctcaagggcaagggtggcctcatacccacacaattccaaggtacttattgcacacaagtaatgctaactgattgagtggcattaaccaattaggagaagtacctgtggatcccttctcatgatgatatttttaaatgtgtaaaataaaattcataggattaaaagaaagcaagttatattgaaatagcgttatcagtacatgaacattttcgtgatatatgtgcttctttatcaataagctgaataagatgcagctgtgtgtctaataattaccataatttcaaagtattgtatatttcaagatacctgaaataattgtaatatgatatgcaaatttttataatttctcatgggtgaaatcacagccactacaaatagctataacttgttgcctacattcacagttgtagaattggtaaattttggcaagaaataaatgaaaacgaagttatgattttttatttttattttttgcacccaagttcggtctcttcccactctcttagtctgttcagtctcaaatagctttcttaatgaagatataaacaacaacaacgacaaaaattaataaaagcgcttagcaacaccaagaaaataatccaaaaatgattaggccagaaggtttgtgctgtcttggcccttgaccaagacctctagttgatagatccttcaaggttacctctctcagcccccttctagaagattaaccatgtcttagaaattggtgctaagtagttccttcttatttgatgatgattttaaatgcatgtactattttgtctgaactagaatccaaactttccatgaaattaacatcattccctgttgaatctaggtgtcatagctctataaccttcaattagtttacaaacaatatatatgtctccttacctgtgaacaaggaatgcttaagaacacaataggcttggaatttgcaactaatttggcccaatcttgagtagatggccaaactaaaatcttgaagttattttgccccaacatagagcaacagaaaagactcaagcaagttccttagagattgtagctgcatagttctagatatctttaatatagaagggagtagccacacaaaaaatatcatgtttaaaaacataaccaacaacttgtattattgaacatattttaatttaaaaatgtatattttagaacagcaatatgaataaatgaaaacgtgtgtgaaaataattcattattactctgaataagcctacttttcctaattatccctaaaaagtttatttttctatttcctgattatctcttttaaaggttaatttattcttatagctttgattatcaaaattatactcagaactaagtaaacaacatcctagcaagggtcatcagtgtgtagagaaagattaatttgggctttcaaga

SEQ ID NO: 119937 - DNA, 1204 bp, Homo sapiens
tcctagaagcagaacctcttatcctgttttgacttggcccttgactgcttaaaatgtctgtagttggctttgtatggttataatcctagccccttaggctgggaattttggccatctgtggtctctatttctagccttagccctaaccaccccacttcctgctgctcctgtcaaatgcacttacttatacttttccgtatgtgtctcaagctttcctacaaagatgatgggtctttgctgaccctatttctttcgttcaggatgagctcaaaattaccacattagttttgaaacttgctctaatttctcctaccaggaggaatttcttccttcttggcaatactgtggtatttaatggtattttactgttttgcactttgtattatacttatttgtgttatgtcttgtcgcccctactagactgtaagatgattttatctgtataccattaagtgtctcatacatacagattctcagtaaaattttgctggtggaatggagtggagacccaggctttagatagtaactgggaacaacaagatcgaatttcttatctgttcgtacctaataagctcctctctcccctcgcccataggctttgcttacctgtcacagaacctaccctgccttttttcctacatgcggtattattgtcctgaactccttcaagtgttaagtaaatcagtaaatctttaaagccaaccttagcggccaggtgcagtggctcacgcctgtaatcccagcactttgaggggcggaggccggcggatcacttgagatcaggagttcaagaccagcctggccaacatggtgaaaccccgtgtctaccaaaaacataaaaaattagccgggtgtggtgatgcatgcctgtaatcccagctattcaggaggctgaggcgcttgaactcggggagtgggcggaggttgcagtgagctgagatcatgccactgcactccagcctgggtgacagagcaagactctgtctcataaataaataaatagctaaccatagcaactctatcagattttaaagaaatatcccccttcggcagggcatggtggctcacgcctgtaatcccagcactttgcgaggccaacgtgggcggatcacctgaggtcaggggttcaagaccagcctggccaacatggtgaaaccctctctatactaaaaatacaaaaattagtcaggcatggtggcgggcg

SEQ ID NO: 119938 - DNA, 1024 bp, Homo sapiens
taagagtctctagttagttttgaagtcttggtcttccctggtcaggaggagtagagtacacctgctggtttcagcactgctctcagatggttaaaaaaccactctcaatatataatatctcccgcctgttatgtaatagtcacttcaacagtttttatgttgtttaacttttcaatacaacctttttggattatcattatttccacttttatagatgaagaactagagattcaaagattcattcaggaagcaaatatgtgttgtatcctggggtcaggctgactgttgtctctgcctgctagtctggaatttaaaccttgttctcctttgtcacttgatattggcaatttctttcctgtccttgctggatttcctgcatttctcacttgtgctctcctctgacttttctgacctctttggttctaaaaattatccctgattcccacacttctggttcctattctgtgtggtgacccctgctgtttgctgcccacacctcggagtgatgctgagtgagggaatccaatctcccaaacaggaagcttaccaagttttgaaagcagagccttttcttgcagtcaattaaaggttcactctgactgtccatttttaaactatggtatgaattttgtctgtcattttcttgcccttgtcttcctgtgagaagactgtgttttatttatcaagatagtagttttaattctcttagaggttggggctttaataattgagtgatttaaaaactttttatgaacaaattctgtgtcttccatatcacacctagagaagcagtgagggacatattttactctttagaattatataagtaatttcctcatgcatcaatagaaagaaattagctacaggcttcggaatgcttagagtgggaatgcgagataatcgtaagtaagctctacatagctggtattactttttttattccatcaaagaaactacatttttttttgctttttttcgagatggaatctctctctgtttccaggctggagtgcagtggcacaat

SEQ ID NO: 119939 - DNA, 1107 bp, Homo sapiens
tgactggagtcagttagataatcatgattcattcaagttgctgcactgaatgcaggttacagcctagtgccatgaggtgttcgctggccttttgcttgcctcaaagcaaaagaacaatagcactcaacatgcttggtcccccactgtataactgaatggttcaatttatatctcatgcctgtagcaactgcttttcaataatcacaataaagagtaagggatatatgtgtagagatatatggctggattattcaggtggggagggcctgactatgggggaaggataatgtgaatttcaaagtgtaaatatgtcattgcataattttttgttctgggcatagttacatttatttatattgtttctaaggctttctatctgatagtatgtagaatatgcagtggttacatacttctgtagtcaaatgaagcaactattctactatttgctaaatctgtgtgccttgagataataaatttagcatctccatcctcaattgcctattctgcaaaatgaggataataacagaactaacttcatagagttgtgataaggataaaaatgaagaaatgtatgcagagagctaagcacagtcttgggcatggagtaagtgcacaagaactcacgatactgatgatgatgatgatgatcatgagtaattgtatagtagtatgtgaacaaaaagattgagttgtttcttactagagcaggaattaacattattttatgttaataatgcagtccttgtcgaagcattcaaatggtgtgattataaatggaattataaatacatagaaaagaaatatgtttcatatttttgacatgtaattgtgtgctgagtacattttaatcaaagacagaatgaaattgctgtcaaggatattggtagttcattagcttattgactgcacactaagtatctaaagtgttattttggtgacagcctgatgcattaatttctaggtcagcatattattgacctcaactatttaattctttaaaaaattaccttaactattttttggtcagatattgttttataaaatcagtatatattcaatgaaaattattttctccttaccataccattcagatggtcttcctaaatt

SEQ ID NO: 119940 - DNA, 1926 bp, Homo sapiens
aatgaggtgttattttcagggcataatttgtcttgttcttgctgcagtggatcttgtgaacagaatgatgctgctttttaaaaccacttactggtaaaataatatttacctggtacaatgctaagcaatttctatgtcattaattttgtttttattctctggttgggtgtggtggctcacgcctgtaatcccataactttgggagcccgaggcaggcagatcaccgaggtaaggagttcgagaccagcctggccaacatggtgaaaaaccatttctactgaaaaatacaaaattagctgggcatggtggcccatgcctataatcccagctacttgggagactgaggcaggagaatcacttgaacccaggaggcagaggttgcagtgagtcaagatcatgccactgtactccaacctgggcgacagagcgaaactccgtctcaaaaaaacatttaaaaaatttttattctcataactctgtgaagttgctactattatcctcattttactgatgaggaaactaaggcaaagaggatctaagcgatctgaccaaggtgacataaatgtttacttttatgaccatgctgtgtctgcttcaagcattgataaaatgctcaatgattagagatgctagcaccctctgttcttactattgtagggaaccattacaattctgcttcaccttctcagtattctagtcttcaactttttacccgtaataacttttattgagagagtttaaaattaaatagcctgtctcctttcgatttatactatatagaatttggcacatagatgctaccttagacattgtgtgtttggctcaatccttattaaaaaaaagggggcaaaaaacataaaattattctaaagctaatttctgaggccaatctgtaaagtgatggagtgaaaaccattttttgatggctcctaccatttaaaagatagtcttccaactgctgtagtgaaatatgtcagtgctaatgattctgctgctttagtaagctgtgagaagcacaaggcttctctcctgatcagtactgtcacatggccgtgttctgatgcagtatgcaaataacagcaccagcatcgtaagtagatattgctagtggcacatcatatatgggctacttgagagaaaaaggctgctgttaaacttaatgatgaggctgagtgtcattaactgtgtgcttattcaaagagtttccccctgaaacatctgttcccctgtcagatatgtcacttttaagcaacacctgtgcagtagtcatttccaagtttcttttcatgcaatcaccttgttttttgctaatggacttcttggtaaaggaggaaaatgcaaactttctttttcaacatcttactgtagtatccctgcctaagtaatgtgctgtagaagttaaaaaaatgaataacatttcttaagggaatgttttataaacacatggtagaatattttatcattggtgtaaatttgtgtcctgagagttaaatactaaaatgaaaaatcattatcctttagttattgcataatttgtaatagtttcagtagcagtcatatactgaaaatcaatgagacgtgtcgtctttcatattcatgacaaggtaatgtccattggagctcatgtattattatatgaacattggagttttctttgaagtctagcgatgattgtctcactggtgcttgctctgtgtgggtgagagagagagaggccaggagaggacaggagaacgggcatgtgtccgagagacagataaacatattaagtagccctttcggtgatgtacatatatgaagatagtatttctgcgactgttgcctccatttgcagagtctgtttttttcctcttggatttttatttaatatttttattcaactataacatatatacaagaaaatgaacaaatcttcagtgtatagtt

SEQ ID NO: 119941 - DNA, 1033 bp, Homo sapiens
gatgttagtctttgaaatactctctcctttaatcttcccaagcatcattatttggagatgtgttcttgaataaagtgctgctggaattggtaagcacatgttcattactttactcagccttagttcctttgagactttataattgaatattagtaatacatatcattttagaagtgttcagcgatctcgatgttcccttttttagctttgctgctttcacagtgctccttatatatttaccgaagaaggtgagatgattttctgctcctatatgctttagtttgatttctcaatcatgattgcattttctatatacttgaacacagtgcctgaggagaaaattctggtaacaaagatgctgcttctaaatagaaaatgagttttattcagaagtgcttataaccctccctctggaacaaatgaaactgaagcccatgtgcatttgtatcacggagcagagttgggcttgctttgttttttcataataaacataagtccttctgggattagaaattatagtctgaaaagtgactatgcagaagaggattctgggaagatggcagagtagaaagcaccaggaatctgtctccccaactagacaacaaatgcactgacagaacctgtttgatgtaactgttttggaactctgaatctactaaaggtgtacaatttccagtggaaggctaggatggtgaattgtggttatgtttggtccttagcatggtagcagctacacacccctatccctcagccttggggtaggcagccatacacttggtctaagagaagcttgcaggcagcttgcacaatgtagggtgcacaataaggatccagatattggagatgtgggtgctgattgctgcttttgatcaagagctgcaaacaaagtggtgggcaaccattgtttttgtgccctccctgcattgttgcaagcccctcctcctttaactgatgtgagtttcagggaatttaaaggtctagtccagggctgggcatggtggctcatacctataaccccaacactttgggaggc

SEQ ID NO: 119942 - DNA, 1025 bp, Homo sapiens
atttttgcttctaccgcatagaacataataacagttttctatagctgcacatagcctcccctaagaagctctgtagtaaacatttgaaattttcctgcctttttaacgtgtagattttttcatagctctggtgtcactttgacaaaatttgaatatcagttgtatcactaaggtattgctcacctctaaactcacgtaatatgcctgaacatatttttttacttagtttactatggtgggtataagattgaatatatggtagtttgtttttactccctcttatagaatttactttctgaaatactagcagactttaaaataagatgttcttatatcgtatttactgattctccattaaactcttaatccttagctatccaatatgtacatatctaaaagaaatatataaatttattgtaaattggtttatatgttaaaatcacagattatttatataatggcaaaaaaaaaaaggaagaaagaaaacaaaaagaaatgttgaaagcagatatccctgcctatttcccagtcttaggagatgtatcagtcagagatcttcagagcaacagaaccattgaaccacagttgtttacacacacacacccccacacacacagattttaagaaattgaggaactggctctcacgactgtgggaaccagcaagtctgcaggcttgggcaggctggaaatttcaccaggagtcattgttgcagtcttgagtttgaaggcagaattccttcctcttctctgaactttagtcttttatcttagatccttcagctgattgaaagaggcccacccacattttgggggataatctgctttactcaaactctacagatttagatgttaataacatacaaaaaatttttatgacatctggtctggtgtttgaccaaacaactgggtgccatagtctagccagcttggattaaccacttaaaaattaattatcccaggtaccgtgtgacccagcagtcttactcctggatatttacactagagaaatgaaaacttttgttc

SEQ ID NO: 119943 - DNA, 1054 bp, Homo sapiens
agatcaattctcagttagcactgtgaagcatctcttttggtctgactgtgttttgggtgagggcaaaggacagggtctgagctcaaaagttgaataatgtcatttctagaacgagacctgaaaatgtacgcctacaagtaagaagtgcagactgagttaaaaataaaggttttatgagaaataggagcccaccataggaaaaagtaactccaagatgagacgaggatagggatcaaagtcagtgaagtgaatagaataatcagactcatgcttgactgacaagttgaaatccgtgtgatttttgtcttggcattagaaaattttatattgcaatactattctttgattcccacttccctttgtcatatttccaagattgtaaatcttaaaatagtttcaaagaatcagattctttgttcactgtatacagaattaactaaatcaaaatcatgtttattgtttttaggattatatactgccatccacaattctatttagttagtattaaaataataatgctaattttctaattgtttgtgggctgtatgcccaagaaagcatttacaatgaaaaaaattcttccgggagctgtgaacctaagaaatcattattcaaatactcttagtttagtagactgattggcatattgaaacattcacttaccctttatatagagagatactggcccagtcattttggaatatggcagtcaggaagcagtgttaccttaacaatatggccctaactgctaaatgtgcatgtctttcttgagattcagatggttctgatggttaaagcccctctcctagatatgtaactgaaagttttctctttagatttttatattagataaaaaaagcttccatttatcaagggtcaactgggtgcagtcattgtttggatgctttacataatttatctttgagccgtacacaccccagccagccaggttgttacacctgtctttaaaaaaaataataaactggcaaggcacggtggctcatgcctgtaatctcagcactttgggaggccgaggtgggcggatcacgaggtc

SEQ ID NO: 119944 - DNA, 2186 bp, Homo sapiens
taaacagcgcctttcttatattaaatatttatggcagtctttgggaagaatacattaaaatagcagatgggggtcgttttaaacatttccttgattgaaggcaggggacccccttgtgaatttatagtctgctttcaaagaaagttcacaatgtctgataacccaaggaggcaagaattccaccaattcccagcactgtgatttcaaaaagcaatggctgcaaacagtcttcatgcttcagcacctcctattttgaaactgttagcaagagcagtgaagaacggtgaacaaaaccgtttacagttgtattgcctattaataatgcaataggagtacacctcttttgcattaatattactttttaatcgatttttaaccatagtagcaaaaataagtggaaagtcaaacctttgacctgcggtggacaggaagatgtatcctagactctggaattctgattctggaatttaaaagatgtttggggaattatgtcctaggaaacgttttctaaaacaggaatgtgcttttttgctttatattttctatttgccttggtaactaagaagtctgaatccaggaataatgtttttttttcccccaaagtagtctcttctcctggtttaagcttataaacactatacatctttaattatattattttctttagtagttatcttgacctttaggagtgttactgaatataaaaattattctatcagtttttattaaaatcttagattattagactgtataatttgacttcattatcatttgataattgagatgtttcttaaacagtcttactctgttttttctaagcaaacagcttgcatttgatgcaaaagggaaatgttttgtctctgaaaaatcttatgtagctttaaccaactatttcattaatgtttggtgagagctctgatagtttcaggccagggaaactatgactcttgtagtacttaagacacttgccaatcaatagtaaccatcctcagctgatggagtgatcgttttacaatcacatagaatgtaaaggtatcatggaagggggaaggtgccacgggcaggctggtaatatcagagtctctttaaacttatattttgcaagtaattgttcaatagttcttcatgggatgtgaagaaactagttttctagtggtaaaaattgtatacctttgtttttaaaaatgttttattatgtgcagtgattgtaatatcacatttaaacatagcccaggagtttttcacagatgtgctctcaaggatctgtgaatcacctgaaatatcaaacccatgttgtatgtagcttgtttttggaagggtatccttagcttccatcagtatcaaaggggatctctaatcccaaaaccttaagctgatctgatctaagatctttattttctagatgaagaatctgagatctgacaaaatcaagtgactaatttaaagtaagacagtattgaaagaactacaattaaaatcgtttattctactggagattgtccatgaggtttacaatattcttttttttttttttttttttcatttttgttagagacaggatcttgctatgttgcccaggctggccttgaactcctagcctcaaaccatcctcccaccttagcctcctgagctgctgggattatagacatgagccactgtgtccagttctccagtattcttttataagttagatgttaatactgtagaattgaaaaaaattatgaacctttttcatacacaaatctattcaactcaaaatacttacgaagtcgagtcctggattcataatatctcagcatattgttttgagttccatctgagcttgaggatgatatctataaagccagccaatattaattacatcttcaagtgaaagtacattacccgcctccctgcagttttaaccctatacagtggaagtgtagcctttccttcttccaggaattgttagcataaatcctgacagttccagacagtatggaaggatcccagtagatagggaaaagatccccactcgaaggtccaagcctagtgggatacctttcctgggcacatggtgccaagagatgacttaaatatctacaaccacttgtcagctcagtttttttggggactactccaggtcttccctggggaagggacacatattcttcctggtaataaagattaaccttgggggcaaggat

SEQ ID NO: 119945 - DNA, 1040 bp, Homo sapiens
gaaaccgcgtctctactaaaaatacaaaaaattagccaggcgtggtggtgggcgcctgtagtcccagctactcgggaggctgaggcagaatgctgtgaacccgggaggtggagcttgcagtgagccaagaatgcgccactgcactctagcctgggcgacagacggagcaagactccatctcaaaaagaaaaaaaaaaaaaagcacatcttagttcaaaccaactgcatttcaagtgctcatcagccacatatggcttgtggtttattggatagtacaggttttattactcttaatgcatctcatgttatttacacattgttttggttttcttcaatcatttcttatttctaatgctactaaagctggcttttgagatttttggttggtactactcatatcataattatagtcagcattttataggtcttctccttgagtcactaaattggcattaaaaacaattatgttggagttccttcttggaaattaagagattaattctaatccatgctgtgctgctgcttattgtatcactttgggcaagtctgttaacctttctgtcacagtctctatttataaaatgaagtggataaagagttttggcatttcaaactggataattcttattttaaaaaattgtctgtgtttgttattcaaatacattgattgattacactcatatgcattgtgttacccatagtgccaaaaaaggtttatctactaggatctatttttagtgaacgatggtgataagccatgaagagggagagaagtatccttaactgactttcaagcacagaattattaaaatcttacattatatctgggtacaaattggagagccctgaattggcactttggggcaaagaaaaggtgagatcattgaagttgttggtttattgttttcgtcagtgctagcaactaagtatgttttacctttttgtgaaaagttgaattattggcgataaggaattatcactttttttccatgaggtagttatttcaaaatgacattctgcttttccccttcggcaagagg

SEQ ID NO: 119946 - DNA, 1055 bp, Homo sapiens
tccactttttaaatagaaaaagatttattccgtgtacagagaatatttataaaattgtacacctctaaaaatagcctatggacatgccagactatttctttggaggataaagctttttattaaatgattaagattaagcaaaggtttattatttctggaagtaggtatttaatttaaactatgaaaacccatatatccataatactactaattttcagatgctaaaaatatcttcagcttttaaaatgtattgagctttttattttttaaaaagctttttaagtgctcttttttctatgtattctgttctcaatgctaagttattgattctttaatttgggaaaactaaaatcttatttctatccttgtattttccatgttgtgtgggtgtgggtgaggatgtgtatgtctcagaaagatagacaggcaggaaaaagtgaaaatgttttcatatggtttagttttttgctgaagtaattatatttcttatgctaaaggaaagaatagtgattggaaatctttttgctgtgtttttttctacctcatggaacatattaagaggagcgaagatctttattttatgcttttttattctgtgagttttaagtccacgttcacataaaagccatgtgttttatttgttgtctctcttggctaggaatatttaaatgtatttttgaaactcttctgttctgtcaactaaaggtaatttaaaattataattttaagacactttctagaaacttatactttggttcaggctaaagtcttcagtttgtgtgcctgtgtgtgtgtgttgaggttcttcagaagcaacaaaccacttgagcgtgagcaaatttcacaggctcccttcattgtttgttttagcctcgttaatcatttggcctttgaaaataggctgatcatttcattgaatatggattgagaaaagttctgtgtgccatgaaaggcctgaatggctcttgctgactctgttttattcattttaaataacatgagggggatcccaaagtatttcctctggacttttgaagcattatcattgcagggta

SEQ ID NO: 119947 - DNA, 1046 bp, Homo sapiens
agaaagtgggaggtgagattaggataggccaaacacaccacatagctccatgttcttaccaagatttatttgttttttaatgaacaccacccagattgctgcaaacctttagttaatttccagagttctgaaaaagttgactgacaatttttgtcagtgttctcattgtttttatgaaggagaggattttcagtctttactccaccattcctgctgaggtcaataaaaatttatgcctgaaaaggggctgccttgtatctatcagaccatcaatatgtgaagttgaatcacttttcttgcttaatttttgtgctgcatgtcaaaggtgcatcaatcacttatggtgctgtcttcctcataaagcttttgaggaagaactcatgtcattagcaggttattgacagcaaatgatcactattaattgagtcaccatcacagaaagcatggagacttacagactaaaatgtatacttctttagatacttctggctttggataccacacaagaaataatatggcatagatagactgaatcttgcctatgatggttaattgcttctttctgttttttgttttgttttgttttgttttttgagaccaagtctcgctctgtcacccaggctgagtgcaatggcatgatctcagctcactgcaacctctgcctcccagattcaaatgtttctcctgcctcagcctcccgagtagctgggactacaggcacgtgccaccacacccggctaatttttgcatttttagtagagacggggtttcactttgttggccaggctggtctctaactcctgacctcgtgatctgcctgccttggcctcccaaagtgctgggattacaggcatgagcccaccatgcacggcctctctccctgttaaaaactgatacttttattaagaaccaaatcaaatattatgttgttatttctattctgatagataattgagttccacaattactgtctttcatgatgtcaaagctgctgttggtctagattcactaaagaagctttgttttcttgatagatgatgtcccct

SEQ ID NO: 119948 - DNA, 1004 bp, Homo sapiens
tgtaatcccagctactggggaggctgaggcaggagaatcacttgaactcgggaggcaaaagttgcagtaagctgagatcgtgccactgcactccagcctgggtgacagagtgagactccatctcaaaaataaaaaaagaaagaaaaaagaaataaatgaaatattttaaatagttcttatgtttgacctaccttccgctataaaaactagtatagctttatgccaaatagattagtgctcattttggaaacaccaaagtttcagggctttctttagagccactagcctggataactgatccagcacaaaattgtcttgtccagcctttattaaaattcaacacagtattttcactcttggaggggcctaacactatcatgttgccctgatttgtgcctaacgctcattcataaaatgatcctgacttaaagtggtatgtttggtgctttctttttctgtttgctttttaaatcctttctaaatggcggcccatttcatttacatctctcatttcccctgaagtctttgaagccttttttgtaatgtgcctttaacaaataagtctctcttttttctccagcagtgtgaggcttctcaaatatttgtgttatgagttatggacaaggcatttcctgatctgtttccttaaaaaatccattttttaagacaacctatagcatttaagattgaaatccaaactgtgggagtttacctgaagctgcaagctttcaaactgctaattttgtggtattggtagagccatgaaagtggaagtgaaatctttttaattaattttctttgcagttgaaaatggcccatgttttagctggtagcaatgtaagtttacatatgagccaactaagctggttcattattctcttcagttgtttgaaagttggcagccatcatcacaacagcagctggatacaagataacctagcagtgttggcacatgttgaggcatatgggaatttattaaatcatgcaacctttgcaaagaagag

SEQ ID NO: 119949 - DNA, 1029 bp, Homo sapiens
gaaagaaagcttcattccaaacttctctgacagcttgctaattcatctgcttgcttcttgttggtttatattatcgacatggtacaaccttataggaaaaaaagaatacaatgcatgttaaattttaactacttaaattgttctctaaattcacaactgaacacctcttaatttgtattccatttctcccatcattgttttgaatgaacatttctatgattcagtctggtccatataatttatcattttttagaggttacataacattttattgacattcttttttttgcttactcatttctcgttgttaaacatttggattgttttcagtttctaactatcatgcaaggagtgtggttattagttctttttcctttatttgaggtggagatcatagaagcaagttaaaattaaataaatatatgtaatattgttgctgctaatatattaacattagataatacaaacctggtagagtctggttgtatttttctgttctgtatgttcactgtaagatattttgtatatctttatatattcaaaatattctgtaattttactcattttgtggaattcttctgaaacaggctgtgaaaacatttgatttggagtcaagaaataagtttcttgttgctgtcaattgggaaaacggattttatctctttagcttcactttgagtctcatcttttgaatgagaagactagattaaagaaactctgaggttcacctttgctctaaaatttcatcattttagtaacttgctacatagttttacaattttaaataattatacaggtttattattgcatttttgcttttatgatgttttcgtggctttatctgtaatttaatactgagtcacattcaggagggcaataatcagtgtttttattattatgaaaaaaggcagacttttatgatacattttccaggaattcattgtagagtgtaatggagactgcttgtgtatgaaaccagacacaactgcagtcttaactatgatgttatcagagaaaattgtttccctt

SEQ ID NO: 119950 - DNA, 1045 bp, Homo sapiens
caaaggagggactgtgaatgaattaagatgctgagagaaaatcaagaaaaatttcatcagagaggtggcccagggaatatcagtagtatggataggggattgtacagtaggattgctcagagaggaagtattctgatttcaatgagtagtttggataggggattgtacaatgggattgttcagagagaaagtattctgatttgaatcatatcaatcggaattgggtgataatggaaaggttgattagggctacattttggagagcattgtatgtacccactggccctcaactcaccctggagtgttcctgggagttcttatcaaaaattagagtcgtggacctggttggttagaatctcagcagatgataaataactttggctttgcagaccatgcagtttctgttgcaactgtcacaactacattcaactctgcttttgtagtgaaagcagccataaacagtatgaaatgaatgagtgtagctgtgttccaataaaactttatttacaaaatcagacaacagctggatttggcacatgggttgtagtttgccaacctctgacctgatcggggtaaactgaatgcagggaaaactgaatttaaaacaataaaacacaataagaaaatgttctcaactcataagaaataaagtaattataaatctgggttttgatttaaatgattttataatttctagtccataaatatagcttccggtttctttctcacttgcttgctctgtgtatgtgtgtgtatatatatatttttttccaatttgtatatatccctattcagtattatttatgatgatgctataccaattgcactttaggatgacataaaacttgaaatgtaatgtttctgagtgctattttttggtaacacttccattaaaagtaataatttgcctaatttcttaataatggactggatattagaggcaactgcattttgactgtataattttataaattattcttcccgagacctgatgtttagttaccttccagttatgttttcccattaaagaatgccatgatctggg

SEQ ID NO: 119951 - DNA, 1078 bp, Homo sapiens
agaaacagatcaggattttcaagaaacagtgaaacttgttgaagagtacaaattcccaagcctgtttattaaccaattttacccaagaccaggaactcctgctgcaaaaatggaacaagttccagcacaagtggtaagatctttttcttgtaaggtattgttttttgccagtagctatagaaatgcagctgtgttgcctaccttcacacaacttgctcatgttataacccttaaattacaaaatatggagagatttccaagttggggtcaggggccagggggccgtggatgagttaaatgaccttaggcaactaaaatataatcacctttttcttcttttgaacagtaaaattcagatgacttggggaaaaaaatttttaattagtatctagtatttacctgtgtgtagaagataaacttttggatgtttcaaaataaggcaatatttaaatatttgtgtataaatgaggcttcatttttaccccactttttaagagactcttttcatagtttgttattgattgggatccccctagttttgctgcttttctattggatagatttgatactatctttctacctttttttttttttcagttttttcacaacgagcctcaatttaattttatcctttcatgttcacagatacagtagaattagatgactcataatgaatgtgaataagtttggaatcaagtaaaggcaaaatgtttcccagaatgccccagaaattaagggtctcaaaacaaatatctactttctagattcattggctgaatacgggcaaatgtaaaataagcctgaagagcaagtagaaatttaagtgaaaattttctactttgtttctaataactattaggttggtgcaaaagtaattgcggtttttgcctttaattaccgcaattacttttgcactaacctaaattttaaaaaattatgccctgtcattaatttgcctcaaatgtttttatgaataaatatgcaaagaaataatccagagcttgttactgtttttctgttatagcgtaagtgaatatcaaacacaacatatatattctttcaatatttggttgaaaaa

SEQ ID NO: 119952 - DNA, 1750 bp, Homo sapiens
ctgttgatagcaaggctcgacaggttttgtagagtagttctcttaacattgcctacataggagaaactggctcactagtaataatggccgtgttttagttacttgtataagaaacttacttggctttagtgctagaacttagtaaaggatttcttctcagagcttctgtcatcagcagttacagtgtgaatacagacggctctgaaagccccatatctatttcagcatgctctagaaagccacttggaatattttttgcctgtacatagaagcactgaggaaatatcctgaaaacaagacagctaattgttattatgcttggtacgttcatcccaatgtttcagtatataggttatgattggctcttggaactgtccattgagcaaatagaaggagccaggaattttgcaggatagttagttgttcatgtggtttggagttaagggactactgccggaagtagacatagtcagggatagagtttctagatcggggtggttacctttctctataaagggccagatagtaaatactttaggatttgtggctgtatttcagtaaaactttatttaaaaaaaaaaaacaacaggcagtgggtcagattggctatggggccatagtttgccaacccctgttctggattccagaagatactccactggattgtgtgactgatctcagagggaagaatagcagtggttttcagttaactgggcagatacctataaccttcaatatgccaagacttcacagtatttgtatataataaatttgttgtcagaaaaggcattgtttctttactggttctttggggctaatatgaatagtgttacttagttatactccatttctttcccaaaatcgagataattaggataaaaagcacatataagtgttagctatcaaagtaaaatcaaaacctacattaagtcacacaaaacaacttctgaatattccttttccacctgccaatgcaagctggtcgctcagccatttctgataagcctcagttcttggggcatctcctaagtttaatactgatatgctacctattttattttatctagcataatttcctttctaaaaatattttccccagtgttttatatcaagactcctaacaaaggaagtgttagcatccgtcatttttcttctgattgaagtataagccaagaactgtttcaccgaataagtgggtatatgggaagaaaagaaaaaattataagctaatgaaattttgatgggcaaatgacctgttcaaagcagattccaaggctcacagagctaacatttcattagccacaggaactgtttccaatcatcttactgatacatctttgctctccaggggaagggagtgttaaattactttagaatttgatggtcagaagcactgctcagaggcggagagaggaggcaggaattttggctgatctgtaggagaggacttttcagtgggtgtcagaaggtagcaacaaggccaagtgatttgaaccactgccactggaattgtgacttcaaagacagctctgaaatagggaaactgatctacaaggaaacgatgagtgtgtacaaatgattttatttacaaggtccttattaatatcaggtccaactgcttaactaaggagatgcagaagattatgtagagctaggcgggggtatgcggcattggggaggtatgatagctgtgtccttgaggacactggaggaggtagaagatacttccctagaacacgggataccagtc

SEQ ID NO: 119953 - DNA, 1857 bp, Homo sapiens
atagaaagatacaaaaagtaaaataaactatggtctgctcctgggagtgaatgttgtgacggtttgcctctctagctatattcattttaatgttcattttccccttgacgtaagtttatgccaaaaaaagaatagtcagcattttagtggattcatcatgctgagtaaactcagaaatgcaactcctattctaaacttggcaaaatttccttcgggtttcatcccaaattatagtgggtcacttaaatgacagctttgcctactagaaactgttaaaacagttgtaattacaaagggtagttagtgcaaccattttgttctcagtgagtcagttgtatttgctcttctttccttcccccaaccaagattgctcctgcctgaccccagacacaggaaagtcaccaggttaaacaaacgtgttgtttgagtgagcccaggtgcatttcttaatcataccccaaagccattgtttaggttgtaaatggtcagttggttttctcttaaatgctgttgcaaaaagcaaataaagctaggagcaaaatgtgtacccagaataaggcttagaaaatactttatttcttgcactaagaaatgttgcttgagactagaagaatttcatttttgtttgttgcctctggttgcatgtccatttcttaaattgttttcaggaattcttataataaataaagactcatacaaaagggcttgacaaaagttaactcccatttatctgtccttctaaaagagaacattagtaaaggtaatccaaagtagcagataatctggttatattttatgcattatgttgtttcctttgtcattttaataaacaggtaatgaacataacttgtattatagtttctgaaacaccatactaagtaccaaggagggttacagggccagagagcttccaggtcacaaaaagtccaacctggagttgatttttttttttcttttgataaatcacgggtaagttagagtaggctataattagaacacttttattaaaaccatgcaaattagcatgtgctgtttgtccttggcctgaagaagacatttctctgcacataaaaatgttttcctgtttctttctctgttttttgttagattttatcagaattatgtgtttagggggaaatctaggtttattagccaaacacacatgtttataatctgctattgtgaaaagttattctaaaaaattgaaatgcttggaaggaaaaagttctatttacatctacagtggtttttaacatctgcaaacacagttaatctgcatgaattagtgcacactccaccactaaaagtgagtctttaacaggtagtcactatttttctgtattttgtgaagtgggcttcttgctttcttttagtggcttgttatattagtaatttttctgcatatacatgtcagtggacacacttgagaagaaacattgtcatctagctcctgtgttggtgaactgggcttttctttttcttttgataactatcattatttaattacttttctacatatatatgcatgtatcaactgaactagaagcaaattcatatatgtcattaaacatgtatgtatttatgcacttgataagttagcctatgagtagaaagaaaactaacattagtgctttactcaaccagagcatcttttgtgcagcaatcccacctttttaaaacagctcagaacctctaaaaaagcctatttgggcccagattgttaaaattattgtgtaattctcctcacccacctcattacttcttcggtccctcatccacaaacagttcaatctttttttaaaacaaatcagttcaaactgatgcctggtttcccaaaacacagtcaacactaatagc

SEQ ID NO: 119954 - DNA, 1782 bp, Homo sapiens
gtgaaaactcagtactaggttcaatccaaggttcatccattctcccttgtaagagtcttacactatagagctggaaaggcccttagagctcatggagtcccaccgccctcctccatccctcctctgttgttcagggaagagaggcttttttgtcctgttgatttaatactcatccttcaagacccagtttaatttcaccttctttgcctcttttctgatagacacagaggattgctctcacctcttgctaccactctgacttgtatatacctttattatttgacattgtgtgctcatataattcacttccatttaacaaacatttgaggtttttcctaggaggcaggcagaataactagagtaagatgcttacaatccattggggcaggggccccgtctccccgaagaccttgaattatggactagaattgaatgtgttatatatatgaagtgtattttaccattctttgaatctggatactataactgtacaaggcacttacccatcatcccacagcaaattcagggctaaaatccagtcttttaattcccagttttgtgctctgtctttgcaaaaattaatacagttggaatgttccagtagtaataaccacagctgtgggagaatgtcctaagtaagtttatgcttggttttaattataaattaagtaatacatgcacttaataccctattcaaggaaattctccctttgtaaccttatcctagagacccctgttttcttctccagaggcaaccactgttgctggttttgtatatatgcttctggagttattttatgcatacacaaatacataccttcatgtaaatgtcagtatgtgtttttatatagatatgtgctttttaaaaatttaaatattatcatactagaaagtcttctgtttcttttttcactttacagtatatcttggagataatttcaaacagtacctaaagagctgcctcattcttttttaaaaaaatagctgtatatattatataccagttattcaccatatttatttaactagactcttactggtggatctttgagtggcatctgatgtttttggtcttacaaacagtgctgtgcagtgtataatctcacaaacatgtcatcttatcaatgtataactgtcacctgtaggataaattcctagaagtgaatatctagatattagatgtgtacatattaaatcatgatagatattggccgagacccactcagcaagatgttccagtgtacatgcccatcaacaatgtaagacagcgcttgtttccccacacccctgctatacaccatgtcaactaacttttaaaatctttccctattagggaaacaaagataacttcttatagttttaatttatatttctcttatgaatggtgtcactcagttattagaaatagccacaaaaacagagtgatttggtctttgattttaaacttttaaaatccacgttttagaatttctgactcttccacttgcaagctagatgatgtcggcaagatacttaagttttctttgccttggttttctcctctgtaaaatgagaatactgcgttccatagactctaagccattattaagtcttattaattgtaagactcaccattaattcacataacgctaaggaaaaaatgcccattacaatggtgtcttaaattgagaaatgctaaaatataaaataatgtgcatcttagaatcgatgaaatttgctaatacttgccttagaagtttgtcatagggattaaatgggaagcatctagaatagcatctagca

SEQ ID NO: 119955 - DNA, 1093 bp, Homo sapiens
actgtgcaacactggtaatttatttagcttctctgaggctcagcttttttgtctctaaaatgggaataaaaacaatagtacctccccaatggggttattataaggattaaacaagagaatgtatgttgaagagattggcacagtgctctgaatgtagtaagcacttaataaatgttagttgttaaataataattataaattctatccataagtatttattactgtaactagatatctggaaaaaaacatattagcagtgagataattttattgtgattaaagaaagcatgtgattgaatactgaaaaatatgaccagggtccttcaactagataaaaaagaaacctaaccagctggaaatctaaaggagaaaaatgaaaatattgttctggttctctctgagccaattaaaattttctgttgtttttaaaacaagtccattttggactagaactgaaagtctccaacctactgtgagtagaaaaaaagcctatggtaagaaggctcaaaaagctaactgacatatgtgaacccagggtagacctcataatttacaatttcccaacagttcctgcaccttagaattttgcttcgatgtgtgtagactcagcagcatgttgtaggcacgttgatgtgttccagccatccacttatataaacactattgtcttataggagactatacattctgactgcagtttaccaaaaaaaaaaaaaaaaaaaaaaaggaaaaaatggagtaattgtactaactctagatataatacaaaataaaaatacctagagtatttcacacatactaatgcattgatggtagatagctttttaagtttgtcccttaaataatcaaagtaatagaatatttggaattattaaatgttagcactgaaaggagtcaggaatttataaggatcagcttaatacagtcccttttttttctactttttttaaaaatttaggtatggaaacgaaggcccacatgcaattggctagttaataataaaatgaaaccttgaaattatatttgctgactcctagtctgatatgtctttcacctcaccacagggtgtttgttttttgttgttgttggtttt

SEQ ID NO: 119956 - DNA, 1002 bp, Homo sapiens
tctgatagatttagttgtagatataaatatattttttaatcatgtcttctggtttaaatatagacactgaatttcagaaatcccagtttatgataagtactgcctttcagggtgtttgtctccattacatctagttctaaaaagatatgtagttctgtatcagtttaatttcagttttcttgttaggccattttggcgatcattccccacatattgtgatgacaactacttttatatcatgtggtgtggtcggtattgttatgtatataacagaaaagtcaccatagacaagtcaaaagcaatttgatgcaaactacccattatccaagttttggtagcagtgaaacagacatgtttcatgagagaggattactgagaagacagctgtcatttaacattcctaacactagaaaaaaaccataaagctagatggctactctaaaatgttattgatcagttcagagcattcagttaattatgttaagttttcatcgatttgaagtagtttcaggggagatctctgcattagtgaaatgtttttattttaaaaatatttttttaaaggaatatagtttacttctttcaaataatcccacaaatttagtattccaaagagaccactttgtgattctttaaattaataaataagaaatattttctaaggcatcagtaagactttaaaatgaaaacatcattgtttaaccataggaaaaaaatttaacctatctggtagttaaagcaatacaaatttaaattccaatcaagtgttattttcacctataaaattactaaaaatttttgatttgagaatacagagagttggataagcatataaattttagaaagaggctaatagttcatatcgtttagctcagcaaatcagcttctggaaatctattttgaggaaataatcttagagacagaaagatctctttgcacaaaaatgttcactgcattattatcaataatagaagaaaaagcttgaatatccatcattaagga

SEQ ID NO: 119957 - DNA, 1039 bp, Homo sapiens
taacactaaagcatttggggttatttataataaagcctgtgcaaaagaaacaagatgccaattcacgtgtcaggcagacagtggcagctgctttgttactatgtggcactgtcccatcctaaatcaaatgggaaatgggtactgtttgacagatactgtcatcagtacaaacattattaaaataattaaacagcttcttcttcttttttttaatcttagggacaggctgttggtttgttcgggctttcccagccctggtgctcaggactccatgcatattcctacaccagatttttgatccagccaagcctgagctatgatttttttatcccagtgggacagtgtagctatgttcttggcgttttctgcctattaccagttagggtctgtgaacagaatctccatttgtgagaacctcattgtggatagcacgcagtggtcttttcattttgattgatggttctggttctgcaccatctggcttctgataggctgcattaatcatatcctgaactaagaaagtgtagacatgtctgcttaatatgtacccatacataatgtagcattagttattcattcatcttgcaaaacagtcataatgtatgcaaggtctttatatagtaaaacataaatattaatatgcgacccattaatgctgtttttacttgtactaacctcccactagtacatttgtttatgaagattgaagaattaagagaaagaaggccatgtgcacatttacatgaacacatatagttttgctgatgtctcctataaatttagagtgatgtatgtctgaaatacttatttgctcatatttactttatatatatgtatctttaattgcctcttgaaatacaggttaaatgcaagctgcaatacagattaatttttctcatgtgaactgcttgcatcaaatgtaggtcatccatttgccggggtcgtgggggcgtatgtggccgtgctcttttgtgctgcctctggctgggcccactctgtcccctgctgtgtgataatgtcgagaaaaaaaagaggggcc

SEQ ID NO: 119958 - DNA, 1049 bp, Homo sapiens
atcaagccagtctggcaggagactgggacaccatagaatctggggtgcccagtttttacccaaacagtagagtttatggtaacataactaaggctagcacctacctcctggtggactggtggccaccaatgtaccctccattctgatgatgatgagctcaagaactaaatgagactggctggattcataggataaggaccctcattggcagcaactcagcaggttatgggaggcagtggccaacatgcctaggataagaggagcatagtgccaggtattatgaagattcagacatgagcagtgttgttgacaatttgaaccaaaagcatggaccaaagtacgaatagaatgctttaggagaaaaagagaagtacaaaatgtaatactgcagccttaaagagtaaatatgaactagtttgtgtgcaaattcaagcaaggcaacgttacttttacaacattattggaagaagttgaagatggtaatggtagtggtacatttattgactgttaagtaagaagcagtatgaccctcataaagattgtttatgtgtagcagggttgaagtgccatgtgataaaactcataagctttacttacaagagttctaactagtgtagaaaaaaatcctgccagacagcgtgtctgctttgtttggaatagaagcataaatatctaatttgccttgttacagagaaaaatgcatgatctatgcagcatgtagccaaataatcattctatcaggctcaaaatgtagggaacgtagttaatttgcttctttgccctaatccttctctctgaatttgtacttcatttagtcatatttcacctcttagaagctaaaaacacaattttgccagaagatcaaaaataaaagcagcaatagcataagtcagtataccctaaattaggaaagttagaaacacacacagtaacaaatctctcaaagtttgtttttctctcaacgtttctctagtctgtaggttttttttcttttccatgtaagtgttgtgtcatgaaagcaagtgtatctcaggagtgtaaggtaggac

SEQ ID NO: 119959 - DNA, 1033 bp, Homo sapiens
ctttttaggggaccaagttaatgtcaacaaagaatggtaaatcagatttgcaatctgtgatgttagggaatagagtgatatcaagtaattagaaagaatcacacagatcactttaaccacttcacagtccaaagaagcaaagtctctgtctaaaattgcacggctgccaacctggataacgtagcaggatcccatctctacaaaatatcaaaaattcaccgggcctggtggcatacacttgtagtcccagctactcaggaggcagacatggcagtatcacttgaacccaagagttcaaggctgcagcaaactatgatcacgccactgcattcagcctgggctgcagagtgagaccctgcctcaaaaataaaataaaattacatggctggtttatggctgattccatagttcagtactgttgacaataggcaacacaaagagtggtatttcctaaaggttctagtggactagaatgtaacattttttaataaaattaattcatgtgaaaactggcttggagattgtacccttctaaactgctaatatccaatgttacatcctcctcctctccttaatgggtctggactgcatgcactacagttgcccagtaaaataaaacatcgtcaaatactgcattaggtatcagggaccaggcatttgtctgagctccaacacgtgctttctgggtcttggatttttctctgctcttaaattagaatgattaatttaatcattaaattagatggctgacatgaacgactaatgtcttcgtggagtaccattcttcataaaaattgaccaaaaaaaatcacagttcacgtcccagagcccaggaggaaagggtgtttttgatttctgaccctaacctttctaatctatccttcaaattcaggtaggttcggctcagaataaaggtggaaagagccaattggaccttaaggttaaacattggagagaggaggaaaactctttttgacagcctctagtgttatttgtgggatagactggtccctctaagatactcttaaatttg

SEQ ID NO: 119960 - DNA, 2524 bp, Homo sapiens
tttggcaaaataaaatctgtggaggcaacactggtgtttttactaccttatgaagcaacgtgaggaagaaggaaaaaatcatgtataatcttttgcaacaagctataaaatgatttttttttgtctttaattaaacaaaagcatttttattcacagaatgttatgatcatattgctagtacagcttaatgcttactttttaactaattcattttctcatttgtggcagtctagaaaggtttattaaatctaatgactgttttaggattaagtaggcggaaagcatgttctaattacggggatggataaaagcaaactaattaaccaaaaaagtgtatttccttcctcatagatgtctggtcagccatatctgagatgaacttggcttacctagctcctgagttttttaatcatgtttttagattgcattttttacaccatctgtaccattaacatgactgtaatttctgtcacagttggaagcttcagttaataaatgttttgtttcggagcgggatgggaaggcagacaggaaggtgggagtgtttatgaatgaaccaaaagggaagggactgtgatctgaggagccatgaagtgaaaatcctggactgacttagaactgtgaatttggggttgtccttttctgccccaccttataaatactcttaattaatccttctaaaaaaatccaacctagtagaaagtattaatcacctattaatcaccagctagtcaaaaaatctaaataacttaattcatagacaacagagcatatacagaagaatgtgtggttgttttatgaaattcagaaggatttgtttctcagtgttgtgtatatcctgaacaaagcacagaatcacagtgttgtagttgagagttccaaataaataggtattttatcctatttttttaattacagatttttctggatatatttttcttttttttactagtaactactgcttcaggcttttaaaaaacactgattatgttttcaaagttgaagaaaatggtaagttttaaagcatctgtaatttcaaagagtgatagtatattgattaaaaagtttatagaaataaataataaaattttgtttcagggagaggaataggcaagacacaaggcaaactgtagactaattcaccaaaaataagtacacatacttttcaattttaaaagattaccattcatgactaaaaaagaataaactgtatgaagtgaagactgaatttttagttaaaagtcttattatactaggatgaagttttacatcttgtagcataagggacattagctttagtattataaaggagatatcagtatatattgtgtgcctgctgggtgcttagggatacaaaccattaagatagaagcctacctcaagaagcttactgtcagtaaacatttggaggacaaggagttacagtagaacaggaaatgtaatttacttcaaaaaacttttttttttttgagacagtgtctcactctgttgcccaggctggagtgcagtggcacaatctcagctcaccacaacttccacctctcaggttcaagcgtttctcctgcctcagcctcccaagtagctgggattacaggcatgccccacctccaggcctggctaatttttttgtattttttagtagagacagggtttcgccatgttagccaggctggtctcaaactcctgacttcaagtaatttgcccgcctcggcctcccaaagtgctgggattacaggcatgaaccaccacgcctggccccaaaaaacattcttaaatgatgatttatgtaataaaagtacttcagtgatagacaatggaaatagtacttatctggttgcaatgatttgtaggtagtggtcttgcaacatttgctggtgatacatcctaaagcctcacgattcctcacattcccaaaaagccttggaatgtatcactgcatccttaagttatgctaataaaagtaattgaacgtttggagtgatgctggcaggcctttctgaaagtgactgcgttcactgagagacagtaaagaagccacacatagatgcaaacactgggaagttggctaaggtgactcattaagtgagtccatcgtatctatcaatcttgagtaattcgggaattccaaaatgtgcagcagccaaataacaaatgaatgtcccgaacatttatttatttatttattttgagatagagtcttgctctggcacccaggctggagtgcagtggcgctgtctcggctcagtgcaagctccgcctcctgggttcacgccattctcctgcctcagcctcccaagtagctgggactacaggcgcccaccaccacacccggctaattttttgtatttttagtagagatggggtttcaccattgttagccaggttggtctcgatctcctgaccttgtgatccgcccgcctcggcctcccaaagtgctgggattacaggcgggagccaccgcacctggcctgtcctgaacgtttctgttccaactagtgatggtgaggatctaaaaatttcccac

SEQ ID NO: 119961 - DNA, 1047 bp, Homo sapiens
tacttaactgacatagctacacatgagaaaaatttcttttttatataattgcacatttccttggactcaaagctattgtcttacaaatcagaaagtaatacaccacaattgggaaaagtggaagggtaatttcaaaataaaaagcataccatctgtttctaagggctaaaggaatgttctaaaaatcagtgtagtttcaaagagctataaatacaatttgtaatgtactgtcatacccatacccacataaatagcaggcttttaccagttttcttttaggtaatgtatttagtaaccaacagagccttgatcaacagagctttgatatttttctgtatttttgtcttgcttttaattcgcatctatctctgtttctctctctccctcatatacccttttctcctctcctcttctttataaatatccttcttcgccaaaacataaatatgtaagtgtattgttttctgcccaagacaggagctaatttaaggtagatacacctcctgggctgcaagacaaagttccagattagtcaagacttgtgagaaattcatgtgaggggcaaagaagagattatttatgtggagaaagtgggaacctacataggattatttttatccagatgaaagaaatacgggcagaagcaaactaaaatggtctacaagttgggcattaaaaaaaatacaactggaatattttacaaagtctgccccatggtgataaatacacacgagcagatattacaatgccatgcatctgtgtccccaccaaaaacctgtgtgatttaaaaagtgatgttaatccgactagcataacccttggtgggttcatctgttttctgacaagatgaaaaagtgatagaaaagtcatcagatctctggctgacacagtggcttatgcttataatcccagcactttgggaggctgaggcaggcagatcacttgaagccaggagttcaggaccagcctggccaacatggcgaaaccctgtctctaccaaaacatacaaaaattagccaggcttggtggtgcatacctgtaatccca

SEQ ID NO: 119962 - DNA, 1052 bp, Homo sapiens
tctgccattggatgatgcagcaagaaggccctcacgaggcactggcaccttgatctttgacttcctggcctttagaaccatgagaaaataaatacattttctttataaattatccagtctcaggtattctgttatagcagcacaaaacagactaaggcagagatctaatcacaaattttacatgttgatgttaaagatagttttcttagtcagtattttgatattaacaggtctgtattttatatgttgtaacctactacaaagcagagaacttttatatggccattttgagaaaatattttaattatttctcttccttctctactggtaagtgaatggtaataatgaaaatttctctttcatttgccatttctttctgctttactgtactgatagactacctgttattaatggtcattacagtacctcttattttctcttaaagaacttgttttatgttttcttcaagacacgtaataagtagcaaagagatggtccagcattgtttactgcagaaaacagtgcactaggaagtttggcacctaagacctatatctaacttacacagtatcctgaaccaaggtacttaaattctctgtgcttctgtaagttggcaaccacaaaagtctatgtgaaagtgaaaaataagaaactagatgaaataagattattatagctgctctttgttatgaagatgataacaaaaaatacagctattctaaggccttcagaataaattatagaattaaatttttgagaaaaatgccattgatttatttcagtttagcaatttttcaaaaggtttcagtgcttgacagtataactgtaagaatatcactatttattaaaagagctgcttcattcatttacatttattgagaacctattgtgagtcaggcatttaggtgctagggataaagttacaaatgaacaaaatctctactcgtggaatttagaatcttgtgagcattcttctaggttatttcccttaaaatttaaggtaactagtttgctgaaattaaaaggagtattttaccctgctgtagtgctat

SEQ ID NO: 119963 - DNA, 1108 bp, Homo sapiens
aaaagtacataggattgcttaaagcttttatctttgttagtaatcaccctggaagaatttttaaattattgatttaagtagaatcttttattcttggtttaaatgtatacaaaaactacctacatgctcacctacaatctcgattttctttgaaattcatctattttctcacttgtctacatcaaggggaaatagggagcgaggataggtctgaaccaaagtactcccacttaaatggcatgatgtgtctacgtatctatgtgtgtgtgcgtgcctgtgtgtgcacatagcaaattactggttgcaataaaatttgttagaatttcaatttggcttcattaagtctgagacagtgaagtaatactaagggagaaatagaataggtgaagagaaataaatactagatcaattttctttcaagaaagacgttttagaagaagtagtattcattttttaggtcatcattgacatttctcaatattatattcctataaactgcatatcaggacttgtatgtgcttgaggaagctacattttcacagcaggagaggaaatcagaataaagcattgagatgcaggtgcacagtaatacaagtgggctctttcccctgcagcctgaatgcctggccaataatgcagaagctcttggagccgggctctcagggtctcccggagctaagccaagaagtatgggggtggggcagggggggtcaggagagaataattgttattcagtcttctttaatgagatgtattgcccactgctgaaagattgtggcagtgccttttgttatgctaattagacaccattagagcttggctctctttgatttctgcttaatcttttctgcttcctcagcctcaatcctgactggcaaatggttgaaagatggtggggtgtactgcacgtgttatttattgctcacatctatgctgagttctttggggaatgggggggaatgtaagatttatcttaccaaaggcagttcctattttggacgttcatttttggcttatttttaaaaaatgaattttttgataatgattactttctgccttttaagtccaaatgccactgttttttatatggttgcttttgcagccacac

SEQ ID NO: 119964 - DNA, 1085 bp, Homo sapiens
taagttaaaacacttgaaagtgggtctaatttcagacaggtcagctaaccgtgctagaagcaaatgagggcgtgtttcttcctatttttccttccacccccaagataactggctcccaagcagttttttctgttccttttttttcttactaaactttatgtgagactaaattcttcatcgctgctaagttcacgtcacaaacaattaaaaccatagtacgtttaatattttatgcatttttctttcattttgtatcttgttagtttcttttacagactggttaggacgtatttgagtttcacagtctagatacatagcttttattctatgctgctgagctatattttattgaccgttgcagctgaattagtatgactgtcacttcacactgtgtttagtgtgtttacaataccttccgtgtaccaatttgagtaccatccaaagtatcatcagagcaagctgatgctaaacaattagctttcatttcacttgcatcactaattgtgcaatcactgatgataattctcttcctcctgagggttgtagctggagcatcgtgagggaaattgcatgcatcagggaactaattgtgccttgataataataatagctaccatttagtgaaccactactatgtgcttggtattgaggctctttactcgtattacttcagtttattattctagcctggcctagggcagctagaacacgatgaagttctttatacagctgtacacacccacatagaggcatcataggatgggactgagcaggcattttccccacctctccatcctttgtccacgttcaagataggaggcagaaggagcagtgagcctgggacaaagacgtggaccgacttccctagctaagcgctaaggaaaagaaccaggcccccgagcctgaattacttacatatgcaacatgcaggtagcacctggcctcttataatatgtttcaatgtttattatccaggaacggaatgaaatcttagagatggaaataatgaatatgggcttggtcttcgagaagtttttggtcttggctgttcctctggtaatactgctaatcaattgtgaccctgg

SEQ ID NO: 119965 - DNA, 1036 bp, Homo sapiens
ggtgcctgtaatcccagctacttgggaggctaaggtgggagaatcacttgaacccaggaggcggaggttgcagtgggccaagatcataccactgcactctagcctgggtgacagagtgagattctgtctcaaaaaaacaacaaacaaacaaacaaaaaaacaagccctctcccctccatctccctaaaacaataaagagattttgttcattggaagaaaacaaaacaaaacaaacactccttggcagccaaaggaactcggaggaacacaaaactttactcggtacaggaaggtaacataccatcagattctcaattacttagtcaaccttggtttacaacaattgacattaagacagcactcagaaataacaataacgaaaacaaactcaaacacttgccacctcctcttatggaaagacagcaaggggtgggcggtgggcaccagtcagtaccttccaagggaacatttcctttacctggaaaaggaattctaatacatgaaatttgctctaaaaattatcagatgaggaaaagtaaagcctgcacgtgaattttctctaatgcctacagccaaaaagcaatgtcccagactggtaatatttttctaagaaattatatttagccctttctctttcctttttgaccttcaggagagggaaaacaattaatttcagaacccacttaatactggtcagaacttcctctgttttcagacagtgacaggtaccaggtcctcccttctgcagacaatctttcctgtctctctaaatgttttgtaatcagatgtggtagttccaaattctctttattccaaacagagccaggaagtaatttctcaggcagtttaactttgatagcaggtaattttaatctatcgcaaacatcagcctgacatggacttgttatcttcattattttaattactcttttgggccacttttttccctcattccttccaggaaggagtgaatagaaattggcagctttaatcttatcatgccatggaccagattttttttttttttttttttttt

SEQ ID NO: 119966 - DNA, 1042 bp, Homo sapiens
cattgcttaacagagaagttcactctgttaagcagacagctccaggtcatctagaacctccctccaaaacagttttccagcctcatttaccatcattccttacaaaaaaaacctccaaccagggcaaataagtgactgttttccaagtttccattttccaggttgttctgtctccctggaataacgctgtttatccccatccttcttcagcctcccctccccatctcccacccaatgcataaacacaaaactggagtttcaagttccagctcaaaacacactgcccctgaccttccaaaaagaaacaattccactggtttcttcggaaggcatgacacatctcatctgaccgtattttccattgtgttcttaattatctgcatggtaagactgtagttctcctctccccagagcctaactcatggcctgaaatagaagggagtgctcaattcagggtttaatgaaggggtaaatgaatgaatggaagtgaataatgataggaaatatccaaaacatcagataatccaaaaataatctatatgtgactttggaatgtattttatacacattttcaaagaacatcaaacacaaaacttcaaacgaagtaatgaagccagcctgtgcagatcccagttgggtggggtgtcctggaaaaagggtgggaatcctaacaggaaaggaggaacctctcatcagccaactacccttccccagcctcgtggcttatctagaaatcagagtgaatccaaatggcttagagctcaagggtacagtgttgggtaattcataaatgattgaaatgcctttagaaatataagtgctacataaatgctaaattataataacacaaaaataatcattttccattattttctttagatatgtaaatggcatactcttttaaatctaaagtgggttcaagaaacagcaataagtttaacacaaatgcaccaaacgatcatggaaacccattcagtgttctaaatgcaattatcgtgctgaccatcagcccagaaaacaaattacggtagctaatgacagg

SEQ ID NO: 119967 - DNA, 1085 bp, Homo sapiens
gaggcggagaactccttccccaaatcttttggggacttttctctctttacccacctccgcccctgcgaggagttgaggggccagttcggccgccgcgcgcgtcttcccgttcggcgtgtgcttggcccggggaaccgggagggcccggcgatcgcgcggcggccgccgcgagggtgtgagcgcgcgtgggcgcccgccgagccgaggccatggtgcagcaaaccaacaatgccgagaacacggaagcgctgctggccggcgagagctcggactcgggcgccggcctcgagctgggaatcgcctcctcccccacgcccggctccaccgcctccacgggcggcaaggccgacgacccgagctggtgcaagaccccgagtgggcacatcaagcgacccatgaacgccttcatggtgtggtcgcagatcgagcggcgcaagatcatggagcagtcgcccgacatgcacaacgccgagatctccaagcggctgggcaaacgctggaagctgctcaaagacagcgacaagatccctttcattcgagaggcggagcggctgcgcctcaagcacatggctgactaccccgactacaagtaccggcccaggaagaaggtgaagtccggcaacgccaactccagctcctcggccgccgcctcctccaagccgggggagaagggagacaaggtcggtggcagtggcgggggcggccatgggggcggcggcggcggcgggagcagcaacgcggggggaggaggcggcggtgcgagtggcggcggcgccaactccaaaccggcgcagaaaaagagctgcggctccaaagtggcgggcggcgcgggcggtggggttagcaaaccgcacgccaagctcatcctggcaggcggcggcggcggcgggaaagcagcggctgccgccgccgcctccttcgccgccgaacaggcgggggccgccgccctgctgcccctgggcgccgccgccgaccaccactcgctgtacaaggcgcggactcccagcgcctcggcctccgcctcctcggcagcctcggcctccgcagcgctcgcggccccgggcaagcacctggcggagaagaag

SEQ ID NO: 119968 - DNA, 1050 bp, Homo sapiens
ctagaaaactaactcgccttcttgctgggggtgcagacaagtccggaagctcgttggaagggggagggggtctcttcaagcaaaggggagcaaactcgaagtcgcttttttttttttgccatcaacaacaacatcaataacaacaatcacaggtcgcccctgtctaccctcttcctcctccgcgtccctccggctgggcagagtgggtccccggcccgggaaggtgggggatgggagcgcgggtccaaaacgccgccgcgctccttgatccgacgacgagaacgcgggcgaagccagccctgcttactttttctttcttttttcccttttctctttaaactcttcgtctgtccttttcgtttctttttttcactttttttttctcctctcctaccccccccggcccttctccctgcctgcgcgcccttcagtaggtgaaaaccaggttggagatgctggactcgagccagtctcccgagatcatctcgctcacctcgggcgtgcagtagtccgggaactcgaagtgcgagccggagccgggctcgaagttaaaatccaggtcccggtcgagcgccgacgacgaactgaagctgcccagggacatgctctcaaagtttgagctggggttcaggtcgagcaggtcgtcttcgaactcgtcgtcggaggacgaggagcccgaggaggaggaagaggaggagtgggacgaggccgaggaggacgcgtgcgagggcgcgctggacggggcgggcgaggcggcgcgcaggctggcgtagccgcggtggtcggcgggcgagcggccggcggcgggggacgaggcggcgctgctgcggccgctcaggctgggcgcgtcgggcgagcagcccgcgccctcctcctcgtacaggcccagggggtcgctggggtcggctcccgcgcccacgccgcccacgggcgacgacgacgtgcccaggccgccgaacaggtagacgcgcttcaccttcttctccgccaggtgcttgcccggggccgcgagcgctgcggaggccgaggctgccgaggaggcggaggccg

SEQ ID NO: 119969 - DNA, 1794 bp, Homo sapiens
gaggtgagacttcccagaccccggaggcgtggaggagaggagactgtttgatgtggtacaggggcagtcagtggagggcgagtggtttcggaaaaaaaaaaagaaaaaaagaaaaaaaaagaaaaaaaaaagatttttttcttctcttaatcggaatcgtgatggtgttggattatttcaatggtggggttaatatagcatgttatcctgtctatcttttaaagatttctgtataagactgttgagcagtttttaaaatagtgtaggataatataaaaagcagatagatggcgctatgtttgattcctacaacgaaattatcaccagctttttttcattcttaactctttaaaggattcaaacgcaactcaaatctgtgctggactttaaaaaaacaattcaggaccaaattttttctcagtgtgtgtgtttattccttataggtgtaaatgagaagacgtgtttttttccttcaccgatgctccatcctcgtatttctttttccttgtaaatgtaatcagatgccattttatatgtggacgtatttatactggccaaacatattttttcttttgtccctttttttctttcctttctttttacttcctttatttctttattccttccttttcctttttttcttttttttttctttttttttttttttttttggtagttgttgttacccacgccattttacgtctccttcactgaagggctagagttttaacttttaattttttatatttaaatgtagacttttgacacttttaaaaaacaaaaaaagacaagagagatgaaaacgtttgattattttctcagtgtatttttgtaaaaaatatataaagggggtgttaatcggtgtaaatcgctgtttggatttcctgattttataacagggcggctggttaatatctcacacagtttaaaaaatcagcccctaatttctccatgtttacacttcaatctgcaggcttcttaaagtgacagtatcccttaacctgccaccagtgtccaccctccggcccccgtcttgtaaaaaggggaggagaattagccaaacactgtaagcttttaagaaaaacaaagttttaaacgaaatactgctctgtccagaggctttaaaactggtgcaattacagcaaaaagggattctgtagctttaacttgtaaaccacatcttttttgcactttttttataagcaaaaacgtgccgtttaaaccactggatctatctaaatgccgatttgagttcgcgacactatgtactgcgtttttcattcttgtatttgactatttaatcctttctacttgtcgctaaatataattgttttagtcttatggcatgatgatagcatatgtgttcaggtttatagctgttgtgtttaaaaattgaaaaaagtggaaaacatctttgtacatttaagtctgtattataataagcaaaaagattgtgtgtatgtatgtttaatataacatgacaggcactaggacgtctgcctttttaaggcagttccgttaagggtttttgtttttaaacttttttttgccatccatcctgtgcaatatgccgtgtagaatatttgtcttaaaattcaaggccacaaaaacaatgtttgggggaaaaaaaagaaaaaatcatgccagctaatcatgtcaagttcactgcctgtcagattgttgatatataccttctgtaaataactttttttgagaaggaaataaaatcagctggaactgaaccctaaatcttgacttttgtcgttattatgcccaatgcctaagattggaaag

SEQ ID NO: 119970 - DNA, 1053 bp, Homo sapiens
gtgttagcagaacttatgttgtttgcattactattatttttcttcattttgacacttcattttggtaaacaaaatccaaaaatggcccaaaataaatgtctaatgactgggagtctatataaaatacagtaagttctctcagagtgaaaaccttgagtttgtaataacagagcccgtacatttgtttaacctttatggcatacatcaagtttttatagtggtcataagagtcttctattccttcttttaagtcttacaattagtttttgttcacctctgtgagaaagtagttaaaaattcacataactactgttggtaatataaaaagttaattttgatatatttacaatccttgtttaagtgattgtttgccatggaaagtaagaactttctttctgtggtctggtcaaataaattaactgggaattggaaacatttttatcttgttatgaggaaaaaaggaacattacaacttgcttctttctagctgtataaacataaacaagctacttaaccttcctgggcttctgtttgttaccaataaaatgaaggttaagttaaataacttaaaacatttttgaaatcttttaacattaagattctatgatttgttacttgcttctataaataagatacatcctctcttgtaaagtttgtttttacatcattgaacaatagagttaacagcatcatcaagttttttttttttttttttttttttgtgtgacggagtcttgcccttgttgcccaggctggagtgctgtggcgcgatcttggctcactgcaacctctgcctcccagattcaagcaattctcccacctcagcctcctgagtagctgggattataggtgcctgccaccatgcctggctaatttttgtacttttagtagagaccgggtttccccatgttggccaggctggtctcaactcctgacctcaggtgatctgcctgcctcgtcctcccaaagtgctaggattacaggtgtgagccaccgtgccccgccttggcatgataaacttaatgtgatttaattacaattattttgtttgaa

SEQ ID NO: 119971 - DNA, 1191 bp, Homo sapiens
gtttggcattttaattgttcagaatattgactttgtttcctgagtctatcaagcatgattcagaataaagcatgacttcactctgtaaggatgtgtcacccctctattttagatgtcattttaacacttctgaggggaagaacacgtttttattttaaggtttatttttataacaaatgacccaactgtagtatttttgaacctggtggcattttaatattagctgtttccttcctattgatgcaagaaaagcattcacttaaatctgaagtgaaatctgcagtgtaatttgaaacctgaaatgcttattgattatggtaaagaatggaaaattaatgactttgggaatctatgccacagtcaaattgagcagagaatgttctcctggtagggtgctttggatgctaacttctattagctgctgctcatttctaccactaaatatctaacaacactgttctcagaagtaactgaacttgcagaaatagctcatgaagtcattttctatttaaatagtctgcactttttagaataaatactctttaactaggatgatattaacgtatgtcttcgacagcaactgcattgagaagacagcctttgcaaaacactcttgtcccccatccaagtatgggtcttttatgacagattgttgtgtatctgaggaagctattgtgtcaacaatgagcatcataatgagtctaaaaatctgactcaatggaacaaatgcattttaatggcatgcattttactttaaaaggatgtaccaaaatagagcaagagtctgaaagcagggcattattttataatgaaagactaatatatgggtagttcaaactaaaggaagagtgtgactgggaatgaaaattgacttagggtggataagatcactcccatcagcaaaccacaaatgctgggggagagttagctgaagtggtacaggagcgaaaattaaagtggttaccaacacccaggaatgtcctttactgagatgctgacctaagtgggcagatggcttcctatggcactcttcacaggctggcattgcaatatcacatttactcactttaccaaaatgccatgaagttaatgctggaataacctgtttcttttcatgtttaaattctacttattaagtgtggtgtaatattgaggggaaaggagtaagtttagagactgagataaatttct

SEQ ID NO: 119972 - DNA, 1050 bp, Homo sapiens
cagtgtgggggctgccctgggaggtcatgtctagttccacgtaaagccccagaagtgaccttctgggtctttacccatggaattccagactatactgcagtgagaagaaagacgtcttttgttctttggctaactgtgcattccagactctaatttggaaaggccagatctgtgagtgataacagggtccatttaaggaaaaggcatctttgttgaaaatggaatagggcaagggtgaaaaggtggggcgaggcagatgtcagttttgtgtattgcagtattccattatctaaaacagtgcaggcagatagtaagtgcttaatacctagttgttgaatgaatgcttgatgacgatctttgaggtattatttgctataggagtttcagtacaggagtattttaaggagatttcagagtgcccttggaagctgctggtaaagaggaactctctagcaaggtgaccaggttagacacagaaaaaaatgcttctggtcatggtcaccccttcccaggctaaaagtactcattggcaccaggaacccttccctatattttaaaaaatattatagcccataattttgcacactaaatttggctttgttgacattggcatcaggtaactcaatctcttttcctttattttattttattttattttatttttttttgagacagagtctcactctgtcgcccaggctggagtgcaatggtgcgatctcggctcactgcaacctcctcctaccaggttcaaacaattctcctgcctcaacctcctgagtagctggggttacaggcatgtgccaccatgcctggctaattttgtatttttagtagagacggggtttcaccatgttggtcagcgtggtctcaatctcctgaccttgtgatccgcctgccttggcactctcaaattgctgggattataggtgtgagccactgcacccggcttgaagctgggaggcagaggctgcagtgagctgagatcaatctctttttctaaggcattgcacacctacacatgtgtaacccaggagggtggcacgggaaata

SEQ ID NO: 119973 - DNA, 1359 bp, Homo sapiens
tcttcactactctacagatacctctttctaaaaaaatttattttacagtggtaagaacactttacatgaaatctatctttaacaaatttttaagtggacaatatggtattgttgactatatgtacagtgtcgtctagcagatccctagaacttacttatcttgttgaactgaaactttatacctactgattagtaactcctcattctcccttcctcccagtcctaccattctagtctttgattctatgaatttgaatatttttggatacctcatataagtgcatttatgcaatatttgtctttgcgtaactgggtatttcattgatgttggctcatattgcagaatttccttctttttaaaggctgaataatcctgtatgtgtgtgtgtacaccacattttaaaaatctattgatcttttgatacacatttaagttgtttccatatcttagctattgtgaataattttgcagtgaaaatgggagttctggtatctctttgagaccttgatttcaattcttctggataaatacccaaaagtaaagctgggtatggtggcttatgcctgtgattacagcactttgggaggccaagacaggagtatggcttgagaccagggattttagaccaatctaggtaatgtagtaagaccctccctctacccgcccccccagaaataaaaattagctgagagtggtgatgtgtacctgtagtcctagctactccggaggctaaggcaggaggatcactggagcccaggaaatcaagggatggtgccgctgccctccagctagagtgacagagcaagaacctatcttaaaaagcacaaaaaacaagcagcaaaaaatacccaaaagtggcattactgaatcatatggtagttgtatttttaattttttcaggaacttactgttttctatagtggctgtaccattttgcgttcccaccaacagcgggttccaatttctctacatcctcgccaacacttgtgttttgtatttttgataatagccatcctcacatgtataaggtgatatctcattgtgattttgatttgtgtttccttgatgattagtgatgtcaaactaaaaagcttctgtcctgtaaaggaaacaatcaacagtgttaaaaggcaacccatggaatttggagaaaatatttgcaaaccatatgtctgataagatgtgaatcccaaaaacatataaagaacccttacaatgaaatagcaaaaagactaataacctgattaaaaaatgggctaaggacttgtataggtatgtctctagagaagacatacaggctgggtgtggtagctcacacctgtaatcccagcacattgggaggctgaggcaggcggatc

SEQ ID NO: 119974 - DNA, 1214 bp, Homo sapiens
tttcactcttgttgcccaggctggagtgcaatggcacgatctcggctcactgcaacctctgcctcctgggtttaagtgattctcctgcctcagcctcccaagtagctgggattacaggagcctgccacaatgcccggctaattttttgtatttttagtagagatggggtttcaacatgttggccaggtgggtcttgaactgctgacctcaggtgatccacgcgcctcggcctcccaaagtgctgggattgcaggcgtgagacaccacacctggcatcattcccttttaaaatgtcagctaggtaataatcttttcttttcgaatcaagtgggggtttcactaagaagggtagagtattatttctatgtgaggccaggaggctattgttgggtccaagaacaaatgcttagagataagcttgttggcctctcacggtgttgtgagagggttcagagtagacagacatgtgtcttcccccttttctgtcaccttcctttctgcctacaatgcccgtttttgatatccagctggtgagagtggataaataatttgtatcatagtgtcagcctcctcagaaacccataaagatttctttaaggatttggatccgatatctttctgaattaggccctaaattattatgaatgtgaacctaggttatatgtcttgcctgtggtatgtgtgctgcgatactttgaagcagaatgatttgtggatcattttaccagtcctttctcttttttggtcaaatgcagatggcatggaggaaatggaaagttctaggcatttttgcaaccactactatataactcttatggaccggataaatttagtagacaaagtaagtggttagtttcttggacctcggttttctggtctgtaaaatcaagagatgcatcaaagtttctttctagctttaaattctgtaattctttctttgagaattgtgtagcatgtataatgtttatgggaagtaaagtttaagtcactaaaaagaggcagaaatcaggttatcactcacagggctgttttttcagcctagtctctgccaatcctaaccttgttaaaactacaatgtggcaagagatgatgtcccattattatttctttcactcgagaatgcttcagctatatagatctatcaaagcagttgttacactggtgagtttccccatatccatcagaagaagaaaatccatcacacttttgactac

SEQ ID NO: 119975 - DNA, 1018 bp, Homo sapiens
gtgcttccagctgagttcttaatgctaccaccttcgtcatctgtctggtgccctcaccttgaggatcaaaggatccccaaggattgcctttccccgcatttccttctcggatggacttatttccgttctttttagttttgttcaccctaggatattatgctcaaaactaatttacatgctcagctaatcttaattaaaatgtaaaggcagatcagggcacgatcaaattaagttctgaatatacttggatagttgggcatcagtttaatggattaaacagttcttggaattgcttctctttcttgacagtaagtcttagttttgctgtcatttcttaatagtcccttttacttctactttcaagctgtgactgaacattctcttttaacttacagactcttttgctatctggaaacccatgtccacctctgacttccactcaaaattgctttcctcacagtctgactgcgagagttgtgaaaaattgggatgtgcttctgaggtgggctgtggaatgccatgtaagttgctacttttttttttctgaatgcagtgggtattcatgcgcagtagggatgttggcatatctctgatgtttccttctaaggctggtgaatctgggttgttgctgttggggtttgtaatgtagtccatgtctattagtgaagacacagagggcaaaataagcagtttctttcttctttctttctttcttttttttttttttttgagatggagtttcactcttgttgcccacccaggctagagtgcaatggtgcaatctcggctcaccgagatctcctcagcctcccacgttcaagcgattctcctgcctcctgcctcagcctcccgagtagctggaattacaggcgcacagcaccacacccggctgatttttgtatttttagtagagacgaggtttcaccatgttggccaggctggtctcaaactcctgaccgcaggtgatccgctgcctgcctcagcttcccaaagtggtggaattacaggcgtgagccac

SEQ ID NO: 119976 - DNA, 1049 bp, Homo sapiens
aggacactggaaatctggaatccttacactgtgttttagtaaaggtatgagcctggaactcctgaaggccttaaaaaatagcactgtagtaaatagagcttagttggggtaaacagagcaccccggaaagtagtatattttggtgattcaaaatttatttcacttctctgatctgtgtaagtatttatgtgatctgtaaatacttcccagccataaaaattctaatttcatctctcaagatacatagtgggcacttgtgcaactgtattcagggagctgtctgttggttggagagggagatgaagtagattgaggtgcaaatggcatatttaatgccgaagctgttgctttaattggtgatgttgaaagtcacttgaaaccacccccctagtcctcaagggagttctcaggttacgtgtgggtgtactgtgaatgccttttattttattgactcactaaattcttagattactctttaccatttgatattgacagaccataaaattcttatggaacctgctcagtagtgacttataaagaattatcttgttaataaactcagcatcatttggaattcaagtttaattaaaatggaaaagtaaatgatgatgtaaagatttttcctcatttaaacttgtatccttttattgcctctctgtcttttctctaaattcaaagatagattttatttgacacccatttttgcaaggtgcatttttacagaatctgttgtaggacttcttctcattagcttttaaattattattatttttaaattagagaaggagttgtgagatagagtctgagagaggtaaaaatgaaaaatctatgttatccagggattttagtttttgggatgctgtttaaagataatgattgtttatggactctttaaagatgttttctcataagagttgccaagtaacagattagttatctgagggtggtttgaaagaccttttgaaattgcctgggtgacaatactaccttatggtacttataaagctcctttgaagttggccttttatattagaaaaccagaaaatatt

SEQ ID NO: 119977 - DNA, 1003 bp, Homo sapiens
cttgaggggagatgtatgcttacaaaaaccacctccacctggctttatttttggcgcgatcacacaaacatgtgttttaattttaaagattatatttattgtcacatttagattttttttaaaaaaacactaagaaatctgagtgttgtgtgtgtgtgtgtgtggttcaggatgcactggaggtgtgtgctgccacaacaaatttcaggccacgtgttctgcagattccaattagcaaggccctcctgctgtggtgtgggagaaaagtttggagtggggttagggctggctgagtgtaggaggctttttaatgcaatctttgcagaactccctcattagcacctcgaggtcagtgggaactggtatacagagcacagttggcattttctgctatgcatggtgtgtgtcagccattttatttatccatgcttattttctccgtttcataaaattaattgtacttaatgggggaggggttgataatgctgaattattttaagcctggagggagctcagcagctgtgtcctagatcagaccaccgatctatctaataggttgtcttgctaccggatccactggacgaatgtgtttcgccaattagacgaatccctatatggagagaaaaatgaccttgagccccagaaagccagacagttgcttcgtgccatgtcttcacctactgaagctgcttcaccgccttggcctgataggagtgtagtatatatctaacctctagacaattaaatttctcctttaaaaaaatagccactcttatgtgaaatagtcaaatctttcatgacttgccaagatacttgcttttggaatcaggtgctttcgggtgtagcctctaaaaattttaaaggagagcaaatcttccaagcttccttcttgtatcaaggcataacctgctgaggtccaggctgcagtgatccatgatcatgccactgccctccagcctgggtgacaggctgagaccctgtcgcaaaaaaaaaaaaaaaaaaa

SEQ ID NO: 119978 - DNA, 1058 bp, Homo sapiens
tccatgggtgaatcagaaaggaccgtggtcagttatgtgggagtgcagaaagccagccagccagcacgattcgccttggaggaatgacttctcatgctgccacctcctgcttctctgctgggggtgtggaagaaacagtatgggatgtgggcggttttctgctgcagtttattgaacaaacagctgccctcctccatttctctccctcccttacccccatcccgccacatccttcttcctggggcagggtataaccatgctgtaaactttggtagtgggagaatcttgccaatactttctgaaacagcaacttttttttttttttttggcttggaactgttagttcaaagctggaaacagagtaaataaaatttgatctagtcattctagaaatgatttgtatcagtccagaaaatggccagagtccagtagtttgaatctaaaagagctgaactaagataaggtaaggagccagttttttaacctggcaaccacatgccccaacttgaaagcctgtttgctgctcttcttttgttatcataacctcttgaacagaatacgccatttgaaacaacagtaaacgcttctcagtggataagtttatgacctagtttttgaccaagagcacttacgggattgaacggcgcggggaagagcaaaggaccttggacaccattcgccaggaagttctgtgcaaaccgggagctcggggctcattagaagccggagacattaagcagcagctgttttatggtgtgaacttttgcacagaggatttcaagaggctcattctcctcggaagtctgtttgcaaagtggttctttcttggctgttgcttcatccttcttcagaggcctattttcactccgagtgtgagcatttcatgccaaacccagccatgaccttgtggctgctgagctgcccgcatggcctgaccccacaggtcttgggatggtgtgcgcagcagagctaaaccaggaggggtgtctatctcagctctgctggctctggggctggtcgcaccctgcagacttggagttgaggaccagaaacgcagg

SEQ ID NO: 119979 - DNA, 1087 bp, Homo sapiens
ggttttctttaaacaaaaaaaaaagccagaagtttcccacgtgtgtgtgtgtgtgtgtgtgtgtgtgtgtgtgtgtgtgtgtgtgtgtatttgcagggagtttgattccgtcttctcattagtgccgcattaatacatttttctgcctcacatttgtttaagcttcacctgaaaaaacaaagtaatgtcgtacttaaaatagagtataactgtacctcatgtagtaaacgtaatttataaagaaccgaactagatgaattttgatggggaaaagggaatgttgtttccaatgaaggtaaccaaagatgagagctttgttatcccaagcacagaggctggacctggataaatcttgaaagcaagcaactaggcacaaaccaggtgcctatcgaaagaggtccctttaccaccattagtgttatcagggcttttatgtcaaacttctgtctgtactgtgctgggtgaatttttaactgaacaggctttacaattggagcaatggggctaaaaccacttcagaattccagaggccttactcagccccacctctcagttggctctttccatgcactcatctctctgcggggctttctcgaggtgtggtcctgggaccaccggcatccgatcacttgtggcacttgttaaagctgctaattcctggtttcgacggtagacctgctgaatcagaaactgttggggaagagtcttgaaatcttcatttttaacaagcacctatcaggtgattcttaggcacattaaaatttgagagcctgtgatatattcccagattagtactgtcacatctcttaaggtggcactttattttacttttattttttaacttttatttttatttatttatttatttttttgagaccgatcatactctgtctccaaggctggagtgcagtggcgcgatcttggctcactgtatcctgaggcgattctcctgcctcagctccttgagtagctcgaactacaggcaggcgccaccatgcctggctaatttttgtatatttagagagacagggtttcgccatattggccaagcttgtctcaaactactgacctcaggtgatctgcctgc

SEQ ID NO: 119980 - DNA, 1648 bp, Homo sapiens
tgatattgttctaatatgcatatttccatatgcatacttttatttttttcttttcttttcttttctttttttgagatggaaccttgctctgttgcccagactggaatgcagtggtgtaatctcggctcactgcaatctccgactcttaggttcaagtttttctcctgcctcagcctcctgagtagctgggattacaggtgtgcaccaccatgcccagctaatttttgtatttttagtagagacggggtttcaccatgttggccaggttggtcgcgaactcttaacctcaagtgatcagcccgcctcaacctttcaaagtgctgagattacaagcgtgagccaccacgcctggccatactttcctttcctaaattttccttcatgaatttcagaggtatacaggattcttctgcattcttcacaagagattacatgaaaagaaaacataacattggattgatctgaatgaaaaaacaaaagcctgagatgaaaaagagtaaaaaagacactatgcaagatagcttacataccaactccttggtattacaggtttagcatcccaaagtggaaaatctaaaatgtaaaatgcttccaaaatccaaaactttttgagccctgacgtgatgctcaaaggaaatgctcatgggagcgttggtttttgtttgtttgtttgtttgtttttttgagatggaattttactcttatcgcccaggctgggttgcaatggcatgatcttggctcactgcaacctctgtctcctgggttcaagtgattctcctgcctcagcctcctgagtagctgagattacaggttcccgccaccacgcctggctaaatttttttgtttttttagtagatatggggttttgccatgttggccaggctggtctcgacctccggacctcaggtgatccacccgcctcggcctcccaaagtggtgggaggccactgcaccctgcctcgtgggagcattttggatttcaaattttctgacttgggatcctcatctagtaaatatataatgcaaatatccccaaatctgaaaaaatccaaaatctgaaacacttctagtcccaagcatttcagataagggatactcaacctgtgttgaagaaaaagagaatccataataaagatggcaaaggaagcagatcctatgatacctaaacagagacaatgagagatttctgtactttttctaaataatagaatcttagccctgattcacgtctactgggtccaatcactaggcagttagtctccaaatagccttgtgatttatgatatagtctaagtggaatcaaaattggagcctggattctccatgccatttctgacttttctgagtgtgggtgtgttgtaaatatgtaggttggatgggagttgaagatcctaagaaatgtaaacaacagccctgtctttgaagaactggaggaaggctcagggttatgaggatggaacatggagtaaggggtgtgattataatgagtgaaagacatctctttgatggatggtattccacccagtgggtctcacacctggccatacctcatcacacctttgtttgcacatacctgacatcattggcaaatctaggtctctggatgcttcccaacactggcaccctgagctgaagctaattctgtcac

SEQ ID NO: 119981 - DNA, 1626 bp, Homo sapiens
ataagggacaaaagaaactctttttttttttcctcccctcttgtgcctttttaaaataagctatctaacaaagacacaattttttccctccctctcctaagccccagatgacctaaggatttagaggtctgaggtcagatttctttcttctttgcttcacagacaactgtctcttctttatattgtgatctttctgatttgtatagggactcggcaggtagaagaatgtgtgtgtgtgggttgtgtgtaaaatatgtacgctttcacatgcggcgggggcatctttatgctttggctcagatggcgcatatgaaagaaattaggtgattctaattatatagcccccaaatagtgaggatcccaattcttctccttccctctttgaatctatttaatagtttacctttgaaccaagttaattaggaaaagggacaggctacagtcatttcatttggctgtttttggcatccaggaaagtgtggggtggggagctcatcagagggaaaccaagggaagctcgtagacattgaacttgctctgatcagattattaattttcttctccttgtacgttgttaaatctgtagaaaaggaacatcagctcaagatctgtcgctctggctccgggccagcatgccaaattctgtcatctttgcagcatggccaagcatctttattacatgttataattctggtttttgagcttgatccagtgatcctgctacagcatcagatggtttgggatgtggaaaaagaagagggctatattcatctgtagatgaggtttggggagaattgtaagagccagaaaggtggagtggttgtctagggcagggacttttcatggatgctacagacacctcctttgtgctgcctcgaatttgaaatgcattattaatttctgttcaatacagatcgttgatgtcaaaccaaaaataaatgtgggccctactcctgctctggccattacatctctcagcagcccagcaattagcaccaaccttgagaacagagtgccatcattgatgtgacagtttcgtccctattgtcctgttcctgggtgcatgggtgacccttgacctccattggtctcggagtgggaaactgaacttatgaactgttcgggctgcgctggcctcagattaacctgggcaaggttaactttctcactctcttcttcaaaagtgctttagagggtgaggaagtactaggagtaaataataattttaaaaaatggttgggaggggaaaaacaattgcatcaatttcctgagtacagacacccctaacctgccttttgcaaataatctcccttttgtctgctcttaggggttttgcagatgaagccttggctttggcttgtcaatgaggacttttcagaagctccagaatgcctttagcggctttgcaggaagcggtgacacaaagttccagccagtctccccctccttccacttattgtttcagaattgtcagaaaacaggctgggatgaggaggaagagctactgtgagggctttttttttgttgttagtttggctgctgaatgaaagcaagcactttatttagaagtgagtagggagggaaatgcagcttagggttgacacccttctggtgcttatccataaa

SEQ ID NO: 119982 - DNA, 1037 bp, Homo sapiens
tcaaggggctttggtgcctaagagaccaagctatggtggggatttgagtctttagacaagcagcccaggaagagattgttttgagagcagttcggcttcttggtgctcctgaacgtcttgtaggtatatatgcttcatgaggcaaaattgtgactctggacttactaaaatacgttccgtagtaagaattttttaaaaaatgcagttttctatgactcaactttagaggttttcattaaatattagagctggaaaggaccaatactggtcacactctaaagaagttttttcatgaattgatacatatctaatttgttgatacctcttaaagtgagagaaggcaaagaaagctcctgagattgtgcttgtcttgatcaatacaagcacaatgagttgctgagatgaatgagtttggcaattggctataatctgagaatgttccgaacttagtagattggggatgtgtttgtgttcccaggttaattgcttatttagctggcattcatttggggctgctagtccatttgttaattctgaaagttgttggacatttgtttaataaaaacaaatatatttggagaaatccagcatcccaagtagccacattagtaggaattaagtaggtacaaagtaatggtttaagaaatgatagtcttttgtatggcaaggtaaaagcaaaatgtcttttagaaggaaaatttcaaattgattaatttttaaagtctgttatcctgtttaatacttgtgtatctctgagaatataaatgaggtaaagaggtaattaagacatttaatatttgtatcacaactgtggaagatatgaaattgttattttccaattgatcattacgtaagagagatttgagaacattttgattagaatcacttagacttttctgtccctatatgaagcgtaccagattgaggcattttcctagtaattacaggaagtcttatttaattaaataaaactgtttctcatggtgtttctggccttcagtaactgaaggtttttattttgattatgtgttttttgt

SEQ ID NO: 119983 - DNA, 1042 bp, Homo sapiens
atttcgctgcttgtcttaaaagtaatttttctggttttatgtaatgtgtgtattagaaatgggaatattggaatacttacttcattgtattgtcaagcattattggtagccctaatttatatatccattgtgctgcagtttcagttgcagaactgccatctgcagggattattatagcacttgaggggatggaattactgcactctgttttggatacttttttcactaagaagtatgggcaccatgagatggtacttacccatctgtctgttgaagcatttgtatgtatattacctgagcacttaggcacaccaccgaggggggatttcaaatggaagggaaaaaggaaaaattgaaaataaaataacacgatggaaataacagaagcctctttgcaaagaatacctaaactattcttaaaagcagacttaacagccagtacaaaaccattcactattgtctttaagagacgaagctcaatccacaaagttgaaagtgaagtgtgaatctggaagttttccaggaaagtcaagcattacagacttctagggctcaaattcaagggagaaaaaaaagtccattttacaaagtaacttcttacattgattgtgagctgtcaatgtttgatgggtagatcctgaaacattaactgattaaattcttcaatgctatgcggtcatattggtggcctccgctgttctgagcttctaaatttgtgtatcgacacatgggaattcactaaatgtgcagcagagagcagagtggaacattgtggcatcagcttgaaatttcctaaagagaaccagtggaatgatgttgaaatcaattgaaatattatttattgattgcctatgttttatagcacctaataaattgtccaatcccttaaaaacactccatctgcctaattctccatttccagttgcagcagatacaaggatacaaagatactctgtactggtagagagggatgatttcaggttttcttcacagcaccgggctccctgacagctattcttcgtgcttgtgcacactcacagtt

SEQ ID NO: 119984 - DNA, 1180 bp, Homo sapiens
gcgaccatctgggcttaggatcacctaggatcacatttggctgccgtggtattgaggagaaaacacaggttgcaaggagagaggacgggctgttcctggccccatggcctcaactcttgggatcctccaggatttctgtaatcacggtggggaagcacgcacaaaagtgctctgaagtggttgaagtgagggaggggttcgccctaggtaccgatgcttggattatgaagaactgggtttgggttctagctcttccagctcctagccctgtgccctcaggcaggtcagctgccctgagcctcagtttctctgatgggcagtcttgcccctaacatttgtggtgcccggggctagaatgtgaatgcaggaccacatactctgtatgtaaatatttaaaagttacaaatcaaacaaaaaagtgtcaaaacatgtttggaaatttttctgttctgacaaatacacctttataaccatcttgaagggcaggtttgaattttgagttttcagattcttagccaacttccatgcctgaccaggtagtgtgggtgggagcaggaatctagtcgtcatgcttgtggacagcgtggtctgtatgtctgctggacccacccttcaccctgtgggcctcgggattctatattgaggattgtctatcttgggggagtgtgtggagggaacatctgcacaggccttataaatgagcatgggctgttgggataaggaactctggggcccgagcacctggcacatgatccagaacaggatttttgggttccgatgggcaggtgactttagtcctcactctgtgggcaggggcattacagcataggggtcccttttgtcagggatttatgatggcatcacacgcaggattcagagagcattaattgaaaaatacatatgattggctgggcgtggaggcttatgcctgtaatcccagcactttgggaggctgaggtgggtggatcacctgaggtcgggagttcgagaccagtctgaccaacatggagaaaccctttctctactaaaaatacaaaattagccgggcgtggtggcacatgcctgtaatcccagctactagggaggctgaggcaggagaattgcttgaacctgggaggcggaggttgcagcgagccgagattgtgccactgcactccagcctggacaataagagcgaaac

SEQ ID NO: 119985 - DNA, 1042 bp, Homo sapiens
cttctgatgtacagtaagaattgagagtgactaatttgctatcagtgattcttaaatggagagaacatgagtcccagagaatttaggaaacctctgggatttttccagagtaaactgtgtatttgcacaaattttgaaactgtaacttaaagatgtgcatgccctcctataattaataaatcttgggttaagagtctctgatccaggaatcccttccaggattctgtttttatgaacttctactaatcaaatttattatgtcaagtaggataggattataatgaccactatggccactgatgtgtctggtagaaaattccattgagagccagagacacagacatttatgttgaaactaggaaataatggaaataggggatttttgtgttttttttttggctttggccttgtttactgagatttgacctttccgataggtttcttgacatctttggaatgcaaaattggggatactaatatttgccaccaggtaatatttatttaatgatgtgagaacccagggtgttagttgactgtaactgtgattattaacaggaaaatgcgatcagaaataatggcacctttgttatcactgtgattttttttttccaatggcactgaaggaaaagtgatatttgttatcaaatcaggcagggaatttacaaatgataacgagttagagaggctgcattctttctagtatctcactctacttgtcacaagtatctttctcttatggaaagataaaaacacttgatttgggccataaattcactctgtcttctatcaccagggccctaggaatccttgaacaatcttgacctcttcctattcttctttgattgaaaggatgcttattatgtggtgatagctttaggagggcaaaggaaaaacagcaaatatatcagtacaatttcctaagaaaggaagcttctgtggccttttggagggcagaaatgcatactttttattgtgatggtgttgtggtggtggtgatgatgatggtgatggtgagggtggcggtgatggaggtgatggcagt

SEQ ID NO: 119986 - DNA, 1054 bp, Homo sapiens
gatgatggtgtggtggtggtggtgatgatgaatggtgatagtgatgatggtgatggtgattttcctccctccacccaacaacttacacaagagctttgtggatagacctaagtgttaattggtttggctaagagtaagcattaaaagcaaacactcccaattccccaatttttcaatgttagattctaatggatttcttctgtttgcagttgattatccttgccttgattacaagtcaatgttctagcagagtgaagtcattactggccttaattttcacagcctggcacggttggagactgcagtgatagaaatggagtggctaaaaagaatttaactttttttattttgaaagtgctgtgggaccctctcagctatagaatacttgacagaccagatatttccgtgtatatacacagcctagcttttgaaatagcagaattggatatacaaattactatctcactatccatagtggaaagtgttctttctgtaggttgggagcaagtctggcgattggtttaggggcgggtccagtgggctgggtcctgcttgtcttcagtcccaagcttcctgttgtactgtatttgacctgaaactagctgctgatatgacatcatcttgggtgttgctggcacattttttttttcttttctcagtagatgtacacttaattatttttccttttcaaaacataatataggatgggtgcacagtggctcatgcctgtaatcctagcactttgggaggccacctctggaaaattgcttgagcccaggagtttgagaccagcctgggcaatatggtcaaaccctgcctctacaaaaataaaaaataataaaaatagccagatgtggtggcacatacctatagtctcagctactaggaggctgaggtggaaggatctcttgagcctgctgtgagccgtgattatgccactgcagtccagcgtgggccacagagcaagaccctgtctcaaaaaatccgccccccccaaaaccacacaaaggagttttggcttgctttgcataccctataggtatgtctggctctt

SEQ ID NO: 119987 - DNA, 1423 bp, Homo sapiens
gagaaagagccttactctgttgcccaggctggagtgcagtggtgtgatctcaggtcactgcaacctccatctcctgagttcaagcaattctccctgcctcagcctcttgagtagctggaattagaagcacttgccaccatgcctggctaatttttgtatttttagcagagacagggtttcgccatgttggccaggctggtctcgaactcctgacctcaggtgatgcacccgcctcggcctcccaaagtgctggaattacaggcatgagccaccgcgcccggcctcgtacttttcattttagatgcttggtagcattggtttttctggattctggcagtggtcaaatatttttctagagccctggctaggtgcctgtcataccttattttgtctgctgagcagctaaaatttggcggaatcctcctgtactttcccgctcttcacctcaatcctcctgccaggagttttacacacttgggtgtccaactctaatccaaagcaaggaaactatttgcttggatcttgtaattcctgccgtctttgttagttctaactcttctgttgccttctcacagatatcaaaaagcaatagaatttgtccttgccatatttactttttaactaatgtactgtattttacctttgcaccacccactctaagaagacttggtagcctatttgtggcatgcagatatattcacagaaaaacataggggaaggaagaggatgtgagtaggaaacaggagagaattgcatgtggttttgatgagaacttcacctgagaagagcctgctatctttgggctctgtttcatcagttgttggaatccttttcaggccggagcgggcaggaggcaggcctgtttctcatcctcccttccagaagtgaagttaaacgttgatggcagagcattgcatgagagccattgcatggctttcatgatgatcgctttagaacagttgtggacaaactttctgaaataagggaagctatgcatagttaaactttaagtcaatttccaatcagtgctccttgccagtgaagcatttcttataagatgacaagaatggtaagaatatgttttctatgtttgatttcttttatccccaggaacttcaacaactcttataaatcactgattcctatacctttaccttcagtctctttggtctcctaaaatccatgttgctgtttccaaaatttaatactgctttaagtctccatctagctgcctaggaggtatatcacattaaacatgaatgtgttcagagagaatctgttatttttactcaactttttaatcttgtcttctctacctttaaactgctgtctaagtgggaggatgggatccacccttgactcttcctcacagctaattggatcacagagtcttttttattgtatctaaatatccctagaattt

SEQ ID NO: 119988 - DNA, 1002 bp, Homo sapiens
tcagcattttattactgtcctcaggaagtaggaataggaaaaaagaagtaggttggagcaaggaaagttaattatgtgaggttatttgacaggaaattactaaatacaaacagacagaagaaacacattttaaagcaggataggaaatctcaagttactccactctgtgcattcaaaacccccaaagcaaattctgaaaatagcagtttaaacaaaagctatcttatctgataaaagtatttcaaacacaaagggaaatttatatattgggcaggcaatcttaaaataaaccgattttgttgatagcactgcaaatgtaattgtgggaaacccccttctgatgtctgaatttatcttgtagatgttttgaatttggcatttcagttctataaaggtatatgtgtgtgtgtatttcaccttggaaaattatatatatgtgaaataaaatgaaaagtttattatgtttgtgttttttttcagtattacaaaattttgggggagttaggtattattaatagttccagaagactgttacatcagtacagccagagaactgaggtgttctctaaaatctttatttctggaggtcatatattttaaatgttttaattgatgtatttgattaacataatttttttttattgcttttcagccattggcaaaattcgtagaatctttgtaaattatccaaacatatttggtgttgttttaaagactaagtgattaaggagtaggaccttttcctaccctgaatgatttctggttctttaatggcctatgctaaatagtcagtgttgcagacatagaaaggagggtcagaagtggctgttcagtaatctgacccttttaattaaggttgtcatcctaagaaaaaagacccaaataacaaaaaacaccaacaaaatacatacatatatgcataaaggggcacacacacacacacacccatatttatatgtagcttttccaaagaaaaaaggaagaaactttattttctagatc

SEQ ID NO: 119989 - DNA, 1060 bp, Homo sapiens
aagaagtgatattatagtagtcatgtcccagaaaaccaagtcagatggagtggttgttgtctgatgttttttttaaagcttgaattacaaacttaacatagtaaaatgagactaaggaggtgagacctccaatgtccagaccattgcaatgaatctcttttcttgctaaaaacagcatgtagtaaaacctggacttgctattcaaacagttttatctcccgaagtttaagtagataacccagaaagtagagcacaaagtttaattttaacaaagaaaatttagaactggttgggaagtggcaggaacctgggcaaaagtagcattatttcaaaaatcagaatgaaaggaaagaagagtaggcataggatgatgtagacctcagatgccgaatgactaagagattttctattgagtaccatttctcatcgggtgtagctttgccttcagtgctcttttgagaagtcttttgagaccacgtccaaactgcataggtaaagttagtttctatgggtgtttgaataaaaaaatggctttatgtgagctaattctgttctaagccattagaagtgagattcaacctaaagaacctaaagaatacatttgagggccaggtgcggtgggtcacgcctgtaatccctgcactttgagaggccgagatgggtggatcacctgaggtcaggagttcgagaccagcctggccaacatgataaaaccccgctctactaaaaatacaaaaaattagccggatgtggtggcaggcgcctgtaatcccagctacttgggaggctgaggcaggagaattgcttgaacctgggaggcggaggttgcagggcgccgagatcgtgccactgcactccagcctgggcgacagagcgagactccgtctcaaaaaaaaaaaaaaaaaaaaaaaaatatatatatatatatatatatatatatatgaaatatattgagctttttagctgaaatgttgaggtattttttttttctttatcacaagccagagctttcccatccgatgcttatgtcattcatttttttttgatactgggtctcact

SEQ ID NO: 119990 - DNA, 1049 bp, Homo sapiens
aagattattcatatgccacacaatgtatcattttcacatgtagaattcagtggtttttagtatattcacaaaattgcatgactcttcatgatctaaaattccatgatctaatttcagaattttgtcatcacctcagtgagaaaccccatacccattagtaggtgctccccattttcctcttcttcttagtccctggaaaccactaatctactttctgtatctaaggatttgcctgttttgggcattttatgtaaatggaatcatacaatttgtaaccttttgtatctgacttttttcacttagtataaattttcaaggtttgtccatgttcatacatgtggtagcatgaattgccatttcattctcttttatgactgaataatactccattttggaatgcagcatattttgttcattgattcatcagttgagagacatttgaattgtttctactttttgactgtttagaataatgctgctatgaacattcatgtccaagtttttgtgtggatgtatgttttcggtcctcttggttatatatttaggagtgacatttctgggtcatagggtaattctatgcctaacattctgaggaactgccaaactgtcttccaaagtggctgtgcccttttaccttctcaccagcaatgtacgaggtttccaattcctctatatccttcccattactgattattgtcagtcttttaaaatatagccatcctagtggatgcaaagtggttacttatttcctagtctctcttggacatcacttcctttggggaattgttctgaacaccctgaaatcctttctcttcaggctgtgttaaatgtccctgtattagtccattttcacactgttgataaagacatacctgagactgggtaatttataaagaaaaagaggtttgatggactcacagttccatatggctggggaggcctcacaatcatggtggaaggcgaaaggcacttcttacatggcggtgtcaagagagaatgagagaaccaaacaaaaggggtttccctgtataaaaaaccatcaggtcttc

SEQ ID NO: 119991 - DNA, 1048 bp, Homo sapiens
tcagaagtgtgtagtcctgtttaaatacttaaaatttgctatgttctgtattggccaagaaatgttttctggtaagagcttctggtaggaagaggacctaaagctgccctcacaagacgatatttggttcatttgaaatagaaagttttgtttgcttttaatttttatttactgaactgaaaattggaaacagcccattgacttttctatcttatacagcatctcctcctacacatatttagtttcctgctcccttgaaatctgggcgacctactcctgttttcaagttttttctattttattattttggtccttagcatttctgccttttttgtatcttccaactttccatttcaaaagagaaggatcatatttttatatatttacatcccgtttgaatgtgtttaaggaacgcttagaaatgttcctttatgttttaaaatatcccttctgctaaagcaagtagcatatcatttcctgctttagttgcggcctcagtctgacaggccagggctaagtaagggtgaaaagttcaccgtccggaagtgctgttgaggtcagaatcacgtgatgaggagccgacccagactcccggtaattccctgagaatgtgaatctttgggagaaggagcacaagagagagctttttctcaagtcggctgcctgtgctcgggctcttgcttacaattcttagttttatggcactattcttcttcttcttcaaggaactcactgtaatgcctttattattgtctacatcagtgttttaaaaagtaaagttgtaacgcattgctaggttatgcaatcaattgtgtggacagagatcagccttaaaaaataaaaaaggaaacaggaaatgtaaacagagtgcattatatggaataagaatatgtgtattttgtaaaactcttgtttgatacatagatccgtacacatagacacacacaatctcataggtctctattgatttgcgtatgggtacacgctggcaggcgtacattctccttcatcctcattcctagtcatttgaaaactcagtcattcaaaa

SEQ ID NO: 119992 - DNA, 1044 bp, Homo sapiens
agcccattaaatacaatttttagtttgcctggttaatatgggcatgaaaaaaataatataatttaaaataatatatccttaaggttttattctaaacaataatactaataaaaattgctatttagtgaagagctattgtattctatgctgtatatcagacattttacatttattaccttatgtagtacaattactctgcaagggtaagggtttgcacattttggatatgagaaaactgaggctcagacagctttagtacagtgcttaataagtgccaaactggaatttgaatttagatcacctgactgcagagcctcagattttccattatagcacagtgtagctttaaatgatgttttccatttgactttaaaatttttaacttatttagcattatgataaccatgctgagtgacctttaacttgggccatgtcagtgggaattgcttaaataaagctgtgttttattaataagtagagtgatgattgaattggactgctttaaaaatttctaaattaaaaaaaattaccaatgaaaaaagagctgcttttatcaattggtggtcttaagtggagattttgctttatttatctgtttttttacaaatccattaatggtccttttctttaacaccccatcaatcaactcagactctcccattgataagcatacctcactgaaagaaatcaattctcctttgtcattttgacaggaattaactaaaaaggtgggttaatccagaagcaacaggaaaatacctgcaggctacgactaaaacctaattttgtaaaatcaaaattgtcataatatttcacagttggccaggcacggtggctcatgcctgtaatcccagcactttgagaggctgaggcaggtggatccgttgaggtcaggagctcgagatgagcctggccaacatggcgaaaccctgtctccatgaaaaatacaaaaattagccaggcgtggtggtgtgcacctgtaatcccagccactcggaaagctgaggcagaagaatcgcttgagcctgggaggtggaggttgca

SEQ ID NO: 119993 - DNA, 1019 bp, Homo sapiens
agaggtgattacattaaaatgaggccattggggtaagccctcatctaatcatatgaggatgaagaaaagacatcagggatgcttgtgcccaggaggaccaccatgtcaagaggcagtaagagggtggccgtctacagggcaaggagaaagacttcaggagaaactcaccctgctggcactgtgatcttggacttccagcctccagagctgtgggacaatttctgttgtttaagtcctgcagtccgtggtcttttgttacggcagccttagtagactaatacattattcatattttaaaaagttctttatctttacacctgtcataaacatttttgtatctattcactataagtcaattgcaaatgaataataaatggataatgtcatactgagcctgaaagttgcccttttgtgtcagagcgtgctaatgacatttttcaggactccagttttaatgtttaaactatgggagtagctatgtgtaaatatttaaaatgtgacagatagtactatcacttgcagtgattttatacctcctagttgggaggttaaatgagaaaaacctcggtaaagtccttataatgtgtgcctggcataatacttgttagctgtgattattactagtactgtgtttcttatgcttatttcattgcagtttcattttcttaagaggtataggctctaaaatgaatctcatatagtagaccttgggaaaaaggtggcgagttaaatttgtagagaatatagctgtttccactggcctgaggttcaaacagtttagagtgagattgtgagcaccctcttagggacagacacatctctgttctgcctccagctccaacacagttctctgccttttgggattgggcagcagcagcaacagataatgagagacgaatttgtcattccagagctacttttgcctttaggatcacgtctgtgctttttccaggagaaggtagaaaagaaagagaagggagggtttggtggttttgagctatggagacctaactttatgg

SEQ ID NO: 119994 - DNA, 1061 bp, Homo sapiens
tttgtacaaattttgaaaacataatacaataatttaagtcaatagtgggagtaaacttttatagaccacttaggtttaagaaatgatggtcgggtgtgtagcagagcctgccaagcctgggtgagtgctgcaaggagggatcccgggaagggatgggaaaggtggaggaggtcaggatgaaagcgatggatgcttgagaatgaaaaggatggtcattttataggtggctggaatgaataaaggggagctagaaaaggatttcagaaagccctcccaaaatttaaccaacttcacaatttggcctgtagctggctatcttgttaggttattaaataattgaaggtaaacctgacatctctcttctggattacttaaaaaaatgcatttctaaagcaattcattttgaaaattggggtcagtgacctctacaaatcaaggtaaaatggtgccagaccctttttatttagccattggtcagtctgtcgcttgcacaaaaagcaaatggagtgaacaacagttagacggggaggtggaggggggacaggcaggtagtcagagagccgaccctcctgcctcatatattttggtggcgcctcatgctaatgctgagtttgtgtgcttaaatggtactgagataaaactattttttgtatcctttatagttcttcattcacaaatcctacttttagatggattcaaagatgaaccagttttacatgaaattcagggaaagggagttgtatcccctagtttcttctgcggttgacagagcgggaaaggaacttgagctaaatgaccttaaaatctgttaagagattttagtttaatggaagtataaccctccctaaatctgaataaaaatgccagaatcttttcaaagtgaacataggttggaaagttaacatattggtgattatctcaatgaaatattactacatagaaataatgacagcatgaactaaagcatgggatgttatgatttctgggcccttgggcacgttagtagacagttgtcagtcttcactgaacattggtaatagttgcttgtaaactctgacctt

SEQ ID NO: 119995 - DNA, 1517 bp, Homo sapiens
acaggtcattagaccagaccagaagcgagctgtgatgataacacaggctgtgggcaggcaggcaccatgaggcacagtgagagcaccaagactgtgggctttgggtttgaatcctggctccactactaatcagccctgtgcaagtgactcagcctctcttaacctcatttattttctgtaaaaatgggaattgtagatttatatttatggagattattaagataatctgtgtaaaatacttagtccacagtacctgacaaatattaaattctgaggaaatattaattgctattattactacttcagctctgaaaatgctgttttcttgacagtaaatggctgttttgtttatttctgccagtagcaaagtaatatattgattgtttaatgccttcttggcctctttgaaaatgtttaaaattatgtttaccttttctttatatcattgcaggttttgtgtgtgtgtgtgtgtgtgtgtgtatgtgtgtgtgtgtgtgtgtgagagtgagtgcgttttgggaggccagtaattaccctgtgcagatggagctgcccaaacagtctttcccatggcaactgaaaaaataaaaaataaaagcaaaaactttgaggttacataattgccttcaatagactaggaggagtgtagagatcatgactttttttgtgggttttggtgttcttttggtgtaaggtgttgggtgaaggtacagaggtcctactgagtaactgaacaggatgctgttgcttgctttgaagtgaataaattggtcaaaagtacaagtgggaggggaagttgaggtttaatgaaggagggccattattaatgtttccatggttttagcagtttaaaagttgggagtttaaataatgttgttagttgtggggaaaacagcccacagacattcagacatagttgaagtttagtctttcagtcttcattttaatctgaaggtagggagccgagccttctgaatcacacagcaaagggattgcttcgtaattttaacagtctgaattattgcatgctcataatggcataagatttgcatagctccaccactctcatcaaatcccaattatctgaagattgtttctcttgggaggcaaaagaatattataatttttgggtttcttttaatcttccaaaatgatttatattcatccccttaaaacctgggtgtaaccaaaggcactagggcccaaagaacaggtgttgtctttccagaacatccataaaaggatccctgtatacattctctttgcacctcttgtgtaggggttaacatggaaggcttcattatttgactggaaagtaggtttgactttcccactggagatttgatactcttagctccagaaccaagaaagagaagactattagactttccttgcccaccaccccctccccaaccctgccaaatgtatgctaagcctatatttgttttatttccaaccaatttgttggaaataaattggttatttatttccttattggtttttctctccagagaccc

SEQ ID NO: 119996 - DNA, 1721 bp, Homo sapiens
tacttaaaaatgcttccagccaggcatggtggctcatgcctgtaatcccagcactgaggcaggaggatggcttgagcccaggagtttgagaccaggctgaccaccatggtaaaaccctgtctctacaaaaaatacagaaattagccaggcatggtggcatgtacctgtagtctcagctactcaggaggctgaggtgagagaattgcttgagcccagggaggttgaggctgcagtgagctgtgctcaaaacaaaacaaaacaaaacaaaacagctcccgttctaccactcctaaaatccatatcatatatcaaaaaaggaagtttgatacctgaaatgactcttggcagggcttctcaacctctgttccctggtatttggggctgtatcattcagtgttgtggggagctgtccagtgcattgcagaatatatagtagcacccctggcctctacccagtagattccagtagcatgattcctctccccagctgtggcaaccagaaatgttctgtgggggaccaatttgcccccagttgaaaaccattgttttggggattgattcaacaaaggaaaagaaggtaaagaaaatggtaaagatgtcacgtatggagctttgtttttgttgtttgttaattttgtcatattaccctgtgaatttccaaagaaagtaaatcgtaagacaatgaggtctgccactagaactcccatttagccaccagttctctctccattgttgactggaatttagtttggattaatacaacaattgcaactcacaacaagtattgactttgatgctgtcattatcaactgaggaactccaggttttatattaaacacgcagaactttctatgaagtggccattttgatcactgggtgttttcacagggctggcttattgggggaaaaagagggagtggttggagaaaaagactcaaataaggctaatgcaagactttaataactgaatgtatgagttgaatgaagaaacacgcctactctacactgtaattcagcagttttatgaatgggaggtcagatacatgatttaaatacaggtttcattgaatgcagtatcttttacggtactaaaaaaggtctggaatcctgcattcttcctgtataggattgtaattcattctctctgctctcactctccttccaaatttacttctacctctgtcatagaatgtttgagctgccagacaagtaggatcatgtcactgctgtgacttaacattaaatgtcctggtgtctttatttcagatgttctgtttttcctctattttctgctcacatgaacatacacacttgccaggcacattctggcttttcttatttctctttctgattttgcctccttcctgcccctgttttcttcccttttctctggctatagaaactgtcaggtggccttgctggcatcatcctacctcttttgaactgtgttacccaggaacttccatttattatgcctcgagcactctctttctttaatactgtatctctctgagggatagttaatgatctttgcagcaaatgaaggtgaactgtagccacattattgttagaatacagccaactatatggaacagattgggctgagctttgaacagctggggctggcagagtgagtcttgacttctctcggaagagttccagaactgccaaatcatcaaacttgaaggggaaagagggacgagaaaggttatggggatagt

SEQ ID NO: 119997 - DNA, 1130 bp, Homo sapiens
tttttcagcctttccttgttttaatgagcttaacagttttgaggcgtgctggtcagatattttgtagaatgtccttcaactgaaattcatctcatgattggacttggttatgggttttttcagaggaagaccacagaggtgaagcaccattctccaccatcatatcaagagtacctatgatcaccatgacgtatcactatagatgttgatcttgataacctggctgaggtcatggtgccaagtctcttcactgcaaatttgccttcccccgactttttcccatactgcactctttggaatgaaattactaagcacatgtcatagggttattttaaggtttaagtgagatgatgaagcttgtggtataaaacccagtgctttagaaaacactcatgaatgtcagttgctactgtagttgctgcctttacactagtccctttcaatacatgaaagctagtattctttagagctgctttctcataattatacagttctcagccatttgctgatattgatcagaaagtaaaaataacaaaaaagagtgctcacacacctttcaaacgagatgcctgtatacaaagtcactctaggatggaaggatacgaattctctcaaagtttaccatggagagactctactaaactgggattatcagcctctggtcctgtttcatgtgatggagtcagtcattgatgacagagctggtgggttctggttggtcttgggcatgagagggagaaagaaagtttaatttaggagctgagcctgaaaaattggtgaggtttttttttttcttcctctggtgatagcttttgggtagaattttgagttcttactggaataaacgatcttcagcacttctctgtgaaatgaagggcttgttctgggacctgaaatgcttcaaaccctgtgcagttgttgccagagtggctgtctgagcctggataatagagcctggagtcctatgtaaccatgtctgttggaataaataagaacagctggtcgcttgtacagatactgttggcatgaattttttatttaagtctctccatgtatctagtaaacagtaagcagtattctaacattactaaaagcctcctaagtctcccaccaataaatttccttcactc

SEQ ID NO: 119998 - DNA, 1164 bp, Homo sapiens
tattccttttaatttaaagccacctgaaggcttcagctgaataataaagtaattcccatatggtttccgttctttcagtgttagaacctctgaaatgcagtctacttttagccttggcttctgcatgcctctttgtcaggctgaaatgcttcccgtctgcttgctctggtaggaaatggaaccaaagccgactgctctgggggacgagttcccaggctttgctttctatttggcaaacgtggctcatgtgatgggaggcacttctcctccagggcactcttgactctctgacagacaggaccagctctgaaggtggctgcaagttttcattaatgccagagctcgctataggcacttttctccctcccttacaattctgtttacaataaactttccctcaaaggaaaaacccaggattcatatgagtttcgttgttttccctggaaagaagtttttgtaaccctcagactctttagaagggaaaacatccagtaaatcctgaaatctgactgcagagttatttttcattatttgtactttcattaattcaaattccaccaaaaaacttttctctttttcctgccctgtgtaagtttactttcccccctgtgttcatatgagttcatgaaatacttaggaagtatatgaaaaatgtttcagaaacacagttgtgttatatgatgcttacccaaatcctgctgaagtaagtgaaaagacattccctctccctaccccttctttttctccccttctctctcctaactttctgtgttcagagtcaatgcaaagggccttcatttttaatgttaattttaaaaataactagttttcttttgaggtaaacttagggaaagcatatgtgtttggagatatatatctccatatataaatatttacatttacatttacatttggagctcaagtttttcattttatttttcaaacatgttgaattaaactagctaaggactggaaacccaccatgactatttgctgtgggttgtatgatcactattctggcttgaatttttgaacttctacagcaacatctttaaagtgccatgagataactttgctgttgctcaaaaagaagctctttaggaagtcggaaaacaggaattctggtgctactttatggtgataatgtcactaactttgtacctt

SEQ ID NO: 119999 - DNA, 1035 bp, Homo sapiens
atcaagtcgtattaagcacctaatgggtttaaaacataatgcgatcccctagtgagtccttgtggcatcagtgggacattattagcttaaaattcagcagttttaaaaatgtagattttaaaaaatcagattcacctaaaacggagatcatttatagaaagaaaaaaacacaaaggtcttctgttgaactgttcagtaagtgtgtactgatacaataatatggcaggatattgggtttccaactcagagttgatagttcagaattaaattttggcctatgtcttgctttttagctttttaagccattctgacgctaccatagacatgcccatctggtagatgagaaattcaggtgtagaaagacttgcagaaatcttatgagatgctctttctttgttcctgttctctttctctgaaccagctcctaacttacatctttgtagtcccaccattaatcctacctttgaccttccgggctcaatttttacagttagtcttaccagtgtttcacacttagttttccctaagtaactcttgctgtctgggtaggacagcatgagtcctgtcccataagacccaacctgcatctgctttctcggacatgtttttttaaaagcaaatatgctagtggagtgtgttatttacaatgcctttttcttagagatttctctggaggtttatatgggctaatggctccccacccacttgactttttgcccattacattatatgtttcttccaaggaacaaaaatataactctctttctctgacagcatgagggacattctcttgctgttgctctccaggaaaaatctcataatctaactagacaaacccttgctgaaaaattagaccaaatggcatttgtaaactccaaggaaagcatttttcttctgtgaagtgttccctagctggaagtgttagaaactttacatatactgataccaattaggtttatggaaaaaatgaaaagctataaacagctggatacactgtcaaaactgaaccctgtcaacttaattttttccctagct

SEQ ID NO: 120000 - DNA, 1050 bp, Homo sapiens
actgccttttgtctagggtatatatttgctttgcaaaagttgcttttgctatggaaacacaacatacacttagctttagctcaagaatttactattccctttatgtcttaaggcttttgtttaatacatgagctgacttatcctagtttcctgtttatgtaaagtatgcttctgatgaaaatatacactactagaaacttataaagggttgctgttttattagtttaataacattgttaaaatttactgatgtgtcattgagaaaaaacaacttcaagtgaggacaacacacacacacacacacacatctttaactgatttttttcttcgagagtatattgtacttagcacactatatacttagtgcatggaatataaacatcactttgcttatttttattgttggcaaaagatacaatatctgttttacacaattaaaagaccttgaaattatgcatgatttttattactactgggatttccatgttggatcaaaggtcatcattccaatcgtctcaggctccctttttttcttctaattgatcattgcagtgcccatctgtctgtggctcacggtataaccttttttgataggggcagggtggcagatggacagcagatgggagttttgccctgcctcgtggttcagatcttggcccaggcacgaactgtcagagactgtcagtttgtcgtctcggcttgtgggctccagtgctgtgtttggcacctcagccatgggtctgaattgatgccaagctggaccagctatttgtcattgtgactagttaatgaccaacattaagggtgggagcacctagtgagtgtgtaagataacctagtagaattgtgctttctactgtgagctggatccccaggacccgagagtcagctcattctcgggatagaagttacagaattagaaacatgtaggtgtcttataggtatttacccactttaaaaagaacacaatttccccaaagatttcctttctatacaaaaccacatgaggacatgagtgaaaagtagaggtagatagacagtggcttgtgt

SEQ ID NO: 120001 - DNA, 1059 bp, Homo sapiens
aaaaactaatgtgtcttcagacttctgcttgtatgtggctcatgttatatctgagcgtatgctactggacaaagtgagtcacatagccaaggcttacaatgggatggggaagcatacttcatttctgtgaaggcactctaagtcacatggcatcagtggggtcatcttgttcttttatagtgaagaggggagtaaataatagaggacaataatacagtccaccaaagatactgaggccaattatatccaaaaagcaagatcagtttggtggaatgacttactaatgcactgagatgcccatatgcccatattccctgccaaacagtctaaatggaaaactagaatcctaattaaaatgagaaaaggcgtgtcacaaagcttcctttattgtagagcagttgagttgtgatgttcgttactagattttttttattagcctgttgttagttgtatgtatgccttctatttattaagcacttattatgagccaagcatagtagtaaacctttttctgaccttatttaaacctatcaacagtctcaagttggaactaggtctctttccatttacagataaaaatattaaaggacagaataactaagcaacttgcccaaagtcacaggtccctgctcttatctgctatattttctttctctatttttctttttcgtgtaatacagaaagcccatgatcatcctgatgcctcctctgtgtggatatcgcaggaatggcaacttacgaccttatgaagtagtttattctaatttagggtagctcaaattactagaacaaatatttaatgggcctttaatcttctacccctaaaattttttccagttggttctagttttatcttatggagctaaatgtatggaaaatgattcaaagaaccttccttcaagtagtagaaatcatcttctagattttatctttcccaatctaaaaatacattgttgtttcaacaattccatgaataacatggattgtggatttttatcatcctggttacttttctcttggactgccaaacatttaagtgcggaacaagaactgtctgca

SEQ ID NO: 120002 - DNA, 1053 bp, Homo sapiens
tcaaaaatggaggatgaaagcgaaatcagagagtaaaaataattttataaatgtatgtttattctctgtggaggcccttgatttattaaagcactaatctattgtctgctccttgattgacctagaagagttaacctatgatttccaaaataggttattcagaaatagagtacatatttctgaaaaagaaaagaaagggaggaaggaaggaaggaggggaggaaggaagggaggagggaaggagggaaggaaggaaggaaggaaggaaggaaggaaggaaggaaggaaggagggaaggaaggaaaaaaggaaggaaggaaggaaagaaggaaggaaggagggaacaagggagggagggaggggaagcaaggaaggaaggaaggggaatggaagggaagggaagaaggaaggaaggagggaaggaaggaaggaaggaagggaggaaaagaaagaaaaaagcactggtttccaattctaaactagccctttattgtaattataaacccatatactgaaatctcagagaaatgatttctagcattttggggtttttgaaaagttattatttgtatattttccccaccatggattcagctcagtttaattctattcaatccacccaatttgctgcagtgcagttcttcattattggatatctattccgtgctaagtaaagaatgcctgtggagtctgacctctacattcaagaacaagaaatcaacactcttccttctcctcagccccacctaaacatgctttaggtcaggtgtttaaatttttttatttttaaaaaataaagtgaattaaagaaaaaatttaagtcattacattctttgagaatctttgagatttcatggcactgtccctttcttcttgttccacatcttatgagctggtgtcttctttcacatgttaaaatgtatcgtttgaaatttggctcgggaggttttctaggttaacatgtagcagagcccagtagttcatgtgaaggctccttcagggaggaagccagaagcatggtacttacgaattcgctgaacatttctgaggaga

SEQ ID NO: 120003 - DNA, 1037 bp, Homo sapiens
cctttatattactgtgtgtggtctcctgcactcatcaacagatatgtatacatggtgactgaacaaaaacataccctttcccacccccacctctctctaccacacaaaacaattctaactgaggggatattgctggagtagtacagcagctaagagggaagattcaatgtgttacaaaaacatcacaaggattggcattttctacttccaaaaggtgtttttacctaaaaactttccttctgtgttgtcaaaataccttaattagaagttgactatcagaaaatgaccttgcagcttttcttttttttttttttttttttaacattccttcaatcagccttttcaacattcagtgattaaccaaaaagtattttaaacaaatgggaatagttagatcagtgctaaatatgccaccaacacaaatattactaattgtatgaatatctctacagcttagggactgtggtaaactgaaaaagatcagatcatcttaatgattctgcattgaagcaatgggaaaggaaaatagggttgatgttttgactgtaagttaccattcactagaacacagaagtaattcccagtgtatctagttataagaatgaatcttactgcagaggaggttgaaatgtatcatatccatctgtttctttggacagaaagacttcttgttatacaacaagtgatctgacagcagcaagaacattgagaaactagccactgtggaaaaaaagaaccatcattaaaaaaaaataaggccaaattatctcccaaatttattgggggaaaaaaaaatctttggttaaagaaaacagatttgccatggggaagtgttagtctatatttggaataaaatattagtaaaatatgaatttaaacatttgccagactgtgtaaatggagagttgaagaaattctcagggcctggagaattttaagggtgcagaacaatctttatcggttgtccacaaagattaccttctgcatatgaaaatgcaagactccacttcattagtctatagagatgctttttcttt

SEQ ID NO: 120004 - DNA, 1052 bp, Homo sapiens
aagatctttgctctcagggcgtgaacattctcctgagggagacacacagcaaacctggacatagatgcagaaataaggaaaggtctgacaacagcgatgctgagaagggaatgtgggaggaaagggacctggcacccagcaacatctcttctcatcgctcccatttctgcatttggaattctgcctggatggaaggcaggccatggggcagacaacgtgggccttccataagcctccttttctgtgcatttttgcccttcagtagtgactctttccagtttctcttaggactctgctttgtcccttattgttattgagtggagcatggcctatgcagactctttggtgatttaaatgggctaggtagagccttaagacagaaaatgaagatagtggtagaagataatttttaaaaggataaggagctagtacttttgcatttaaatgaattccaggactagttcttttagtgaaaaagctataaatccctaatacttagtaatttttctgtgtttgcttctacctcagggcctttgcactggcattccctctgtctggaacagtctcccctctgatatccaatcctcaagcttttcgagtttttgttatgttttgttttgttttgttttgagacagagtattgctttattgcccaggctggagtacagtggcacaatcctagctcactgcagcctcgaactcccgggctcaagcaatccttgcacctcagcctatcaagtagctgggaccagaggtgtgcgccaccacactcagctaattatatttatttttttgtagtggcggggtctcactgtgttgcccaggctggtcttgaactcctgcgctcaagtgattcacccacctcagcctcccaaaatgctgggattataggcttgagccaccacacctggctctcgagtctttatttaagggttgttgttttcaattactactgtattgagaattagaccctctttctagcacttcatggcacttacatgataataatcctgttccttgtcactctccattggccgcctccttcccaaatg

SEQ ID NO: 120005 - DNA, 1002 bp, Homo sapiens
agggtcagcagtaaatacattttttttttttttttttagacagagtctcttttgagcaatctctgttcactgcaacctcccctcccaagttcaagcagttcttatgcctcagcctcctgagtagctgggactacaagtgtgtgccaccacgcctggctaatttttgtattattagttgagatggggtttcaccatgttggccaggctggtctcaaactcctgacctcaagagatccacctgctcggcctcccaaagtgctgggattacaggtgtgagccaccatgcccagtcttgcagtaaagataatttttactctcttttccacatttatatttaaaaaatttagtagtctgttttgggtttcctcttcttttatcagttcttcctcatctgctattgatatccatcaataactctcaataaccagtcacaagagaaatataagcaagaagagagagcagaaggtcaagctcacctaattcaaagggatctatcagtgaataagtgtgctatctgtacttcagagaaatgctgcctcaaaagtaagaccacagtgaaaatcttcccagagagtagcagccttcttcttggataagccatccttctgaatcctcttgaatacattgagataggtatattctctcagggagaacgtggatcaaccttgtttcttcttagtggggtggagaattttagaagtaccaggagaggaagagagaaaggaagagagtgaaactgcaaaactttgccttgctgaaaagtttgtgggaacccgggttgtacttcaggtcagttactcaggtgaatgtccttaagattttgaatatcattattaaaatttcacatttcagtttaatcattaggcataatctctaatgaaacatactataggatttcctacttaaaggctttggttgggaacgggattctagacattaaatggattctagatattaattgggattccaggcattaattattaaccttattgcaggaaggca

SEQ ID NO: 120006 - DNA, 1046 bp, Homo sapiens
ggtttaatgaagacagttttcttagcttctgaccgtggtaactcatctccttgtatttatgacttcccaatcctctctttgcttcctcgtgtcccacctctcagtccagtttcacatctcattatatcttctaagtcctaagttgatttaccagctcctttctttcctctttaccttaagcagcctgtgggagtcctctgtcctcatgcagttggagacctctgattctgcatgtgtgatgcctttaccagcacttactcttgcccctacccttctgctttactgaatgtgatttctgcttcctctcttcttgttttcctaccttgtcctctctgcttccatgttattgaatgcctatacaatgcagtgggcagagtaagcaaaatgattaagacatgcatgacctctcacatccaggaatttatagtcttgctgaaaagacagatgagcatctctagtactacatcataagtgattcgatttagtaaatatagtttgcattgagccatttagttcaagtgcttctggctttatcatgttgcagcaaagccatttgtggacccttcaaatggaagcgtccttctgctttgacctggcattgtagatctcactcttcattcctgcacctcatgtctcatccatgtagtacatccttcaaataatgacattcttttttttccataaccattcaaggtggaattaatgacattcttaaatagatatttagagtacaaatctgttttactgtgtaaggggctttggtacatgttatatagagaggggaagagcaggcagcttgactttggagcacttagatgggctgggaactgtgctaggcactaggcataaaatggatacttcactgctcttgctctttgggagttcagcgtgtaggagaagagacagagaagtaaactagctatgattatctagtggcaggtggctgtgctagaggtgtgctcagaggactgaggaagtgcagattggattagggttgtgggtcagccagtttgaaatggtttaaaatataatagacccttttgttt

SEQ ID NO: 120007 - DNA, 1051 bp, Homo sapiens
ataagataatgtatcacacgtatttttagagaaagaaggctgttggggcaaaatgttaacaaaggtgactctaggtgaaagctctatgggaattggttgtaatattcttgcaacttctttgtaggctttttttttttttccaaaaaaaaaaaaagtcttgataaaaaggtgtgccggccgggcgtggtggctcacgcctgtaattccaacactttgggaggccgaggtgggcagatcatgaggtcaggagattgagaccatcctggctaacacagtgaaaccccatctctactaaaaatacaaaaaattagccaggcctggtggtgggcgcctgtagtcccagctacttgggaggctgaggcaggagaatggcatgaacccaggaggcggagcttgcagtgagcctggatcatgccactgcactccagcctggcagacagagtgagactccatctcaaaaaaaaaaaaaaaaaggtgtgcctattctgagccagacttcctaaattccaatctcactctgcctcttattgactaggtggccttggacaagttacaataacatctttgtgccttagttttctcatctgaaaactgagcataacctaccatatagaattgttatgaggattaaattaactcatatatagaaagcccttaaactagtgcctcacatatagtaagcctcaaatatatttcattaggattatttaggcttgttaacataagagcttttctttataaactatataaaattaaataacccccagaattgcgtttaaaagttaccactgttattcattgttctggaagagttggccaatttagttaagaatacaaaatcagggccaggcacggtggctcacgcctgtaatcccaacactttgggaggctgaggtgggcatatcatttgaggtcaggagttttagaccagcctgaccaacatggtgaaaccccgtctctactaaaaaacaaaaaaattagccaggcgtggtggtgcacgcctgtagtcccagctactcaggaggctgaggcaggagaatcgcttgaacct

SEQ ID NO: 120008 - DNA, 1098 bp, Homo sapiens
tgggaacatggccacaagagccaccacaatcaggaaagggcaaagagagctattgcttttcacctgataactgtaatttgttcgtcttcccagtccagtgcagtctaccagtcaatggtcatttttaccataaggattgttacctagtaacaacacaactgatactcctttatcaactttctagaggaaccaagatagaaagttaaacccaggtctgatttttcctatcaaaggaaaaaaggattttaaaaaaacccttaactcataactggatttaatctaaagaaggtcagtaatggtttatatttgcatttcaacattttggggatattacttacaataccataaattcttaactaaattagcaataccataagtagcattctaatttgaaagaaaatcataatttgttttattctctattttcagacaaaatttgacaaacagggaaacgttacttcttttggtgagtgattagcattctaaatcattttttaaacatttaatgagtgaatctgatagaaatcaagaaattgtagtattttgagtaaaatattctttgcatatacaggtgtgttgaaagagatctttcttcagcatttgtccatcagtcttaattggagctggcaatactcagactgtgtgtattctcccagaattgttttcttctagcaggagccactttttgctctaacaggctattgaaggaatatttgggagagcagaggctggtgtagaactggagcccagagacacactctttttctcttttgtctctcttgttggcgtccctttcactgccctcattcattctcctgaagcatgtttaaggcagagtcacataataccactgacattgcagtgggtgacaaaagatgaacagggccatgtcactgcatggcagccacatggaactctgctgctgatggctctctgtggacagctactttaaaaagtgagactaggcattactttacagtgtgacttcagatgtgagtttcacatctcccttgagaatgaatcagtctcaggtaataaattcagcttttctcatttttgtattagtctaagaacaaagaaaatcaagcttatctgttc

SEQ ID NO: 120009 - DNA, 1058 bp, Homo sapiens
ggttttttgtgggtgtttttgagacggggtttcactccgttgcccaggctggagtgcagtggtgcagtctcagctcactgcagccttaaccttcagcaatcctcccacctccaccacccaagtagctgggactgcaggcacatgccaccatgcccagctaattttctaaatttttttgtagagacaagatctcactgttgtccaggagggtctcaaactcctgagctcaagcaatcctcctgccttggcctcctaaagtgctaggattacaggcgtgacaccatgcctggccaaattgattcttaatttgcctggtaaatactcaactttttttttttttttaaataagtcattgtttagcatgaatgtataagataatatatttgataagatactctaaaaacactattatgaaatgttcttataagtttattctattgatcatttttgtgtatctatttcttatagtctatcagagttagaaacagatattaaaattttcaaagagtcaattttggagatcttggatgaggaagagttgctagaagagctctgtgtatcaaaatggagtgacccacaagtcttgtaagtatataattatactttgttatttatttccttagagtaaatcttttgccttttccacttcaaggtgatttttcatacagaatgtaacatttttctggactacagaatatagagatttttcatccccagtttcccttttttcctgtgcagtatcgtatctaattcaatgtaattctatgagtatgcatactgcatacccaacactgctgacatgtggtgaatataaacacacagttacctttatattcaagggactgaccaccagattggcatatacatctaccaaaataacttacctaggaagcagagtgggagagaaatttacatgggggagggaaaagatggggtaaatacacgagtaacacattaacatggattatgtaagttcagtctaatgaaaatgttaatcttataaaccttttatcttttatgaatttagaaattgtttatgcttcttgtgcacactccag

SEQ ID NO: 120010 - DNA, 1452 bp, Homo sapiens
ctatataacatttggtagatagccgataggtatggtagcagaaactgtttgctttgcttaggccaatctgtcaatctgtctctaatatgctttatgatacaggtacctcttcagagtacttcattcccccttacccttcttggtagggtaggggagcaaagttattactgatatcattcaaaaacattttctttatatgaaatcacattatgtacacacctcaaaaggaaatggtcttgacatttttagttgtggattttgttttacctgatagtggtattggctttgcactaattcatctgcattcacatatctggattttcctgtaactggcagcatgtatctgcataaaaatctcttggattggggccatgtaatacagtgacaccaactggtctacataaggatggaacctctgtcctcaactcatctgtaaagtgttttggatcagttgacataggtactcacagattggccacaacaatagaaaagacaaaggcagccaggcgctgtggctcatgcctgtaatcccagcactttgggaagccgaggcaggcagatcacaaggtcaggagttcgagaccagcctgtccaatatggtgaaaccccatctctactaaaaatacaaaaattagctgggcgtggtggcgggcacctgtagtcccagctactggggaggctgaagcaggagaacagcttgaacctgggaggcagaggttgcagtgagccgagatcgcgccactacactccagcctgggagcagagtgaaactccatctcaaaaaaaaaaaaagacaagacaagacaaaggctagcttttccactggtagctgaatgctatatactaatttaggaagtttttgtcactaagtatatgatacacatgttgggagtatgttaattattttctcttttaattgaagtgaaaagagcagtgctgggattgaccatgcagaagagatggagttgctgttggaaaactactaccgattggctgacgatctctccaatgcagctcgtgagcttagggtgctgattgatgattcacaaagtattattttcattaatctggacaggtaagaaagcattatataaaactaagtttttttaataaaataattataagaaagtttttaaggaaatattttgtgaggaattacgccatcattatcatctatactacattattattattttttttgttgtgtaggtttcatccatgtggtctgtatagatttgatgaatgtgctgtatatagttagtgggcccttctaatctgaataggtgttctcctctccagccaccgaaacgtgatgatgaggttgaatctacagctgaccatgggaaccttctctctttcgctctttggactaatgggagttgcttttggaatgaatttggaatcttcccttgaagaggtgagaatgtattattatttctaaaacttgggggt

SEQ ID NO: 120011 - DNA, 1093 bp, Homo sapiens
aaaatagcctcagactggatggacttggatcaggaaggagcatcctaacaaaccgttaggaacagccccgtggatactgaagttttttttatggtagttacaggaaacttctgatactctttttattattttcttgtatagagtcagacacttgaaaaaaactaatgtttgaagacaaaaatattttggcagtcacaataccagaactggattgcatttccagaattctgagttaaagaaacaaagtatttgctttgtaaaaggccaaaattctatttcctacaaactttaaatgctgtttttatagatgtgatatgaggcaacacaagcacagacagttgcatagattttaatttatacatatcaagaaaagtgcaatttcatgctgaatgaagcgtaggaacttgacaagcccataggtagctatagttctttgtcagtatagggaattatgttcatgtgaatttcctgattctcaggtgactaaaaagctagcattctatgtattaaccttacaacagactctgtaagtttgagctttaaaaaccaaactttgacataaccttatttcttgtatttgcccccttttttttataaaaggtgaataaaaagaaataatttaatatcaccattgtatggattcctaatcaagatttcacgttctcagcccctgagactagttttctttgctctctgtaattagagcctttggaagcaaagttgaaaggaagtatttccattctgttactgttttgtagcactttgtccatttattgatttttaaagtagatatttagataccacccctgccctgccccaaaaagaaaaatgtttattgtcctgctaatctatatgcctacacctcagaagctgacagatgagcttcctaaaacatgaggatgaataaatgttagaactgtgatatcttctcatttccacagagatttgggtttaaaacaaatggctaatatttgtaagcctgaaagctgccatcctctttaacatcctacctaccttttaaaatattttctggaggttaagtacagttaggcactagaacatttgttaagcctcccaaagtagtgtgcatgga

SEQ ID NO: 120012 - DNA, 2096 bp, Homo sapiens
tgggaagccattagagggaagctgcagaacagaatggaacaggacaggctgggctagactcgagcacgcagtggcccctgtgccaccacactgtgggtcaggaacacgcgtcatggtgttcttgtcggaatgtgaacatacagcaccctctagcattacgaatctcttaggatttttaagattgtatttgataatacttatatttcacagggcacacttttggcacacctcagagcacactgctgctattttgggtcgtatcactgtaaaatacataataagtactacttaactgtgacatgaagaattggaatcccagagggcaacatttgatttgactaagatcaggcataagatagaatttttgtcatttttccttgcagttttattgacttagtttatgagcttggataaaataattttttgatgaatcatgtcaataaaaggaaaaataatgtaactacctcataagtctgataaaaggaagttgctagtgttttatagaatttctgaaggtggttaaatcaagtatgatttcaaaatatcaactagttccacttttgtgattgcaggatgcttcttatactaaagttctcataaataataaatcagcttatgccaaaaatatatgaagttccttggttttaaattttgaactaaaatggactgagcacattaattactgtttgaaagtaggtaccaaacactgggttatgtgagtgagtaagcaatcatatcgcctgtcaaacacatcaagtgtcgaacacgtcaaggtgtgatactgtctttggaaggctcctaaacaaatgtgagcacaattattaacaccttattcttcatgaacacagactgttaagcagcactaaccaattttatattaaaaagctatttattttggtgagttattccaagagttgtatacagctttattttttggaattgcaatattaaagttgcacgttggatttaactctcatgactttagtaatacctacagaggtgagctaatggatggtacatggagtagggactgcagagaccctagttttgtccccactccatcttcaaataattttggtctcttaggtctgtgatacaaaggcataaaacaattcctatcttgaagccttgagaaaagctgttacatatacgcagatagtagcaagacagaaaatgcaaatatgtaaatgtcttctgatatcttgaaataaagataaatttcagttaaacttgtataagttcagatttctgttaatgagaaattacaaccctacaaggtaaggtctttacattttagttattaagcagaatcaatgcttaaaactatagttaatacttagtggaaagaaaatttaatccatgtatcaggataatatattagactgtcatgcattaattttttcctgtatgccaggttttttacatacgtgccatatcagttgaccttttacagtaggagtataatttacattgtttttgacattggggttagtatggttaaatgtcctataaacttgaagcttgcttccatttttgtgggtcttaacctccacctggtgcttgctattgggtgtattcaggcattgagaaaaatataaatcgtgaggtaaataatggtcatgtttaaacagaggccttatcatttagtgaagcataaaaactgacactatataaatgcatccgtctaatgaaaagacccagtactgagaaaaacatccctttactcaagtgtcagatgtcagagtgctctaactgctcaactcataagtgaatacaactaagtaatttctggtcccctaaaaataaccatccttttaattaaaagtaattcttcagataggttgggctaccaataattgtccctaaacaaaaccaaatggcgcttccttgtgcttttgctgtgccataggttactatgcagctagcacatgtacctcttccagaaaaatgaggtcatcctgggagtgacccagagatgctctctagggatgtacctcttgatgttcttgttaactttccactcttcagctggattcctcttcctgtccccttttcaccagtctctactcttgagagaagctgagaagagaagggct

SEQ ID NO: 120013 - DNA, 1706 bp, Homo sapiens
ccatagcaaagtaccacagactgggtggcctgaacaacagacatttctcattttaccgctctggagggtagaaatcccagatcgaggtgttgtcagagttggtttcttctaaggcctctcattggcttgcagagagctcagcttttgtctttgtatctcatcagacctcaattttagactcatggagtctgagatgtctgttcacgcccaagtgaggatgtaaagtaagcagttggttatatgaatgaatcttccctgtgtgtctccacatggtctttcctctgtgtgtatatgtgtcctaatctcttcttcttttaaaaacaggagtcagattggattggggcccaccagaatgacctcatcataacttaattccctttttaaagaccctatttccaaatgcactcacattctgagatactggggggttaggacttcgacatgtcaattttgccaggagcaccattcagcccgtaacatcagggtaggtctcattgaggacatgagatacaaagaccaaaggaggtaagtgtgtccggagttggttcctgccggtaggtttgtggcctcgctgacttcaaaaatggagccgcggacctttgcagtgagtgttacagctcttaaagatggcatggacccaaagaatgagtggtagcaacatttattgtgaagagcaaaagaagaaagcttccacagcgcggaaggggacccgagtgggttgtcgctgctgggtgggtggggcgtggtggccagctttttattcccttatttatcccttccagtgttccgtttctgtcccatcagaatgcctttttttcaatcctccctgcgattggctacttttaggatcctgctgattggtgcgttttacagagcgctgattggtgcattttacagagcgttgattggtgtattttacaatcctcttgctagctacagagcgctgattggtgtgttttttacagagcactgattggtgcattttacaatctccttggtagctccagatcgctgattggtgcattttacaatcctcttgctagctacagggtgctgattggtgtgttttacagggcgctggttggtgcattttacaatcctcttgtaagacagaaaagttctccaagtccccactcgacccaggaagtccagctggcttcacctctcataaggacattcagctagagccaaagtagaagcatggctgacacatttgcagaacagcaaggaggcccgtgtggactgagcaaaggggaagagttgtatcagaggaggtcatagggagaaggggaagagtgggtggaacatgtaggacctgtgagttattctaaggacttggtttttactttgagtaaagagggggctgtgtcagggttttaagcagagatatgatctgatttacattttgaaaggccactctaaccacagtgctgagaatagatgaagagtggtggaagcagagagacaggttaggaggttgttgcacggatttaggtgggaggccacggtggcttgaaccagggtggtagcagtggacaaggtgaagagttatcccataaaggatgtattttgaaggtagagcccactggattttctgatggatcattatatagaaagtaggtgaaggagaggggttagtgatgactccagggcttttggcctgagcaattggaaggatgaggatagctgaattgaacagcattagg

SEQ ID NO: 120014 - DNA, 1011 bp, Homo sapiens
acagagcgagaccctgtgtcagcaaaacaaaagactataagttggtgttggaccacattcctcttagcctctgctgttgctgcagcatcacagtctcctaggagaattgcactctttccccaccccccagggaaacaaaataaaagccatttgaaaaaaacatggattgggtggcttttttttcttttctttcgtgtgtgtgtgtgtgtgtgtgtgtgtacaggtgcttattgccaactaatcactgatgcatagcagctgtgtagcatagcagctgtggagggaactggaggggaacatgcactgactcagtgcttttatctttggggccaagcccacgtgaggaggaaaatggcagtttgagcacatgacaaccaccgagggaagtgttttcacagagaggcggtagcagccacacgttcactggtcaggtctgcagcttctgacagactgtgtgggtttgtttttgtctcctgtccagacttgtgtttgctcaaaccaattcttggtgcaaaggggcatccatgatgcctttgtaaaagcattcgccgaggccatgaagaagaacctgcgcgtaggtaatggatttgaggaaggaactactcagggcccattaattaatgaaaaagcggtagaaaaggtaagtatattgtattatttgtgaaagtaaatttcatggtttcaatatgaaaagcttaatcagcaaaaaacactttggctggaggggtggggatagagaggggtgggttgacagaatattacagctagacagaaggaataagctctggtgttctacagcactgtagaatgactgtaattagcaacaatgtattgtatattttcaaatagctattattagaagagtagattttgaacgttcccagtataaagaaatgatcaatgtttgaggcgatagatgtgctaactatcctgattagagtatagagtatgagagatctacatctatacatggaatcgaatggaattttcaatgatgttttcatacaaaaa

SEQ ID NO: 120015 - DNA, 1282 bp, Homo sapiens
atcaggagtcatcgaaaggcttgggcaaaaatgtcgtgtggaaatctaacaggtgtgcaggtggattgaatagtagaaaacaggaagagggtctcgataggagatagtgagagtagaattgaagcaagaggtgactttcaaaggttttgagatgaaaaagtggacaagaccaacctgggactttatctgggagcagggaagactccaggcccaagtggctggacaaaaagtcatcaatggtgccctcatctttaggcatgatgtctttaatgactcttctaaatgccatatatgtccttttatcctgtgacaggttatttttactctcaagacccagcccagatctggagagtggcagagcagctggaagtgggcatggttggcgtcaacgaaggattaatttcctctgtggagtgcccttttggtggagtgaagcagtccggccttgggcgagaggggtccaagtatggcattgatgagtatctggaactcaagtatgtgtgttacgggggcttgtaggattctttggttctttaaaaaaatttaaaaggagacttatctacatatataggtacatgccatccattattttaaataaactaataggttttcagaattatgaatttttcagaactcatccagtccttgtaatcttaaacagatgcaaatcctacccctgcccttaatgtaactagggaccaatatgtgccacgtgcctgtggctgcagactcccagagaaccagcactgggtttacagaatgaggccctggctccccaccacagccccagctgcctcagagcaggcacagcacaaggcaggcccagccccatgggccgtcacaaaggcttgatcactgcctgggcagtggcacaaccatcccccatgtcgctacagaacatgggcccagagcaccttgaaggagacccttgactgtgactggcaggcaggtgaggggcacagcacccctccccggcatctgccagctcagcacagaagacaccgaatgtgcatctggaggtgttgcggcagaggtttgagtgaaccctctttcaaagacaataaatagcacagaattgtccgtgcttctgtgaggcacgaaggagcacctctccctattcctgaaccatattttaattgatgcctttattgtcccaaatttaccacttaaagaattctattttcatttctgtcctgtttgccacttcatttcatttccttgagtaaatgagctgaagtgtaaagcaaagaatagcagaagcagcttggtaggatggaaggca

SEQ ID NO: 120016 - DNA, 1262 bp, Homo sapiens
ttatataacattttaattacttgtgatttagatgtatccatcctttttctattaagaatacaaatgctgggctgggcacagtggctcacgcctgtaatcccaacaccttgggaggccaaggcaggcagatcacgacatcaggagatcgagaccatcctggctaacacggtgaaaccccgtctctactaaaaatacaaaaaaaattagtcggatgtggtggcaggtgcctgtagtcccagctactctggaggctgaggcaggagaatggcgtgaacccaggaggcggagcttgcagtgagcagagatcacgccactgcactccagcctggatgacagagcgagactccgcctcaaaaaaagaatacaaatgctccaacattattttttataactctggattaccgatgctgagatgtgtgcaggaatacttccaaataaatttttaacattgtaagccagtagattctttggctgggtggcaaattttgagtcttcttgcatatttggctcatgggttcataaattgaggccagagactcattgtatatccttgatcaattttctaattaaaggaaatagcttattgtttagtaaaatggcccttggttgtgggaagaaagagaattatttttaactgaacgtttttgttgttttttaaataaagtagccatatgtaacgggattttaaaaatatatacattttacaacatggactagaaaaggaccattagatcaggggttggcaaactatggcccacgaatcaaacctggcctgccacctgtttttatacaacctgtgagctaagaatggtttatatgttttcaaatgattgggcagaaaatcaaaagaagaacaatatttcatgacacctgaaaattctatgaaattcagatttcagtgtccataaacaaaatgttattagagcatagccacacccattcatttatggtattgtctgggactgctttcttggcagagttgaatagttgggacagggacagtatagcctgcaaagcctaaaagatttactacttgtctccttaaagaaaaagtttgccagctcctgatctagaccaagagggagatattgaccttacttgcatttatccggcattatttcaacacctcctgtgaagaaagtacttttctggcatagctaccgtgagttctcagcaggaacttcccagcgatgataatgtacatgaaattagccacgtaacaagagtctatttgccttgaaaaaacaattatccttgaactt

SEQ ID NO: 120017 - DNA, 2034 bp, Homo sapiens
ttcagtttttgaaaacagataacagcagtaacaggccatgtatattcagccttctaagttttatctgaaacccaaagttaggaacctatttatggcagaagagaaggggcaaattccaaacccctctggctgtcttgatatttttatattacataccactatgcagcatagtactttttataatgtatctcattgttttgcatttctgcattaataatttcttgcacggtaatagcaaaaacacctttttttttttttttttaagttagtgggcaaaaggctatgtgtatcttagagagtattcttcttcttttcaggttaccagatgtggtggtttacccaacaacattgtggatgtctgggagtttttgggcaaacctaaacattgccagtatacatgggatacacaaatgaactctaatcttggaataactgctgcttgtaaacttcgttttgatcgaatatttttcagagcagcagcagaagagggacacattattccccgaagtttggaccttcttggattagaaaaactggactgtggtagatttcctagtgatcactggggtcttctgtgcaacttagatataatattgtaaaatgcttttcaagtgtgggttttgccctgattgttgcaaatacaatttccaccttctggaaaggtaggtttgctgtggaggaaataatgtactagatcattgtcacagaaaaaccaactatgatttatggttgtgttttcagaattcaacattaaagattaatgtttatttaaacgaacacattcctgcattcaggatgtgaggccatttaataaaaagggcacaaagcctgtcagagttttcaacggtgcttatagctgccagctggattccaaacaggtaccacattgtctctgagctaatgtttatatttttccattcaggcaccgaaatagttaatatttgaaataagtcttcaaaagaaaacataagagattattgagttcttgggactggatcctttatttcataagttcagatcatcttaaatgaaaatgccatgattatctgcagttaagtagatgacagctattctacatcagacttgatttttgtcagctaattacataattggtaagctataattgaaaccttatggcttaaaattccttaactcctttttgattcatgtttgtagtcatgttgtcaacagaggcaaagttaagcttgatgatggttaaaatcggtttgatagcaccatgggacatttttctaacaaaaataaatgcatgaagagacatagccttttagttttgctaattgtgaaatggaaatgctttacaggaagtaaatgcaaattacttttaagtgtgctttaaagaaaaatattttccccacaagagaaatttaaataaagaattttatttgtttatggtttgttttagtatgtttttgtgtccatgatgagattaaattttttatctgcttcctgcttctggctctactgctgcttcttcctctttgtgtagaagaaaacagatttccatttgcttctcactccaccaagaattaccaagaatatatctgcttcctttgtctgaaaaaaagccagcgagaataattagaagtaatagaatcttatttatatcaggagtgccaaaatttaaacacctaaaaaaagatatttatatataatattccctttgtagtgacaacgaaaaagtttaaatgttaatcataattttaatcattaaaaataaaaaatgagggccgggtgcagtggctcacacctgtaatcccagcactttgggaggctgaggcgggtggatcacgaggtcaggagatcgagaccatcctggctaacacggtgaaaccctgtctctactaaaaatacaaaaaattagccggacgtgatggcgagtgcttgtagtcccagctactcaggaggctgaggcaggagaatggcacgaacccaggaagcagaacttgcagtgagccaagatcgtgccactgcactccagcctgggcaacagagtgagactccatctcaaaaata

SEQ ID NO: 120018 - DNA, 1050 bp, Homo sapiens
tatagaggagatggtatttgaaatgaaccctgaaaaatatgtaagacatacatattaaaaagagtccaagtagagaaaccaccatgagcaaacttttgcaagttgcaagaggtgtacatgtatgagtatgaatgagcattctattcagttgagtgtaggggccatggagaggcaaatgtgacaggttgagaagtaggtaggctcctgattatagaagagcatgaatgaccaatatgaaagaattagacttgattctgcagacacttagtataatgatagattgtacattgttggtgtcttaattgcaaatggtaaatgattctcattcattcagttaactgacttttttggaatacctgtatgccaggcccttaataatacagcaataaataagaatcatctctgctttgcaaatgacttatggctttgtaggagggaaataattgtccttttaatttagcctagggggctttgaaacagtctgttcagcatgcctttggtgtattgaggagggagccgctgatggcctggggacactggggaaaggttcacagtggaggtgacatctgggggtaggtcgtgcttgctaaaccgtcgtctttggggacagggttactgctttaatacttcttttgatccggagggataggcatagtgctgattttacagtttcagtttagtaaatatataccatttgacagaacaatctgctgattttattattaaagttcagtattaatagtcagtggacagttttaatgactgtttgtcctgctgcaggtgaacgtgtcaggaaatgagctttgccttatgacatcccatttggagagcaccagagggcatgctgcggaacgaatgaatcagttaaaaatggttttaaagaaaatgcaagaggctccagagtcagctacagttatatttgcaggagatacaaatctaagggatcgagaggtgagtgacaaagtcagtttgatgtttgaggacagattattgctatggagactaatttaggttcctttgaccaaagctgttaaaactaggacctttagt

SEQ ID NO: 120019 - DNA, 1265 bp, Homo sapiens
agcacccagatcatggcctttaaatacaattcttcactgaaaggaacaagggcttttcagaaatgactgatttcatagaatgaaaggggcttaatgtaaaaattaaaaaagaagttaaaaagaaatgactgattccagagcaggggcaaaaaaagtacaagatgagccaatggtatctgtggtgttagaaagtaaggaggtgcccagaaaatgttggggacatgccagaagggcacaagacctagcttaaaagctgcctaccctttccccgtgaaatctggtataacccaagcaacaggatgcttggtaggaatagattacaatccataaaaaaagaacccatactgatataaataccattgtccaagagagaagggaacatttttccttacagtagaactccatctattaaatgtggaagacatgaggaattagaaaaaaatcttcatttgggaactgccgtattgataattatttcaggtagatatcaacagatactaaaactagtaggaaagttcagtgaacaacagcatatttacataatcacaaagtactttcccacaaaatacttactatgatggggaaaattataacttcgtactagagaaatctggttaacaacactttaaccaagtgatcaaagctaacatcaccaggaatgggaaagctccatatcagatgcttgatatggtgcattgcggaggacatactatcacttctgtgacattcctgccaaaaaatgcataatctgaatcaaataataggaaaacataagcccaatctgaaggacattctgtaagataaatggcctgtactcttcaaaaatgtcagagtcatgagagacaaagactgaaaaacttttctggattgaagaaaattaaaagagacatgccatctaaatataacatgtgatcctagattaggacactagtagcacaattggcaagattggtctaggtctttagatattaaatctagccataggaggcaataagaaaaagaaaaacttatatcaatgataatcttctgacttgttgatcatactagagtatactgttatgcaccacataaccacatctctattgacaacaaactgcataaatgaagatgatcccataagattatattactgtatttttgctataccttttctatattaggtatttttagaacacaagtaagtgccattgtgttacagttgcctacagtatccagtatagtagcatgctgtacaggtttgtagcctaggagcagtaggctagacc

SEQ ID NO: 120020 - DNA, 2036 bp, Homo sapiens
tatcttctaattctgcataaatttttcctttatcttatatggcaagattttgtctgtctagaatatggatagggactacaatttgtcccttactctgtatgttaagatgtttaataaattgtgggaaatggacttcatgtgacagttacgctaaagtcttatttttaaaaaatattaaaatgttttccccttccagactccaaaaaacaaagctacaatcttcaagttatgcagcatctgcctctacctgccacaggaacagctcacccactgggcagttggcaccatagaggatcacctccgtccttatatgccagagtagagtactgaccagcaaaatggagaagatcagagaatgcagcagcagttttttttcttgttttcttaccactttattctttcagagtttaaagaaaatggactcatgcacagaacactatgcattttgaaacttgttcatcctggatttttttaaatcatttttatctcagaacttaaacaaaaattagatgtcgtgcacggactgtgtgaaagaagatgctttgcatatttgctgcactgcatcagtatcttactaaaaatgtgaaatgaaaggactattgtacactgaaatgcttaaatgtatctgaaagcacaaggtgatactcatttttatggtcttcccatttgtgctggtttttgcctctttgacatctgtcatcagtatttagagggtgagaagtgaatgtaacaggtataaataacatttttaaaaacaataactttgctataatcacagttgttccagagcactgtcagatacattctaatgaccagaactggtttaaaaaaagaaaatacaaccatgggaaagaaatcttaaatgaaaaacgcatctcattgtaggcatttttgcctcatattttactgggccatgtttgtttcctggtactcatgtattttttttttccagatctctttccccaagttgctattgtaagagtattctgctgcgtgtggatgcagttatacacattaaagcagatctggagtctgaagtagctataaagcagctataaaacagaaatacatgcatagctgcagaaaccatgataggtagaggacttttcttttggttttgttttgttttgttttgttttgtttttggttttacagagaagagatttttattacaaagaaaaaaattccagtgaattgtgcagaaatgctggtttttacaccatcctaaagaaaaactttacaagggtgttttggagtagaaaaaaggttataaagttggaatcttaaattgtaaaattaaccattgagtgtcaaagttctaaaagcagaactcattttgtgcaatgaacataaggaaagactactgtataggtttttttttttttctccttttaaatgaagaaaagctttgcttaagggttgcatacttttattggagtaaatctgaatgatcctactcctttggagtaaaactagtgcttaccagtttccaattgtatttagcttctggttggaatttgaaaaaaaaagaaaaaaagaaaaagaaaacctaaataaaataggtgaaagttccctgactattcaggtgaatacacaaagtttgaagtgttaactttttctttccatttcactgatgttactggtcaccttagagaattatttcatagtctgtggctaaatagtaaattcagaagaaaaatacctggcaattgagtgtgtaacttcaacaagaacaggaatcaagaacatactgtcagctttcaacagttagcaacctggccttatgccttgcttcatgggaaagggccattcttaaatttcaaaatgctttcatgtgtcctcttatttaaaaattagaatctatttgaaataacattttgaatgtttattataaccaggtactcttctaagctcttgtcttaacctctcaacctttggtggaaatagatgcagaggttaagtaacttgctcaagctcagatcataagtagtggaggatttaaaaccaggctggctggctcttaaggcctatgctct

SEQ ID NO: 120021 - DNA, 1005 bp, Homo sapiens
gtgttctgacttaattgataacagtctttcataacttcacaaatttttgagaatgacccaaggctaactgtgggaaaaattcacataaaaacatagcctatctatgaggagcaaaactatatttcagttgtgggctttacatttcatttaaccctcttaactgtcctgtgaaatgggttacagccttattttatagatgaggaagctgaagtttaagggatttgcatacggtcacgtaactagtgagttgtgcagctagggttagaataaacagatttattttttttttttcttagaaacagcaattaacaatgtgactcctaatcaaaagaaaagagatgtccttggggcttaaagtactatggtgggagtcttggactgagtaggtttgaaaatacaattttatgatcgtggagtactaggatttagtcattttgatgcagagcatttcctgatcaactgctgttgtggagtgtactgtccaatagaattctctacaattaaggaaatgttctgtatctcaagagattgttcttaatggtggccagtagtcatgtgaccgttgagcatttgaaatgtggctagtgctactgaagaatggaattgtaaattgcttttaatctaaattttgcctgtgatattattggctgtgggtttgccaaaatttgtttttttaaagaggaaaagataacggactgttggctgctttattggacagcacagctagcatatagatgcagataggtagtataacttgtttgtagtttaatataaatgttgtattttgtaattaggccaaatttgagtttcatcatggtgactatgaaaaacagtttctgcatgtactgagccgcaaggacaagactggaatcgttgtcaacaatcctaaccagtcagtgtttctcttcattgacagacagcacttgcaggtaagcagcttttttgaaaaccacttacaggctcattcaaaaacttattggttagtaaacgttttatatacaagtt

SEQ ID NO: 120022 - DNA, 1058 bp, Homo sapiens
gagaaaaggaatggtaaatgttaacttgcaggcctcttttttttgttttttgttttttgactcttaaagcactttacttatttttaaaatttaattaattttttgtagagatggggtctcactttgttgcccaggctggtcttgaactcctaggttcaagtgatcctcttgcctcagcctcccaaagtgctgagattacaggtgtgagtcaccgtgcctggccttttgaagcactgtaaaacctgaatatatgggtagtgaggatataatcggaaccagaataaggattgtttttaaatactgagttcttcagtgtactgtgaagtgctgggaggtactactaaaatgtatctcttcttttctcttcattattaatgctactgccaaggttagctcctcccctgactgttagaatatttcgttacttctgtgggaattacttctttcatgctgcttatgagaagttgtgtgtgtgtgtttgtgtgtgtgtgtgtgtaccatttcttttcagataagtggatattcaatatgatagaattgaaatgctaaagaactataaggaaggcctttttcagtctcactcaaaccttttttcagtgtggttaccggttcttgcacccaccctggttgcttaccatattgcagctttgttacttgaatagtatttcagtttttaacacatttgtttttgtgttggttctgtttcctagtatggctgttttttttgttttgttttgagatggtgagatggggtattactctgtcatccaggctggagtgcagtggcatagtcatggctcactgcagccttgaactcccaggcccaagtgatcctcccacctcaacctcatgagtagctgggaccacaggtgtgcaccccatgcccaactaattatttttgtagagataggatctcactgtgttgcccgggctggtctcaaactcctggcctctagtgatcctcccgctttggactcccaaagtgctgggattataggtctgagccaccatgcccagtcagcgtttatcagattacttaccattactactttgtcctg

SEQ ID NO: 120023 - DNA, 2891 bp, Homo sapiens
acccaggaggcagaggttgcaagtgagccaagatggtgccactgccctctagcctgggcaacacagtgagactccatctcaaaaaaaaaaaagaaaaaccagaaatattgatggttttgataatgtaatattgagaaagtaatggaaattggcccatataaggaataaaactattcatttgtctgaatagcgttgttttaaaactggtgagatttttaattttaagaagtattgtccaaaatagtgctatggataccattatgctataaaactcaagcattaaacattctaatgacagtttgtacatgtatggttggagggggaggtaggggaagaacagaaggaattacctatctgaaaatgtgttttcagtgtataagttactgcagacagttaagaattttgtggagttaatgttacatgacattgtaatatgaactgagtgttaaaaggctgtgctccctgtgggttaatacaccattttcttttcttctagaagaaaaagtcagcactttttgaagtgtctgaggttataccagtcatgacaaataattatgaagaaaatatcctgaaaggtgtgcgagattccagctattccttggaaagttccctagagcttttacagaaggatgtggtacagctccatgctcctcgatatcagtctatgagaagggtaagttctgccttaagtcttgacttgataaagtttctgtggattaaccttgcatttccccgccccccgaaccccccttaaagtggatagttatgatagtgaccagtctcttcaggtaaatttgtctttgtgccatgttgataactgggatcatgactttaaagcattgtgtttataggattagaaaaacacgtttttttacgccagaccattcttatgtggatgaagtatataaagggatttctttaatctgtgttaggtgttgatgatctcggacttttttttttttttttttttttgagacaaagtcttgctctttcgctgaggctagagtgcagtggcatgatcttggctcactgcaacctctgccctcgcgcattcaaatgattctcctgccttagcctcccgagtagctgggactacagttgtgcgccaccatgcctggctaattttttgtgtttttagtagagatggggttttgccatgttggctaggctggtctggaactcctgacctcaagtgatcctcctgccttggcctcccaaagtgctgagattacaggtgtgagccactgcaccctgccagtagccaactgtttttaataatttaagtgttatgcagaaagtttaaaaatttttgaagtaggtttgtttttgaaaacttgaccttgagtaaaacatggacaactttgttgtattaggctcataatattgtgtattattattgtggataaatgtcttatgtctccgtttattgtatttccttttttggggggaatatgaatataaggaagtgcttccagctttgtaaacttctgcaacatgttaaaagttaatctgggcatacctgaaccaagagatccccacagttacttggggagaatgctggagataaccagatactggtctggaagaaattatggaccttcaaaaattaatatgctggctacaataatgaagcagaagtcaggaatggagaaaagtagttttctatcaaaataaaaatagcatttcagctataataggatagtgattcatattaggagttctaagacatctttttaaatagattgatttttaaaggtggaaataaaggttcagggtctgacaatacaacagatatcagagattttgttggagttttcaccatgcactgataagtctaggtcttggtgttaggagcattggactgagtgtatgtgactctctgtaagataaaaattaaaattagagccaggcacagtgacttagcctgtaatcccagcacttcgggaggctgaggtgggtggatcacctgaggtcaggagttcgagaccagcctggctgacgtggtgaaaccccgtctctattaaaaatacaaaaaatattagcggggcatggtggcacacacttgtaatcccagccattcgggaggctaagtcacgagaatcgcttgaacctggtaggcggaatttgcagtaagcggagattgcaccattgcactccagtgtgggccacagagagggactctgtctccaaaaataaaaaattacatcatgagctattcagattataaactattatgtttacttcctaagatataaaatgatatatggtagatcttttgtacttataaaatgtttttataggggaaccctataatttgtgacatggcttgatgtagctgtttctttaaaagtaaacttttttttttttaatcattttataggatgtaattggctgtactcaggagatggatttcattctttggcctcggaatgatattgaaaaaatcgtctgtctcctgttttctaggtggaaagaatctgatgagccttttaggcctgttcaggtattttggtctaaagtgtgatgagtatttcaatatgtgaaaactactagaatataatagggtctaacttgagaaattctttgggaaaatggtttctgatagttttatttcacgagtctcccctatttagaatattgtgatgcaagagaagaaagcgtttggattatagaatctcttgacagtgtggtggttccacctgcccagtgtggctttgaaattatgactagagaaaatcttttaaagtggacatttactgatttatagaggggcccacagatgagcttctgagatctgtaactcttgaagccttcaccacacatccttctaaaaccgtatatttaactgctgcttcccaaaggaatgtgatctgaaatgggtgaagaaatca

SEQ ID NO: 120024 - DNA, 3862 bp, Homo sapiens
tgcttttatgacgacatcggggcggggcgaagagccaactcaggagactgggacttcctgaagaaggggggcggaaggagtggcggggagcccccccctttccacgccccttggatactccatactggaggagagaggagtctcaactctcaaactccccttttgaggggcgattactgaaatggagaggttaaattcaaaggctccacttttaaaagacctgtccctattccgtactcttgatctgttttcctctttttcggtaaccttgaaaactttcccacctccaatcctttctccccctttgattctgcgcaaatggtggggtcccgcagggcgcgcagtcgcagtcacaccggggcggtgccggtgagaggcgggtgacgcagcggccgtcgctgccattttaagttgtttgttctcgcttcttttctcaaacgcgactctgccccggacccgcgaggcgcccgaggccttcgccgcttctgcagccaccggcgggggggggaacgaggcagtactgccgcggacgctcaccaaccgcttcggcttttcccccctccgggtctcctcgacctttcctgagagccggaatccgactgtagggggaagaaagactcaagagcagatgcttgaactgaaataactttattttggggggttactttgctgacccttagcgcagggcttcctttcccttccccctccgccgccagtaccaatccaactccccatctttctctttgtttttcctctttttctttttctctccctgttgccgctgtctccgcgtccttcccctccgttgccgcccagggcgccgagccagactatgggtcccaggtgggggctgagcggcggcagcagcgcgggcggtccagtcacggtgcgcactgcagcggggatggaggggctcagttggctggtggttttctcttgacatggctcctgcccgtgctaccagcagcgcccccgccgccgccgcctcttccgccgccgccaccgctccgcccgcaggctgcggctagagggcccaaaccccgccctagagtcggtccgtgagtcccgggctccgcggggacagggaggggatttccccgtcacccaccccgccctagctgcctcaattccaccccctgcccctcgggaaacaactaacgaccccaccctaaacaatccaaactctggaaacatggtctgttcaacgtgagagagagctaatccgggaacttaattttttggggggagggtgggtgggcttactttagaagtaatattaacacaattattttctttttttcccccactgaaccttcccatttaccctctcccgcccactccacccgggcgggaattgtttccacgatgaaatgagtgaaaacctgagtgatcctgtgtctcccgtggtgcgagtgagtcgctgccgctgaaggcaaggggtgggggtgggacctgcgggggtggaaggcaggtggtctccgggcaccgcctgggatttgggagaagaacccgccacctttgcctcggcaatgctcacaagaagataaatcgcactccccaccattttgaacgggggcagatccacagggaagtctcccttggggaatgtaggactagttgcaggctgggggtgttgggaacccgggcattaatcaggtctaaccacagagccggaataattaataccgtattatataccccttttccttctgccgtcatgattctccttggcagcagcgttagcagccgcctgagggtgaaaatgtgggtgatggggaagttggtaatgactccgctgttttttctcatggctcctttgggccacagctgcccgcccccggtatacactgtagttgattgcagggaaaccctgtacctctccctttccttctctaccgattttgcacttttctctatgctcaccaccaagtgtaatcaataacaagcactgacaatacatagcaatagtgaaatctgaaataactaagaattaggtactacagccatggagctggctgggtaaaatctaattggatatttcagtttcattcacctaccctgttttggtgtttggttttggttttggttttggtgagttttttttttttttttttttggaaagcaaggatcacacttccccctccctgttccttaatcccttttctaaaaaggggggaaaatccggatggattttagggattggtctggtgtcagctgtgttttattgcacacctaaatcctgattataggcttttcatttctccgcaaagcctttattttggcagttaagccaaatgtgttttccagaaagttagttattttctcctctttctttcctttctttcctccctttttcccgtctgaccccaaacgttattgtccaaacatgactggacagcagcttttgtttcttgaccctgtaatatgacagtctgctaatattgacagaaggtgcagtttttgggttatagtcgtgattttcgctaatcaatcatattagcaggaaaaaaaatgacttgtttctgttgtacttgagtcttaagaaaaagtgcccatagtttagtgacaatttccaaaggctttagtaccacctgtatttcaaaatgggggacccaaactcccggaagaaacaagctctgaacagactacgtgctcagcttagaaagaaaaaagaatctctagctgaccagtttgacttcaagatgtatattgcctttgtattcaaggagaaggtaatttaaagttcttaatggtgaattagcacaagtaatttttgtaagtgtatattatttgttactcttaaattattatgaatattaggttaaagagtggttgaaaaaaagtctgctttgtatgctctgttttttcacccttaggggtgattctgtgaattgagcagttgcagcatgcgaaaagacccttgagcgttctttggtttggaaataaatttgagtctgaagcttagtagtagtatacactgagttgacatggggtgggcaagattacaaaattttatatggagttaacatgggaaaccttatgatggaatttaaagattatctaatgtagagtataaataagatggttgaaagtgtgaaattgtaatcagactgtttatatgctaaagtttatcctgtttcttaaactgcgtaatgtaggtaaccttttctcttacatttaatgaagtagaatacaccttttaggagcaattaaatactgaaatggttaatttgtgtttagaagtgtgattttcttttttacttagagttcattttgccttgtatagaagtacagtttttaaaaactcaaaatgacctagaggaagtttcatttttaggggcggtggaggtcttaatcagaattagttccgcagttaaatagcaaacagtaagttgtgagtagtcaaggatgggatgataagagcagtattttttgcaacttaaaatgaacattttcttaaattatcagcaaggcttatttgaccaaagatgaggttatgaatgtaaggaagtgctacttggattttggtgcttaaattgttagctaatttcagatcagaaatacaatcttagtgtggtatctattaagtatctggaagttttccaggtttccccctactgtttaactcttattatttttgttgctgagacaggcctcactgtattgcccaggctagtcttgaactcctgggctaaagtgatcctcctgtcatggcattttaaagtgctgggattacaggcaggagctgccacgcacagccccaactcttaactcctaaaaggttatttgtatttaagaacattcttagctgctgaagtatagcattgtgaagtgatttttaagtaatttttgaagtgactgt

SEQ ID NO: 120025 - DNA, 1037 bp, Homo sapiens
cccactgtgctttgtgtgtgattatttaaaatttttgttatgaaatttttgaaatatttaaaagtattttaataatttacttccccagcttcagcaattaccgctatatggccaatctggtttcatctatgtccttatttactccacttttccttcagtggattaatttgaagcaaatcacagccaaataatttatatatttccagcagattacattttaaagaaagtcttgtgtttactagctacagtgaaactatcttgaatataaaggatactaggttctgtttggttttggttctacctccaaaactgagaccttgggtgggttagttagcatttcagccttagtttactcatctgtaaattgggagaactggactagaactagatccttgtgagttgcatgcaaaattctgtgtgaatgtgcttttatgtgaatttttttggggagaggattcacagagtattaaatagttttccaaaaaggttaagacccattaatatacaagaaactttctggctttaagagtctattattccaatgcatactctatatacagaaaataataatagtaatgttacattgttttaggcaaaagtctatatagcttatataaataaaagttaaatcttggaaatggtctttttttttggtgacagttacttagctggcttctttgaccattattaacagaaagcatttaaataacacctcttgttagtaaggttccaacgttacattttcttttatttgtctggagactgttgactaatctataatctaaattatatctgaaatgttgatgtaatatttgtcctcacagtagctggcatttgtccttcagttaaatggtgagataataatcagcagtagaaactttaccgtgggaaaggtgaactcttatcatgtgaagtacagtgtggaatcagtaactttctcacgctggtatggtatcatgttcttgctaaccttgtttgagtattcaccattgtttgctatcccatggtggcagtataactaatgatattttgcaaaa

SEQ ID NO: 120026 - DNA, 1110 bp, Homo sapiens
tgcagtggctcacacctgtaatcccagtagcttaggaggttgaagcaggaggatggcttgagtctagaagtttgagactagcctggacaacacagtgaggctctctctgtatgaaaaaattagctgagcatggtggcttgtgcctgtattcccagctactcaggaggctgagtcaggaggatcacttgagcctaggagtttgtggccgcaataagctatgtatgatagcaccactgcactccagcctgggatacagggcaagacccggtctctgaaggaaaaaaaaagggtagggggaaaggatagttattaatatgacagctctgataattggattgccttgtaggggtttacaagacttggaaataggctttttagaagaaaaatgtttagataatgagttcgaggtatgaaaggaatttgaatattccaggagagtatggcataaggaaaccaataaaaatatggatgaagagtaaagatgaatgagaagaattatgcctataataagtactagtttttaatagaatggtagtatacatcagaagaagaagcaactgatgttttgtaagcattatggaagattattatttctgtatgaattatgggtcattgaatgttaagtactgatgataaaattgaggcctagagaagttaattgacttgctgaaggtcacagtaacatttggactcattttgaattgccttgaagacaggaagaagagaaatagatggtaggatttttattaggcaaaattaggaaaggttgactggatagaaataaagcagctctttaaaaatattgtagattgaagagcaggatttgtgacactcatatctgattaggttaaaaattaaatcaaggattagttaaaataaactgctaaagttaaatatcaagacaaataactatatatcatgttggtaatataaccacaggtggaacacattatccttgtaaccctctgcgatacatggtaaaaattaaaataactgcgaagaaatcccaaactttattacatttgttgtttgaactttattatatttgttgacagtggtattagtgtaattttgaaaaaaaaaaaaaagttgtgtatattttaggactga

SEQ ID NO: 120027 - DNA, 1141 bp, Homo sapiens
aaatgtcagtgttacataaaaagacacgacctcacaaaacaaatgtattgcaaaaatctttaataatctaggtggaagatatatacgtattgtacttttgttgtaattctgaaggattgaaatcttggaaatgttggggaaaatagaataatattgattttattttttaactttaatcttttaaaaatgagtattactaaacaatatgggggtactaagattggaaatttttttgaaacaaattactgggttttgacagtaatgatttttaaagttatatttaaaatattattttagaaaatccatcctctcagtattggaaggaagtggcagaaaaacggagaaaggcgctgtatgaagcacttaaggaaaatgagaaagtatgtattgagtataatttgtaccatttttaaaaattccaggattgttttgctgcttagcatattttattagagcaatatgggctagctttagtattggcttaagaaaagtttaagtaaaaaggcagctcttgacaattatacaaaatgaatcccgttgtgttgagagtcaattctatgctgcatgtcctccatgttatatacttggaggtatgtaatttgatttatagcatagcaaatctatggaatactgaactttatttatgtaatacagcttcataaagaaattgaacaaaaggacaatgaaattgcccgcctgaaaaaggagaataaagaactggcagaagtagcagaacatgtacagtatatggcagagctaatagaggtaggtaatttaatagttatctggttcaaatttatgtatttttctataaagttgaggtagtgtagtgtgatcactttgaagtgttagggctctggaatcagatttcctggatttaagacttaacttccttcctaacaccattaagtttgctgggtagagtgggtttatccggtcagggcttcatcttcctcatccacaaaatgagagtaatgatgcctaccttatagacttgttatgagaattaaatgagttacaatagatggacaattgcaaggagtacttgcacagagtgaaagttcagtaacttaattattgttatgaagcaaaagaccatattttttggtagagttattaaaaggaattatccctggaaaat

SEQ ID NO: 120028 - DNA, 1042 bp, Homo sapiens
aggaagaaagtttttcaaatcaaaacttcatgtaactgaattgtgaccttttacatttgagatccatgatagaattaatatttgaagttttcatttggagatactgtggtagctgtcttaactgccttaaaagaattagtccacagctgattggaaatgtagaacacctacttgtccttgcagctgattggggaagtacctgtttatactctgaaataatttcagtgctttttaaaaaaaaaagacaaattattaaacactttgactttgctgactatgatctagcatggtagagactttgatataatactgtttataaatgaatttattgaggggcaagatgaaaaaaatctcatagctatatcagtatgctatacgggtcagctatatcagtatgctgatcagcttaggttttaacatttttacaataaattattggtttattctttaaaagagactgaatggtgaacctctggataattttgaatcactggataatcaggaatttgattctgaagaagaaactgttgaggattctctagtggaagactcagaaattggcacgtgtgctgaaggaactgtatcttcctctacggatgcaaagccatgtatatgaaatgcattaatatttgactgttgagaattttactgccgaagtttacctccactagttctttgtagcagagtacataactacataatgccaactctggaatcaaatttccttgtttgaatcctgggaccctattgcattaaagtacaaatactatgtatttttaatctatgatggtttatgtgaataggattttctcagttgtcagccatgacttatgtttattactaaataaacttcaaactcctgttgaacattgtgtataacttagaataatgaaatataaggagtatgtgtagaaaatttgtctgtttctatgcttttatgttgttctctttccattcttttgctaactaccttggaggagacaaggagaaaacgaacttaaagtatttagactgagatagctgaggtttttaactcccaaac

SEQ ID NO: 120029 - DNA, 1039 bp, Homo sapiens
tatttaactatgctgaatctttctcaagaaatatctgggtttctcaagtggacccaataacgggattggaaaaggggcagaaagaggctgccctagtttcctgggttgaaaagaattggtcactctttgctttcacaatttgccaagattgcttggatcaatttccacccccgaattcctggataaatgctttagttggaagtcactttccctactttatttgtcccagggtctggagcagacaaagacctccccacagtaattcatgcttgtgtgacctctgccttggattactgcaaaacattctcttcccatagatgtctaggaagctttctttggctggtgccaaagagatggtgtcattgcaggggcataaactaaaatagcacattgcactaaagctatgcaggctgtcttagccaccagtccacccccctgatttatggcccccagtgacctcagggtaacctgtttagatcaggccaatgccaaaaggggcccaaaactacaagtaaaacattttagatgtttattttaatatctctatgagcagcaagccaagtcttaactttttaggaatgatgtgtgtaagatatactagagtatgtcttctatagggcttgagttgaaaactaaaagtacatgcatactcattgtaggtatgataatttaaacaaagaaaaagaaatgtgtagtttttgtgaccaaaatattaaaataaatctggagggttgcactcccacctctctttttgatagaagccacttcacttacacaagccaacatatttattaaaaagatgtgatttatctggctaactatgcctcctgtattttttcaagagacaggctctcgctctatcacccaggctgaagtgcagtggtgtgattgcagctcactgcagcctcaacttcctgggctcaagggatcctcctgcctcagcctccaagtagctgggactacaggtgtgcaccaccatatccagctaattttttaattttttttgtaaagccagcctctcactatgttgcccaggttg

SEQ ID NO: 120030 - DNA, 1737 bp, Homo sapiens
cttcaattttcaataaataactagaaacagagaaaatagctttccaagtcatcaaagaaaacccatggtgagaaggatattaatggattaaaacaggcataaagaggaaactgaaggcaaagcattggcaaaatctagaaatgattatcagcttcagctaagtccgatactcaccagctccaaggacagagtagggaagcatcagttacaagttaggagaaacagcactgcagtattgtcggggagcaaggtgagggctttccttcctctttgagggtcagttgtcagtctggggccacactgcttccagaagggcacagaactggaaacctttaacaatggttaaaaaatctgactgctcttgttctgtcgcctgccactgctgcctgagcccgagtggttcactgcaccctgaagacagattccagacgctgggaactcgcgcctccaatcccagacactatgtccagcaaaggctccatgagagttctggcctatggtggcggcctggacacctcctgcatcctcgtgtgggtgaaggaacaaggctatgatgtcattgcctacctggccaacactggccagaaggaagacttcgaggaagccaggaagaaggcactgaaacttggggccaaaaaggtgttcattgaggatgtcatcagggagtttgtggaagagttcatctggccggccatccagtccagcacactgtatgaggaccgctacctcctgggcacctttctcgccaggccctgcattgccagcaaacaagtggaaatcgcccagcaggagggggtgtcccgcggcgccaccggtaaggggaatatcaggtccggtttgagctcacctggtactcgctggtcccccagataaagggcactgctccctggaggatgcccgagttctacaaccggttcaagggccgtaatgacctgatggaatacgcaaagcagcacgggattcctatcccggtcactcccaagaacccgtggaacatggacgagaacctcatgcacatcagctacgaggctggaatcctggagaaccccaagaaccaagtgcctccaggtctctacacgaagacctaggaaccggtcaaagcccccaacacccctgacatcctcgagatcgagttaaaaaaggggtccccgtgaaggtgaccaacgtcaacgatggctccacccacccgacctccttggagttcttcatgtacctgaacgaagtcgcggacaaacacggtgtgggctgtactgacatcgtggagaaccgcttcactggaatgaagtcccgaggtatctatgagaccccagcaggcaccatcctttaccacactcatttagacatcaaggccttcaccatggactgggaggtgtgcaaaatcaaacaaggcctgggcttgaaatttgctgagctggtgtacaccgctttctggcatagccctgagtgtgaatttgtccgccactgcatcgccaagtcctaggggcaagtgggagggaaagcgcaggtgtccgtcctcaagggccgggtgtacatccttggctgggagtccccactctctccctacaacgaggagccggtgagcatgaacgtgtagggtgattatgagccaattgatgccaccgggttcatcaacatcaattccctcaggctgaaggaataggaatatcatcgtctgcagagcaaggtcactgccaaatagacccctgtacaatgaggagctggagcctcctcaatttg

SEQ ID NO: 120031 - DNA, 1035 bp, Homo sapiens
ttttagacaagagtttccctctgtggcccaggctggagtgcagtggcacagtcttggctcactgcaacctccgtctccctggctcaagcgattctcatgcctcagcttcccaagtaccttggactacaggcacccaccaccatacctggctaatttttgtatttttagtagagatggggtttcaccatgttggccaggctggtctcaaactcctgacctcaagtgatctgcccacctcagcctcccaagtgctgggattacaggcatgagccactgagcccagctgagacaggttttataattcacttaataaaatcatatctcaggctgcaggaaaggaatgtcaaatctgatttgtgccaggcaagttcatcgtcattagtccaaaagaggagagaggtctattggaaatgaggagctgctgctttccatctcaccctcggtttttagtttgtctctcttcagtttttgttgctgctttccctcgtgtactcaggattatgttttaaacactcacaacctggacgattttggttttgtttacttattggctgtatgtttacctcaaccaggccaaaggttctatggactctggactggatgcactactgatttacttttttttctgatggtgggggtggggagatggacttttgctcgtctcccaggctggagtgcaatggcataatctcggctcactacaacctctgcctcccttgttcaagcaattctcctgcctcagcctcttgagtagctgtgattataggcaagcaccaccatgcctggctaatttttgtatttttagtagagacgtggtttcaccatgttggccaggcaggtctcaaacttctgacctcaggtgatccaccagcctcggcctcctgaagtgctgggattacaggcgtgagccaccacgcctagcctatttactttttaaaacacttgaatggtcttgtaatgttagctgttctcagtcccgcaaaagtcgggtttctgtcaggcaacgcgtctgcttaatttaggtgtcaaagagag

SEQ ID NO: 120032 - DNA, 1006 bp, Homo sapiens
tgtggattggaatcatacaatggggaacaaatggaaaagagtacttttgaaatagtgctggagaccactgtgaccacagaatgtcaagacacgtgctgccattactgttactatttggaaaatacattcttgtaaatgcaaccttagggggtttgagggggaagtctgttgggaaatgaattgcaagaaaaatattacaccctgattgggactgtcattttgcctcttattgcagcttgccagtcgacatgccatctccaacaggaccggctgtacactgtgctgggcgggggtgggtcccgtgccaggtcattcaattccttgtgagttctctttggagctttggtgggaggcaagtggtgctccctccaacccctggggccaggacgaggacagggaaggggtgggcgagggagcctgaggccgcctcatgatcacccaccagcgggagaaaatgcggcgttggggtgagcgggtctggggagacaggatgagcgctggggctgcctgctgagtggccgccgtgtcactctggatggtccctttatgcactgcagcagcttaactaactcccttttctctggtaatatttgttgcttaaaagaggatggctttatcatctttctcttaattaatatgttaatagttaatatggctatatcagctttctcttggttagaatctttctatatctttctcatattgtagatataagtatgtaaacaggcatatttcaggctcaggcatatagaattgatcataatattaaccatactattgtgggtctgttttatgtgtatgtaatctgttgtttttgctagctcttactcattgtgccttggctgtttagtaattttgtaccatgagctgcttcatggtttgtaattctacttgcagaaattctctttagctagcttaaagatggggtccttcaaagagaattttccccttcttctaggtttatgagaactgttagtccaggggcactctaaattaaatgttcagc

SEQ ID NO: 120033 - DNA, 1015 bp, Homo sapiens
aacagattacatacacataaaacagacccacaatagtatggttaatattatgatcaattctatatgcctgagcctgaaatatgcctgtttacatacttatatctacaatatgagaaagatatagaaagattctaaccaagagaaagctgatatagccatattaactattaacatattaattaagagaaagatgataaagccatcctcttttaagcaacaaatattaccagagaaaagggagttagttaagctgctgcagtgcataaagggaccatccagagtgacacggcggccactcagcaggcagccccagcgctcatcctgtctccccagacccgctcaccccaacgccgcattttctcccgctggtgggtgatcatgaggcggcctcaggctccctcgcccaccccttccctgtcctcgtcctggccccaggggttggagggagcaccacttgcctcccaccaaagctccaaagagaactcacaaggaattgaatgacctggcacgggacccacccccgcccagcacagtgtacagccggtcctgttggagatggcatgtcgactggcaagctgcaataagaggcaaaatgacagtcccaatcagggtgtaatatttttcttgcaattcatttcccaacagacttccccctcaaaccccctaaggttgcatttacaagaatgtattttccaaatagtaacagtaatggcagcacgtgtcttgacattctgtggtcacagtggtctccagcactatttcaaaagtactcttttccatttgttccccattgtatgattccaatccacatgatcttctagtgaatgaggttgctgagatctacagaaaggatagagaaaagtatagcagaatagctcagggatggactcaaagtatgccaggtaattaaagaaactgaataacctctacaaataaagacaggggcactctgaaagagaaagtccttttaggctgggcataatggctgacacctgtaatcctaacactttgggag

SEQ ID NO: 120034 - DNA, 1085 bp, Homo sapiens
ggatgggagagtgttctgaaaacctagcgtttaagcatgtatatgtgtgtagcatgttatactgtaacaaggtatgtgcgtctgtgtacagatgtgttttgagccctagtgacctatattccctcctgtaccattcttggcacactacacagcctacagctcacaaagatgatgtttaatcggcgctgacaacaagaggaagttctgagcacccgttgatctccatgtgtggaatttgcccctctgttgtttcttttagctaataatactttggaggaatttgtgtatgcccttccgttggtgactgttaactcagcaggtaaaacttgatgtagagaggctgttgctaggtttgtatggaagcccctacttctgctgaattacagacaaacctgatcttttaccagaatttacagtatgaaattattcacagacgcacgcgcgtgtgcgcgcgcgcacacacacacacacacacacacacacacacacgcacctctcatcatgatcccagcagatcctcttctctctccccaaccctgtggagtctgcatcttttgctggagtgagtgacacatccggttctgggaggctgcgacctttccaacaccccaagcaaacgccagaggctctgaagacgcctccagaggtcctgagaatgagtgtagggcagggcttgcctggctggtcaggggataaggatggctaaagtgggtggcagatttttactttatataaggagttgtccttaagtctggaaatggaaagtgtaggtaattacttaggcccaagagaaagagtgaagggtagagtggaaataaggtgtctgggtttctattcatggttctcaaaaggaatagtttgtatattttaaaagttgagtttgacctttatcttgaaatggaatttttgtttttattaagtattgcctatctctttcaagagagtgacatattatgcccgatatgatttttctgggcctttcagtggtcaagttaggctgggatagaataaatacctgcacctgctttcctctaaattcaagtgctcacaagagttctgctctgatcaattcaaaatggcgaccg

SEQ ID NO: 120035 - DNA, 1133 bp, Homo sapiens
atacttttaaaatttaatttttgaggtcaaagctttctagggcagtagaaagcatgatactccatttacccactgtagaggagtactgtagtttatctaaccatgtcccttattgtcagataatttaggttatttccaatattttgccttataactgtccatgtcctcatatttatttctcttggataaattcgtggaagtggaatcattgccatcattgcctaataggcattttgaaggatgctttttttttcacctgattgttatttaggaagtctcaatagagaataaatcctccaccttgtcaatttcattgtcttaaacaagagtctacttggcagaatggcttgttctctttgcttggatccgtgtatttcttagaccagtgctccttggaccctagctcctgaggcaaacctttttcatgcaatttagggttctttcagatctccctgtgtggaagtgttgtcttctactacagtatgtttgctggaatgagaaagtcctgtgacttcacttgtggtttcagagtcacagcttccaagtatcattgtcttggcagaatcagccatagctttttccttggctgaatcctaggtaggtgtgagcctgtattatatgattcagatctttgcccttgtcgtgggactttcttaccttgggcctttgaatgctctcataaatggtagttgagtagattcacaaatgataaggcacatggcactttcattagatgaaatgtaattaacaagaaccataagctaatatgcatgtagaactagtccaatgtcttagaagataatttagtatcataatgaaaggagacattgtttttcttcccagacagttctgaaggcagttgattttatctgtatagccaacaacaatttcttaagtctcatggtccttccccactccactagaagctgcagagtagtccttctcattctcatttactgtcccaatttcctgaccctttcactatctccctgtcctgggagaggggtgtccaggtgatgaggacctatggcctcttttctgccatgaggagctccttgtggagccctgtcctccttgctgaggccctcaagagtgcagcctgcttttctgtgtcctttcaaagctaccattgt

SEQ ID NO: 120036 - DNA, 1122 bp, Homo sapiens
caaagtgctgggattacaggagtgagccaccccgccgggccacatctttttttaatctattccttcactaatagattgtgggttgtttccaccttctcactatgtgagtaatgctcttatgagcgtgcatacaagtttttgtgtgggcatatgtgctcaagtctctgatcccctagatgtcttgcctatcctacagatccaggcctaccacaaaaaagtgtagaaggatcatataccatgagaacataaaggagggacatgtagacttaattagggagtcagggaaggctgcccctgaggccaccatatccaagctgcggcttgagagataggttgaatagaaaagtttttcaaactgcagctgatcacccattagtaggttgtgaattcagtttagtgaatcatggccagcattttttaggaggtgaactaaaatagaatagtagatgttagaggacattccatgtggtaagggtaagtattgttgcatgaaatttattttcagtagctatatgagcgcatctagcaaattgtgacgtaagaagtattctatattccgggttgcaatcagaaaaatatgaaagccactgctctagggattttttaaaaggagattatttattaatctggagctttaaatatggttccactagaagattggagagatacaggagagagaagaacctagaaagctgaagatcctttgaaagcttaaagttctgtgatttctacacttttaaaatgattcatttattcaacaaatattaaaatatttaccataggcctagattgcactaaattctgggagcatatgtaagatttgtgtgattttgttttttttgtgatctggcagagaagatgtacaagcaattaaaatgacttctataaaacatggtgggttgaggccgggtgcggtggccaaggtgggtggatcacctgaggtcaggaggttgagaccagcctggccaacatggtgaaattccatctctactaaaaatacaaaaaactggccgggtgtggtggtgggcgcctgtaataccagccactcgggaggctgaggccagagaattgcttgaacccaggaggcggaggttgcagtgagccaagatcgtgccactgcac

SEQ ID NO: 120037 - DNA, 1032 bp, Homo sapiens
ggttaagataccaaggatgatttccaaattttagacatccttccccttgttccaccaattttttttttcttctgggaaaatagccaggatgattgcaaaacataagcttgtaaaaaggcaaaactccatggatgtaagaaagtaaatttcttgagggccacacccatgataacgctggaattttcatttaattcctaactcattttttgttgtttttgtttttttaaactcaaatgtgtctctttaattgaggtcacttacttggttgggagattaatattctggtggggaaactttctttttagagtttatattgttttattccttcagtcactcagtattactaatggggtagcttttggaattttccatcccccccactttcagattacttttgtctttttttttttccctgagaaattagtgaaaacagtttgaagtcttgccacgttgtaaggagatttgcattatttaaggaaacagctggcagatctctataatgccccacctctgttctgccagtgcctaaaatttcctttgcatgactcagttaaaaaaaaaaaaaaaaaaaaaaaaaaccagaggaggggaacgagtggagagaagaaacccttgtttccctttctgagttgtaaaaagcttttatcaaggtttacatttagtcatgcttctgtcctctagtggatggcagcatgtgatgaactcagagaaactcttctcccaaattggccagtaagaactctgcaaaaactgtggatgagctgagcttacctcccataattttattttgaaaataaaaaattttccccacatagtaaacacagttatcttcacgagtgtgggaatgattaagaaaaaaaaaccaagcttagattttgcaagatgggtgacctgaagttttgcctagagggagagaagggtctcttcctcctttcactctgttcttgacagcgcctgcagcctgccctggaagaacgggtttcttcttcagatagaaaggaattgctggctcttctgccagccttgcccata

SEQ ID NO: 120038 - DNA, 1042 bp, Homo sapiens
ctgtcttcttcctcctgcccacccctctgtctacattagaaacaggttttggaggagtagtgggaacattgggtgatttctagtggggttagagaaagcagtacctggttctttggccacatctaccaaagcaaagacctagacttgtagaggagagtattgtttgcttgtttgaggattgtatttcccaggtttgttcatttgcatgagtggctgaataatgtaacagagacttcagaagtaaggaaaatggttgtcaccaaaatatcttgttttacctttatttggactaaatggaaaacacatgtttaatagctaaggctattgagtgcttatcatttgccaggaactgtttctgagcctttcacatataacacctcattttatccaccctctacccctaacaaatggtgtggtttgagttggccttggtgaggtatgaaaaggaaacaaagcagtgacctcttcctgcaggctggtcagatgtttgggataacattccttagcattcttggtggaagtggtgatttcgttgaaagctgcttcccagttgctctggagtgcaggtgggaggggtggactttggcttttccaaaggatcccaggaatgggaaggaccttaaagatctagaccaggggtatccaatcttttggcttccctgggccacattgtaagaagaagaattatcttgggctacacgtaaaatacgctaacactaatgatagctaatgatcttaaaaaattgccaaaaaaatctcataatgtttaagaaagtgtatgaatttttgttgggctgcatttaaagccatcctggactgcatgtggcccatgggccatgaattggacaagctttatctagactgttctgaactactcatctgcctcccccagcccccacccccaccccacacatccagaattctccacccattggttgtctggcctctgcctgaatagctgagtacctgtcttttccaaaactaccccttgaggggagacttacagcaccctgtagcatagtatatgatatttggctagtaa

SEQ ID NO: 120039 - DNA, 1012 bp, Homo sapiens
caacttgatttccatcacaggttttagattagaagaaaccagagaaacacagccccaattttctatttgctagttttccaaacagtaagttttcattgatttcactggctcccctccggctactatttgctgtgcacaaacaaagtctgaatgagcattttgtagtcctgaaaaggagtagcatatgggcttcaacagccggtcatattttcttttattactatatttaaagcaacattcaagattaaaaaaaaattcctggcaactagcataacaagctgcaataaaatcattcctggctattgatatgggctactttgtgcctcatgtcatgttattgaatccaacttcttggaattgactgtcttaatctgtcacttagcaaatttatattggtgaggaagaacaaaaacagatttataacttgcatatctcttcaagcttctgttaatatgctcaatattagaatgttctacttttagcgttttgggtcataagctatagaacattggggcttggtgagaggatatgggcatggggagaggaatgaatatttggcattatttatgtttgaaccattgagctggggtctttaggtttattatttcatttaattcccactctgacgtaggtggtatttccctcattagtagataaggaaatgagctagtaaagaaaactatttaaatccagatctaaaatggatctttattctgtgccaagctcttgggggaagagtatgtgtggaggaggagttgtggggactcacagagcagtggcaaggcaagccagagatacagcaaagggatatcaaggactaatgaggtactttaaaggagatcgagtcatggtaaggcatttaaattagttttgttagcaagtactgcatggaacaggaagactctgtacatgctcagtgtagggcttggtccgtcaagactggctaggagttttctagatagagccttgaatcttgcattacagtcactacagagcatgagctctgtggaca

SEQ ID NO: 120040 - DNA, 1068 bp, Homo sapiens
ataagtgcagtacttatttgtcagggcatatattatgttggagtatgatgtcatgaggcttaaggaaactaatgcttatcatttgttagtgcttaaaacaaagtagagatagccaaatgcatttctctacttccttattgccatacagctctccttgtaagttaataagtatcttattgcaaatcagccctgtatctgttccaaattcaaatgttgatggttgagcttccagtattttctcccatatattcacactgaataacatttcctgaggattgcataagacccatttaacatttgtgaactatgagacttctttgtacatttctgtttctttagttgtattacggtaatcgggcatatgtcttctaaccttgatgatctcacctctatataatataaggatgttgggagaaatatgaaatctagaccaactctaaaaaattgaatgtcaaggtaattgtcttgtcacacaatggtgtaaccagccaacatcctcgaacagatccgtgtccataatggcatcattgacttctgaactgtatggtggtgttctctgaaaggtgctatagagaaaacacaagtgtgaagggcgattgtgatggttgtgggtcagaggctcctcaagtggagtgaatgaggccagccaggaatgaagacaatgcagtgaatgattcttttgttgcatagtaaaatgaagtactagaaaatgttctcttaacaaagaatcatgtttggtcagagtggacgtgatatagtgaggagtttttgtaaattcttcatttagcgactaatattttggctcagttaaagatatgaaaaacattttttaacaaaaaggtgttagtggccgggcatggtgggctcactcctgtaatctggctttaggaactaactagctggttctgactagcgtatgagggtggggttaggttttccctatcttcccccttcttccatagcactttgtgaggctgaggcgggtggaccacctgaggtcgggggttcaagaccagcctggccaacatggcgaaaccccgtctctaccgaaaatacaaaaattagcca

SEQ ID NO: 120041 - DNA, 1038 bp, Homo sapiens
gttctcagcagggtcaggttgcctctggctgggcagtgggtgtccagatgcagggatagtggtgtagatgcagggcagtgattaaaggctttggagtttgaatcccaaccctgctcagtgtgaccttgggcaagttacttacctgtgttaagcctcaataacctgtgccattggggcctttataaagattaatgaggtgtaatataaaatacttcacatagtcattttctggcacatactcagtacgtggtggaggttatggtgattttattaaaatagaattggctgtagatgcccctccccactttccaagatcccaacatcatgcctagtctgcctgcattgttgtcgagcatgaagaaataatcgattttgtaatttattcggctccttattacttttccattcttgcagatccattgcccatatccttaagatgttttctttaagccttaccctagtcagagactattttctaaatagaactaaaagagaaatttgattgagcatctgaatctgaccttctccccaattaacccagttgggcagaccttcatttagagtgtcatttatttttcaagccacgtggtaaggaagcagagggttctccttacttctaaagtcaatttccattaaaaccttcagtgttcagtgtgtagcttaatgccttttaaaatgattgctatttttgaaccagtgtttttgtcacaacgttttgagtgtagaatattccttatttgacaaccctgagcttgtaggagtttataaatggctaagaacaatctgattagaatgtattgcttttggttggaggccaagaatattggatcattggtttagggtatgacacttaaagagaccaaagagcagagtacataatgcccagataggccaattcatgtagctttgttccataatgtaagattgaaccccaaaccctggccacctatctttgagatatatgctgttggccacaggagcattaattactccgggcagatcagcagaccatgaactacatgctacgaggggaaatcc

SEQ ID NO: 120042 - DNA, 1346 bp, Homo sapiens
tcatcaccggtgacttcagtgcctccatcactcactttgaaacatcccactcttatcaccacttcctcttctctcgcaagcctcatgtggtacctccaacctcaatagtccattgatccaccaggtttttcagtccattgaatccatcacgtcttcacggacccacactcaccccatgtcctcacttctccccttccccagcttggagtccacgatcaaccactgtaatctctaccatggcatagatccttatcacccttgacccctcaggcttggtcattcttgcttgactaaatcacagttctggttaaatccttccctctcttcacctgttctgtgcttgcacccatgaggccaaatgtgcttggagaataccacagcaccatattgtttgtctcactctaagctgatcacagatcttaagtgggcccttgatgctacctggcagtctcattgtgtttccactgtctcttcattcccaccactctctcagacaactgttgcatactttctacttgctgttcaaacatccatggtctccttacacttggttgtttcctttttcaccagaaaccccagaaataatcagtagagactgccaccagcacacccaccacctgcctgcgtctgtgcccatgctcccacctccttgggcatgatgttctatctccatctacacgtaccttctcaaggacattgctgtatgaaattttccctccctttcctatgtcatctattttcttctttctacctgattcccactggcatatgagttattatttttcttattaaataaaaacatcctctcttgactctgatttctcttccagctactagccagtttcttttcttgcttttactgcagaacgtttgaatgagtcatctgtatgcattaggtctaacatctcccctcccattctatcctgagcccatcacagtcaagtttgcaccttaactcaccgtacttcactggcattgtgcttttcggggccacgggtagcatttccttgccgaagcccatggtcaggacccactcccttcttacttcatttaccagcagcatttaacagtcagtaagtcccctccatgaaatacattctttacaggactgcttggacacacatgcacctcatttttttggttttcctggtctttctcagtctcctttgctaattccttatcgctccaaactctaagcaaagtgtttcagggtacttgttcctcatcgtgtctactctcagtgctttaaatatcacctgtaagatgacttctgcattcgtatttgtagcctggatctctctcttgaactccagaccccttcatctggctgcctgctggacatctct

SEQ ID NO: 120043 - DNA, 1033 bp, Homo sapiens
cccatttgtttctcttctaaagtatataatggggctgggcacagtggctcacacctgtaatttccacactttgggaggccaaggcaggcacatcacctgaggtcaggagtttgaaaccagcctggccaacatggtgaaacctcgtctctactaaaaatagaaaaattagctgggcatgatggcacatgcctgtaatcccagctactctgggggctgaagcatgagaattgtctgaacctgggaggcggaggttgcagtgagccgagattgcaccactgcaccccagcctgggtgacagagtgagactctgtctccaaaacaaagaaagaaaagaaagaaagaaagcacacagtgggtgaagaaagtactcactactcaggtagtgagtacctgaccaatgtagaatgacttttaaaattccagacttgggagcatttctcaggatgccagtaggtattaaaaattatttttgaccaagtaaatttggagaaagatgggttaagtgaagttggatagggattttcttttttatcggtgcttccaaagggggatggtatatgcagcatttcccaaatttatttgaccagggaccatgtatttatttatttaggagcagctcagaggactagtgttccatggagaacactgtgacaaaggctgttctacaccacggaagatttttttcctctctctcttttagagggctcttttattttggtgtatacatgtttattattcagagccagcaaactctgtaactttctccattggttatataaaaagtgttagcattttccttggatatttgtgaggttttgaagggccgggataatgaccgttgagtgagctcttacttggtgccagctacattgctgagcatttcctctagagtctcattagtgggaagtacaaattagcagttctgctttttaggtgagaggataacttgaccaatatgcaatttatgcatcatttccaacatgccagacattttaaggtgaagagattttaaaaatcatgtatagttttatat

SEQ ID NO: 120044 - DNA, 1043 bp, Homo sapiens
ttattaaatagctaacatacttactttagtttagatttatgatatagttctagttttagggttttcctgcatattgtatggtacttttatctccatatataatatatttagtatatttatgcttatttcacaggaactaataacatttatacagttttgaattattttaacggttcacatttgtttcacctttgcttttataacattgttatgtctcagctcttaattaataatgttgcagggatgcaattgctaattttaatattcccccccagaagaaacattttatacacaaacacacacacacaaaatgtatatgtatatatacatacacacacaaaatgtgtgtgtttatagatacacatataaaatgtgtatatgacattgtgtgtgtatatatattggagtaaaaagcaaggatagtcagctcctatgtttgcttatacaagacacaggaactcaagctcgcttgcttgtaaagtgaataaaattgtgttcttatgcaagtgtcacagttttcctgggactcagtttcctcattctcaaagaaggaatttaactgatgaattcaaggatcaactctaaactcattgaattgccttattaatctcttgggtcatgcaattcagtgatataactagggttagcctgagtgtttcaaagcaagattaatggaagctcattcgccagctgtcgggttaggagattattcacaaatgttgccctgtcatttgaatctggtagggtttgctgatgaataaatgaaccccattatactgacagccacctcactaatcgatcctaactaaaccaccttatcctcttcaccttccaattgtgtagccagcaacttgccagatctcagggacgttgttgggacatgtggaaggtctgagacagagggccggaaggacagacaatgccaccaactctattaatcagtccgcatttctcagacctggctctcagcctactgaatttgacaaccaaggatttgcgtgtagttttttttttttttcattttcaattaatttcccttttta

SEQ ID NO: 120045 - DNA, 1084 bp, Homo sapiens
cacagccttgattgactttctgtgctcagcttagccgttcaagcccggggttgtgtctgggtaaagctgtttgactttgggtaagtcctttaacaacctgaggtcccagtgttcttaactttctacagttttgttctaatccagcattcttgaactagcacataagcataacttgctaaataagcaccacttgctaaatacaggcttagtgacaaggaagttatttggaaaatgaaaagagggcaattctcccatcaggacttgagaagccttggagttttctttctttattgaaaagactcatgaggcctgtccaaatctcaaagttgcagagtggaaagttttgtagtaagcttcatggatgtgggatcctggctcaagatctgaactcctagctcagccccttagtattcatgagggcctctgctaagtaaaaggaacctataggcatatgggaccccacaggctgtatgtatgttcttagctgagtatcaaaaaggaaacttccataaatgttctaagactgagagaggcacagctgagaagcaaagttagggatgattttttggaagcttagcctgattttgctctgtgcattatataaatgttagctggagtacaaagaatggaaagcaagagggcaaaggtgggaggtgtttgtaatttgggaagtgcaaatgagtacttagttgttgttttttttccattaagtttgctgttgatatagtgagacttgtgactatgtatcttatgcattttagtatcacagagacctgttttacttaatctgaataatctgttgggtttttgggctgctgacagatttctcatcttgagatttcacctgtgatttgttctaaaagaactttgatacagggactctttaagttaaaactaattctgagaccaagaagctgtcccagctcgtaattcttcttacatgacaggagccaagccatgtggccttctgaggtttcagtatcattaaagtcccgtggaaacaccaaagcccactggccccactttttggtgcttatactgatgctgctgcttctgtcttacaggtccttacatcatgccgagc

SEQ ID NO: 120046 - DNA, 1104 bp, Homo sapiens
agcactttgttgttctactccagggacagcactcaggtacagtagacgcatcttaattgacctccaactaatcttgctgagccaaattgaccaaaggtggccattcctatccctgatgatgctgactgatgctagctgcattttcatagctgttagcatgtaagagagggtacctgctcacacctattcacacctgctaccacccactgaatgagatgctcattgagggtcatgggtttattcctaaacctgtttatagcagttatagtagcaaatgtttttaatgcaacattttagtgaaagatattttatgtagcaataaaatatgagtgcaaaagaagagtgtctgtgacattgaatattgatgaaagtgaattgcttaaattgctgttttaaagactagacaactttatagttgggggaggggtggtgaggagcataataatctagaaaacgtctgctgtcatattactttgcaagtattttgcagttctgcatttttaaagagacttaaattggaagctggaagccatacttgtgagtatggcttatgcagaaaggccactggagggccagccagtgggcttaactcaaagaaaaactttggcacagtattaaagggtagtgaatgaatatttattcataaactttaaattaaaataatgaaggaaggtatgtatactttttagaaaataatttcctgctttaaatgacttttcaaaaccaaattatgtatagatcttgataatgataggcaagaaaacttctactctaatttaatgcttttaaacatgtgccttaaatgttgcatttagctcttggaggacaaaacaaacgtctcagtactctttgtatttccaatactggcacatagtgggcttttcataagtgtttgtcagttgaccaagtgaataatgaatgaatgagttctctttctacttccagagctcatcagtatacttcatgttgtttaactggagattcaggggttttctgcccagtatttacttccctccccactattaataataacttcatcagtatactttgagatgtttaactggagattcagcgtttttctgctctaaaatttattctaccaac

SEQ ID NO: 120047 - DNA, 1262 bp, Homo sapiens
cctaaaatgttccttgagacaatgtggataaacaaggttagggaagatgaaatttttgaaatgagagactcaacactggctgtgtggacaggagttgggaattcattctgataaggaaaacacattctccataactcagtttgtgaagaacaaattagctcttatgataaccggcagtgtaaacgtgagagtactgttccttatagagtttgtacaacatgctttaacactaaaattgcatagcaattgtatagtactatataagggcttagtgggaatatagtgataaatgaattttttggatttattaaaatgctgatttaaaaaaatagctttattgggctataactaactgcagtaaactaaagtgtacaatttgataagtgttgacatatgtatgactctgtcttcgccctcttccccacctgcagtcaatctgcaggtatctacttttggttgctgtagtttgcattttaaaaattttatatgaatgatgtcatacaatgtatacttcttcctgtctgccttctttcagtcagtttaattattattattttaatttttaattttatttttagttctggggtacatgtgcagggtgtgccagtttgttacccaggtaaatgtgtgccatggtggtttgctgcacctatccatccatcacctaggtattaagcccagcacgcattagctatttttcttaatactctccctcccccaaccccagtttaattattttgagattgatctactttgttgcatgtctcaatagtttattctttttgttgctgagtagtgtttaattgtgtggctatattacagttcgtttatccattcgcctgatgtgagggacatttgggttgtttcccatcttggctatgatgaataaagctgctatgaatatttaagtacaagtttttgattggacctgtactttcatttcccatgtgtaattacctaggggtagaatggctgaattgtatagtagctatatgtttaactttttgagaaaccgtcacacttttccacagtggttttactattttacattgtccccagcagcatatgagagttgtagtccctccacatcctccccaacactggtatagtcagtctttttaatgttagccattcaacaagtatgtagtgctttttcattgtggttttaatttgcatttccctaatgacagaacatgtggagtatctttttatctgtttatttgccatcacgtatttccttctgccattacagaaattgggct

SEQ ID NO: 120048 - DNA, 1057 bp, Homo sapiens
catgtatatgttgatttctaaatctgtgacctctgctgtacccaggtcttcgtccccacctaccagctgcccaatagggcatctctacaaggacagccccaggcacctcacactcagtatgtcccacactggactcctcactttcccccctaaaaattgcttatattctgtatttctgtctcaattaatggcattgttgttcacatagtctcacaagttaaaagctgagccgtgctcatctcttggtccttactgtcatattcaattggttgctaagcttttaaaaatattatcttaatatctcgtggtctggttctttctccttgttttcatttccactgccatagtcactttctcccttgcatctttctagttagtctccctgcttctagttcttctcttgcaagtgatccttcatactgtcatccgagttatcttttcataattcaaacagtatctgttctttgcctaagctctcaaatggctggctttcctgataaaatgtaaattgtatagcctgacacagaataccactgttttcctgttcctgaacacaatcaggctctctcatattttcagcaccattataatagctctaatcctgacaaattccaaaagatttaactcaggtatcttctcatctgtaaagagagtctttattcatgtttccaaagaactttggatcacttcctgcactagtacacatcatactgtgttgtaagtgcttgttcatacacttatatattccatgactatttattgattttctactatatgctaggcatagtgctaagtgttgaggtccagcagtgaacatggtccctgcccacgtggaacttacattttaacttggggaaagaaaccccccaaagagggaaatacataaatcaagtaacagtacctttgagtaagtgctgtgagagaaatagatgggactcgtataaagaataaacttctgtctccaaaggcctccctgtggccatgataacttcaacagacctaggggaagagaaggcgcctgccctataagagtagggcaaagaatatcatcttccca

SEQ ID NO: 120049 - DNA, 1049 bp, Homo sapiens
gagctgcatatgttctctgccccagaagaatcatggcccaggggaagaggtagcaaaaggaacaactattccagtatgacttgatcagtttcttgatggacatgtgtgcaaggcactatagaaggacagaagagatttttactttaattaattgaaaattagtaatttatatttggtatatacgtaatctaataattcattaagtggagcaacttttcaaactattctaacaaaatctaacattataaaactataacatggagactgcattgctaaatacctttcatctacaaaggaaagttatagggatttattatgttttctagatttctagctctctagtgctcaaaaaaattgaaaattgaaaaattgaagaaaaactgaaattgaagtgaccctcatctttgttgaagaaaaaggaatgtgacaaaatttatttctatgtgcagtcaaaaagtgtggtttgtgaaatgtgttgttgttgttgatcttacaggagaatcatgaaaaaagtctccatggagccatctgagcgcctggctagtctccaggcgctgtgggacagccagaccgtggctgagcagggcccctgtggtgagcatgcattttaaaactgaaatgtgaatagctggatggatatccccctgccaggaagttaagtctattcctagtgtgctactgtaaaggtgcaattagtttcaaggtgtaattagcagcgcacagactttagattggtggacaaaagtcctatatttaagctgtattgcatcctgctatgtacttactatagaacagggaggagaatctttgctgttttcccccctaaaaaggaaaaggataatcagcattgtcaacatcggccatatttaagctttaaaattttaatttaaacatcattttgccaaagacctgtcagtgtttttgttgtatgtttcaggtggattttctcagatgtatgcctgtgtttgtgactggcttggattttcatacagggaagaagtacaatgggtaagaatgtctgtgtacatgtgcatgagcacacacactcc

SEQ ID NO: 120050 - DNA, 1055 bp, Homo sapiens
gagggggacgaagagagggaagaccataaaataactattgaaagagttgttctcctttttttttttttttttttttgagacggagtctcgctctgtcgcccaggctggagtgcagtggcctgatctcggctcactgcaagctctgcctcccgggttcacgccattctcctgcctcagcctcccgagtagctgggactacaggcgcccgccactacgcccggctaattttttgtatttttagtagagacggggtttcaccgttttagccaggatggtctcgatctcctgacctcgtgatccgcccgtctcggcctcccaaaatgctgggattacaggcgtgagccactgcgcccggccagttgttctcctttttaatctaaaacttaaaaaaaattttaaacttaggcaaagttagtaaagaggcttgtcagtagaaaacctggcatgtggaaacacatgactgagcctgcctatttctctggattttttttttctactatctgtgggcactcatctcatctttttaaagcatgtctattgaaactgcacacatgtggtgcttcagagccagggttctgactgtagttctgtccctttggcctagtttcagtttattttctgaacatctattccttcatctgtaagatgtaaacaacagtgactcctggggttgttttgagatttaaatgaactggtatatgtagagtgccaagcacagggccgggccacccagagctatgagataatattgattctcagacttctttccaccttctgcctttctcttctatttcagtaaaaatctgagtatctgctacttgtcctgcactgagcataaaactgatatgacctcactaaagctaaaaaactgaagtagacaaaggcttggttttcaaagaattgaataattgggggtggtaggggactgatgcttaaagcaacaaactataatataagatagaataaataaatgctaaaaagggaggtggggtttgaccaggagaggacttaaggaggtgaggatgtgtaatagtggcatttaaggacacatagtt

SEQ ID NO: 120051 - DNA, 1064 bp, Homo sapiens
gtcagtgtagctactgtaggagcactttcatgtactttgttgtttctgcttccagggacctaatacctatcattgctgctctggaatataatcagtggttcacaaaactgtcctctaaggatctaaaactggtaagtaatcaaacatgcagcaaatgttgcttggctttgctgaatttcaaaaacccaataattgtgggaaaaaaacaatttttttactgtactagtaagctgtatacattttatttcttgaggaggtattttcctttaaatgatttgcgtaacatttagtcaaatttgtaatgtgagatgcttccaagtatttcctcatgtattcagctgtttcgggcaatttaagaagatgaacaaaaagatacatttagtgtagcctttagtataaagtcattcagttggcaaaaactgttaaagttacatttgcacagctgcaaatagcagattttatattcctatcttacactctgtctctacaaagtttcccttcctaggaatttaggaaaacattaacaggtagagttcccctggtcgagtaatgatagttaatgttgattttctagatggggttttgggtagatttatatgaaagcaaaatgaaattaaagtgaaatctgttttcataagatatgaaggagaaaaatatttggtatattttattagtggaaataagatgctgtgttggggttgctgccagttcatatcagtcatatggacagatgcttatacataaattaactctctggtgtttgttatgggataagaaagaatttatatgttttcctggagactctcacgtttaagcctctaactttcagaggtcatagaatctaggggtttaagattttcatagtgaatacatcagacttggaatgagacgtggatctgtaggacatggagggttgagactggctagtgggcaggcgacttggttctctgaatttgcctggggtaggggtggcctaaaacattataagtatgaaaatggactaaactcatttggggtcccttaagagccaatatggtagaggaaaatgcatgaacttggaataa

SEQ ID NO: 120052 - DNA, 1126 bp, Homo sapiens
ctgtcaataactgttacccacctataagagaacttagttctatccatacaggataagcagcctcctcacatattcattctttgttttctgaggtgaatttgtcagtttagttcagtttatgttaatttgagccatttatgttatgtatgtaaagagtgtatagagtgctaattatacatttttccttatgattgcatcttacatggtatacagatcatctcctcattctttgtgaaatccattttaatccaaatgtttccttgaatgtaatacatttaagaagagctgtctacttctctttttaacttcccaatactttaaatagcctaaattatctgaacttggacatgcatcatttaaacaccaggcactaactcaagaatcacctggcaggattaagagaaggataaacattgtcaactagattgctttcatcattctaaggcttcagattaaaatcctttctgtccttggacacatcagaagacatggatcaaagggaagccaattcattactccttctgattcagtgagggggttgtgtctttgaccaacctgttcttcctgagggtgtatcaaaaggagacacaatcatagcgccacctttcagggacagtgctcatggttaacctcagtcctgcaatttgatggaagtgttgggccatttatagaaacacaaacctcattttgtttcctggagtgcaaactgagcctggattttcttgatgttgcaggggtgaacagcctttctcagtcactcagtgccaatccattgaccgcctctacccttgtccacctcgacctctcagggaacgtccttcgtggagatgacctctcagtaagttttcttttctttattccatcttcgaagaagctgtgtttaataagcctggaataattctaaacatgtctttgtagtgcattttcctgcctctctctttgtcatgacacctttgaatcatttagttacgagcttatgaagtgttttactgaaaattccagagcattcgttaattaaatgtcatatatcaccacaattatttttttttctcatttagtgatgctgaagttcacatttttttggaagtaatgctgttgaagaatttttttcttcatttaaaaacat

SEQ ID NO: 120053 - DNA, 1031 bp, Homo sapiens
agcaattgaacaagtacacagatgagatatacccagtctttctcaaaggacactgttttagaataagggattagtgaactgaatttaaaaagtgaaaaggaaggcactcacctccagcctcctaacaaggtcagggagtgggaggaggggggttttcatagctggaggcagccgagcccctatgtgttccatgccactgctggagttctctcttagtagataaagccagagaatcactagaaaagaaagtctcagagacttgggcataaaataattccctaccttcccacctcacccttaccctagggtatttttggggtatgctgagtggaggtccttttcctgggaacatggaaaacaggtaatcgcccccagttaataaatacctggtttccactcttctagtacttaccactggcagccttgtgttggagttattggcacacatatctgttttccttgcttgagagcaggaaccatcttatgttcatctctatgtttttcacaaagtctgatttagggtcttctgtccacttagtataatttagtggttgtgtgtgcatgtgtgaattttctgtttcaagcttgcttgatggtgttggattttataggactgacttgtcaaagtggatccaagtgattagtctaatctcctcaatttgcagatgagaaaattccttttcagagcagtgatatgatttgtctcagctcagcaggtagttggacaggcaggatcctggactccaattcaagacatatgccttgttttatacccttgcccacccactactgtaggtcgtttaataaactcatctagatataatttgacatcctgttatactacagagcctgacttcctcacttacatattccttagggaaaactagctttactttgcgactctaataacaattgcttaataatattctaaacgttattaaatctcttctcaagcagatgcagtgggaatttatctgtgatgagcacaatttaatttcagtatgcaattaggtgtgctgttggtttatttg

SEQ ID NO: 120054 - DNA, 1008 bp, Homo sapiens
gttgatagctgaccaatgtgggggtaaaggcagtgagaagctaggagggttttgtaggcaacactaagtgagcagagcccatacttctctgtgagcccaaggtcttaacccccttgctcatgcctgccgatataaagacttaaaaacaaggggtacaaaaggtctgctggttcaaaacccaaaaccaggctcacactgggtgctagctgttctctttagcagttttattccatgtttcctaagtgtggcttttctcaaggactagctccactgtcaccttgttgccatccatcattcagagagattggtgttgctacctaggtcagcagtctggtgaatgaagagttaattcacattgctcctcaagggctctttcatgatgtttttctattctccggcataaaagtctaagctgaagccaaaacccaaaatctgcagcaatttctttgaaggtcagtatgtgtgtaaagaaggtcatcgagattaggaagggaaggcagtgaaagttgtgaggccgggatcatccagacaaataaaagctattttatgtgtcagggtgaactgacaaatcctaaatacccctgaagtatacacattctgaaggtaaagtaatatttttctccccaaatagattttgtgtttaaaaagcaaacaaactcctgtttatagtaactgatgttttgccagcagagtgaggaagttcctaggattactaattaagccatgtcagggaaataatgaaaacacaaggaactatgacagattctctctagtgttttagaaacactagtgttttactgtttggggggaacaatctcagtagctgaaattctttatattgggcatggaactggttagcatcttttgtaaatagcttccacctcagacataaatataagaatatgattgggagaatatcagagaaatatcagaatttagagttttctgtctagtgaaagttagataacataatagtaagtgaacatatgtgctattgctttaagtaca

SEQ ID NO: 120055 - DNA, 1048 bp, Homo sapiens
tcaactgctattttctgtaattcgtaaatcaaaaacataaaaataagtatcctatttaaatttaaaatggaagccaccagaggaattaaagaggcagaggctttcaaaagaatttttctctgcaaattgaaaagaattgactagtagggaaatttttgtcattttagaccatgttgaatggtttgcattattttcttaccttgttacaaatgttatttaattttttgttgcttcttctttgaaagaaagatgtccataataaaaatgtcatgcataatattccaattaggtaaactatgggtgactgtatagataggcatagagacatgtaaaagggtgttcatcacaatattaatgatggttattttaggtggtatgaaaggtgtattttattctcttctcagtatggtttgaatgttttacagtaaatatgcattatttaagcaagaaaaagtaaaccaatatgtgttgagaagaaaagttatactagtgaagtagcaggacttttgagaaagaaagccattattttgaccttaccagtcccttaaaaatctaatttcttttcctgcaaggaactaatactactagcctagtattttatggtttactattattaacaggttttagtgtttaacatgaaatgcaatgaaagttacactgaaactttgtcttgtgttcctttatgagctacaataataaagacttctcactctgtcgcccaggctggagtgcagtggcgcaatctcggcttactgcaacctccgcctccctggttcaagcaattcttctgcttcagcttcccgagtagctggaattatagttgcccatcaccacacccagctaatttttgtatctttagtagagacagggttttaccatgttgcccaggctggtctcaaactcctcacctcaagtgatccacccaccttggccttccaaagtgctgggattataggtgtgagctaccatgcctggcccaagacttcttttcttttcttttttttttttcttttccttttttttgagacagagtttcactcttgttgcc

SEQ ID NO: 120056 - DNA, 1036 bp, Homo sapiens
catcccggtgagcccttgactttcagaaagtaaacaattaactacatggcaggtgtagggagctcttttatatggcttctaaacaaccaatgtttaaaaattaaactccacttcccacctgatcttacaactatttaccaaagttctcccaccaacatcaacattatttagcaattctttaattgcagaaccctcctaattcactgagcaacccttagagttgggagagaccacagaactatatcctgctcactcaacaaaggaggcatggtgtggccctcactggtcagaattctggataatactacaaccatgtcattagtgagtcagatgcccaaggaaatgttaaaattttaatccatgttgtgaatttctttataacaatgaatgtgcggttttgattaatatgctgtttatgtttttcatgattaacagtttctttttggtgtaaagatgacatttactagagtgttttattcatgtactttggatttgatatataaatcgacttaaagtgacaaaacccttatggttttatatttgtttagggcttacacagtattaatgatctgttagcgccatctagtgtcactttaaaacaaccattgttaaaaattcttgctatttaaaattcagaccagtcatgggtcttctgtcaaaatcattaaataatgaagtttttcaaaaattagctttagaacattttttttctaaagtaccatgactgtattctttctaaaggtagcaacaatagcatcaatgatcaatatactgttgataaaatatatgatgtcttcaccctcctataagtaattctctttgcgttgctggcatttgagatatatacatataaatatgtttaaagaaaaagaactgtaagtatgaagatatgacacttttcatttattgacaaaagagagaaataagcagtgaatacttagagttcatatattttcctctggggcctccaagtcatctgtccacacacaaaggcaatgggcattgtattattttatccttattccccacagtcact

SEQ ID NO: 120057 - DNA, 1008 bp, Homo sapiens
cccttttgtttgtggatgttacttcactgagcaaaaacacaaaactaatttttggccagaaaaattctatgatgctttatttttttaaatgacttatttttatatatagatttaccaggctttatgttcttggaatccagtttgtggaacagtttgattcacgtgtttgtgtctccttagatgacattccagactctccatctagcccgaaagttgcccttcttccacctgtcctgaaaaaagttccttcagacaaagagagagatggccagagtagcccccagcccagccccaggacattttcacaggaaggtaaggattgtaaggatttcttttctctgggttagctctccccaaggagggacatttcaaaataaaggaactcatcctggactttactaatatcttagagtttgttaaagtcaacattgcttgggttaaatttttggaaatggagtagtttcttagttcagaaacttgattcagcatgattgatgacattggatcttaatgacatatgaaaaaagcagctgagacacaaaggtctaacttatttgcaagaataatttctagatgcttctgaactgacttccagcatgttaggagctccttaaacatgattttatgacgtatttggggctacctatagatttctgagtcctattattttcaatgaaatcttttcctagtcgtggcaaatcagtactgctatagttcaggagcagcacccccgggcctgagccaccttgcagctcactgtgctcgctcagtcacaaggtcagatgttccttactctcagaagtgtggtgcagacatggacattctcagggcgaccctgcaccagtttgctccttctaatttgctgaggtagaagcacagcaagctaatcctgtgacgagaatgctttcttcccaaatcagactgagctgttaccaattattatcaaaggtgaggcatggttgtggcttcagcacccatgccatttcttttaaatgtgtgattgacttt

SEQ ID NO: 120058 - DNA, 1304 bp, Homo sapiens
ctgcaactgctgactttacatctttacttttaaggaagcgttgaaaatgcctgaaagagttcagttggagagaaaaagaaaagtgaggaagggatggtagtgctaagtaggaatgttcatctatcttgtctgaagcaattgaaatattgaaggatttacaaaaatagaagaaaaaagatcagaaggttgaatacaaaaatcattgttttaacatttctggaaagtggtgttttctagatgcctatagattatcaaaacaaggcctagagtaacccaccagcctcacaagtacaaatatagatcatggagcctctctggttagcaaagtcggggagatactggataccactgcaggctcttagctgccgtgaaaaagttgaatgttctttcccctggaagttagaaatagaatgtgttcctccttaaatgtttcagagctttaggggtatatgtttgattcccttcctcatccttctccctccccaagtagcaaatcttaggaatggctcacgctcccttctttccagtcagacggtagggatggctgagctgtggagaccatgactttcccatctgggatccagaataagttaatcatagacatcatcctggtgttatcacttggtattgaaattggactgaaaatgtacatgaagtctgggaacagtctgtaaatgtctgaggtggtaagattttgactttatcagcttgtccgctaaggttgcccagaaatggcagccacttgtgagttctatctttttctttataaactgtccatattgtgctcattctgttttcttatctattattcatgctgattacttcatttccctgttctttgcctccctttggactagcatgcccaactaatttctgaaacaggtaaattgctatgattcttctggattattccatagtgaatgtgattttcattaatccatcgtggaatcaaaatggtaatactggagcctttttgttaatacttttttggggcagactcgcagctcacctcattttgcacgacatttccataatgttggctgttgaattctgtagataatgatgcatatctgcccaggaccaacactgtaggttccttgaatcctaagtggggtgggtaagctgatatttaatttttaatatttttaaatattaatgtcaacacattgatgtatgtgctaataatataaagggtaaaataaatcccttttcctcagtagtgcaaagaggagattattacaaaagacattcagatcatgacagtggcaagccttccagtagagggaaaagatcttcaaaactgt

SEQ ID NO: 120059 - DNA, 1356 bp, Homo sapiens
cacctccggcatagctaccacacacttctgcagcgttacacggttcttttccagggttacacagcactttccagtgctcaacagctcttcagtattaaacagctccaaatgacctcagctccaagtctcgccaagtaaacaaacagaactggaggatgaaagatgcggtatttataggcacggccctcaaacgccgcgttcggtatccaaaatctgattggacaatgggaagtggcgtgaatgcaaatgaggcgattctagtacgactttctgattgggtagacggccatcagccaatcagatagcaaatgccaacctcagtcagactataaataggcccagtagcagccctagaaatgtggttctcgtgttgctgcaatttgatgcgaggagatgtctggacgagggaagcagggaggaaaagcacgcgccaagtctaagtctcgctcttctagagcgggtttgcagtttcccgtaggccggatccatcgtctgcttcgtaagggaaactatgcagagcggataggggcaggcgcaccagtgtatttggcggcagtgttagagtatctcacagcagaaatccttgagctggcaggcaatgcgtctcgcgataacaaaaaaactcgcattattccccgccacctgcagctagcgatccgcaatgatgaggaactcaataagcttttgggcggcgtgaccattgcccagggcggagtcctgcctaacattcaggcagtgctgctgcccaagaagactgagagtcaccaccataaagcccaaagcaagtaacttaaggttgtcattggtaaaaagacttctgtgtcagaaaaaacaaaaggctcttttcagagccacctaccgtctcagaaaaaggctgtacgttacaaaacgttactgctgttaaccagccatcttacttgcctgtcacaaatgcccgtttaagcgcatttcgggaatgtacggggactgaattttcaaggagcgttccatcggccattagtttgaggtaattttggttatatatgtcactgggcgaggtggcttaacgcttgtgagcagtcagtacttgcacttcagtggaggttggagcgggagggtcgttcaagcctggggcttgaccgttaacataattgagaccctgtccccacagaaactagctgggtctggtgatgcaggcctgtagtcccagctgttcgggaggctgcggtgggagggttgttcatgagtccgggaggcgaaagttacagtgaacgaagattgattgctccactgcactccagtctgggtgacatgagcgagactatctcaaactagatttatgtatgttagttatgttaagggttacacatggaagtg

SEQ ID NO: 120060 - DNA, 1530 bp, Homo sapiens
ttgatgacaactggccctaacacggcctaaaactcgcacttttctctccctccgcaactattcaaaacactgtattttacatttcttgcaaattaaaaactaacatctctggcaacggacctctaaaaatttctaataaaactcctcggatgcttgtggcactgcatttgtaaaccgccccctctcaacctactccctaaaaaagagctgctttttgagagagaagcggtaccctctgatgttactgggcggcagtctgcctacaatttccttcacaatgaggcaaccagagcggctttttctgtgtgtttgcttgcgttgaggggagcaggaccataggccctagaggcccccagctgccttctgagactgggcgaaaccctcggcagcgcgcagggggcgctagggcgcgaggggcgggcactgacgggcaccaatcacggcgcagtcccaccctataaataggctgcgttggggcctttttttcgcatcctgcttcgtcaggtttataccactttatttggtgtgctgtgttagtcaccatgtctgaaacagtgcctcccgcccccgccgcttctgctgctcctgagaaacctttagctggcaagaaggcaaagaaacctgctaaggctgcagcagcctccaagaaaaaacccgctggcccttccgtgtcagagctgatcgtgcaggctgcttcctcctctaaggagcgtggtggtgtgtcgttggcagctcttaaaaaggcgctggcggccgcaggctacgacgtggagaagaacaacagccgcattaagctgggcattaagagcctggtaagcaagggaacgttggtgcagacaaagggtaccggagcctcgggttccttcaagctcaacaagaaggcgtcctccgtggaaaccaagcccggcgcctcaaaggtggctacaaaaactaaggcaacgggtgcatctaaaaagctcaaaaaggccacgggggctagcaaaaagagcgtcaagactccgaaaaaggctaaaaagcctgcggcaacaaggaaatcctccaagaatccaaaaaaacccaaaactgtaaagcccaagaaagtagctaaaagccctgctaaagctaaggctgtaaaacccaaggcggccaaggctagggtgacgaagccaaagactgccaaacccaagaaagcggcacccaagaaaaagtaaattcagttagaagtttcttctagtaacccaacggctcttttaagagccacctacgcatttcaggaaaagagctgtagtacacagatgaaatcccccaagcaaatgcaacacgccctcaattatattagaatcacttggagagtcgatagaactttaacatagcctcatctagtaagaatttactactcaatctatcaaagatagcaaggtgaattcaaatgcaccgagttaaaatcgagttttaaagtcacctgggtttcggtagccggaagtcccgcgtctcacgactccaagctaattagtcataaccgtattgaaccaaggttgaagcccagtccca

SEQ ID NO: 120061 - DNA, 2202 bp, Homo sapiens
ccacttaaataatcatctgtagagttggaatagaatatagtagccggtgaaactgcacgattgttgctggcttaaagatagaccaatcagagtgtgtaacgtcatatttagcgtcttctatcatccaatcactgcactttacacactataaatagagcagctcatgggcgtatttgcgctagtgttgggtgttccgctgtgctgtttttccgtcatggctcgcactaagcaaactgctcggaagtctactggtggcaaggcgccacgcaaacagttggccactaaggcagcccgcaaaagcgctccggccaccggcggcgtgaaaaagccccaccgctaccggccgggcaccgtggctctgcgcgagatccgccgttatcagaagtccactgaactgcttattcgtaaactacctttccagcgcctggtgcgcgagattgcgcaggactttaaaacagacctgcgtttccagagctccgctgtgatggctctgcaggaggcgtgcgaggcctacttggtagggctatttgaggacactaacctgtgcgccatccacgccaagcgcgtcactatcatgcccaaggacatccagctcgcccgccgcatccgcggagagagggcgtgattactgtggtctctctgacggtccaagcaaaggctcttttcagagccaccaccttttcaagtaaagtagctgtaagaaaccaatttaagacaaaagggaatgcattgggagcacttttcgttttaatgctactgaaggcttcaaaaccaatcgatttcggccggtcgcggtgactcacgcctgtaattcaagcactttgagaggctgaggcgggcggattaccagaaatcaggagttcgggatcagcctggccaacatggccgaatcccgtctctacgaaaaatacaaaaacacgccgggcgcgacggcgagcgcttgtaatcccagctacactctgaaggctgaggcaggagaaacacttgaacctgagaggcagaggtttcagtgaatcgagatggctctaatgtactccagtctgggcgacagagagattcggttaaaaaaaaagttcgacttaaaataattctggagtcagaatgggtttacatttaattcttaacccagttcctcaaagcctgtagctctgttaagaaaataaaggccattggtcaagcctgcttggtcccaccctcatctccccaccctcccccaatcgctgctcccgccatttcctggggcttggaggaggggttaaaggagcggactgtaggcgtcacatttcccgcctgcgcgcttttcagtctcagtgtccgctggaggtgggggcaggggtaacgtagatatataaagatcggtttcctattctctcacttgctcttggttcacttcttgggaagtcatgtctggacgtggtaagggcgggaagggtttgggtaaggggggtgccaagcgccaccgcaaggtgttgcgtgacaacatccagggcatcaccaagccggccatccggcgtctggcccggcgtggcggtgtgaagcggatctctggtctgatctacgaggagactcgcggggtgctcaaggtgtttttggagaacgtgatccgtgacgctgtcacctatacggagcacgccaagcgcaagacagtcactgccatggacgtggtctacgcgcttaagcgccagggacgcaccctttatggctttggcggttaaggttgctgatttctccacagcttgcatttctgaaccaaaggcccttttcagggccgcccaactaaacaaaagaagagctgtatccattaagtcaagaagctcaatgtgtaattaagatgaatgatactgagctgacatcctaaaaaggaaagattaggggaactccaagtttgccctccactcactacatatgggtaggggagcaacgatattccaactctgaagaaagagtggaaaaaaagtagtgttaaaaatttgtattagtttccaagggacaaagaagcgctgcccaatcaatgagggccattcgtagctgtcaaccaatcagaactgatgagctaatatttcctgaggcaagccagggagccggaggggaagctaagaagcttattgagaaaaaacaaaaaccctgttttaggaaaaaaaaaaaccatcttttagcgattatgaaataaaatcacagagacatttaagtatccctcaatca

SEQ ID NO: 120062 - DNA, 1060 bp, Homo sapiens
aaattcagattcaaatagtagtgtcgtaaacgggagggaaaaactaaagggattaaaaagtgaaactattgtgttctccctcgcagtccttaggtcactgcccctcgaggggcggagcaaaaagtgaggcagcaacgcctccttatcctcgctcccgctttcagttctcaataaggtccgatgttcgtgtataaatgctcgtggcttgctttcttttcgcgtacctggtttttgttgtcagctggttagacatgtctggtcgcggcaaaggcggtaaaggtttgggtaagggaggtgccaagcgtcaccgaaaagtgctgcgggataacatccaaggcatcaccaaaccggccattcggcgccttgctaggcgtggtggggttaagcgaatttccggtttgatttatgaggagactcgtggcgttctcaaggtgtttctggagaacgtgatccgggacgccgtgacctacacggagcacgccaagcgcaagactgtcactgccatggatgtggtttacgcgctcaagcgtcaaggacgcactctgtacggcttcggcggttaatcttttcgtcagttttcttccaatggcccttttcagggccgcccactccctctcagaaagagctgtgattgtattctttcggatggtaacatctcaatggctttactcggctattctgcctagtatgtagaactattataaaccagttgggagagaccaggttgtttggtctgagtggctgctaaagcagaaatcagctaagtaaacgaggtctccgagataagtgagctataaacttcaatgctatagttttgacatgtcaagcaacttaacgtgcagcgcgagtccgataaatgagtagctcagctttttagttttaaaaacgagttgtgcgttatttgtacgagagcctaagatgctagctgcctggaactgagtaggtggattaaaatgggtgtcaggtctgttttcccaggcgtatctgacttaacgtcagcaaaagctgtacttttagcttccctggtaacacctgccgtccttaaccgccccctgccggt

SEQ ID NO: 120063 - DNA, 1034 bp, Homo sapiens
aaaagaagagtagctctttcctttcctccacagacgtctctgcaggcaagcttttctgtggttttgccatggctcgtactaaacagacagctcggaaatccaccggcggtaaagcgccacgcaagcagctggctaccaaggctgctcgcaagagcgcgccggctaccggcggcgtgaaaaagcctcaccgttaccgcccgggcactgtggctctgcgcgagatccgccgctaccaaaagtcgaccgagttgctgattcggaagctgccgttccagcgcctggtgcgagaaatcgcccaagacttcaagaccgatcttcgcttccagagctctgcggtgatggcgctgcaggaggcttgtgaggcctacttggtagggctctttgaggacacaaacctttgcgccatccatgctaagcgagtgactattatgcccaaagacatccagctcgctcgccgcattcgcggagaaagagcgtaaatgtaaagtcactttttcatcagtcttaaaacccaaaggctcttttcagagccacccacttattccaacgaaagtagctgtgataattttttgttgtcttaacagaacaaatttctaaggacccccccggaaagcattagactatggtcttaaagttgattaacagaaataacggtttggtcagtcttgcagtgtaggttatttctgaccttattaaggtgctatttggagagaagctgtgtaagtccactatcattcaggcctctagcttgctatgattagcatttgtttaaacaactttgtaagagtaagggaaaaatctggtaagtagttaactggcgcttactaggcatttttgcaaagctttgaaaagattagaaaattgtgtcttgcgagttccagtgtcttcctcaaaatgcttaggaagattttctcagctcaatacatagtcccctaggttttctcatatattatatatatatatatatatatatatactgttaaattcatttggctgttaacattaacctgaaatttattctggtgcaaaatgtg

SEQ ID NO: 120064 - DNA, 1074 bp, Homo sapiens
ggatgatgctgcgggtcttgtcacgtatggcgctgcccaccagttctaagatctcggcggccaggtattgtaagtacactggcgcaccggctccgaccggctcaaaataattgccctttcgaaaaagatgacggactctgccctattgggaactgcaagcccggtagcgacgaacaagtttttgctttagctccattttccacgtccgcaaatagcgacctatgaaagcagcggaaaactgtgaaagacaagcaagctggaatggcgcctgaacaaatccttttatacaaactgcaaggctgcaataggaagctatcctattggtcaattatgtttggtgctttatccaatagaaaaagataacataaattccatatttgcataaaccccacccctcagtgaaaccgtgtttcttttgtccaatcagaagtgaggaatcttaaaccgtcatttgaatctcaggactataaatacatgggctctgaactgttctctgtactactctgtagtggagagtgttagtagcttttctattctgtttaggaatagcaatgcctgaaccctctaagtctgctccagcccctaaaaagggttctaagaaggctatcactaaggcgcagaagaaggatggtaagaagcgtaagcgcagccgcaaggagagctattctatctatgtgtacaaggttctgaagcaggtccaccccgacaccggcatctcatccaaggccatggggatcatgaattccttcgtcaacgacatcttcgagcgcatcgcgggcgaggcttctcgcctggctcactacaataagcgctcgaccatcacctccagggagattcagacggctgtgcgcctgctgctgcctggggagctggctaagcatgctgtgtccgagggcactaaggcagttaccaagtacactagctctaaataagtgcttatgtaagcacttccaaacccaaaggctcttttcagagccacctactttgtcacaaggagagctataaccacaatttcttaaggtggtgctgctgctattctgtttcagttctagaggatcaactggaatgttagcg

SEQ ID NO: 120065 - DNA, 1343 bp, Homo sapiens
aagaattcacagaggacctgtgttacttcccttgtgaagaaacagaattatcatgaaaatttaggtggaaaccatttcgcttttttcttcaaaaataagggaagcatgtgcccaaccacccctgggaaaaagaaccttcaggggcaaaggagcgaacaggtaatttataagaaaaacagaaagtggtctctgactgccccagacttccttcggagttgggggaattggggacgcctggacgcgttgtttttgtgtttgtggaaaaaataaatgaagagcatgaagcccgaggcttctgagatcctttcctgaccaaacccaagtgatttggtgcggggaattttaatatttttccccttttgtgaggtggaacaaacacaacttgggagcagcgcagcggctcagagcctgccagccaggcgggcgaccagagcaccaatcagagcgcgcctgcgctctatatatacagcggccctgcccaggcgctgcttcatcggcgctttgccacttgtacccgagtttttgattctcaacatgtccgagactgctcctgccgctcccgctgccgcgcctcctgcggagaaggcccctgtaaagaagaaggcggccaaaaaggctgggggtacgcctcgtaaggcgtctggtcccccggtgtcagagctcatcaccaaggctgtggccgcctctaaagagcgtagcggagtttctctggctgctctgaaaaaagcgttggctgccgccggctatgatgtggagaaaaacaacagccgtatcaaacttggtctcaagagcctggtgagcaagggcactctggtgcaaacgaaaggcaccggtgcttctggctcctttaaactcaacaagaaggcagcctccggggaagccaagcccaaggttaaaaaggcgggcggaaccaaacctaagaagccagttggggcagccaagaagcccaagaaggcggctggcggcgcaactccgaagaagagcgctaagaaaacaccgaagaaagcgaagaagccggccgcggccactgtaaccaagaaagtggctaagagcccaaagaaggccaaggttgcgaagcccaagaaagctgccaaaagtgctgctaaggctgtgaagcccaaggccgctaagcccaaggttgtcaagcctaagaaggcggcgcccaagaagaaataggcgaacgcctacttctaaaacccaaaaggctcttttcagagccaccactgatctcaataaaagagctggataatttctttactatctgccttttcttgttctgccctgttacttaaggttagtcgtatgggagttactgaggtatcagacgaattgggtgacggggt

SEQ ID NO: 120066 - DNA, 1371 bp, Homo sapiens
acctttttgccttcccaaaacatagggtctttaggagtgaaacttcatagccaaacttataccttgtccagcacagagaaggccatcaaaatgcctggtttaaataaaaatattaaaatgattgggagggtaaatcccttgacctataaatctgacctcctttaaacattatttgtatgttccccaataaactattccgtaatttattagttagcaagtggaaataaaaagaaatgtggaatggggctatgcttagcgtcattaagctgacaggaatacagcgcattcaacttgcaaacacccttccactcccacaaagagcaagctgtcactggccaatcaaaacaatgaaccataatgaaacagtttttcttgctccacccacttggtgaccaaatttgaaaaaaaaaaaaaaccgcgccaactcatgttgttttcaatcaggtccgccaagtttgtatttaaggaactgtttcagttcataccttccactgcgataggaatcatgtctggtcgcggcaaaggcggaaaaggcttggggaagggtggtgctaagcgccatcgtaaggtgctccgggataacatccagggcattacaaaaccggctattcgccgtttggctcggcgcggtggcgtcaagcgcatttccggtcttatctatgaggagactcgaggtgtgcttaaggttttcttagagaacgttattcgagacgccgtcacctatacggagcacgccaagcgcaaaactgtcacagccatggatgtagtatatgccctaaaacgtcaggggcgcactctgtatggcttcggcggctgaatctaagaatacgcggtctcctgagaacttcaaaaaacaaaaacaaaaaaacccaaaggcccttttcagggccgctcacaaagtcgtttaaagagctgaaatgcgttgcgagaatgagtttggatgacagaaataaccgtgacatcctgcataagaatgaattgtgtttgccatgaccggccacactgtgacaaaatttcaaagcataaagtaggcatagagaggtaagcgctaataaagtgattggctccacaaaaagcattttgctgggcgcagtggctcacgactgtaatcccagcactttgggaggccaaagctagtgtatcacttgagatcaagaatccgagaccagcctggccaaaatggtgaaaccccctctaccaaaaaaaatacaaaacttagccgggcgtggtggtctgcacctgtaggcccagctagcccggaagcagagattgcagtgagccgagatcgcgccactcccctccagcctgggagacagagagagactcctcaaaaaaaaaaaaaaaaaaaaaaaaaaaaattatgtattttag

SEQ ID NO: 120067 - DNA, 1021 bp, Homo sapiens
taactaagaggtactctccatccctcattagcataaaagccctataagtagcagaaatccgctctttactttcgacacatttctggtgttttaagatgcctgagccagccaagtctgctcccgccccgaagaagggctccaagaaggcagtgaccaaagcgcagaagaaagatggcaagaagcgcaagcgcagccgcaaggagagttactctgtgtacgtgtacaaggtgctgaaacaggtccatcccgacactggcatctcttccaaggccatgggcatcatgaattctttcgttaacgacatatttgagcgcatcgcgggcgaggcttcccgcctggcgcattacaacaagcgctcgaccatcacctccagggagatccagacggccgtgcgcctgctgcttcccggagagctggccaagcacgccgtgtcggagggcaccaaggccgtcaccaagtacaccagctccaagtaaacattccaagtaagcgtcttaacacctaaccccaaaggctcttttaagagccacccagatacccactaaaagagctgtggccagacgccaaattttatttggcggcggaggggtattagaatataggaactggagaggggtggggacaagtgttgcagcttagagagggacaaagggtcctgaacccgaaagaagccagccattaaaaatggctttggggtcaattcgttgtgcttaaatttaaaatggagacaagcggccattttgctaactcggcgttcccggaagaaaccgcaggctcgcttaggtttcagacccagctgtctgtccctgtctacgtcgccaggatcaacggttgccgtaatgtcataatttcgccaccagcttctagccaataggctgtcctgtcattttaaatattaaccaatcgagggaaagctgttttgagactctgatttacatagcggaccggagtgggaacctgggcagtaactgcctaaggaaggactccccctctgttttcgtggcgcacaccttcgtagtat

SEQ ID NO: 120068 - DNA, 1108 bp, Homo sapiens
ccgcgatgcgctcaaatatgtcgttaacgaaagaattcatgatgcccatggccttggaagagatgccagtgtcgggatggacctgtttcagcaccttgtacacgtacacagagtaactctccttgcggctgcgcttgcgcttcttgccatctttcttctgcgctttggtcactgccttcttggagcccttcttcggggcgggagcagacttggctggctcaggcatcttaaaacaccagaaatgtgtcgaaagtaaagagcggatttctgctacttatagggcttttatgctaatgagggatggagagtacctcttagttaattggaagacaaactgcacagttgtcatccgtgggcagagctatgcaaatgaggtatgaaagtacagcttttctattggctatctgactagcatttgctaccgaccaatcaaaaagtcggatttactccccaggaactacctataaaagcggccatgttttacatatttcttgattttgtttgttttctcgtgagcttaggccgctggttttggtgatttttgtctgattgcaatgtctggacgtggtaagcaaggaggcaaagctcgcgccaaagcgaaatcccgctcttctcgcgctggtctccagttcccggtgggccgagtgcaccgcctgctccgtaaaggcaactacgcagagcgggttggggcaggcgcgccggtgtacctggcggcggtgttagagtacctgaccgccgagatcctggagctggccggcaacgcggctcgcgacaacaagaagactcgcatcatcccgcgccacttgcagctggccatccgcaacgacgaggagctcaacaaactgctaggccgggtgaccattgctcagggcggcgtccttcctaacatccaggccgtgcttctgcctaagaagaccgagagtcaccacaaggccaagggcaagtgatttgacaggtatctgagctcccggaaacgctatcaaacccaaaggctcttttcagagcccccctaccgtttcaaaggaagagctaacctcactgcttgtaggtagaaggaaaaaaggcactaaggtaagttaattttatgccaaccttgagcaaagcgtat

SEQ ID NO: 120069 - DNA, 1897 bp, Homo sapiens
aggactctccgaggagcctgtgttacttccctcacttaagtgcagatttgtaataaaaatcttaatgccagtggcatgctttttggatatataagaagctaaccacttggagtatcatatttgagaggtcagaaaagtccacagttaaagatcggtttataatttacgaagaaaatagaaagttttgtttctctgagttgaaatttgccaagcacggcgggaaatattgcaagtttttggcacaaggctttgtgcttcccttataatttgagatctgcgtgaagcctgagggttcggggatcattatctgagaaaaaccgggcagttcggtgtagacaatttttatatttttggctttttttgaggtgtaacaaacacaactcgggatccgagaggacactctgcggctgccagcgaggcgggctggacagcgcaccaatcacggcgcagctccgccctatataaacgggcgggcgcagcgccgcggctcgagtcccggccagtgcctctgcttccggctcgaattgctctcgctcacgcttgccttcaacatgtccgagactgcgcctgccgcgcccgctgctccggcccctgccgagaagactcccgtgaagaagaaggcccgcaagtctgcaggtgcggccaagcgcaaagcgtctgggcccccggtgtccgagctcattactaaagctgttgccgcctccaaggagcgcagcggcgtatctttggccgctctcaagaaagcgctggcagccgctggctatgacgtggagaagaacaacagccgcatcaagctgggtctcaagagcctggtgagcaagggcaccctggtgcagaccaagggcaccggcgcgtcgggttccttcaaactcaacaagaaggcggcctctggggaagccaagcctaaggctaaaaaggcaggcgcggccaaggccaagaagccagcaggagcggcgaagaagcccaagaaggcgacgggggcggccacccccaagaagagcgccaagaagaccccaaagaaggcgaagaagccggctgcagctgctggagccaaaaaagcgaaaagcccgaaaaaggcgaaagcagccaagccaaaaaaggcgcccaagagcccagcgaaggccaaagcagttaaacccaaggcggctaaaccaaagaccgccaagcccaaggcagccaagccaaagaaggcggcagccaagaaaaagtagaaagttcctttggccaactgcttagaagcccaacacaacccaaaggctcttttcagagccacccaccgctctcagtaaaagagctgttgcactattagggggcgtggctcgggaaaacgctgctaagcaggggcgggtctcccgggaacaaagtcggggagaggagtgggattttgtgtgtctccggagctatttttgactaaggcgtcgcgtcgcccaagccggagtgcagtggcgtcatctcgattttgcgttctcgagtgtcggagttgaacccatttgggcctcccttgtgctttgcacttttagcaggccctggcctccagatagcatgggaaaaaaaatgttgggattttcccgggtttctaagctgggtttttccgagttccaaacacggcacagtgtatcagtttctgtgctggttacaagcctactggttatccctatcgagtatggcaggcagtgagggacttcagaggagtacgtcttaggacaagtggcatagtactgacattatttccgaagggctacatttcaagtgcttggggagactactgccacataactgaaaattagaaaccgacactgcagaaaaatacttggtccttaaatgtggcatttggatggattaaggacttgccgaaacgtaaaactgacagacttgggggggggggatgtcccaatta

SEQ ID NO: 120070 - DNA, 1093 bp, Homo sapiens
attgcctaccctttattttcacgatgtgtttgtgcattctgtaaaaagtgggaaacactgttctccggattgtgtgggtgatcgccggtcgcctagcttgccgttcttcaggtatctcctgctgctccagaatctacatctgaatgtcaaggcatagcttttccaggagcttttaaaccgacctttcaattcgaagacgtaactgcgccaggagctttgtctccctggcatataaaagcatagaagagagcaacttctggtttttaaaataagtaaactaatctgaattgtttgcaatggtaggaacttgttatataaaatgttaattaggtggcccgtgctcgaaaactgctctcaggatatgaccaatgggagagtagacctaagctccttcatttgcatgcagacttcacgacaaaataacgaatcagagttggagaaactaaatcttcatttacataacattgtctacaaattccgaggatcaggagatgtagatttcattttctttcctaactgcagaacagcaaagatagcatgcctgagccagcgaaatccgctcccgccccgaagaagggctccaagaaggccgtgaccaaggcgcagaagaaggacggcaagaagcgcaagcgcagccgcaaggagagctactccgtatacgtgtacaaggtgctgaaacaggtccaccccgacaccggcatctcctctaaagccatggggatcatgaattcctttgtcaacgacatcttcgagcgcatcgccggcgaggcttcccgcctggcgcattacaacaagcgctcgaccatcacctccagggagatccagacggccgtgcgcctgctgcttcccggggagctggccaagcacgctgtgtcagagggcaccaaggccgttaccaagtacaccagctccaagtaaacttgtccctgcaactgccttagtaaacccaaaggctcttttcagagccactcaccttttcacaattggagctatatactgacatgtgaagatactagaaactcctgcagctgaaataggcatgtttttaaaacttaaaatggcactcactgtctgggctggtggctttatgaaa

SEQ ID NO: 120071 - DNA, 1325 bp, Homo sapiens
cgggaggctgaggcaggagaattgcttgaatccgggaggcagaggatgcagtgagcctagatcgtgccactgcattccagcctgggcaacagagcaagaacccgtctcaaaaaaaaaaaaaaaaaaaaaaaaaaaaagcaccctgtgagggaaacagtactaattatttgatattctgggaaaagtgggggacaattgtcaggcttctttgtcgaaagtttatgaactgatggctcagttaatggctgcaagtatagtgtgtgtgtatatatatatatatacctagcagtatttattaaatcccagctgaggctcttttgttgcctcaggcccctcttggtctcctccagtctgagcaagggagaattgcacagaagggcgggaactgactgtggttcccgccccttctcatgaggttttcaaacaggtccgtcatgctattataaaagtgctgcgtggctctgccagacgtattgcgttacagatttaacagctgtggtttcaagatgtctggccgcggtaagggcggaaagggtctaggtaagggtggcgccaagcgtcaccgtaaggtattgcgtgacaatatccaaggaatcaccaagcccgctatccgccgcctggctcgccgcggcggcgtcaagcgtatttctggcctcatttatgaggaaactcgcggagtgctgaaagttttcctggaaaatgtaatccgcgatgctgtcacctacacggaacacgccaaacgcaagacagtcacagccatggacgtggtgtacgcgctcaagcgccagggacgcactctttatggcttcggcggctgagcttacctctacagtacactaccgcaaaaccaacggcccttttcagggccacctatccactcaggagaaagagtagtagtcactgctaaaagtgtagtttcacgtgtttagtagctccggttttcaagttaaatggtcttattacgccttggcttcatatcttactggccggtgaggatagtgtattaaagtttattttcactcttgctgtgtcgcccatgctggagtaatcaatggcgcgatctcggcaatctgcagtctccgcctcccgggttcaaacgattcttgtgcctcagcctcttgcgtagctggggcaaccggcttgcgccaccaacacccggctaatctttgtattttttgcagcgatgggttttcgccatgtttcccaggctggtcttgaactcaagctcaaaagagatttccctcctccgcctccgaaagtgctgggattacaggcgtgagccaccacgcttggcctgtgttttctgtatttctgtaaggaaacat

SEQ ID NO: 120072 - DNA, 1053 bp, Homo sapiens
gctgccttgtccaatcagaacaggggtgtctttatatatacgggtacgaaaggctagactttcgttttttcgtcatttagcagggtttagaagttcgcaatggctcgtaccaagcagactgctcgcaagtccacgggtgggaaagcgccacgcaagcagctggccaccaaggctgctcgaaagagcgctccagccaccggcggcgtgaagaagccccaccgttaccggcccggcacggtggctctgcgcgagatccgccgctaccagaagtcgaccgagctgctgattcgcaaactgccattccagcgtctagtccgtgagatcgcgcaggacttcaagactgatctgcgttttcagagctcggcggtgatggcgctgcaggaggcctgcgaggcctacctggtggggctgtttgaggacaccaacctatgcgccattcacgccaagcgagtgactatcatgcccaaggacatccagcttgctcgccgcattcgtggggagagggcgtaaattgtcttgtgaatgtgtgctaaccaaaacccaaaggctcttttcagagccaaccaccttttctataaaagttgctgtttactgttgctgtccgtaaactggaacctctgttcactcaaggtaagtaagcattcttgcctctatccgttccccctcccctcacggaattggtgcaaaaagctttattataattggggagttcttaaaacagcctttaaggtactcttatatctccttgttttgggggccgctttcttaggcttggatgcctccggcttgggaactttcttggccacctttgaccaaccaaccttctccagcagcctccaccagcaaaagcttttggggtccgcttagtactctttttcggaataaggacgccccaagctttcttgggcctctcggctgccaggacagctgtcttgggcatgactgcagcggcttttctggcctcggtcttgattttcctaacactgcctggtttggcgggaatgaacctgaggcgctgcactccttagcacgaagatgccctcgtttgttttc

SEQ ID NO: 120073 - DNA, 1761 bp, Homo sapiens
accaaacctgttggtggtaaacacggaaaatatgcaggtaattacaactctatagctgaaaaagtgggtggctcttaaaagagcctttgggattgggtatgaagacgttagaattacttagagctggtgtacttggtgacggccttggtgccctctgacacggcgtgcttagccagctccccgggcagcagcaggcgtacggccgtctggatctccctggaggtgatggtggagcgcttgttgtaatgcgccaggcgggaagcctcgccagcgatgcgctcgaagatatcgttgacgaaggagttcatgatgcccatggccttggatgagatgccggtgtcggggtggacctgctttagcaccttgtacacgtacacggaatagctctccttgcggctacgcttgcgcttcttaccatccttcttctgcgccttggtcaccgcctttttggagcccttttttggagcaggagcggacttagcaggttcaggcatgataaataaacacttcgtccacaacctaaagagaaatgcaagtgtcctcactctgcagctggtaatatttgtagagctcctatcgtaaactggcatttaaaagcttacacattgattggatgaattgtctctgtgtgccctgtggtatgcaaattaggtgattctagcgtttctttgcaattggttggttgttctagccaatcaaatagcgttatttacaattcgacctccaagtataatagtttctcacttgctaacaaaattcacttttacatttttgtcttcattgcttaacatcgtttttaagaattcaaaatgtccggacgcggcaagcaaggcggaaaggcccgagctaaggctaagacccgctcttcgcgggccggactccagttccctgtgggccgcgtacaccgcttgctccgcaagggcaactactccgagcgagtcggggccggcgcgccagtgtatctggcggcggtgttggagtacctgaccgccgagatcctggagctggcgggcaacgccgcccgcgacaacaagaagacccgcatcatcccccgacacctgcagctggccatccgcaacgacgaggagctaaacaagttgctgggtaaagtcacaattgctcagggcggtgttctgcccaacatccaggctgtactgctccccaagaagactgagagtcaccacaaggccaagggcaagtaaaacgagaactcttatattggctttttaaggaagcagtcttaacaaaggctcttttcagagccacccatgtattccttaaaagggctcacattttctgtgtaaatagctattttgcagttttctttaataatttttccatttataagtgggtgttcttaacactgaatcgtgaaactaaccgtccattttaaagatgccataaaaatacataagcaaattggcggggcgcggttccttacgcctgtaatcccaggactttggaaggccaaggtgggcggatcacagggtcaggagttccaggacagcctgaccaacatggtgtgaagccccgtctttactaaaaataaaaaaatttgtcgggcgtggtggcgcgcgcctgtaatttcagctatttaagaggttgaggcaggagaaaatgttgaaccccggaggcggaggttgcagtgagtcgagatcgcgccactgcactccagtttcggcgacagagcgagactgtctcaaaacaaacaaaaacccaaaaaagcaaactaattaaaatgcaaagagactttatgtcaca

SEQ ID NO: 120074 - DNA, 1117 bp, Homo sapiens
tcgggcctttccgccttgcttgccgcgtccggacattttgaattcttaaaaacgatgttaagcaatgaagacaaaaatgtaaaagtgaattttgttagcaagtgagaaactattatacttggaggtcgaattgtaaataacgctatttgattggctagaacaaccaaccaattgcaaagaaacgctagaatcacctaatttgcataccacagggcacacagagacaattcatccaatcaatgtgtaagcttttaaatgccagtttacgataggagctctacaaatattaccagctgcagagtgaggacacttgcatttctctttaggttgtggacgaagtgtttatttatcatgcctgaacctgctaagtccgctcctgctccaaaaaagggctccaaaaaggcggtgaccaaggcgcagaagaaggatggtaagaagcgcaagcgtagccgcaaggagagctattccgtgtacgtgtacaaggtgctaaagcaggtccaccccgacaccggcatctcatccaaggccatgggcatcatgaactccttcgtcaacgatatcttcgagcgcatcgctggcgaggcttcccgcctggcgcattacaacaagcgctccaccatcacctccagggagatccagacggccgtacgcctgctgctgcccggggagctggctaagcacgccgtgtcagagggcaccaaggccgtcaccaagtacaccagctctaagtaattctaacgtcttcatacccaatcccaaaggctcttttaagagccacccactttttcagctatagagttgtaattacctgcatattttccgtgtttaccaccaacaggtttggttttatcctcatttgagggggttgctgctgtgtaggtctagaccacagttcttttgactggttgaaggaaaatgctatacttaaccgtagcatgtttgttttaccccaagtgctggttagaaggctagcccattgtgctgataagcacatttttcttatgttgtgctgtgatgtgtcccttgtcaaattggtttcataagaaaagaacttttgaaatatctcttttgctactgacatagtgtgagggaaaggaatgtcttccttaattccggt

SEQ ID NO: 120075 - DNA, 1067 bp, Homo sapiens
tttacatgtatgcgtcactaacacattgcccaatcagagctggatattttgaattctttatttgcatgaaaggcctataaaaggagagactctagacacgagcttttatttaagtgcgttcattctcactgctgttattgttttctgacagcatgcctgaaccagctaagtcagctcctgctccgaagaagggttccaagaaggctgtgaccaaggcgcagaagaaggatggcaagaagcgcaagcgcagtcgtaaggagagctactccgtgtatgtgtacaaggtgctaaaacaggttcaccccgatactggcatctcatccaaggccatgggcatcatgaattccttcgttaacgacatcttcgaacgcatcgcaggcgaggcttcccgtctggcccactacaacaagcgctcgaccattacctccagggagatccagaccgccgtgcgtctgctgcttcccggagagctggccaagcacgcagtgtccgaaggtaccaaggctgtcaccaagtatacaagctccaagtaaatgtgtgcttaggtgctttaaaactcaaaggctcttttcagagccactcaagtctcacataaagagctttaatattgaatttcaccgttttctagggaataatttttccgattttgtaatcccagcactttgggaggccgaggcgtgcggatcgagaccagtttggctaacgtggttaaatctcgtttctactaaaaatacaaatattagccgggcgtggggcagtcgcgtgtcatcccagagactcgggaggctgccgcaggagaatcacttaaacccagcaagcaaaggttgcagtgaaaagacatggcgcttttgcattctagcctgggcgacaaaggcgaggcttcgtctcaaaaaaaattgatcaggagatactcctgttctgtgttggcaagatcctgtaatcctagcactttgggaggtcgatgcatgaggctttcttcagctcaggagttaacagatttgcctgggcaacatagaactcgtctctgcaaaaaaatgaagctaaccaggtgtgacggcttgcgtctg

SEQ ID NO: 120076 - DNA, 1057 bp, Homo sapiens
cgaaggaattcatgatgcccatggccttggatgagatgccagtatcggggtgaacctgttttagcaccttgtacacatacacggagtagctctccttacgactgcgcttgcgcttcttgccatccttcttctgcgccttggtcacagccttcttggaacccttcttcggagcaggagctgacttagctggttcaggcatgctgtcagaaaacaataacagcagtgagaatgaacgcacttaaataaaagctcgtgtctagagtctctccttttataggcctttcatgcaaataaagaattcaaaatatccagctctgattgggcaatgtgttagtgacgcatacatgtaaaatagccttcaccttatttcctttctaattggttggctcgtcaaagaacaattttaaccaatcaaattgcgcctttcacaattctaccgatgactataactagcttcttattcctccatcgagcccattctttttctttattcagtggattgttagttcttctgctgttaggaagccactatgtctggacgtggaaagcaaggcggcaaagctcgggcaaaagctaaaacgcgttcttccagggccggtcttcagtttccagttggccgtgtgcaccgcctcctccgcaaaggcaactactccgaacgagtcggggccggcgctccagtgtacctggcagcggtgctggaatatctgacggccgagatcttagagctagctggcaacgcggctcgcgacaataagaagacccgcatcatcccgcgccacctgcagctagccatccgcaacgacgaggagctaaataagcttctaggtcgcgtgaccatcgcgcagggcggtgtcctgcccaacatccaggccgtattgctgcctaagaagacggagagccaccataaggccaagggcaagtgaaatgattactagtcaaatccgtcagtgatcccgagtcccagaaaccaaaggctcttttcagagccacccaccttttctgtaaagtgctggaatacacatacgatgcctgaaatctcaatgttcactgtcctaat

SEQ ID NO: 120077 - DNA, 1173 bp, Homo sapiens
aagcagcggagattttggaaaaaaaattctaaagcactttctaacgcaaacacattcgattttttatagctaaacaggataacagatcagtctattaagttaaatgatcaatgtctttgcaggtcatggtctacgtgaaacatcaaagaaacctgtaacggaaaacgacttgtttgaaagagccagttctctatccaaatttaccaatcagaatcttgcactgaaaaaataaaccaatcgtgaatctctacggccacttccggaatttagcaaccgatcactaacagggatcgtccacaatccaatcagagtgattctgttcctatatagaggggcaaaccaatcttcctaactcatttactttgcagatgaactatggcgcgtactaagcagacggctcgtaaatccacaggcggtaaagcaccgcgcaaacagctggccactaaggcagctcgcaagagcgctccggccacgggcggcgtgaagaagccccatcgctaccgccctggcaccgtggctctgcgcgagatccgtcgctaccagaagtctaccgagcttctaatccggaagctgccgtttcagcgcctggtgcgagaaatagctcaggacttcaagaccgacctgcgcttccagagttccgcggtgatggcgctgcaggaggcctgcgaggcctacttggtggggcttttcgaggacaccaacctgtgcgctattcatgccaaacgcgtgaccatcatgcctaaagacatccagcttgcccgccgcattcgtggggagagggcgtgaattgttttgagtacaaaccttaaatccaaaggctcttctcagagccaaccactttgtccgtgaaaagggctgtaatcctttgagacgcattagaccactaaactgcactgatccaaatagacatttgaaatagtggcattcagttccctcgatgcttcatttaaatttccaaatttaagcgctccctcaggttttcgcctagggctgggcctccctacgctgttctccattggtttagctggctttgttttgctgttcaggccctctgctgctttcttgtacattgttctcgttttctaaactcctggccacttaattgtaccctgcttaacccatcctcttgttttctggctcaacgctctttcatgtggtggcctgcattttagg

SEQ ID NO: 120078 - DNA, 1558 bp, Homo sapiens
ttgatgcaaacagctcgccagagagcctgtgctattgttcctgcgaaaaaacccaatttccctgcacatttggataaaaatgagtttatctatataaagttgagacggtaagaattcacagaacaatgccctggaagagagatttgcaaatgaaagagggagaaatagtatttttaaggaaaacatgaaagttgtctcgatttgaccgaagtttgaaagagagttgggggaataagaaaagtttcaagatgccggttttaaaactatgcatagaaacaaaggcaggaatgaagcccgaactctctcggatcagtttcccccaagtctctaattatttcatgcccagatttcttatatttttactcttttttaaggggcaacaaacacagcagcgcggtagatacgaggagtccttttccagcagcgccgcgcatggagcaaggaaccaatcatcactcagcgtctctctatataaaccctcagcctccctcgtagaggacatgctgttctgacagtttgagattacttattgtcttttctgggaagacaaaaacatgtcggagactgctccacttgctcctaccattcctgcacccgcagaaaaaacacctgtgaagaaaaaggcgaagaaggcaggcgcaactgctgggaaacgcaaagcatccggacccccagtatctgagcttatcaccaaggcagtggcagcttctaaggagcgcagcggcgtttctctggccgcgcttaagaaagcgcttgcggctgctggctacgatgtagaaaaaaacaacagccgtatcaagcttggcctcaagagcttggtgagcaaaggtactctggtgcagaccaaaggtaccggtgcttctggctccttcaaactcaacaagaaagcggcttccggggaaggcaaacccaaggccaaaaaggctggcgcagccaagcctaggaagcctgctggggcagccaagaagcccaagaaggtggctggcgccgctaccccgaagaaaagcatcaaaaagactcctaagaaggtaaagaagccagcaaccgctgctgggaccaagaaagtggccaagagtgcgaaaaaggtgaaaacacctcagccaaaaaaagctgccaagagtccagctaaggccaaagcccctaagcccaaggcggccaagcctaagtcggggaagccgaaggttacaaaggcaaagaaggcagctccgaagaaaaagtgaaactggcgggacgttcccctttgaaaattttaaacggctcttttcagagccacccacaggtctcagtcaaaagagctgaagctttttggaggggggagtggggtggagaggggtgcgggtgctgcggtgttgtgcggccacggtctatcctagtcgtgctggttgggggtcagttattaacagctcccagcagcctgggcgcaaggatccttccgtctcagtctcagccacagtcaccggatagctaaggctacttgagccaccaggtcctactttttcttcaaattcccgcggtggtgtgtgattggccggccgatttctgttaaagcgcggcgctt

SEQ ID NO: 120079 - DNA, 1273 bp, Homo sapiens
gggctgaggcagaagaatcgctcgaacccgagaggcggaggttgcagtgagccgagatcacgccactgcactccagtctggggcagagcaaaactgtttcaaaagaaataataattttattctcttgtctatccattcggtagacaagtgtagcgttactgcctcctttttgcaaataataaggattttaggagacagacattatcagttcgagagcccacaggcactggactagaagacacagaaacctacactcaagacccaaacaaggaaacaggaaggagtcaaatcaacttgcatttcccctaccctcaccgccccctttccttcccaaggcaatagtgtaggggacgcccagtaagttacggaaaaggcggagacagaggtttcgttcccgcccctccaattcagtctccaaaaaggtccgcataattgatatataaggggcttcagtgtgtagcaaagttgcaaaagttaagagttgttgtttgtcttcgatcatgtctggtagaggcaaaggtggtaaaggtttaggaaagggaggcgccaagcgccatcgcaaagtgctgcgtgacaacatacagggcatcacgaagcccgccatccgtcgcttggcccgacgcggcggcgtgaaacgcatttcgggcctcatttatgaggagacccgcggtgttcttaaggtgttcctggagaatgtgatacgggacgccgtaacctacacggagcacgccaagcgtaagacagtcactgcaatggatgttgtctacgcgctcaagcgccagggacgcactctgtacggctttggtggctgagcctcaccccggctttttatttaacagctcacccataaaaggcccttttcagggccacctccttcgtcacacgaagggctgtaactgatgacgacttgggtttcgttttgtaaatttgggattctaactgagttaaaccgagccgtttttagcgatcttcctaagatggcggatgtgctaaggagaaagggaaggcgaaacattagaaacttgttcaggtatttcgatcgcaaacattcacaggaaaagatggtggaaatggtttgggaataccagcagccttttatgacgtatgtgatgtgttttattcccacgtttctgaaatttactcctatgttaggtggctgggacttaactacactagcattacatgtttagtttttgagatggagttgctcttgtccaggctgtagtgcaatgacgcaatctcggctcaccgcaaccaccccctcccgggttta

SEQ ID NO: 120080 - DNA, 1123 bp, Homo sapiens
aaaagcatttagataggttaagattttctaaaatgagacctagtagctgatcacaagtcctatcacactacataattcagggcgcgaaactggaagattcggaccaatcagaaggactttgcctttataaataggagtaagaacaactgtttgttcagttgtgaccattgcttgaaacccattcctatggcacgcacgaagcaaacagctcgtaagtccactggcggcaaagccccgcgcaagcagctggccactaaggcggctcgcaaaagcgcgccagccaccggtggcgtgaagaagccccaccgctacaggcctggtactgtcgccctccgtgaaatccgccgctatcagaaatcgactgagctactgattcgcaagctaccattccagcgtctggtacgtgagatcgcgcaggacttcaagaccgacctgcgcttccagagctcggctgtgatggcgctgcaggaggcctgcgaggcttacctggtggggctctttgaggacaccaacctgtgtgctatccacgccaagcgagtgactatcatgcccaaggacatccagctcgctcgccgcattcgcggagagagggcataagttgtactgagggtgtgcgccaacttaaaccaaaggctcttttcagagccaccaacaatttcagttgaaagcgccgtagcactagggagtaatgtctcctaaaacaaggagggtggagggttaggggatgggggcagggccggtggctcttctaaactaggcttttgtgtcttggccattgtcttcaaaatggccgatagtggcggctcacgccttgtaatcccagtactgtgggagcccgaggagggcgggttacttatacaaaggtcaggaattcgagactagtctgcctaacatagtgaaaacccgtcttcactaaaagtacaaaaccaaaaaacaaaaatacgggtgtggtggcgccctcctgcagtcccagctatatcgggggctgaggaaggagaatcgcttggacctgggaggcagccgttgaagtaagccgagatcgcgccactccactcctccatgggtgacagcgaaaccctgtctcaaaacaacaaaacagaaaatggttgtgtgctgaggcaaa

SEQ ID NO: 120081 - DNA, 1132 bp, Homo sapiens
aatttggtaggaaactagaaacataatatccgtctttgtttctgtttaaattctcacctaaggagacagaacttataggtagatgttactggcaaggcattagtttttctaatgttttgaatgaaaaactacgttttttcccccgggaggtgtagaaaaggatttagggtaggtttcgcataaatatccaatcaaaaagtagacttgaatttaacttttttattggctgatttggtccaatcagggattgagaatgattaagcacctatttgcataaaagacctacaaaaacggccagctgtgctgttgagccttcactttggggtgtattcttactcctttatcttgttgcaatgcctgatccagctaagtccgctcccgccccgaagaagggctccaagaaggcggtgaccaaggcgcagaagaaggatggcaagaagcgtaaacgcagccgcaaggagagctactccgtatacgtttacaaggtgctgaagcaagtccaccccgacaccggcatctcctccaaagccatggggatcatgaattcctttgtcaacgatatcttcgagcgcatcgccggcgaggcttcccgcctggctcattacaacaagcgttcgaccatcacctccagggagatccagacagccgtgcgcctgctgctgcctggggaactggccaagcacgccgtgtccgagggcactaaggccgtcaccaagtacaccagctccaaataaatggacgcatgttcaaacccaaaggctcttttcagagccacttaatgatttcaattaagagttttaatgctgggtgctgctgtattctatgggagaagtgtcgccaatacaggtaaaattttcctacatcacctgtttattctgtgcgtttgacaaacactaagcttttagagtttatttgtctttataaaggtggggtacaactacattgttcaggctggtcttaaactcaagcgctggtcttaaactcaagcaagttttcccacctcggccttgccttgtattactgagcagataatttgacacagcaggaaaagtgggcattcttgtttaggaaccaaaaactaagtttgcaacttaaaatgcaatcaatttggagcaacacgtccaccagtcta

SEQ ID NO: 120082 - DNA, 1149 bp, Homo sapiens
cacaagataaacttctcaaaacgtggtcctccgaatctggccccacaacacatctactgaatgagaattagcgtcttccaagtcttaaagtagtcgtttacggactacagcttgagaagcgcagaattagaactttaagaagttaacgttcttggatcgcagactaaccgagaagagaggattcaaaaatgaagtgattcatccaatcagattttccagtaattcaccaatcacatcgttggactcttcagccaatggttttgttgcgcgggtcttttgaaaatcaacaaggccaattagaatgtttctgagtatatataagggcagtttccactctgccaagtggctgagtttttctttcaggtagtctgagatggcccgcaccaagcagactgcacgcaagtccaccggtggcaaagcgccgcgcaagcagctggccactaaggcggctcggaaaagcgcgccggccaccggcggcgtgaagaaacctcatcgctaccgtcccggcaccgtggctctgcgcgagattcgccgctatcagaagtcgactgagctgctgatccgcaagttgcctttccaacgcctggtgcgagaaatcgctcaggacttcaagacagatctgcgctttcagagttccgcggtgatggccctgcaggaggcctgcgaggcctacttggtggggctctttgaggataccaacctgtgtgccatccatgctaagcgagtgactatcatgcccaaggacattcagctcgctcgccgcattcgtggggagagagcgtagaggtttccgggcagtaattctatccaacttaaaaaggctcttttaagagccgcctactttcacccgaaaatagctgtgattaactaatcaaatctttgaaactaaacattggttttagtacttaagtcctcatttgattggctaaagttaatggtaagcttgctatatttgttcccgtgctttttcccgaaagtgccagattgtcagcgtccttttctaaactggcttttaggggtttggagcttcgatttggtagtggaaggggccacctgggggcgtttatatacattgtctcaagcgttagtcgcgttgtctacttacacccattatagatgggattttttttcgttgtgtatttctggtta

SEQ ID NO: 120083 - DNA, 1003 bp, Homo sapiens
ccttggtcaccgccttcttggagcccttcttcggggcgggagctgacttagctggttcaggcatgttcgcagccgaagtgataccgtcaaatgaccacaggaaaatgctggtgagcccaaacgccctcattatttacctcgtgtatatgcaaatgaggctggctgagtttcggtttctcattggttcttttagtgtctgaatatatgataggccatttctgaactcctaaatctcatcggctctcccagaagctcaaccttgcataatttgacctttcaactataagtatgtaagtcagaagtggttttttttttttttttttttttaaatttttttaaacacctgcttttcgattggctgaaatctgtgttcaggagatagcacagtctactttgccgaatatagattataagagtttagctcttgcgttttactagaatcaatcactttccttcttctaaacaagtatttaaatacttcactgcgtctggatgtggaatgcagggcagcaaagctcgcgccaaggctaaaacgcactcttccagggctggtctccagttttctgtgggccgagtgcaccgcctcctccgcaagggcaactacgccaagcgggtccgggccggtgcgccggtgtacctggaggcggtgctggagtacctgaccgccaagatcctggagttggcgggcaacgcggcccgagacaagaagacccgcgtcaccccccgacgcctgcagctcgccatccacgacgagaagctcaacaagctgttgggcaaagttactatcgcgcagggcggtgtcctgcccaatattcaggccgtgctgttgccctgtctatacaagtgactgactaggcaaacaggactaatgagaaaatgtttaatatctcaagtaagtgctttaatgtagtcgggaagaagcaagttcagtaacgtttacaaaaccttgtaaagtttagatggacagggccactgcagtgttcaagttatcctgcagaagagg

SEQ ID NO: 120084 - DNA, 1337 bp, Homo sapiens
ttggtgatggagagggtgaaatcttgcagttttcaaacacttccgaaggggggtttcggtccgcatgtgctttacagccggcagcagaaagccagtcactgtgaccttggggacaaagctgcactcctcaggcttccggtcttgtggaccgaggctcctctccaatcgtcctaaagcaactgaaggaacaattgataacaatttaaacatgttaatttatttaatctgatttggttgttaaaacagccttaaaactctcattcctatttcccagcaattgcaagagacgcctccgcggagccggcgctcagatgccaaaggctggagtcgttggtgacgtcatccagggctgggctatgcggggtggggccaagaagcaggaccaaagttccggtatgcgcgctttcagtcttcaattaggtccgaattcccggcatataagggcgttgctttgccttggcgtttaggtttcttaagttggttttagaagttgcttagtcatgtctggccgtggtaaaggtggaaaaggtttgggtaagggaggagctaagcgtcatcgcaaggttttgcgcgataacatccagggcatcactaagccagctatccggcgccttgctcgtcgcggcggtgtcaagcgaatttctggccttatctatgaggagactcgtggtgttctgaaggtgttcctggagaacgtgattcgtgacgctgtcacttacacagagcacgccaaacgcaagaccgtgacagcaatggatgtggtctacgcgctgaagcgacagggacgcactctttacggcttcggtggctaaggctcctgcttgctgcactcttattttcattttcaaccaaaggcccttttcagggccgcccacttttttcataaaagagcagacatcttgttatcctgctttgttccagatttttgctgagaagtagttactgtgcacatgtgtagatttgcaggtaacgtttaattactcgtgcttaatctcgcatgtttaggatttgggcataaagtacttaaagccactgttttctgcttgagggaagttggtatgttgaatatgtttagctttcttgtggcattttaacactagatatcagtgagtaagctggattgtgacagtttataattcccgtgggccttcctccttcagtttaagcttgaagcgttcgtaaggttctcaaagactacagaagttggaaacttcgcggagagactgcaagttaccctttccaaaatggcgggaagggctaaaaacaaagaaagctcgcacccagacggcgggccttaaaccaaggcgaatccgtgagcgcaacacatctgcgtgagt

SEQ ID NO: 120085 - DNA, 2056 bp, Homo sapiens
aaaccttagaaatgcactgagtgtgagagagctttctactaatgctcagcccttctcgttgtaagagaattcacaccggagaacaactttttaaatgccttcagtgtcagttgtgctgcagacagtatgaacatctcattggacctcagaaaacccaccctggggagaagccccagcaagtgtgaaaaaagcttctaacaaaactctgacttacccatcagagaagccatactggtgaaaaattgtatatttgtcttaagtatggcaaaagcattcgttggagagccttacttgggtttgcacccaaaaaaaaaaacccaatctgaggaaagactgcaagtgtctgaatgaagagtgcttgtcaatgatcaactcttgtggtacatcagggaactcacataggtgaaaaaacccatacttaccttgagtctgagaaaacctttggtagaagctcctgtcttatcaggccccaaaaaacctgttctgcagtgagagatttaattgtgggtgagaatctatgtacatataatatgtatgagaagactgttctcatagttagttgactcatatggtagagaggactttacatgaaatcagtatgaaaatagttttttagatacccagaagcttgttctgggagaagctagggtgggtcagagtagacctgatgggtaactcaggtaaagatgcttttcttttatctgaactacttaatgattgctttacttttactttttaaaaaattcagaaatccaataaaggaaaggacggtaaccttatgatagaaggtgtggcatgtgttactgttgggggaaaggagtatattgactttgccttggttgatatttttatgcttgtctaggatgggactagagtgttgatagtaacatggcagccttttgctggcagtgaaatgaacttaagaagctagggagtagctatcctagatcaaaactctcctaatagtttttcctttgcaggaccaatcttataaagaaacagcatactcagctttttacttagtgtcagttgaggcatactctcaaaagttttttcccctaaaatatctttcaagttattactggtatttgaaatttcaagtttagaaattcatttctttttaactcaaagtgcaaatttcatataatgattatgatggttttagtgtccatatttttgtggcttcacttatcatctctttcagcagtagctacccacagtcagctcctagtaaaatggctacaggaaaactgaaagaaaagtttaagcctgagtaggcatagagtaaaaaatgcataatgatgcattattaatataagagtaaggctttttttattttgagtatcctaactccaaacctagtgttcttttcactccattatcctgctgtttatagcaaatcaagacccataatgatacgtctttcatttatttcagttctgccaaggaaagagaaaataccttttaatcccagggaaaggattgcaatcaccacattataaggtatatggcgtggaatgcagaattctaaatactagaagggaaaagtagttggcagattcatcagaggcttaaggataagtacttgtttccaatttaaaagtataattaggattgtctttaatgttctctagaaatactataattaatctagagatctatcaatggtcacatctcagtttttttcttccctgagattcaaagacgtgtaataccaatacttcagattcctatagtatttgggactttgtagactagtgaatagatactttgttgctagtccaaatcctctgattttggtttgatttgtcctagcagatccctgaacttcagagagtattgccatttggattcatggagttggcgaactgctacactgctaccttgtgtatggctctaagctttgatcctaatgactggttgatgatcatgataatattagggccagtgaatatagctcatagtgataataaggattctagggtatttttttttcttttagaaaaagatcctggaagtttatttgatctgacatgtttttgtaatatttagaaat

SEQ ID NO: 120086 - DNA, 1125 bp, Homo sapiens
taactactttcttccaagctttctgcagaaaggactccagagatactcattcactgtcccttttgatttgctttcttcatgagcaggcataataattattagtcttgtcttgatttctcaactgaagcaaggaaagatgaagagctcttgtttaaaattacccagattcatagagaaaagagttcttacttgcagtttcccatatgtattgctgatcagttttatattagcaaagagtaaaagtaaataactgatttcaagccatataaaacctagaagacttagggactctgatacagagtttgtcttttctgcagtgattttaattttgagaattcttttcttagtcataggaatataaataatatttctactttgtctcacagggttggaaataccaagtaaggaattaacatatatgatgctggaaacttgtagaggctcatgattgaaaggcctgaaacagatgtatcttccaagttcttatcaagaaaatgactgtgagggcaacgatgggtcaagaagaccagcggaaaactccctaggagagagccatagaaaatgtacacttcagaagagaaatgtaatcagagaactcaaaaaaggaaaatatataatgtatgccctcggaagggtaaaaagatttttattcatatgcatgagattattcagatagatggtcatatataccagtgccttgaatgcaagcaaaacttctgtgaaaacttagctcttattatgtgtgagagaacccatactggggagaaaccttataaatgtgatatgtgtgagaaaacctttgtccaaagctcagatcttacttcacaccagaggatccacaattacgagaaaccttataaatgtagcaaatgtgagaagagcttttggcatcacttagcgctttcaggacatcagagaacacatgcaggtaaaaaattctatacatgtgacatttgtggcaagaattttggtcagagttctgatctgcttgtccaccagcgaagccatactggcgagaaaccatatctatgtagtgagtgtgacaaatgcttcagtagaagtacaaacctcataaggcatcgaagaactcacacaggtgagaaaccatttaagtgtctcgagtgt

SEQ ID NO: 120087 - DNA, 1217 bp, Homo sapiens
aacagttctgagttgacatttgaaatcttggtatatctttttatatttataaataacttttacttactacaataaaattgagtaaaagtagcagcctctgtgcctttcgcaaggaaagcatacaaattgctgaatggaaattagaaaactgttgttaacaaattgatgaaacagaatgttatgtatcatctcattacccagaggtaaccatgttagtaccatgtgttttggatccttttgacttcctgttttctctgagtgcacatgttcctttgtgttctggtccattacacttactaatttgctgtattcagtgagctttaatatcatttcctttacaaataggctccaatctaatatctagtttcttggattctggacctttttgataatttaagaaaccgtgtaccttctccccagaaaagtgcacatatactgtacattttgcagtcaaagttttcataaattacctgggagtctgtggatgccaagtaagaactcctcttctaggtttgagtgcctactctgtgccaggcacttttctgagtgctggggaaacaatagtgaatgaagtgagccaaaaatccctgtcttttaggggcttacattctatggagaaaaacaaaataggaaaggagaggagtgttgtttttgtgagtcagctgggacggagatgtggtacagtttagaatagggtggttggaaatgacttcactgagaatatgcctgttgagcaaagatgtgaatgaggtgagagagagagccttgaagattcctggaggaagagcccttcatccaggaagagatatcaaggataaagaccctgaaatgggagtgagtctggcttgtttgaacaacagcaaagactcagggtgactggagtgcaatgagtaagtagaggaagagcagagaaatggatcagagtagtaactacgagtcagatttcttaagagcttgtaggtttctaacagaagcagttttggtggagtagtgagggttgattgtttaattggagtatgttccagaaaccttggaagacagaattggagacaatgagcaggtttatttatttcaaagcgttttactgcggagaggaacagagaaatgggacaacagcctgagtgtgaggcagttgagaggtttttcttgttgattgtgcttttgtttttgagaagagaaataatattggaatggtccaatacgaaggaataaattga

SEQ ID NO: 120088 - DNA, 2577 bp, Homo sapiens
tttgtctagagctggtcggaactgatggctaccagtggcaggtacttcctgcaggagaaacagtgtaagcaaagatgggaagaggtaagctatggttgaaggatgctcactagaatggagaggaaatgggaccagttttctaggccagctctagaaaaattatgaattataaatttcacaaggtcatcgtctacattattgatttttcctctaggagaggcaagaattgagtgttgtgaatagttctgaactagagaccttttgaaaccaaaaggaagatggtcttgagtctttcttgttacggtaagtggtataccaggctctgtttctgtataaatgtggatgggggtgtggggtggggcagggtgaaagacaggaaagtatgggagaagatatatggaaaaagagaatgcccctttcttagctcctaagatagcagagtgataaaactgagccctatcctaccaacttaaggctattttctactccttttcaacatgcatgcatattcacattaggcttgcagtaattgctttttgattgatttgtagcacaaagagggtagtatgcctaatgcttaggcaggctctggagtcagaagataggtattgaaatcctggctctgctgcttactatttgtaagttgttgggtgattatctaactgccctaagcatcaggttttccatctataagatccaaacactggtattaatacctatttcatagggtccttgggaggactaaatgagataatccatgtaatcaatgaaaaataaatgagaaatttccaagtctaaggcctataaacaccatctaatttttaaataatgctttactaactttgtctcttggtcccatataccctttaaggataaccatgaactctcaagttgtatgaattagcctgtctgcttggacttttgtcgtgttccagtttattcctttcacttcgaccctaggcaggaaagagtactagtctcttcctaggatggggcaagagaagcatcctgaaggagggtaccctggagctaagacttgaaagatgtatttgggcttgctagatgaaccagccagggctactggtctagtctgttatacagctactgggggtccaaggataatgattgcctttttgttctggtatttgttcacacttttcatttattcaacaaatgtactctaggtagtagggatattacagtaagcaaaagactaagtcctaaccctaatagaagttatattttagtaaaaagacaaacgaataaatataaaatgtataccataaagttgaatggtgataagtgctgtggagagaaataaaatgtgataaagcaacacaggctattttagataaggtagtcagggtatgctgctttttgaggaagtgatcttcaggcagagacttgagtccaataaaggagtaagctgcatggggaagagcattctaggcagaaggaacaagtgcaaaagctcggagatggcctgtgaggctgaagataacgcagaggtgccacattatgtagagcagtaaaaactttggattttattctgagtgtgctagaaaacagtattttaaattagggaagtgtcgtgatttttttttttttttgagatggagtcttcgctctgtcatccaggctggagtgcagtggcacaatctcagctcactgcaagctctgcctcccaggttcacaccattcttctgcctcagccttccaagtagctgggactacaggcgcccgccaccacacctggctaatttttttgtactttttagcagagacggggtttcaccgtgttagccaggatggtctcaatctcctgaccttgtgatccgccagcctcggcttcccgaagtgctcggattacaggcatgagccaccacgcccggccttatgatctgttttgaggtttgacacccagacttattttttaggtgttgacatctaaaaaaagcttggatatgaataggaaaattatttccttatttattcagttttttttttcttcttcttaatgccccacacttcattggttgtttagggcaaataagacatcttggactgataactttagggaataatgtaaatgatttgcctggctgtgacaaaactaagaatcctttattttcactctattctccttttgagcttaacactaatacaaattttaaaagacaaaaccttttatgaaccccccatcttataacagctatttgtctgtatcccggcatatctttacttagttgtgattctgagttggaattcttccttttccttctaatatttctccataatttttttctagtttttgcataatcttcatattaatcattaactggccaaattgttttattagttattgcaagtgggttttgaacaaggctttgcacaagaatcaggcatagaaaatgggcttaatacatgttagtggttttgtgcatgtgaaggtagaattaagaaaataatagaatctaccatttattaagcatctactgagacctaggcattgagcttagtaccggcagtgtctttgttctcatagcaactctgtgaggaaaaaagagaatattgaag

SEQ ID NO: 120089 - DNA, 1111 bp, Homo sapiens
cgttgcccgccagttccaggatctcggcggtcaggtactccagcaccgctgccagatacaccggcgcgccggccccgacccgctcggcatagttgcctttgcggagcaggcggtgcactcggcccacggggaactggagaccggccctagaagagcgagtcttggccttagcgcgggctttgcctccctgcttgccacgtccagacatagcgagcgcaactcactacgagcaaccacaaagtgaacgggaaaggcggcgctttttataaacactattgggcgcgaaaaagaagacgtgttgttggttagggctgcagtttaatttcaaccaatagtagtgcgtcttctggatttgcgaatcctgattgggcagacctgacctctgacgttaccctgaataactaccaatcagacacaagacttcaactcttcaccttatttgcataagcgattctatataaaagcgccttgtcataccctgctcacgctgtttttccttttcgttggcgctttatagctacacagtgctatgccagagccagcgaagtctgctcccgccccgaaaaagggctccaagaaggcggtgactaaggcgcagaagaaagacggcaagaagcgcaagcgcagccgcaaggagagctattccatctatgtgtacaaggttctgaagcaggtccaccctgacaccggcatttcgtccaaggccatgggcatcatgaattcgtttgtgaacgacattttcgagcgcatcgcaggtgaggcttcccgcctggcgcattacaacaagcgctcgaccatcacctccagggagatccagacggccgtgcgcctgctgctgcctggggagttggccaagcacgccgtgtccgagggtactaaggccgtcaccaagtacaccagcgctaagtaaacagtgagttggttgcaaactctcaaccctaacggctcttttaagagccacccatgttctcaaagaaagagctggtgcttgtattcctcctctgctggccactgacaaacccttgtaacttgctactgtgttttttggtctgaagtagagcagttatttaactaatccttagtgactttttttttttagatctgccattct

SEQ ID NO: 120090 - DNA, 1478 bp, Homo sapiens
aatgtcgttcacaaacgaattcatgatgcccatggccttggacgaaatgccggtgtcagggtggacctgcttcagaaccttgtacacatagatggaatagctctccttgcggctgcgcttgcgcttcttgccgtctttcttctgcgccttagtcaccgccttcttggagccctttttcggggcgggagcagacttcgctggctctggcatagcactgtgtagctataaagcgccaacgaaaaggaaaaacagcgtgagcagggtatgacaaggcgcttttatatagaatcgcttatgcaaataaggtgaagagttgaagtcttgtgtctgattggtagttattcagggtaacgtcagaggtcaggtctgcccaatcaggattcgcaaatccagaagacgcactactattggttgaaattaaactgcagccctaaccaacaacacgtcttctttttcgcgcccaatagtgtttataaaaagcgccgcctttcccgttcactttgtggttgctcgtagtgagttgcgctcgctatgtctggacgtggcaagcagggaggcaaagcccgcgctaaggccaagactcgctcttctagggccggtctccagttccccgtgggccgagtgcaccgcctgctccgcaaaggcaactatgccgagcgggtcggggccggcgcgccggtgtatctggcagcggtgctggagtacctgaccgccgagatcctggaactggcgggcaacgcggcccgcgacaacaagaagacccgcatcatcccgcgtcatctccaactggccatccgcaacgacgaggagctcaacaagctgctgggcaaagtcaccatcgcacagggcggtgtcctgcccaacattcaggccgtgctactgcccaaaaagactgagagccaccacaaggcgaagggcaagtaactatctgtactagtttgtggcagctcaagtaaaatcgagtccaaaccaacggctcttttcagggccacccacgtcttctctaaaagaacttaacatttattccatgtgaaagaaagtgagacatggacaagactctagtcataaattacccatctttttgaaaacagtgtagcgaacaccgcagatttaaaagaaaaactagagggaaggtggtccagattttaccacgcttaaaagttaagatgtgaacaaatctcttaggccattacttaattttaaacttaatcagtgtgtgtccacagagcaccagtggcttcgtgagttcttgaagcactttggcccaaaagagttatcgcccgggctagaatttagcagacagctgttccacgcgggccagggcggcatgaagaagtcccgccgctacgtgcccggcacagtggccctgcgcgacgttcggcgctaccagaactccgagctgctgatcagcaagctgccgctcctgcgagagctcggcggtgacgccgctgcacgagagcgaggctgaagaactttgt

SEQ ID NO: 120091 - DNA, 1050 bp, Homo sapiens
ttatgaggcaggaatcatgttaaatgaaaaaaggaaaaacagcctaggtcttgaggattaaaaaggactgaaggagaacaagagggagtagagcacagcaggcctgtttcccttttaggtcccctcccccaatgcagagggacttcccgccaaagctcttccggttttcagtctggtccgcagaggttacccataaaagaaagctgccatcacaggcagcagacctttgttctctgaccacttgataatgtcaggacgcggcaaaggaggtaagggcctggggaaagggggtgccaagcgccaccgcaaggtgctgcgcgacaacatccagggtatcaccaagccagccattcggcgccttgctcgccgcggcggcgtgaagcgcatttctggcctcatctatgaggagacccgcggagtgttgaaggtgttcctggagaacgtgatccgggacgccgtgacctacacggagcacgccaagcgcaagacggtcaccgccatggacgtggtctacgcgctcaagcgccagggccgcaccctctatggcttcggcggctaaatggcattttgaagcccagtcattctctaaaaaggccctttttagggcccctaagctttcaacaaaagagttgaaatgactgcaaactgagtctcttaatagggccattgtcagtgagttctgtcatcctattttacaagattaactcgacgccgaaaatgggctgatgactacaggtgaccttgggccgagatttttccaaggccagaagagcctctgctggccagtaacttctggcggctgcctggaaattgcctgcagccggtttaccgctcggattagtttagaaagccaaggggtctgcggtccaaataggggcgggctagataattaacttccctctggaccttcaaatacgtctcaggagataatgagtttgatgggctccactaaatgctagaacctccaggaaaacttcgtggtggctggtttaagaggacttggcgggcacagagctctgcatgggggggagggggacagaccatgctttt

SEQ ID NO: 120092 - DNA, 1047 bp, Homo sapiens
catggccttagaggagatgccggtgtcggggtggacctgcttcagcaccttgtacacgtatacggagtagctctccttgcggctgcgcttgcgcttcttgccgtccttcttctgcgccttagtcacggctttcttcgagcccttcttgggcgcgggagcggacttcgctggttccggcatgttgaaggcgaactacgagcctgagacgagcagcagatcgagaaaacgggaagtaatgggagcaaggtaccaggagtcgtttttatataggacctctcatgcaaataaggtgaagagtgaaagtcctgtatctgattggtggttattagggtgacgtcagaggttagttatacccaatcaacccaatctgcaaatccaaaagacgtacttccattggttaaaactaagctacaaccctaaccaatgacatatcttctttttcgcgcccaatagtgtttataaaaggcgctgcctttcctcgttggctactttcagtaagttgtgaccagtatgtctggacgtggcaagcaaggcggtaaagctcgcgccaaggccaagacccgctcttctcgggctgggcttcagttccccgtgggccgagtgcaccgcctgctccgcaagggtaattatgccgagcgggttggagccggcgcgccagtgtacctggctgcggtgctggagtacctgaccgctgagatcctggagctggctggcaatgcggcccgcgacaacaagaagacccgtatcatcccgcgtcacctccaactggccatccgcaacgacgaggagctcaacaagctgctgggcaaagtcaccatcgcgcagggtggtgtcttgcccaatatccaggccgtgctgctgcctaagaagactgagagccaccataaggccaaataaggagcgaggttgtgaaaactggaaaacaaaggctcttttcagagccattctacactgtcttagagaaagctggacacagtcatgtttgtttcacttcatgtttgcttcgctagataacattgtaaagcgcttctttcgcggttgggctgg

SEQ ID NO: 120093 - DNA, 1117 bp, Homo sapiens
actggtgagaagccctatacatgtcttgaatgtggaaaggcttttagtcagaacacacatcttactctacatcagagaatccatactggagagaaaccttatgaatgcaatgaatgtggtaggtcctttagtcagagtgcacatcttactcaacatcaaagaatgtatacaggagaaaaactctatgaatgtaatgaatgtgagaaagccttccatgatcactcagctcttattcaacatcatattgtccatactgcagagaaaccctatgaatatcatgactgggaaaactttcagttactgttcagacctcattcaacatcagagaatgcacactggagagaaaccatacaaatgcaatgaatgtgggaatgcctttagtgattgttcatcccttattcagcatcaaagaactcacaccggagaagagccttatgaatgtaagcaatgtggaaaagcctttagcagaagcacataccttactcaacatcagagaagtcacgcaggagagaaacagtataaatgcaatgaatgtgagaaaactttcagcctgagttcattccttacacagcatatgagggttcagactggagaaaaaccctacaaatataatgaatatggaaaagcttttagtgactgctcaggacattttcagagaactcacactggagagaagccctgtgaatgtaatgactgtgggaaacctttcagtttctgttcagccctaattcaacataagagaattcataccagaaagaagccctgactgtaccttcataccagtaaatgcactgactgtggaaaagccttcagtgattggttagcacttgttcaacatcagataactcaacactggagaaaaaccgtataaatgtactgaatgtggaaaagccttcagttggagtacagacctcaaaaatcaccagaaaactcatactagtgaaaaatcctataaatgtaatgaatgtagaaaggcctttagttactgctctggtcttattcaatgtcaggtcattcatactatagaaaaaccttatgaatacggtaaatgtggcaaagcctttaggcagaggacagaccttaaaaaacatcagaaaatgcataccgaagagaaacc

SEQ ID NO: 120094 - DNA, 1036 bp, Homo sapiens
aggcagctctgaggtctgccgcactgctcatgcttgcggtgatagtggtagtggtagtgatagtgactgggcttgcaatatgggaaagattcaggatcctctggggtctgctgtaaactcctgataccattgaatctgttctttaagaatattgccagcattgactaccctgcttcttttagttgtcatctcttttgttttgggcaacagtttacttcctgattatgtactttcctggttatgtttcttctgttgttttatgtgtttgctgataaactgctttctttcattggtatattttattaattctgttaccctgactattctcaaggatcttccctctgcctctgctctttttcacatatatttctaaggctttagctattcttgtccttctttttttgagctgatactttccatcctacatttgaacatccttgttattctgatgttggcatctttcacttccacaaacgctactatagtccagctctccatttcttttcttaattctcaaaatgcctagacttgaacttgttagtttctccctgctaaattatttctctactatttacaactcttcccatatctagcaatgatgtgattatttcttcagtgttccaggctgaaacacatggggtcttagctaataaatctttcctgtttgttctgtctttaaatcatggttcttggattttttgttttgttgtttattagcaaggaatcccaattcaaactgcccccttcagattcagttcatctctgtctactcttagccatctctgttgtcacctttttagtcaactattaccttaaatgtatttccttactggttcttgaagattatctatgaaattgaattagacattcttttgccactttcgtattttatttataattctccttagctccttccaactttctccccaaataatatggctatatatttgaaaaccattagaattttctgagagatttatttttcagtatcattatattattcccacaatagcagtttattttttctctattcaga

SEQ ID NO: 120095 - DNA, 1324 bp, Homo sapiens
gggacccttctcagttgtgagattatgaactcaaagttcaagatcccaaagttttgttgtagtgtgaatggcaagaacagtctttctctgatgcttctagaagattcaaatcataaaaagctttctttgcctgttgaaaatacactgtagtaatctactgttataacatcagccctcttgcataggaaaccttttatacaaccagaaaacatgcactgaaaataacaaatgagctctcaagcttggtgtttgcttggtggggacccacgtgggttcaacatgtgtattgagaagtgttatttctgttcagggcccatctaccctggtcacggcatgatgttcgtccacaacaattgcaagttgttcagattttgtaaatctaaatgtcataaaaacttttaaaagaagtgcagtcctcgcaaagctaggtggatcaaagcattccagaatgcagctggtaaagagcttacagtggataattcatttgaatttgaaaaacgtagaaatgaacctatcaaataccagcgagagctatggaataaaactattgatgcaatgaagcaaattgaagaaatcaaacagaaatgccaagctaaatttataatgaacagactgaataaaaataaagagctacagaaagttcaggatatcaaagaagtcaagcaaaacatccatcttattcaagcccctcttgcaggcaaagagaagcagctggaagagaaaatggtacagcagttacaagagcatgtaggcatggaaaacacatcttaaaaatctctgtaaccatttcttttatgtacatttgaaaatgtcctttacagacttggaactgctaaattattagtttattttttacataaggtcacttaaatgaaaagtgattaaaacatatctttcctacattgacatctgcaaaacatcagatattacgaatgttagattgcatctcagtgttaaatcttcactgatagatgtacgtatgtaaatcatgaaaattctacttctaactatagaagtgaattgtggatgtaaaatggttatgctatttggataatggcactaggcagcatttgtataacaactaatggcaaaaattcatggctagtgatgtataaaataaaatattctttgcaataaaatattccgtttattaacgttacagaaggggggatacaacaaggaactaacaatttgtataacagtgtcaaatgttattttgattttagtatttcctgttttggtttatttgtatcttagaagagcacaatgacattgtttgatgaagcctaattattctggactgttttgacctggtttaaccctt

SEQ ID NO: 120096 - DNA, 1427 bp, Homo sapiens
cgcgttgccagccagctccaggatctcggcggtcaggtactccagcaccgccgccaggtacaccggcgctccagcaccgacccgctccgcatagttgcctttgcggagcaggcgatgcactcggcctacgggaaactgaagcccggcccgagaagagcgggtcttggccttggcgcgagctttgcctccctgcttaccacgcccagacatggcaaaaggtctattacctttacggtcaagaaagactgaaatgaaattggaaaaacgtacattttatagcctctactgggcgcgaaaaggaagctgtgcgattggcttacgttttatttttatttagaccaataggactcgagtatgcaggatacctattttgattgggcaaaactggcatctgacgtcatccacggataatcaccaatcagcactgacctattctactcctaatttgcataataacatttaaataaagaggacgaaacagccctaaggttgtcttttattttgttttccaccatgcctgaaccagtcaaatctgctccagtccctaaaaaaggctccaagaaggccattaacaaggctcagaagaaggatggaaagaagcgcaaacgcagccgcaaggagagctactctgtgtatgtgtacaaggtgctgaagcaggtccaccccgacaccggcatctcttccaaggctatgggaatcatgaactccttcgtcaacgacatctttgagcgtatcgccggagaagcgtcacgcctggcgcattacaacaagcgctcgaccatcacttcgagggagatccagacggccgtgcgcctactgctacccggggaattggccaagcacgccgtgtccgagggcaccaaggccgtcaccaagtataccagctccaagtgagcctctcgctgcagtaacagttccgccgtgacccacaccccaaaggctcttttcagagccgtccacgtttctcaagaaagagccagttcactgttaagtttgtctcccattaggtaccctttgggactcgcttcgtacatataaatgtacttgtatatgtgggtttttttttgttttttgttgttgtttttgaggtgtagtctcactttgttgcccaccctggagtgcaatggcacgatctcggttcactgcaatctccaccttccgggttcaagcgattcttctgcctcagcctctcgagtaggtgggaccacaggcatgtggcaccaggccctgctactttttgtatttttagtagatacggggtttcaccacgttggccagactggtatcgaactcctgaccttaggtggtccacttgcctcggcctcccagtgttgggatcacaggtgtgagccactgcgcccggcccaaaatattttaaagaggattattagcaactatgagtgaccgtggcttagggaagacacaat

SEQ ID NO: 120097 - DNA, 1064 bp, Homo sapiens
tttttttttaatatatttaaaaaaaagagtgtctcctaaagtgtaagcgctatcatgctggactaatgttttaatttaatttaattgttgtcttggtagagatggggtctcgctattttgctcacgcagatctcaaactcctgacgcccaggtacactcccatctcggcctcctaaaatggtgggatcacagacgtcagccaccgagcccggtcacttttttgtattccccacagtattgatgtatatcttctgcgttcaaaagcaattttttaaagcctcataacgtggtaacagaatactttgcacattacaaaattcagaacacggaaacaagaagctcgcttttttttcccccctatttcggtttggccctttagatttcccctcccccaccggggcgggacttcccgccgacttctttcaggttctcagttcggtccgccaactgtcgtataaaggcgctgcctcaggccagaggcctcacaaagcgttgggtgagactcctcttgctcgtcatgtctggccgcggcaaaggcgggaagggtcttggcaaaggcggcgctaagcgccaccgtaaagtactgcgcgacaatatccagggcatcaccaagccggccatccggcgccttgctcgccgcggcggcgtgaagcgcatctccggcctcatctacgaggagactcgcggggtgctgaaggtgttcctggagaacgtgatccgggacgccgtgacctatacagagcacgccaagcgcaagacggtcaccgccatggatgtggtctacgcgctcaagcgccagggccgcaccctctacggtttcggtggttgagcgtccctttctatcaataaaaggcccttttcagggccaccctactttctcagctgaagagtggtaacactgaggagtggttttggtaggtacggaattttgcttggttctgagtcagttctggggggaacagttttttgaacacagcggcacacgtgtggccattcacccggggtcactgtaggcaggactaattacgagatgtaatgtctaaacttgctcaaaattcgtaagc

SEQ ID NO: 120098 - DNA, 1090 bp, Homo sapiens
ttgtatttcccacagtattgatgtatatcttctgcgttcaaaagcaattttttaaagcctcataacgtggtaacaaaatactatgcacgttacaaaattcagaacacggaaacaagaagctcgctttttttttccccctatttcggtttggccctttagatttcccctcccccaccggggcgggacttcccgccgacttctttcaggttctcagttcggtccgccaactgtcgtataaaggcgctgcctcaggccagagtcctcacaaagcgttgggtgagactcctcttgctcgtcatgtctggccgcggcaaaggcgggaagggtcttggcaaaggcggcgctaagcgccaccgtaaagtactgcgcgacaatatccagggcatcaccaagccggccatccggcgccttgctcgccgcggcggcgtgaagcgcatctccggcctcatctacgaggagactcgcggggtgctgaaggtgttcctggagaacgtgatccgggacgccgtgacctatacagagcacgccaagcgcaagacggtcaccgccatggatgtggtctacgcgctcaagcgccagggccgcaccctctacggtttcggtggttgagcgtccctttctatcaacaaaaggccctttttagggcccccactttctcagctgaggagccgtgatgcttgtttgcccagtttctctttaccatttgttcgcgcctgctgagtttgtgctgctatcggagcatgcgtctctagtcgctgtaagtaggcatcagtcactaatcgctctccagtaaataaaatacccaacacaacttgtttcaggtgctccagagcttactgacatgggccgtcgcgcagactgtagtgcagtgtcatcatggctcactgtagcctcccgattagccggaacctcgcgcccaccaccacgcaaggctaattatttttccaaagaccgggtctccgtgtgtttcccaggctagtttcgatatcctggcctcaatcccctcgcctatgcctaatgttggtattacagtagtgagccaccacgcctggccacgatactgttgaggttttagggttagttacattta

SEQ ID NO: 120099 - DNA, 1558 bp, Homo sapiens
ctcctgagtagctgagattacaagcgtcagccaccatagcccggctaatttttgtattttttagtagagacagggtttcaccatattggtcatcctggtctcaaacccctgagctcaggtgagccacctgcctcaacctcccaaaatgctgggattaaaggcgtgagccacagcgcccggcgactttttttttttttttttttttttttttcccttgagacagggtctggctttgccgcccaggttggagagcagtggcgcgatcgtggctcaccgcaacctccgccttcctggccgaagcgatcctcctccctgagcctccccagtagctggggttacaggagtgcatcacgcgcccagctaattttttacatttgtttgaagagtcatggtttcgccatgttgttcaggctgctctcgaactcctgacctcaagtgatccgcccgcctccgcctcccaaagtactggaattacaggcgtgcgccgccgcgcccggccgctttttcctattccttgtaccctttctgcagttaaactacaacacgcctgaccccaccaagtcggccacagccccgaaaaagggttccaagaagactattactaaggcaagaagcgaaagcgcagccgcaaggagagctgctccgtgtacttgtacaaggtgctgaagcaggtccaccaacaccggcatctcgtccaaagcaatggggatcttgaacaccttcgttatgccatcttcgagcgtattgcgggcgaggcttcccgcctggcgcgttacaacaagcgttcgaccatcacctccagggagatccagacggctgttcgcctgtcacgcatgctgtgtccgagagcaccaaagccgtaaccaagcacaccagctccaagtgagctccttgctggttcgtccacttggaaccccactaggttcttcctgactcacactccactaggttcttcctgacccacaccctaaggactcttttcagagatattcacacttcctaaatagaactgacgctcgtttatccctagttttgaaatgttcagttagctttaacctaaagcctttcataaatgcttcttaatttatgcaaaagatacattgtggccttatgatatttccaatattatctgctactaagtattttatgttacaaacgtcaaatacacaaaacgggagttttattgtgcgaatttcacttatccaggctcaatttcaacaccgagaatcccctgttgagttattgtctagaaaaccaagtatttaaagtaaaagtcctatcaacctctactgaaatatcactggacgttttgcaggttacaccacaattttcaggccacctggtaggatactcagtgactaccatgtaatccaggtggcattctctttcaatttttcttttataacatgaaagcagggaatgtgctttcttgcctaatttgcacaaaatgacctaaaggtgttgagattaaaatggagaaagaggaaggaaagaaattagaaccaatttatattacctcttcccaccagttagaaatgaggtttggatccttccttgc

SEQ ID NO: 120100 - DNA, 1096 bp, Homo sapiens
cagcccaatggattcttatgaaaagctgaagggattttttaaaatatctttcatcaattgcacaagattcttgaaaacacaaacaagtatgtgaacctggaggctgttttcctcctttggagcttcaaagtgccaaattctgtaccattgttttaagcatttaatcaaattttgaggactaacaaacacaatttgggagtccaaccgcgagcggcggcggccagagggcggtggattggacgctccaccaatcacagggcagcgccggcttatataagcccggggcccgagcatagcagcaacgcaaaacctgctctttagatttcgagcttattctcttctagcagtttcttgccaccatgtcggaaaccgctcctgccgagacagccaccccagcgccggtggagaaatccccggctaagaagaaggcaactaagaaggctgccggcgccggcgctgctaagcgcaaagcgacggggcccccagtctcagagctgatcaccaaggctgtggctgcttctaaggagcgcaatggcctttctttggcagcccttaagaaggccttagcggccggtggctacgacgtggagaagaataacagccgcattaagctgggcctcaagagcttggtgagcaagggcaccctggtgcagaccaagggcactggtgcttctggctcctttaaactcaacaagaaggcggcctccggggaagccaagcccaaagccaagaaggcaggcgccgctaaagctaagaagcccgcgggggccacgcctaagaaggccaagaaggctgcaggggcgaaaaaggcagtgaagaagactccgaagaaggcgaagaagcccgcggcggctggcgtcaaaaaggtggcgaagagccctaagaaggccaaggccgctgccaaaccgaaaaaggcaaccaagagtcctgccaagcccaaggcagttaagccgaaggcggcaaagcccaaagccgctaagcccaaagcagcaaaacctaaagctgcaaaggccaagaaggcggctgccaaaaagaagtaggaagctggcgtgtgaaaaccgcaacaaagccccaaaggctcttttcagagccaccc

SEQ ID NO: 120101 - DNA, 2381 bp, Homo sapiens
agggcaagatgagctgagtaatttttaactgggcatcatttttagaaactggagtttaagtacccccttttccattttttcctgaagtcgtgggcagggcgcaaggtctgtgaatcggccgaccggatgcagctggtgtggagagttcccaatcaggtccgatttattactatataaagtactgctgcgaggcttgccgtgttgcattttgtttagtacaagacatgtctgggcgcggcaaaggcgggaagggtctgggcaaaggaggcgctaagcgccaccgcaaagttctgcgcgacaacattcagggcatcaccaagcccgccatccgacgcctggcacggcgtggaggcgttaagcgcatctcaggccttatatacgaggagacacgcggagttcttaaagtgtttttggagaatgtaatccgcgatgcagttacctacacggagcacgccaaacgcaagacagtcacagccatggacgtggtttacgcgctcaagcgccagggccgcaccctgtatggctttggcggctgagtgttttacttacttacacggttcctcaaaggcccttctcagggccacccatgaagtctgtgaaagagctgtagactaaagatagttaatttcttaagaacacttaaacgtatggcagttttggcaaattagcgattccacataagcagtcgctgaagtttgaggttcggtgcccctttcagcattacttagtggttaaaagtgccggcttctctgatacacggccaaatctataacgcctctctggtttttgcaaaagtcataatgaaacagccggtctcatttatcttgtatcgattactttaccgctaccaatgcgagggctgtgtaactatgacactgtggtccgcaacgcccaaaatgttttaatatcgccctttacagaaaaagtcggccaacttctaaaacattaagtacgtttaaatttgagaaatactggcataccacaacgctcgaatttcatatccccttcaatgcctccatttacaaatttactctagtttcacttttcctttacgttctttaactttttgtcaaatcagtaatgacacctcgtaattaaaatagtgcaaggcaagtttagatttatcaagcttatatttaaacaggattttgatgcatgaaaaatcctagacttttgggggatttttttttgtttccgtttttgtttttctttagctagcaaaaccattttacgtttcttgacccaaaacagaggcggaatgtctccctttcactagcagattaaactgggagccaattccgtgtgtgagacgtggcatggcacagtctactgtccaatcagaacgcgagggcagctataaataccgggatgatcagtttttttctctcatttgtgttgagtaggtacgtctacttagccatggcacgaacaaagcaaacagctcgcaagtccaccggcggcaaagcgccgcgcaagcagctggccaccaaggcggctcgcaagagcgctccggccaccggtggcgtcaagaagccccaccgctaccgccccggcaccgtggccctgcgcgagatccgccgctaccagaagtcgaccgagctgctaatccggaagctaccttttcagcgcttggtacgggagatcgcacaggactttaagaccgatctgcgcttccagagctcggcggtgatggcgctgcaggaggcttgcgaggcctacctggtggggctatttgaggataccaacctgtgcgccattcacgccaaacgcgtcactattatgcctaaagacatccagcttgcgcgccgcatccgaggggagagggcataaatattcctatcagcccaagaagtctgtccaaccccaaaaggctcttttcagagcccctcaattgtcaccaaaaggaagctgtagcttttgagacgtgtcttagctccatgttaaatacaagctgtggacaaaacgtggtagtggcccaacacactataatgcaggagtcaggtcacaggctgttggtatgctaaatcaatttcacatacagaacctgttcctactgataaggattatcactcaaaaaagacatgtcatggggtcaattttacagatgaagtttagttttgaaaagtattcctgtttttatccttgaggaatgtgtctcctgcgtatctacctgcccctactgaagggaacaagtagcacaatgagtgtccacaggctctggtgaggccgaggcaggcggatcacaaggtcaggagatcaagaccatcctggctaacacggtgaaacccccctgtccactaaaaaaaagactgccggccgtggtggcacgcgcctgtagtcccagctactcgggaggctgaggcaggaggatcgcttgaacc

SEQ ID NO: 120102 - DNA, 1169 bp, Homo sapiens
gttgcagtgagctgagatcgcgccaccacactccagcctaggcgacagaattagaagccgtcaggtaaaaaaaaaaaaaaaaaaaaaaaagtggcaggaaccaaatgaagatagtattaacaaccaaccaggtttttcctacaacagttctgaccaatcaggatcagatcatcgttataaattctggtagaagccactgctcattcagctgcttgctttcagagcatagctttctcaactatggcccggacgaagcagacagctcgcaagtctaccggcggcaaggcaccgcggaagcagctggccaccaaggcagcgcgcaaaagcgctccagcgactggcggtgtgaagaagccccaccgctacaggccaggcaccgtggccttgcgtgagatccgccgttatcagaagtcgactgagctgctcatccgcaaactgccatttcagcgcctggtgcgagaaatcgcgcaggatttcaaaaccgaccttcgtttccagagctcggcggtgatggcgctgcaagaggcgtgcgaggcctatctggtgggtctctttgaagacaccaacctctgtgctattcacgccaagcgtgtcactattatgcctaaggacatccagcttgcgcgtcgtatccgtggcgagcgagcataatcccctgctctatcttgggtttcttaattgcttccaagcttccaaaggctcttttcagagccacttacattctcactgaggatagctgtcacaccattggtcgactgtcttaaatcaactttaaagcagggataaactggcggaaagtcgtcaagggttgttcattctgattccttgcagtgtcctttgtcttctaagacggtccttttcacttgtcctctgtgacccatctcacaagggtctcactttctccgaggaaagtcagcaaatctatatccaaggtcaatccgcttcaaggggaaagccaaagtccttcctgcacatgctgtcctttggggatagcatctccagaaccccataactaacaattagattacaggttaaatgagatgccatttttaactgaaacgggcactgcccttgggtcccctggaagcttgctgaaaatcacggacatgaggccggttgatttagcacatagacacgggagacttcaaaatgaggacccacccaccaat

SEQ ID NO: 120103 - DNA, 1349 bp, Homo sapiens
cgctcaaagatgtcattgacgaaggagttcatgatgcccatggccttcgatgagatgccggtgtcggggtggacttgcttcagcaccttgtacacgtagatagagtaactctctttgcggctgcgcttgcgcttcttgccgtcctttttctgggccttggttacggctttcttggagccctttttgggggcaggagcagatttagccgggtcgggcatggcggaggagagtgaaagagcactcaaataacaagaatgaggacaagctgggttatgccctatttatttacaagtctatatgcagatgagattgagaaattcttctgtctgattggaagttactcagatgacgttaatatcaatatagtccaatcaaaacacgtatattcagaaagctcatttgcattaagaggaagctgcaagcttagccaatggcccagcttctttttcgcgcccagcagctgctataaaatgcgcgtccctgtaggttcctttcactcactttctgacttaggccacaggtcgttttaccatgtctggacgtggcaagcagggcggcaaggctcgcgccaaggccaaaacccgctcctctagagctgggctccaatttcctgtaggacgagtgcaccgcctgctccgcaagggcaactacgctgagcgggtcggggccggcgcgccggtttacctggcggcggtgctggagtacctaactgccgagatcctggagctggcgggcaacgcagcccgcgacaacaaaaagacccgcatcatcccgcgccacttgcagctggccatccgcaacgacgaggagctcaacaagctgcttggtaaagttaccatcgctcagggcggtgttctgcctaacatccaggccgtactgctccccaagaagactgagagccaccacaaagctaagggcaagtaagggctgaactttaaaaatgtaaacttacaagacaaaaggctcttttcagagccacccaccatttctacggaagaactgagcactctgttctccaaacctatcagaaatttgtggccgagttcaagcactgaggccattactttcctattgggtaaaataaaagtattgaatcaggcctagtaaatactatccaactgctaccttataacatgaaggaacctccttaattgtcccctccccacaaactgtcctgggtctttaaaaaacttggggccgggcgcggtggtttatgcgtccttagcattttgggaaactgaggcaggtgggtggggaggggagaaatctctagggacctggagttcgagaccaccctgataacgagacccctgcctcttaaaaaaaaaatgactgggcgcggtggctca

SEQ ID NO: 120104 - DNA, 1206 bp, Homo sapiens
aaagtgagtgaaaggaacctacagggacgcgcattttatagcagctgctgggcgcgaaaaagaagctgggccattggctaagcttgcagcttcctcttaatgcaaatgagctttctgaatatacgtgttttgattggactatattgatattaacgtcatctgagtaacttccaatcagacagaagaatttctcaatctcatctgcatatagacttgtaaataaatagggcataacccagcttgtcctcattcttgttatttgagtgctctttcactctcctccgccatgcccgacccggctaaatctgctcctgcccccaaaaagggctccaagaaagccgtaaccaaggcccagaaaaaggacggcaagaagcgcaagcgcagccgcaaagagagttactctatctacgtgtacaaggtgctgaagcaagtccaccccgacaccggcatctcatcgaaggccatgggcatcatgaactccttcgtcaatgacatctttgagcgcatcgctggcgaggcttcccgcctggcgcattacaacaagcgctcgaccatcacctccagggagatccagacggccgtgcgcctgctgctgcccggggagctggccaagcacgccgtgtccgagggcacaaaggccgtcaccaagtacaccagctccaagtgagctctcgcagctgccagcaatccaaaggctcttttcagagccactcacgcttccagagaaagagcctgtgcattttgcttgtagtcttttgggtggactccggccggcctccattaggagggaagacggcgggaaaaggtaagctaagctccctaggctttttgcgtgtgagtatagacgctccatcagacaaatttagcttgggttcttagatacccttggggaaaaaggcttgcagttgtgctttaagctataattacaagtttgctttcggttttcggttactctttccttttgtgttgttttttttttttttttttaaatggagtcttggctctgtcgcccaggatagagtgcagtgccgcgatctcggctcactgtaagctccgtctcccgggttcaaccaattctgcttcggcctcctaagtagctgggattacaggcgcccgccaccgtgcccgactaattattgcatttttagtagagacggagttttaccgtcttgaccaggctagtctcgaactcctgacttcgtgatc

SEQ ID NO: 120105 - DNA, 2778 bp, Homo sapiens
aaagtgttaggaaagtttttgacaataccttgaattagattatgtagaaattagtctcatctgttaagagtaagggaaaggttgagagctgaagcgtgtagaaccagattagtacagctggtgtatcaaagactaaaaggggttaaatgagcagccctgaaggccagctgagattaaacacaaaatttcaactagacccagtctacatggtttcctgactttgcttagccatgttccacatccccaaacagggtgatgaaagcagaaggaaggggtttttctatggatgggtttggcatggctggcatgacagaaagttaaggaagtaagaagttatttctggaacagtggggaggatcatttaattggccgagccatgaagtccgtgtcatactaaggaacttgttaagataccatagttagttacaatgacttttgacttgccttaacactatcatattttcttcatgaagaagtacccttagaaagaggccctcagaagagtcttctcttaagaagataaagaaggtagtggaaacgaacttcctgagcttttcaggctctaatggctgaagaatcaagaaagccttcagccccatccccaccagaccagactcctgaagaggatcttgtaatcgtcaaggtagaggaggatcatggttgggaccaggaatctagtctgcatgaaagtaaccctcttggccaagaagtgttccgcctgcgcttcaggcagttacgctaccaggagacactaggaccccgagaagctctgatccaactacgggccctttgccatcagtggctgaggccagatttgaacaccaaggaacagatcctggagctgctggtgctggagcagttcttgaccatcctacctgaggagctccagacactggttaaggaacatcagctagagaacggagaggaggtggtgaccctattagaggatttggaaaggcagattgatatactaggacgaccagtaagtagaaggaggtatgcgtgctatgactgtgggagtcctggaagcttggtagagggacataggcatcacagtgggagagcagatgcttagcatcagtttctgttggataaggatgacaatagttttagtgtagtatgacttgtagagttctttttacttttgtaaaggatataaatccattttgtttttgtcgtcataacatccctacgactgtattgttcttgtttgccagatgggaacttgatgcataggaagcttaagttaatttttcaggggtatccaaataattaaaggtaaatttgagaccagaaatcaggctttctagttccttattaaaagatttttctactgcatagcactgctttaagtttgttgttttcctccttcctctgccttaggagtacaaaatattggtgttctgtgtaacagggaaggcatcagcagaaatcttttcctttagtactaagcaaaaatgatgcctttctttctgtgctcattacgtattcgtgttccttactgtccctaagaagtgaggaagattctgctgcttccttccccaagcatatatccctgtagatgtgttcgtggtcctctttcattgttcattacatttcgcaaagggattccttattatccaactgtctgttgtttccaggtctcagctcgcgtacatggacatagggtactctgggaggaggtagtacattcagcatctgcaccagagcctccaaatactcagctccaatctgaggcaacccaacataaatctccagtgccccaagagtcacaagagagaggtgagtagccagatttcattgatgataagggggggaagtacaaataaaagtccatttgggatacctatctagttcctgaagaaccaggaactaaaatcctgtttacagaccagtcccaaagtctgtgtttaaatgtttaggcttcaaatatagattattctttctagtggtaaactcatgaacaaattaaataatttgacttttttttttttaattttttttccttttattattatactttaagttttagggtacatgtgcacattgtgcaggttagttacatatgtatacatgtgccatatttctgttaccacagtacatttacaacatacatttttgaggttatgctggtattgtcatgccactttatttggaaatatttcagtatgtatttcctcagacgagcatttcttaggtaacttaaataaataaattcctaaatttatcacaattaagaaatgtagtattgctacaatactaacctaggccatagttcatattttgacagttgccccaattatgttctttctggttcagagtctagtctggcgtcacactttgtggttagttgtcatggctgtttagtctcctttactttggaatagttcctcaacctttctttttttttgaagagtacaggtgtgttattttgtagaatggctgcagtttggatttgcgtgatgtttgatcatgtttacattgaggtcatatatatttggcaggaacacctcaccctgccaaggatacatgacctaaatcttaacaagagatgttgtactccttcttaggggtacaacaggaatttgtcctattattggtggtgttatctttgatgacttggttaaggttattcttgcagggttaatcattgtatagttactatttttccctttgtaactaataagtaatttgtggaagatactcttgagtgtatttaaatatcttagtcctcattaaactttgttgctaaaacactagttttagtgttcattggta

SEQ ID NO: 120106 - DNA, 2446 bp, Homo sapiens
ttcgccactggagaatccacactggggagaaaccctatcagtgtaatgtgtgtggtaaagccttcagttacaggtcagcccttctttcacatcaggatatccacaacaaagtaaaacgctatcactgtaaggagtgtggcaaagccttcagtcagaacacaggcctgattctgcaccagagaatccacactggggagaagccatatcagtgcaatcagtgtgggaaggctttcagtcagagtgcgggccttattctgcaccagagaatccacagtggagagagaccctatgaatgtaatgagtgtgggaaagctttcagtcatagctcacacctcattggacatcagagaatccacactggggagaagccctatgagtgtgatgagtgtgggaaaaccttcaggcggagctcacatcttattggtcatcagaggagccacactggggagaaaccctacaaatgcaatgagtgtgggagggccttcagtcagaagtcaggccttattgaacatcagagaatccacactggagaaagaccctataaatgtaaagaatgtgggaaagctttcaatgggaacactggtctcattcaacacctgagaattcacacaggggagaagccctaccaatgtaatgagtgtgggaaagcctttattcagaggtcaagtctcattcgacatcagagaatccacagtggtgaaaaatctgaatccataagcgtttaggaacaacatcagttagagtttgagcattattcagcattagggaaaccacacactggtgagaggtctttcagtgtactaaaaggcagaaaggtcatcacaactttagtgtcagaatctatagtggtggcaaagttaggatagctctttagtaatttgggcccagtgccttggtgaaggttgattagcttgactgtctttgaaagtatctgatggagctcctgatgacctaatgtatcctttagaaatttaaaatagcattagagcaagttgcttgtcatggcttgaagagcttaactttgtcttttgggtgagtagctataggtttgagagaggctggctactcctagttcctgtgcttcttcccatctcctgtgatccccctctcccatttattcccttgaaggtgcccttgtattcctaatctgatctaagaagctgctgtagagtcagaagtagcttctgtgtgaaacttatatttgtatgtagctttctaggaaaattttacagacacttaaagtatttatgcttaagtgtgcatttttttattctaatattccttctagtcagtggaaatttgtattcccatacaaactcagaatgctatatttttaacagcactccagcatttttcttcatgtatcaccttcactgactccattgagtcattgagcatctgtacatatccttcaccacccccagtcccagcacctgtgtcagtaaagaaagtggacacattagtaatggttatgggagtaatacagagaaagaggtgagtggagactcagcccagctgctcttgagcttggatagttatacattttggtgacttctgactctccttccacctccccactgtacactgtggtacagatagttggcactatcctagttatggcatcaggtaggagaaggagacgaagatgctttaggaagataaaaaccttacaaagaatgtatactcatcttttttggcccattacaatactgctttctcaggttcttaacagcctgtgcaaactccctgactagatggtctgtcactcctatcattaccttgcacccatctctttagatggcctcagcacctcactcgttattctccatctgtttcttgccattagtttatatgactttaatatccacagtggtaatctaataccttacctcacaggttttcattcttttgaactctggtgcactccatctgtaatccatgtctataatctaccaacaaagatgtactcttaaactcagtatcaccaggcactatatttcatctttgaggcttttgttataccaaggaatactatataaagtaatgagactggtttaaagtaacatgccagaacttacgcatccaatgtgggttgtcacttgttattcccaagtactattattccatactactatattcttccaaatatttggaacactcttagaattcccatttaataaaccatatgagaaaaccctctattactcttacactttagttttaccatttgagtagccacttattcaccagagttggaattgagaaattttgggctttccaaaattaacctttaaacttaaaattgattacattgagcctattcagaaaaaaaattatataggttctgatgaaagcttcataatttcaccctgtgactatcctgaaaagaaataataatcattttatgattgatgggccaaaaaaagcaatcaaagtcttacgtcat

SEQ ID NO: 120107 - DNA, 1073 bp, Homo sapiens
ttgtgggagctacaattcaagatgagatttggatgggacacagccaaaccatatcaataggtattattttatcccccattttataaatgaggaaacggaggcttagttgagtgagctgaccaatatcacccagccagtatgtgataaaactgattctgacccacacagtttgattctagagcctgttctgactactgtgctaaggtgtgtataatgaacatggtaattctaaccagctttttaaaaatatgtagcgcttgtcatgagaggtactggggaaaagaatgtgcagtagagtgcaaatacattacaattactggaaaattggtggaaaatgctttttggggttacaattatatcatttttaagtgttgatgctttgtagtactacaaagctaaattgtgcaaacaaaacatatttaacagagtaattgggaggataaagcaataataaattcaaatatatttttctccaaactgccaaagggaaagtagaattgtggagggaaatgaaatatccatgtaccaggccaggcagatggtcagttaggatgacaatagtaagttcatctacagcataaaatgtgaaatgctttcatcctcattgcccatttccaactaccattctgtttctcctctattgttcatggtttttcaaacatatctttgatttttcaacccccctttttcattaatctgttcttaaaacttctttttactggctttcatacttagcattccagtgaaatgttcttagactcaccagtggacaaataataaggcctttttttattattatttcttgtcttttttgatctaatttatattttatattgttgaattctccctcctttggcttgtgggatcctttttctctaatatctgtctttctttttttagttgatctttccacccactcccctttctcctcttctccactgagaataatctccctgtcttttattcacttcattttctatactcctatttatccattttgattgtttatacctactatttgtattcgaatgacttcatttttcccaccctgtgggtcagtttgtgacttttgg

SEQ ID NO: 120108 - DNA, 1390 bp, Homo sapiens
agcactttaggaaaagtcaccgtagcccactgtggcatcagaaaattcttgggggctgagttggaggctccctgcctctattctctctcctttgctttccttgaagtcagctttggaccacaataatttcactgtagatgatatgctaggatcaaagttaaacagcattcttcactgcaggacatctcagagcatgtaacataactgcatgattatatactctaagcaatagagagcttcatgactgagtaagagttttgaagtcagcagtgaatcaagtgcccacagatttgcaggcttaagcagaacaagggaagattgatatttttggatatgctatagcagctttctcctatgaaataaaactgatgatgtttggaagtatactactctcaaaggtgtctttaaagtacaggttaatggtgaacattttcccccagtggcttcacctcattcctcccactggccttaccccttccttccccagtggaagcattttcaaaagcaaagataattttcgctggtgaacttcagaacttgccttcagggttagcttcatgtaattttaccatttcccatccccattccccaccacattatgtcaagattcaagttataaattaacgttttacttagactttgaaagagatttcatgagtaatttgaatgaaccttgctgaattaatctgaatagcaactgtctgacttgataactccagtgccagtatagtggctgctgcatagacactattcagtaaatgtctgatgaaagaaattggactttttccctttaatactgatgatgcaattttgaaatgttgcttgttctggaatacttcggaagttaaacaataaagtcagcttggagaggagatcatgatctttatactgtgaatagcagaatgtcacagatgaagaatattaaaattaggggcgtccactccaaaacatatcaccagagtgacaacttcagccctcagcctctgcaatccatatatatcctggtcttgggagtccatagaatactgtttccttctaataaaggtttcaaacaaatccctgcagatttatttaaagtgtttgtggaagataattttccatataagctgtgcagtattctatggtatatgtccccattgttcatcatttacgtcatttacagtttgatcaccataaacaatttttcagtgaacatccttgtatatacaactttgcctacttacagaatttttttctttgttcagttcccataatgagaatcaatgaggcagaaggtaggcatattttctaaggcttttgatgcattttccagaatgccctccagaaaagttacactaatttgtacaccctgttagcagcctatgataatgcccaattttctatacccacg

SEQ ID NO: 120109 - DNA, 1049 bp, Homo sapiens
gcctctttaatagcaaaaggggaggggacacaaggtgccgagctagcaaacgacagagtctgtcagggaggtggctagagaggcccggaagtggcttctgtgccccgccctgcgggtggtttgctagtttcaagcactttgtgagtatggggtgaatcggcgtcggccttccactgtggggttaaatctcatcccgcggctctcctcctgtcggtcctgcagttcttttgtccccgggtagaggtgcgtttgcaggagtatgtgtgtgtgtgtgtgtgtgtgtgtgtttgtggagagaggcccttccctccccagttcctgcagcctcggctcccaaggagggagacccctgcgagaagccgtgggggagggaagggcgctctgcggcggaatgaagtggtcctcggcgttcctgcgtagagcccaatatgggtgtcccttgtttagggccgttaccgagtgtccgggtcggttcttgagggtatttggagacgggatgcatgggtcacatagacaagcctcgagaatgggagccgttacatttttgcactgcctggtaacaaggtcagtttcaaggtctttaaattattctgtggtactggccaagagccagaacgttggagtcagattacctggttcaaatcctgcctctgccacttactggctgtgtgacttttcactagttcctaagctctctctctgcctcattttactattttgtaaaatggggataatattccctaactcactgggttgttgtgaggattgaatgcattcgtatgggtaaggtgcagagtaagcatgatttaaagatttgcttttattagtggtactattattatttataactatgatgacacattagtgactggcttttgtacggttgctttcaattttactgtcattcatcaattcactttgtaatggatgatttctatattttaggagggaaaaataagatactctgaaaaagagcctatcccaaagcaaagaccaaaactggtttgtgttggacgttgtgatactcaaactctcaaaggctttaagac

SEQ ID NO: 120110 - DNA, 2022 bp, Homo sapiens
aggcccccgcgaggcgctgagtcggctccgagagctctgccgacagtggctgcagcctgagatgcacagcaaggagcagatcctggagctgctggtgctggagcagttcctgaccatcctgccggggaatctgcagagctgggtgcgggagcagcatccagagagcggggaggaggtggtggtgctattggagtatttggagaggcagctggatgagccggcgccgcaggtagaaagaacaggtttagtatctgagcgctgtggcctgtttcctcctgaaatcccagatcagagtgaggggcattcctttaacatccaggagttcttcatctcttttttgtaccgtgaacctccttggcagtaaggtgaagtccctggactccttctcagaataattttttttttaaaatacataaaccataaaggattacaaaagaacgcagtcatatcaacatacagtttgcaaagtattaactttgtattaaagtcatacttttttttattagtacactaaataataaaacctacggacagggcttataactggcaattacaaagcagtgataagtatctctttgcttggttgtaatgtgatgtaaaaacatctgcaggttctattggtgacaaagtcgtgggtactgcttatgctacattgatttgttgcttccattcataattggaaggaaatgctaactttctcttaaagactagttaaaaataagattagcttttgtcctgttcaagttcatggactacgtgggaaggagttcatggaccactggttatgaacctctggtagaaaatgggccgacttttacctccatgttcttccctgttttatgagactgtgtcctctttgcatcatcctgtgtccctgtgcacacaccctcagaggacctgtgtggccagagccttctaaatggtgagctggataccagggttcttgacttgggtctgttgcacccaaggcctgtaacagtggaaagtcagtgcgagtctcttagcttcattctttataaaggatgtgggaaattctgagctgcacatgagaaagtaacttgaaaactgtaattttataataactataaatgtctggaaggaaacctgcatacatatcgtatgccaggccatgttaggtgatttcacgtactgtgatgttgtttgggtcccccaaactccataaactagagattgtaatccccttttcagataataaaaggtattaatattctctgagaattttgcaccagtttccaatggattttcataaaagcacaaatgtatatatgaaggagcatagagtaatgataagaacgtgtgctctggcatcattctacctgagctcccatcctagcattgccactgattagctatttaaactggctgtgccttaatttccctatcagtaaaatgggtataataataatacctcccttataagattgttgttttctgcgttaaatgagttaacatttataatgctcttggaaatagtgccagccacctaggtagttctatggaagtgtttgatgaaaacatgaaaataagaacaaatgatttctaggtttcaggtgttgaccaggggcaagaactgctctgttgcaagatggcactattgacaccagccccagggtcacaaagtagccaatttcagctaatgaaggctctgctcaagcatgaatctgtgggatcccagcctttacaagatagaggtaaggattattttctagacagtatgaattctgcagacttcatccaatttcatttaaggatagccaacaaaattcattgatagggggcttatgtgcccatcacagatcaactctcatttaagactgagactaaaaggagtatttccaacataatgatggaaagctttttcaaccaagactggacatagtaaataagatattagtaaaacttaggtttggaaagaattggttcttgcttgggttttgttttgttgtattggtttttttttttcttgtattggtttttgttttcttgagacagggtcttgtt

SEQ ID NO: 120111 - DNA, 1012 bp, Homo sapiens
ctggagccctatccctcccccaatgcccctcactactattgagcttcctgtgaagactcctcactccccattcccctccaccccaatcctagatcctccatacagatctcaaatgggatctgcattttctcatctatctcgaggttgtttatcattaactttatttaggtgcccacttaagaggcttttcctgtttattactagctgttggcaggaatggggcctgggggtgcttcccagatcttccccactccaccattttggtcagccccttcttcaatgggattacctattgttttaggggttgttgaaagtggaagatgtggccctgaccctcacccctgaatggacacagcaggattcatctcaggggaatctctgtagagatgaaaagcaggagaaccatggcagcctggtctccctgggtaagactaaaggacactaatttctgttaaggtttcttggcattctttgtatattagaacctgttgagctattggaagctgttgagccctgttatgtttggattcacaatcaccatttctgaaagcctgtaactgactagctccttaccctttctttttttgttgtttttgagagatagggtcttgctcagtcactcaggatagagtgcagtgacacaatcatggctcactgcagcctcaatgttttgggctaaagtgatcctctcaccacagcctcccaaactgctgggactaaaggcatgtaccaccacacttggctaattttttaattttaattttttgtcgagatagagttttgctatgttgcctaggctggtctcggactccagggctcaagcaatcttcctgccttgtcccctcaaaatgctggaattacaggcatgagcatgagctactccacctggcctgcttatcccttctgaccttgctttctcctctccgtgccagtattctagttaagttaaatgggttgaagtcgatacaaccccgagtacaggtctggctcacaggagatgcccactaaatgt

SEQ ID NO: 120112 - DNA, 1007 bp, Homo sapiens
aatacaggcctcattgaacatcaaaaaatccacactggtgagaaaccctatcagtgtaatgcgtgtggaaaaggcttcacccgaatttcataccttgttcaacatcagagaagccatgtagggaaaaacatcctatcacagtgacccatgccatacatgccagagttggtgctcatttgtcactgatctgaagccactccccctggagtctcaactatagaaattgtgggctgggctttatttaccactacacattatcaggtgttagaaaatgtagactgggttagacaaattatcttctaagttctagaaggggtttgtaatcaaaacatatttgataggaggctacgggagagttgtctagaagaggtaagacctgaaactgtttgttctctcccactagaattaaatggatgtttagactggctacttgccctaaaccagcacttggtgatgtctactgggtggatggttgtgatttgggggctgcttctctgaccattctttttgactgtaatgaatcctccacagttggtcagattcataaagtcttatatccccctctgtgccttttctgcaggtgctaataaatgtttattgaatgtaccagtgagattaccttcatagatctgaaaatctgatgttatccaggtttctgaagaacttctcgccaaggccatttgtgcttgtgtccaattctctgacctagattgtgactcaatctagtgtgtttcttaccaagtacataggcagagcagggttactgtgattgaaagaatccattttttttttggagacgtagtcttgctctgtcgcccaggctggagtgcagtggcacaatcttggctcactgcaacctccacctcctgggttcaagcgattctcctgcctcagcctcctgagtagctgggattacaggtgtgtgccaccatgcccggctaattttttatgtttttagtagagacgggattttaccgtgttagccaggatggtctcgatctcctaac

SEQ ID NO: 120113 - DNA, 1048 bp, Homo sapiens
agactgtctcaaaaaaaaaaaaaagaaaaagaaaaaataataaaacaaatgttgcaaaatattaaaagttggtgaatgtgtgaaagatccgctaccttatttctactttctctgcatccttttcattttcatttaattttttaagtaggtaaaaatgtacatggctcaaaaacaaaaattttttaagttatttaatgaaaagtttctattctactcgattttcccagccacctagtctcttcctcctactctgaaataggttgtaactgttactaatttttcgtgtgtccttccagatatttttttgatgcatatgttttccatattgaaacaaatatattttgctctctttatcactaagatggtagactcttgcattttttatttctaaacagctgcttaatattaaaatgtatggatacattttaaaggtagaaagaggtaacatttatgatcccttcttagttttagatgttgagactggaaatgagtatgggaatttaaagcaagaagtttctgaagaaatggaaccacatgggaagacatccagtaaatttgaaaatgatatgtccaagtctgctaggtgtggagaaactcgtgaacctgaagaaataacagaagagccctctgcttgctccagagaagataaacaacctacctgtgatgaaaatggagtaagcctgactgagaactctgaccatactgaacatcagagaatctgtccaggagaagaatcttacggatgtgatgactgtggaaaagcttttagtcagcactcacacctcatagaacatcagaggatccatactggagatagaccctacaaatgcgaagaatgtggaaaagctttccgtgggagaactgtgcttattcgacacaaaataatacacactggagagaaaccgtataagtgtaatgaatgtggcaaagcctttggccggtggtcagctcttaaccaacatcagagacttcacacaggagaaaaacactatcactgtaatgactgtggcaaagcctttagtcagaaagcaggcctctttcaccatat

SEQ ID NO: 120114 - DNA, 1050 bp, Homo sapiens
cattatttacctttacatatcccctttccttttcctctttctctcttaatgttttattttaccctaagttctatcttatttcctcctttctgcctcttttcacctttttcttctctcctttgttttgtctttctccctttcctttctccacttctttaagcataagataaagaggtaacagtggcacaaccaacatactttagcggtaacaacaggagaaattacatctgggtggagaagggaagattccccagaggaggcgacatttatattggccttgaagaatgggtagggttatggcaggcttatatctgggaaaaaggtcatttcagggttcagccactgccacaaatagtatactttttgttttctgttatcagagtgagtctgtcagctacatctcattttcctcaggtctcagtccacactggggaacaggaaatgttcttgcaggagacggtacgtctacgaaaagaaggagaacccagtatgtccctccagtccatgaaagcccagccaaagtatgaatctccagaacttgaatcccaacaggagcaaggtaaagaagaaagacccatcttgggaggaaggggaagatgggtaacataggacattggggcttttttgtacttgctactgtttctgatcattaaagtcaaaaaggccgtctcagaatctgatggctcatatatagactctcagacagcctagtttgtcactcttcaacccttacttttttgtatattcatattcttctaaattctggctttaccacttaatttagtccttctgatatttatctctctttatactgacctccttgctatttttagcctttatcctatcagacaatacctctatcttccacttgcactatatcctttctgcttcactaaataagcctttgctccattatgtctgcaactaactttcagatggttcaagaaaaaaaaaatttgtatacttacaaagaaaaggagtaacaggctgggtgcggtggctcacgcctataatcccaacactttgggaggccaaggtgggtggatcacg

SEQ ID NO: 120115 - DNA, 1085 bp, Homo sapiens
ctaatcttaagtcttttctatcagagtatttttctgagtaagtattgtacattaatccggaggtcagatttcaaaggtcatagttaagttctcagaatttgcagttttactttatggtggagtttgtattaataatgatggcttattcttcaggactgtccaggaatacagtttccaggtgagatcttacttgaaacaccggtagttctagcacagctaaaatggcatctacttgggctatccaggcccacatggaccaggatgaacctttggaagtaaagatagaggaagagaaatataccaccagacaggattgggacctgcgtaaaaacaacacccatagcagagaggtcttccgtcagtacttcagacagttctgctaccaggagacatctggtccccgtgaggctttgagccgactccgagaactttgccatcagtggctgaggccagagacccacaccaaagaacagattctggagctgctggtgctggagcagttcctgaccatcctacctgaggagctccaggcctgggtgcaggagcagcatccagagagtggggaggaggtggtgactgtgctggaggatttagagagagaactggatgaaccaggagagcaggtgagaaaaaagatgtgacttctgcttgagaaaacataaattgtggatttctaggccagagtgaagaacagccattttttcacaaagcatgtttttgacagtttggtgcatcagaaaggggcatgagtttcacggaaagttggctaatgtggtcccaacttatttataacttttctgtggaaggattttatatttctctattaagctacaaaattctgtttgataaacatgctgctcatcttagaaaacttctaagacaagagaaagtatcaaagagatgacagtagcaggatgggaagcagtctcttggaggggcatcactctgttgcacaatacaaataattaagaattaaggttttgcagatatatccattgctctgactccattacagggttttaaaatgaagacattaactatttcaggggaatgagatgtgggagtacaatggaaagttagtgagg

SEQ ID NO: 120116 - DNA, 1044 bp, Homo sapiens
ttgagctgtttcggtcaggatgattgaaacagtaccttccttcagaaaactgtaggcgtttttgttccatttcttttttcttcctatattatctggatttgtatttctaaagtatctatcattaatcaggttttggtgttccttcatgagacagagtgactgattttagtgtaaatactccagtccctccttgtcctgaggttttctgcatttttatatttttttcttcgtaaattattgtctagatctcggggtttccagaagaaaagatcaagggagaattatcaagaatagattatttttctgaatagttaaacctttgatggccataaccttgacccttcagactgcagagatgcaggaaggacttctggcagtgaaggtaaaggaggaagaggaggaacattcctgtgggccagaatcaggcctgtcaagaaataaccctcataccagagagatctttcgtagacgcttcaggcagttctgctatcaggagtcccctgggccccgggaggctcttcaaagactccaggagctctgccatcagtggctgagaccagagatgcacaccaaggagcagatcctagagctgctggtgctggagcagttcctgactatcctgcctgaggagctccaggcctgggtcagacagcaccgtcctgtgagtggagaggaggcagtgactgtgctggaggatttggagagagagctggatgacccaggagagcaggtgagaagatgggagaacagggatttgtacctataagaacaagtatggggtttcagtgcaacaagaaaaggtagaggaggaggattttttttttatgccagacttgatcttctgtaggcttttagtctctctgcctctgttttttctttgccagcttcttggtccttcttttctatccagcggccctgaggaggcctccttgccatgttctctctgatattgggttcccaactgtccttgatttccaccaggtcctgagccatgctcatgaacaggaagagtttgtaaaggagaaggcaactccaggagcagct

SEQ ID NO: 120117 - DNA, 1022 bp, Homo sapiens
tcccactctggccaatagtttacttcaaactggaaaataaaaccactttctcagtgccatgtcactactttctagtggtgctaagaaagtagtgttggacattcatagcctacagttcttttttttttgaggtggagtcttgctctgtcgcccagtctagagtgcagtggcacgatctcggctcactgcaacctctgcctcccaggttcaagcgattttcctgcctcagcctcctgagtagctgggactacaggcgcctaccaccgcgcccggctaattttttatttttagtagagacggggtttcaccatcttggccagggtggtcttgaactcctgacccttgtgatccacctgccttggcctcctaaagtgctgggattacaggcgtgagcaaccgcgcccggcctgcctacagttcttatattggttaatcctgtaattttactaggaaagtattttctcaagtcctttttgtagtattgtgccaggcattggggttccatggctgaggttcatgagttggtgatatcatgtcctaattcttcatttattcatcaggttttaagggaaataatagaaccagggctatagaaagtagcttccatgaggctagattagcttttgctgaatattctgagatctaaatgtatacggtaatatatatacaggcacataaatactactaacaaacatagagcagtgcttggcacatcatatgaagagttttatgcacagtagcttccttaatgctcatgataattttatcaagtgtgtactgttgtcttactttacagataaactgcagcagagagggtaaatgacttatccaaggtacacagctaggaagcagcagagccaggattcaaactgagatggaacacatgaccacatcaggtcctgccccacaacatgtgttattggttatcttctagttcttgtgggtggtgtgtttataggtatttatttatatttttagttttaaaagcctgccattttgaatgggattaaatgaacttgtga

SEQ ID NO: 120118 - DNA, 1187 bp, Homo sapiens
ttggggttacaatgaactatgaccacaccactgcgctccagcctaggcaacagagcaagaccctatctcttaaaatcagttcatgatggatattgtggcttcagatgtgaaagaaaagatacggggctaaaattctgtattttcagagtattctggtaaccagctaatccaagcagtaatttttgaaatgtgaagtttagaatatattctaaataaaatacgtgcaacctccagtgggaacctcttattattggggaggtagtagaaaggcgctgggtgttctaaaataggctctcctggcccacggctgactgtcttccttgtgtctctacagtggacgtgactctggacccagacacggcctaccccagcctgatcctctctgataatctgcggcaagtgcggtacagttacctccaacaggacctgcctgacaaccccgagaggttcaatctgtttccctgtgtcttgggctctccatgcttcatcgccgggagacattattgggaggtagaggtgggagataaagccaagtggaccataggtgtctgtgaagactcagtgtgcagaaaaggtggagtaacctcagccccccagaatggattctgggcagtgtctttgtggtatgggaaagaatattgggctcttacctccccaatgactgccctacccctgcggaccccgctccagcgggtggggattttcttggactatgatgctggtgaggtctccttctacaacgtgacagagaggtgtcacaccttcactttctctcatgctaccttttgtgggcctgtccggccctacttcagtctgagttactcgggagggaaaagtgcagctcctctgatcatctgccccatgagtgggatagatgggttttctggccatgttgggaatcatggtcattccatggagacctccccttgaggaggtgaattcaggccaaaagggctgttggctgtaatcctacgccaggcacaaggcatcttgttgccttgccacgtcctgtcacagctgggtatccttaccatgttccacgcccttgcagtgggagacaggatgtccatgttctctaccatccttttccttcccatgcagattgtgaaatgtaatgagatgtatcaagatatcctagaaataaaaaccagatgtccacctccagtgtttcatactttctggtttta

SEQ ID NO: 120119 - DNA, 1088 bp, Homo sapiens
gggcagtctggtggattctgaaatccttatatgtaggtaaacccttctcttaattattagaaattacaaacccccacaatctttgataattttctattttgtatatgctgggttcatatatgcattgcatctattcagatatatactttttggggcatctagcaacatagagctagcagatacatgtcctctacaagcaagacaaatggggagaaactccactcaatacagtggataataccagaagtggttagttcaggcatgactttccttgatctggctcttcttttcttgccacttaaaagtcttagtgggataatgtgtgagaaattctgtttcaactataaagtgccttataaatgaatggtcatgtttaccccagagtgtcagtgagtgtcacttgagccattcagctcttgtacacagatgacttatgcaactcaaaagttatgtatgacgtggggttggaaccgcgtttccctctgcagaatcagctgactcactggaaggtggaattcttgatcttggctcagttttatcccatattctaccagtctcaggcatgtggttatccctgtacttaagattcccaatccctctccccttaaagcttttggttggatgatagagccatacatcatatgaaaaaattagtgcatgactaacaacagaggttctggggtttctggtggagaccactgctttatgatgactaaccaaagcccccttagttatgtatttcctggaaaccctcatgacttccataactttgctcttttattctttcagaattaagagaggctcagttatactcaggtaggtgatgagagacaaaaccatattagggtaaggagtaaaaatccttgtgaacctaactactattatgaatgatttggaaattgcttagatttggattcttttggttacatgtataaagatgatacacaacaaccacaaaaatcctcagttgtttctatgtgttaacagtatctttgcctcctgaaatgtctcagagctgaagccatagggtaaaatcaatctcaggtgttaaagaaggattatagggtggaaaccgcagttccccaaaa

SEQ ID NO: 120120 - DNA, 1515 bp, Homo sapiens
cataataaaaagaaagcaagctggacaggtaggcaagcttgaggtccaatcataggacgcttaagttagtaaatttgaaatcctgaggtccttgaccagtggatggtgggtactgaaggagggtatgggaaatgctggtatagcaaatagtatgcatcccattttcctctgcctgccttttagctcctcaacactgagttatgttccagtgatccttttctccctaatttctcccatgagagccagtctgtagttggtttttcaacaaacatctgtgaaagaaaaccgaagttttaaatgacttctcatggttattttttttcctttctcttgcaggacattggggacacattgagcaggtatagttttctgtttccctagtgttaaatcaaatatgagaagactgtctccttcacatttgtaaatcctgaaaggagccctgagcctgaggatggacatcttatcaaattgacacatatccctgaagagagtcactagtatacaaagaattagatgaaccacagctctactcagtaaaattcaggaagtagggggttcatgtgggaggctgccggtggattaggggtatgaggacacttccatggagagggtgtggccttacagggacctgggctgaatataagggtagtttatgtctattgcttcctatacatttcagaatcctttcccccttcattatctcatttttttttttctgtaatgggggaaataaagcctaagaaaggtgtgactggcctgcatttacataattactgatgagccacctggattctggctcttattcttactcttgctatttctctatgttccatcaaaaaaaaaaaagtgaggaagaactccctggcagctggaacacgatcaaagagggagagcttggagggggcagtaagccagggcaaagttgttttgcaggatggatgacgaggcaagtgggatgggccttgggaagctcatgtttggtgtaagaatgccttcaggggtggaaactgactttgaggaagctgtactgtgaaggtgattaagatcctgaatggtgaaaaccttctaaagcaaaatgcagcttgactatgtgggagcatttaaggagattggggaggtccttatagatggggcagtttggctgggaggcctgtgttgatagaatcatgttgatggaattgaggttcctgagggatcctaggatggagataaggtggagttcataccagtcccagccagatgacctaagcaaataatactgttacctgatactttatgatgccagtctagctgtgacctaacatacagagttagctgcctcagaccctagcagtttgtgacattaaggattgaatttggctatataagataggaaacccaaaattttattggcttaaggcttaaacataataaaagaaatgtgcaggttgggtgcggtggctcacacctgtaatcccagcattttgggaggccaagtcaggtggatcacctgaggtcaggagttcgagaccagcc

SEQ ID NO: 120121 - DNA, 1249 bp, Homo sapiens
aataagtatggtttttacattttaattttaatttaatattatttatttattttgagattgagtcttgctctgttgcccaggctggagtgcagtggtgcgatcttggctcactgcaacctccgcctcctgggttcaagcgattctcctgcctcaacctcctgagtagctgagattacaggcgcacaccaccatggctggctaatttttgtatttttagtagagacggggtttcaccatattggtcaggctggtctcaaactcctgacctcgtgatctgccctcctcggcctcccaaagtgttgggattacaagtgtgagccacagcgtcaggccagtttacatttttaaatggtaaaaatcagaaaaatgtatttctttctttctttttttctttttttatttttgagacgaagcaagaagggagtggacagcatagtaatgcagttgaggtcaaataatatcaaagctgatacccatttgattcaataacatgaccatcattggtgatcttaggtagaactatcacaatggaataattggggcaggagccacattagggggagttgagtagtgactaggtcaggtgaatggagactacacaagtagatgactatttcaagtacaactgttaaggggttgtaataaaatacttagagacgagacaggattatggagttttatctggaagggttggttaaagaaactagaagttagacatattttcaaaatacatatggaaaggagtatatgttgtaaggtttctaggtgagggagaacactgaagccacaagaaaccatatactggccgggcacggtggctcatgcctgtaatcccagcactttgggaggccgaggtgggcagatcacctgaggtcgggagattgagaccagcctgaccaacatggagaaaccccatctctattaaaaatacaaaattagccgggtgtggtggcacatgcttgtaatcccagctactcaggaggctgaggcaggagaatcgcttgaaccagtgagacgatggttgcagtgagccgagattgcgccattgcattccagcctgggcaatgagcgaaaccctgtctccaaaaaaaaaaaaaagaaaggaagaaagaaaccatgtactgatcagcaatgtgcggttcctgagaaggcaggtggaaatgagaactaaagtacatatgccaggaattagtgtcagagagtcttctgttgtatgggaagaaatgattgtttcagagtatgggaaaga

SEQ ID NO: 120122 - DNA, 1600 bp, Homo sapiens
cccacccccactctcttttctctgtttacccccatgttacctgtctcacggacacattgtacacggagacatccttttgacagtttaaaagaagtgcataaaaccgcgtacacatcgacaagctgcagacactcttactcccatcggctctcagacaaaacgcagttggacgttaactgacttatgcccattccttagtctataagcatttccccagcactttcctgcaatccgtcctggtctagaaactcacagaaaagaacagcttttcgctgctggagtaagtcacttaaccactctgagactcaggagataacacagttatgaggaatattgtggaatcatgtgactcacagagccctttgtgaactggcacagctaaacagaaacgtggaaacaaagtattacatataaaacagttgtaaggtgaccttcaaggagtccatgatactgtgtattttctgtacgttgagggcttcaggaatgcgtacacaattatgtccgtgtttaaatatgagtacattcatgtgcaatcacttaacatttatggacctttcagctatattatttcactcactctggtgagaactcttgagtaggttgggaagatggtgtttgcccatttcacacatgagggaaataagtcactttcacagtgtacctatatggaagagctacaatacaacatagttctaagcctcctactccagtcacagttccgctaagtcatgcaatatcctaccagggacaggtagatgactcattgtttaagatagacacaaatagtcctgacgaggtagctgagtggttgaagccacaggctgctaagatagacacagattgccaaaggagtggcttgtttgcccctgcgccctgagtctcttgtgggtggcagtgtggcctaaggacaagcgccaactggagacttggcatcaggtgtgtggactccatgtgtgataagaagtaccatgctgatgctaaggtctacctaattttgaactgcccatctgttttgcttttctcaggagcaaatccagaaccagctcgaccatttaaaaagagtgaaagatttaaagaagagacgtcgggcccagggggaacaggcacgagctgaactcttggtaagggttgttggaattcacagttggttctgctggtgctctcctcttctgtagagctgatgttacttcccttaaacttgtccagcatgtcacccagaacttgtaggtagaggtggatcaaccgcacatggcagtgggaactcacccggagaactaagattcccttacttttggggaaagcatggagaagccaagtttggaacccttggaaatcagacctgtcagtttactttaacctgctaactgcgtagaccagggttgatccttggcaaagctgagataggtaaaattattggatacagttagcttgcgttggtaccattctgcagacaattgctaatagtggatttgtgtaatccccactgttgcttctctttggcttattctcctttcttaacaatgccttaattctgaattttttactctgccctcttcctccagtctcaaggccttaacaagtggctgatgtgttaatttat

SEQ ID NO: 120123 - DNA, 1022 bp, Homo sapiens
atgactatttcaattattacttttacaaaatcattcctatattgtcttataacattacaccctttgtgttggtaaaaaatagccaactcctccttatttatctgtcaaccatcattctaatacactttctgcatccctctcttacactcttatactcttggtaattcattgcttcactctatgtcatttttcagtctcttcaatttacatagttctttgactctctttctgttctctcttgttctgtgtttcacaacgtgtatttgttctcactctctttcttctggtctttttaatttttcttggacacccacaaaagtccagtacaactttactctcttcctattaatttcatattcacggatgtatttatttctttattaatcaccaaagacctagttgtgtactaggtgctacaagggaatgaaatatcaattcttttctccaattcattagtgaaaaccacgttaatactttggcagctaccatctgttgtgtgcttcctatacaccaggcaccatgctaaacatttcctgaatacctggttctcataactctttgaggtagttaatatcatcttccttttacagaagaagaaatggtcgcagagaggttaagtagcttgcccaaggttacatagccgatgaagaccaggcctggagtctgagtcctgtttgattccaaatctggtgctcctggggtagctctaccattgacgatatgtggacattaatggacagtaggagaagaataaacttataacttttcctcaatcatgtcacaatctccccattgcctgctgccggagcttctccctgacaacgagcttctagactgagtgagcctctagttaatcctcacaatgaaatctacaagcaaagtcaggagtgttgggcacctttgaaagggtggtggattagggctcaggtagtaatgttgacttctaatgctgctgccacacctttcaaagcacttcacaacctctgtatgacctggataatatttctatattctatatttat

SEQ ID NO: 120124 - DNA, 1026 bp, Homo sapiens
gacagcaggatgatgagtccaccggggttaggaggtaggaagtgaagacaactacaaagagagtcctttccagtgctgggtgttcagagaagcccagaaggagaaagcctggtgcggagctttggttaaccatggcctgttcctctctgtatctggaaggatgaggctgtcaccccagtgtgattcaacctgtcttattaaaactcagcctgggtgtttgtgaggtcccagtaggtgagtgtttctcttttgtctctgctcgcccagcgttcctttcccagtctcatcaccatcaagcagctccttctcatcccctgttccttctgatcaaacattgtctagtgggagtgaggaaaccattaatgtgctcaacaacggattgagcctcacactggtgcctctgacttcctggttgaatgcaaaacgtctgatgtgaagcatagatcagctaactagttagtttttattaattttgcaaaaatttattaagtacctattatgttctgatcgctatgctactactgaattttccctttgttatgtgtggaaggaaatacaaagaaatgtgtgttcagtgagtttcctaattgtaaacattactagagaattcatcatgttttctagtggtgggcataaattttctcaaatcattcacattctatctactttacacttttgcaagagatttgaccagtgatagaaatgtggactgtggagatttcttctgtatgtgaaatgactcaactgctagaaagatcagtcaggtgatttaggtctttcaaaaaaaattatgacttattaaactaagaacaaacatttctcctgcaaatgaaatgtcctgcctaaattttccattatgtgtaatatgtaaaaataagaaaaaatataatgtcagtcagaaagattattttctggttctgtaactgcaaaaaaatcctgaagaattgatgtttggtgttagaaagctgaaatagatttcaatatcctctccttttcatgtaagataaaatatagtagtaaaaacat

SEQ ID NO: 120125 - DNA, 1030 bp, Homo sapiens
aggttacctagtcaataagtgctaggactaggattttagagtaagtttaactccaaatctggtcctccagtgttgaggataggcggaaactgatatctcacagccaaagagcaaaggttctgcttaccttcaatcaaataaaaatctcttctggtaccagcaattccccatgacagagctcttaactggtgcccagcctccacttgtacatcaggaagaaacaaaaaaataaaaaggaatgggcatccttgaatgggcaactgcatctctggtcacaatagggattgctaatgctgaccatctggcacttttctaagcacacatgtgtgtgatgagctggagctggctcagattatctcttgattagtaaatttttaggaattttgtgagacagttattaaaccatcagtggcttgagacagccatggcaggaatatttacactatgaaaattggcaaacactacaaattagggctctccccatctgccaccaaccaagttgtttattaaacatttactctacactgctgattatccttcacaactctacatattattctcttccttccaatatgaagaagttgaaacaaagaaatataaataactttcccaaggcagtatagttagtaagcaccagagctgatgtttgaacccaaatctgctaactgtagagggtttgcaccaaccaaagcccaccaaatctctgcagggaggatgaagccaaggtcagaactttgccattgagttctttgccatcgagttctttgccatcgagttctttgccattgagttctttgccaacaattttccccctcagtctaggcagaggtgtgcctctgttttagtggcattggaggtagaaatgttgacatggtatggtggtagagggatcccacggagggaaagagctcattaattctgctgagactctagggtccatagcccacagacaattcattagccacaaattatggtaaaaggggcaggggaatatctataggaaatatgccaacaatagtcatcactgtgg

SEQ ID NO: 120126 - DNA, 1060 bp, Homo sapiens
gatctcattgtaggaggtgtcttcacaggagagtcgaattagagctgggacctcacagacaaaatcatccacctgccgatcggggcagaagggcaggtgcagggtggatggtgtctggaccactgactccactagcccaatgacccaggccacagatgccagctgccagcacaggcgggggtggatgatggtggcatagtggaggggctggcagacagccacgtagcgatcaaaagccatcactgtcaagaggatgcactcagttgtccccagggacaggaagatgaagatctggacagagcagtccaggaagctgatggtcttctttgggccccagaggttgaccagcatttggggaacacaactcgtggtgaaacagaggtccaagaaggagaggttggagaggaaaaagtacattggagagtggagcttggggtccagcgcagacagcaggatgatgagtgtgttgcccactagggttaggaggtaggaagtgaggacaaccacgaagagagtcctttccagccctgggtgttcagagaagcccagaaggaggaagcccggtgtggagctttggttaaccatggcctgttcttgtttgtacctggagggatgaggctgtcactccagtgtgattcaacctgtcttatcaaaactcagcctgggtgtttgtgaggtcacagcaggtaggtgtttctcttctgtctctgctcgcccagcctccctttccaaggctcatcaccatccagcagctccttctcattccctgttcttcctggtcaaacattgtctagtgagagtgaggaatccatgaatgtactggacagcagatggatactcacactggtgcctctgacttcctgggtgagggcaaaggaggctgattaaaatatgcactaattcattaattcattcattcaggggaaatttattgagtgccactatgttctgaatgctgttctagagttgtctcttatctattggatgatctcgtaaggtatattgaatgaattttctgataagttgtctctgtaggctcaattattgctctattggttga

SEQ ID NO: 120127 - DNA, 3987 bp, Homo sapiens
aaaatccagtgttggcctggcaggtggaagggctctggagtgggagctatgtggttgactcagcctccttaaggcaagaggatggctgttggctgtaggtgacaactggagagaggcagctgtgagcctctagtagtcaacactcacagcagctgggtgtagcatgcagccccagcataaaggacctgggcaggcgttcactgtgccccaggctgtcattaggggctggtgcaatgccaaagagagggatgttccaactgggttgacacatctctctgatttattggaagctctgtgcactgacttttctctccttccccactttttccttttgtttttaaattctctcttatttccctgatcgcattttttctatcggtatccttatgttctctggcttttcttgttctgttttgatttctccttttaatttattctgtccacttaccctacgtcctccccctacatttttctgtgcccttcctctctttccctgtgcccttcctctctttccctcctccccactccttcatcacctcctcttctcctactatcccaattgtgcttcttcctccagaaagaggagcgtgtctctgaactgcgccatcaactccagtctcggcagcagctccgctcccggcgccacccaccgacacccccagaaccctctgggggcctgcccaggggaccccctgagccccccgaccggcttagctgtgatgggagtcgagtgcatttgctttataagtgagggtagggtgagggaggacaggccagtagggggagggaaagggagaggggaagggcaggggactcaggaagcagggggtccccatccccagctgggaagaacatgctatccaatctcatctcttgtaaatacatgtccccctgtgagttctgggctgatttgggtctctcatacctctgggaaacagacctttttctctcttactgcttcatgtaattttgtatcacctcttcacaatttagttcgtacctggcttgaagctgctcactgctcacacgctgcctcctcagcagcctcactgcatctttctcttcccatgcaacaccctcttctagttaccacggcaacccctgcagctcctctgcctttgtgctctgttcctgtccagcaggggtctcccaacaagtgctctttccaccccaaaggggcctctccttttctccactgtcataatctctttccatcttacttgcccttctatactttctcacatgtggctccccctgaattttgcttcctttgggagctcattcttttcgccaaggctcacatgctccttgcctctgctctgtgcactcacgctcagcacacatgcatcctcccctctcctgcgtgtgcccactgaacatgctcatgtgtacacacgcttttcccgtatgctttcttcatgttcagtcacatgtgctctcgggtgccctgcattcacagctacgtgtgcccctctcatggtcatgggtctgcccttgagcgtgtttgggtaggcatgtgcaatttgtctagcatgctgagtcatgtctttcctatttgcacacgtccatgtttatccatgtactttccctgtgtaccctccatgtaccttgtgtactttcttcccttaaatcatggtattcttctgacagagccatatgtaccctaccctgcacattgttatgcacttttccccaattcatgtttggtggggccatccacaccctctccttgtcacagaatctccatttctgctcagattccccccatctccattgcattcatgtactaccctcagtctacactcacaatcatcttctcccaagactgctcccttttgttttgtgtttttttgaggggaattaaggaaaaataagtgggggcaggtttggagagctgcttccagtggatagttgatgagaatcctgaccaaaggaaggcacccttgactgttgggatagacagatggacctatggggtgggaggtggtgtccctttcacactgtggtgtctcttggggaaggatctccccgaatctcaataaaccagtgaacagtgtgactcggcaccttgcagtcttcctgtgaacagaatgggcttcaatccaagaagggaggttcagaggactccaagttcatgaaaaggcattaaagcggagggtgaaaagaggtgttttattgatccattgagggcttagcagaatgaagcaggacatgattaagtctgagattagtgagtgaggacactactggttaaaagtgtgggctctggagtcagactgccagggtatcagatccaaccacatgcaaacattttcttagtctctattccccatgtcctcatttatgaaaatgagaataacagtaatacattcctccataggttgggtacaaagactattataaattgtgcattcaggtgcctaggttggcccttgggccatggtatatgttgcgtgaatgttagcctctgtccctgctgtttaatgagttccttgacagtagtgggcatgtattgggagcctggagcaagtgcctaagcatcccctctagggacgctccttcccaggaactaagaagagtaaaagaatgatgactgctagaaggtaatggatgagatggctgctgagtgcttccaaccttaaacatctttgtttaggaactctgagcatcttggaaataatttgctatcaaactgaaaaaaaatcttgaatggacaagggcaaaaacatttgcctgagactttaaacattttttgtgtcatcttggagagtgcttttttgaagctcaaattttcttttattttggcactgatttttaaagtgattctcagatttttgtaagacagctgcaagggttggatgggccctgtcattcactgacctgttaagagccaatttctgaacttccactaaagcatgggctggttgaatcttagaccagtacttgaaaaactttccactgtgattatccaccttggaccagttggacttaatttgagtctctcttcttcccacagtgaaatatccgctaggaaaagagaagaagtctatggagtagataagcctgcagtttggaaaatgaatagttggcatcagaacagcagcaggaggctgggtgtggtggctcacgcctgtaatcccagcactttgggaggctgaggtgggtggatcacgaggtcaggagttcaagaccagcctggccaagatggcgaaaccctgtctctactaaaaatacaaaaattagctgggcgtgatggtgggtgcctgtaatctcagctactcgggaggctgaggcagataattgcttgaacccaggagatgaaggttgcagtgagtttgtgccactgcactccagcctgggcgacagagtgagactgtctcaaaaaaaaaaaaaaagaaaaaaaaaaaagaaacaacagtagcaggagctatagaacagccctgggtagaacctaaaagacccaaattatcatctcaaacttgcattgcacttaagtgggctgtaaattataaacaaagggtgaaaagttctactgtggccaaaggtaagccagacactctgctagcaggagtgcaggagtcgagagccaaacggtgcggctagcagagtgcccagtgcaaaggggtgggaaggagtgagattgagaatattaaaaaggtacttagaagagaacttgtaagatttttactggccaaatttaaaacatgactgagcactatttttcatacaggcctcctactaataagaaaaacaattttgagataactacttatttgagttcacagttaatgttcctgatgattaagatcagttgcaaatgttcatctgtcaatgcttatctacaatgagacttcatgtattcatttctgaaagtgtcttttcagggtgaatggtgctattgattagcactaatactaattattagtacattatatataattacaatgagatatacacacacatacacacacacatatatacatatac

SEQ ID NO: 120128 - DNA, 3457 bp, Homo sapiens
cccctaataataactggaaaacatatttgggaatattaccctgccaggattaaaatttcagattagctttccttctttttttgtttgtcttaagaataggtgtccacactagatacttcaaggcctttttagctttatgattccataattgtcatttaaaactttgatttgggttataagaaaccttataacattttttaatgatccccttctttctcctcccattttcctttgctgtaagaaagacagaaaaacttaaagaacaaacaaaaacaaagactacaactttggggacatgcctcagcatttcccaacctatggatagaccattcactccatcttctcatctcatttctggttgcttcctaacggccccagtggcactgagcattctgcctgcagtaacctctgtccagtgcagttagggcctcatgtccccagccaatgactgaatgtccatcagcaatctagttctttgcccttttctcctatcccgtcttcattcctttgtcctccttcccttctcttttcccttcccctcttcctcccctgtgccatgcaggagggtcccccccagctgaccagaccctggtcatcaagacattccgcttcctgtcacagaaactctttatctccgtctcagttctctccagcctgggcattgtcctagctgttgtctgtctgtcctttaacatctacaactcacatgtccggtaagtttctcttctgacgttttccttgtctgcctctctgagatactgatcatgttcctggacaggatgagaataaaacctgtgtaactcccatggccatgtatcatggagtttttcattctgacttgttgagaatgaaaacagggaaaccagatataacccccactcctactccaaagtagctaacgggaggaaaaaagaaaagaagagaaaaaaacaacctttggggccaggtctcacagtcttggactctacataaatagcctgtattctagtgggggcctgtgcttgggaagccctctgcaactccatcttcagccccatgactgcattgctctgcctctcaaggctccactgtcttctccaatcctgtcttcctttagcccctggccctgaaattagggtcatgccattgcgtggtatttggagagctcagcctccctggagaagaggggtaattctctctccctctcaccctctccacctctgccctagttatatccagaactcacagcccaacctgaacaacctgactgctgtgggctgctcactggctttagctgctgtcttccccctggggctcgatggttaccacattgggaggaaccagtttcctttcgtctgccaggtgaggaggtggtgggcaaattccttacaggatgtgactctcccacccgtctcaggagcaccttccatgatttatgattctctgcccttcctcctcagctttccctgactcttgtccctgttctttccttctagcatcacccctctgttctctgtttggctctgtcccttctttctgtgtctgcaggccattttcattctgtagtttacttgtcagttccaaggttgccatggcaggccttgcagagaagaggagggagccattgaaggcaaaggaaggggatctgctcaaaggtctcctgaacaatggtggcttgtctgtggtatgggggctgagaatcagaactgtggactttttttgggagcctttgttgggtttggaaggatagaagcagagatggaaacacagcagagagttggggggaagggaccactgccacacagggaggaggggctctgggactgttggtacatggaaggttctagtgctgtggggagaggccagcttcaacagtgatagttgagtggttctcttttccactggtggaaacacccactctttctcctgatctgcctgcctgtccttgctctctctttttcctctgctctgtgctgtcctgatcatacatctgtgcacatggcatttccatgcacatgcacatgcagttcatcaggaatcctctgttcccagtgaggccagagtgcagctggagaagcagacaattagctgtagtgcaataggagaggttccagagtagggatctgcacaaagtgctttgggggcaaagaagggaacacagttcactgctggcgtgattgggtggacctcactgaagaggtggcatttgaatactgaaggacaaataggattttatcagctagagaaatagaggaaggctacttcaggggcatagggagcatcgtgtggctagaaaatacatgaaagagagtagatgaagagaaagtgagtagttcagcatggctggagcgtggggtaggtgtggggctgggagatgagcctagctggacaggtggatgggagcatgttgtgaagggtctgtgtcatatccagaagtgttcaggctataacttatagatattggggagtggttggaggtttttggccactaaagccaggaggttttagcaagatcaccctggtggtgtggaagtagagggtggatgggaggaattgttcaaggtggggagactgctctcctcctgccgctccccgtcctgctcacattttcgcatcctccctgtgccaccatgagctccctgcccgtgctccctgcccactctcccttagggttctgcccatccttactgcagtcccggctactactctaccctgttctgcctgtgccctctcttcctttctaggcccgcctctggctcctgggcctgggctttagtctgggctacggttccatgttcaccaagatttggtgggtccacacggtcttcacaaagaaggaagaaaagaaggagtggaggaaggtgagctgctgcccaatcctcagcccccagatccttggctcctggggcacagagcattttcccctgacgtgcctgttctccccacatatttatccagactctggaaccctggaagctgtatgccacagtgggcctgctggtgggcatggatgtcctcactctcgccatctggcagatcgtggaccctctgcaccggaccattgaggtaccactggagaggaggtgctatggtcaggagaatgagcagggctcagtggccatcagggccctggggctgtgtgtgtcttgagggatgaagctacttggagagagtgccttcctcgtattggaagctcttcctttccttcctagaaggagcccctcataggcctccagattcagctgaagaaaggaaggggtgggaatctgggaagggtgtgtagaacttccaggcatcagggaaagtggggaacaagcacctccaagggttcaggaaaacattcttaggcctagaatgagatttggcatcagcattgagggtctcataggaaaacagttggaagccagagactgagaagcgttgaggagaggaggggaggctggcaaccatctttcttgtgaccttgtttctgccctag

SEQ ID NO: 120129 - DNA, 1039 bp, Homo sapiens
ccaagcatccttagggcctcaggtgaaaataaaatcagatacaaccatgcaaagctctagggaagtgggaagttgaaaatgcctaggatcagctctttggctacctgtggtcactccttttattgtcgtctgcccaggtggcagctacaagaagattggctactatgacagcaccaaggatgatctttcctggtccaaaacagataaatggattggtgagtggatcttgtttgtattttccttcagcccctctcgacagtcaagggaaaaagtcatgcctttgagtgaggatggaatggtagagactgttaggttggaatgtggctggcagctgggccaggagaaagggttaagtgagagtgaatacaacccctaaggcgtgggtaggggagactggtgtatttggagagggaataggcggtggttagtactatttttaatggtgcattgctggggtaactggggattagaggcagggggtgggcagagggcgggaaatggaaactccatttgggtttcccagatgtcctggtgtcttgatatatttgaaccagctacttcaagcccagagctgtctctttgtctgtctctgtcaggaaaacggttgcttaaactatggaggaggagggaaaacctcatgtaattgtcatctgccaaaatgtgctttttatttttatatgtatttttaaaaattttcctatttttatgtaatttagaggtagacgtgcagttgtgttacatgaatatattgcatagtggtgaagtccgggcgtttagtgtgcctgtcacccgaacagtgcaccttgtacctaataggtagtattacatccctcaaaatatactttttaaagagagaaagcaagcagttattctttgtgtacttggtctaaatgataggacataggagagaaactgaaggtggacaaaaggaaggacctactgataaaagaaagcctccttgagaatgaaggggaggctcaaccattgaagatggctgccgtctgccctgcccagcagatatccagtcattcccagcact

SEQ ID NO: 120130 - DNA, 1036 bp, Homo sapiens
ccaaggcaggcagatcatgatcatggtcaggagtttgagaccagccagaccaacatggtgaaacctgtctctaccaaaaatacaaaaaaaaaaaaaaaaattagctgggtgtggtggcaggtgcctgtagtcccagctacttgggaggctgaggcaggagaatcacttgaacccaggaggcagaggttgcagtgagctgagatcacgccactgcactccagcctgggtgatagagtaagactctgtctcaaagaaaaaagaaaagaaaagagacatgcaaattaaaaacagctactctctttcccagtggcttccattaatttcaggaatttccccttgagtggcttgggttgagaggttgatgacctgtcagttagactcaagaaagctgaatctaggagaaccgctattttttttttaagggaatctgccaaatttccttgctgtgtaaagcttcaatgtgtatagcttggcttttgtagattgtattttcttgaaacttagcacacaggtatttgcagaacttctaggagttaatttttctgctccactcggctctcagtcttttacggcatggccaagagagctatttcttggcctcctgtgaaaagtttctttcttcctttctccccacctccacatcctttcagctcctctttgtatccaggacaagaggaaatggacttcagccatggtgaaaggagtgtgagttggcttttgaaggaaaagttatggtaacggaaacagttctagaacagaaatcttagaaatgaccaaattttactcaatggcgctttaagaggcagatataacttatccaaggaattaaaacccaagccaacagaagagaatgttctaaaattaaaatgaaagccactgggaaaatagagcctgcccatcatgagaggaagaataagcagaaatatgtgtaaagctttagaagccaaaatcaaagtgagagacatctcgccgagagaggtgtgaggaatggaataggtggcagacatgttgtggagcctcctcactgaagactttt

SEQ ID NO: 120131 - DNA, 1529 bp, Homo sapiens
agaaatatcctcctggctggcaagcagagtgagaagactgctatcaccttttctagaatcttttggaattgtaggagctgttagatcctgggttaactctatgaagaaagtcagaaggatcagagaacatcagtgtcacagctcttcattggaatatccatgtctcctcctttactctgctctaccttccatcctttgccactaattatccagagtgtttgtcaaaattctctgtttgcagttctgagctagcaactgtacacactaacaccatcagacacagctaatacctactctagtctagtagcttccgatctaaggcagacacatgggtatagttaaagattttgaatgtacatgtgtccaatctgacaacagtaacacaaaccatccattcaagtagaagtgattgagtcagaattggattgcaccccttcccccacacccacacacatttcagttctttcctcatgattttttcctcccaagacatcccaggaatttgtggagaaactaaccaagcgactgaaaagacaccctgaggagacaggaggcttccaggaggcaccgctggcctatgatgccatctgggccttggcactggccctgaacaagacatctggaggaggcggccgttctggtgtgcgcctggaggacttcaactacaacaaccagaccattaccgaccaaatctaccgggcaatgaactcttcgtcctttgagggtgtctctgtgagttaaaacttccttcatactcccctgtcttcccaatcttgagagagactcccaagaggcaccttctacaaacatgcattctctgtttttctcagttacttctttgcagaatcagtctccgaccagagaagtagggaccttcaaattagaagaacccatcaaagactagaggaaaaaaaatgatgtattccatttttttaaacccctcccctcatttcttttcaaactagaccaagtattcatgagtcagatgagaactataggattttgaaagacaaaacagtctgaaaggtcatcttcttattccttttaaaatgaaaagattagtttccagagagatttgctgacttgcttaggccacacaaccagaagcctgctggtgttctgtctggggattttttcccattcaaatctcataagtgaagctccttctccaaagaataatgtttctaaaatctagggtatgggcatctggggtatgtcctatatgcaggcaaatgccataaatagcattcattcagaggctcaattacatcaaaaacagaaggatttaaagagtccctgatgttctctttcactcttgcttttgtctcctttgccttgctccacatgttccttccctcagggccatgtggtgtttgatgccagcggctctcggatggcatggacgcttatcgagcagcttcagggttagtacaggggcaggaggggaccggacatgggggctaggctggggctgggctgggatgccccctggggaagaatgccagagacatcacaagattgccctggca

SEQ ID NO: 120132 - DNA, 3270 bp, Homo sapiens
tttctatgagactgaagcccggaaagttttttgtgaggtggagttggatctgaagagggaggggcactgggtgggagtttcccttggttttcttgtggggcctcctcttggcatctgtgcctgagttgatagcatatgatctgaggtgacgattcataggatgtctctgtctgttggctctgactgcatcccttgtctgcacacacatgatactttcttcagatctcatttttctactgctttgtgtttcctgagaagcccatgaattccatctgtcctgactggctggaaaaggccactcagaaatacaggggctggggagaaacttagaaggaagaattgtcagcctttcctactatccccaagacttgtagatttctctttttagttctactgctcttccctgattcccaagaggctaaatagtatcaagtgagataagacaaaaacaaacaaatgagcaaacaaaaactcagccattctcctctgtattcaggtgtacaaggagcgtctctttgggaagaagtacgtctggttcctcattgggtggtatgctgacaattggttcaagatctacgacccttctatcaactgcacagtggatgagatgactgaggcggtggagggccacatcacaactgagattgtcatgctgaatcctgccaatacccgcagcatttccaacatggtgagagtgtggggacttgcagtctggcacctgggagggtggagaggactgagggggccttgcaggggaaagggtggcagggagagggtgcggaatttggatataaaggagaagagggggctgtgcccaccctgaacttgtctgcattatgtttcctgtggatcctacctttgctctgacttccttgggtagagagagaaaaaaaaaaaaacgatggagttgtatgttcagtaggttcctgatgagtggaagggctgttaccatggagacgaggagcagttggtgagaagtcaggaggaaccggcattaatgataatatggatgcttgtatactcaagcacacctttacaggagcactgtgtctgggcagaattgcatttcattttcttggtgatttatgttagtgttttagagttgcttaatattcactcatgattgatatgcaattagcttggatcctgttgctttttttaatgattctttttttagaattttatgtggagaaggggcttttgaaatcatttagccccagacagctggttaatgacagacttggagcgaggaggcgcattctctgatttgagagggctggggcagccctgcagctgaggggcagaagtgagtgtgggtgtgggcacaggggaagaggcttctttgttgctcagcactacattgtaaagagtacaggaattttgggtaagctcgatacggccacctatgtgtctgcttattacaccaagtgtgtacctgctttggagagcatgttaggggtgagttaatggttgtaaagccccaaaatagcttgatttaaaaagttttactaacagtggcatttgtgtggtacttagattcatgatttcagggattctaacagcaaaactctgatgtggacttatctacattttgtagaccaggaaaatgagactcagagtggtttaatgacttgtctcaggtcatgcagctactcagcagtccagctggaattgaatcctagttaaatctggctccaaactgctctgctcatcacttcccatggaaaaccatgaagcctgactaaaaagtttgtacttttatctgctaacactgtttagctactggcaattgctgagcaaaggagaaataagatttaggaagttgactctggtggtgtgttgtgatgaaagatctgctgccacatggactctgatgatacacactgttttgggacattctaaatggactctatgttttaaggtatgttagttgaaaaatacaatgaaaaaattttggaagatcactttcctgtagagtacccaagaggtgagtcatccataaaacctgggaaagtattggaactggctaccaaagccagaaagacttgttggtgccctgagcccaggacttgccaatcgttgcttctgtcttatagcagggagctagaggaggctgacagaaaacagggatttggctggatctagtggctcacacctgtagtccccagcaccttgggaggccaaggcagaggatcactggagcccaggagttcaagaccagcctgggcaatatagtgagacccccagctctaaacaaaaagagagagagagagaacagagagatggttagggacatagagggacacctgagcattggggtgggaagacttggaaggtccctttctgactttgtgtctagagaaagatggttcctgcttttgaggccatagggcttccagtgggaccagcctaaaatgccagtggggaagccaatgttttctgaagaggatagagcagtcttaacaataggttaggggcaaaagagattatagattaatcaaacagcacaaatagaagtggatcaaagcaagggttggacctagggggccggagccatggagacttagaaaagaagcagagttgcttttattccctaaggatggccttatgtttagatcaatagttctcaaactttaacatccgtcagaaccacctggaaaggtagttagttcacaggttatcaggcccttcccctggaaattctgattcagtagatctgggctagggcctgagaactgacatttctagcaagtccctggggatgcagatgtactggtctggggatcacacctcgagaactattagttagggtagtggttttcaactactaccctagactcagacgctatactatctggaggcatttttggttgttacagttgggggtaggggatggggagggatacatgctcctgatatctaatgtgtagaagccaaagatgattctaaatatcctacaaagcacagcccctggcaacaaagaattatcttgctcaaaatgttaatagtgcagagaatgagaaaccctagtttagagaaaacatctttaggggcaatatgtggaaatggagagtgggttagagtggttttagagaaatgtagctgtgggctagaggggaatgtgggaggtggcatcctggagataagattgtgaggaaatcttgattggggtagagatcccatcagacctaggaccagtacaaactaaaaagctacctcaagatatacattttagcccactgtcaagcatccattcttgagagccagaca

SEQ ID NO: 120133 - DNA, 1018 bp, Homo sapiens
gaaaagagaagagggaggaaacaaatggaaggtggggagaaggggtttgcagaggtgaggaaggaattttcataatatggctttgagcaagctatctggggatgtggaaagagtttaccgtattcctactgacttcttccacccactggtgtttgaagcatagaaacatggggtaaagggcttggtgacagagggaagggggatgtctgagggtgagctgaaaggaggtaaggtggtatgttcattaataccaaaggaggggtgtgcaggagaggtgatgggtaaggctccagatggaagacagagaaggaagtttaatgaaagaggagaaaaaaggcacttgacaggaagagatgccagaaaggagaagaaaacggtaattaatgatgaaagtgagtaattgagaaaggaactaatttgttcgagaaagataagagcaggaattgcagacaggggaggggccccaggagagcttgccctcatctcctcttgtctttcagtgtgatccaggccaagccaccaagtacctatatgagctgctctacaacgaccctatcaagatcatccttatgcctggctgcagctctgtctccacgctggtggctgaggctgctaggatgtggaacctcattgtggtaagcagggctatgggggtcagaagatggggtcattcccttttgagctctactgaagggacgatggcgattgtgggtttgtattgaaaaggagtgtggaggacctgctactaagattcagagtcctctgcagacctgagctaggcagcctcctagcaacagtggcctgacagtgctgcagctgacctccttcttcagaaggaattgaaattagatcagtgaaagagcatcccggttgtgaggggtgtgtgggcctttgagaatctcttttccttaggcagaccagaggtggggaggtttggagagagtaaggaagagaaacccaaaggcaggaagagggttaaaggaactcttggccactcttggtgtcctcagtgaacaga

SEQ ID NO: 120134 - DNA, 5175 bp, Homo sapiens
aattactcccttttcttggtcccactttgctgtccagatgatcttattagcctccctttatcctcctatcctaattcaactcgaatatcctcatttagcctttttttttaaagaaaagctccacccacatatcatacccttcatgatttcttaattacttttctttcttacctccacccagcacccttccctccccacttgtgggttctctcatcagctttaaccctggccctttactctctgtcctttagccaggggatctgtacctgtccccactcccaccctctagtgccccatccctcttcctctgtccccagcctgcccacagaccacgccctactctccccttcctcccactggggagcctgccttttcctctttcccaccattcctctctgtatgcctccccgactcaccccttaggttgccagatcatacacccgccctgggaagggggcatcaggtaccggggcctgactcgggaccaggtgaaggctatcaacttcctgccagtggactatgagattgagtatgtgtgccggggggagcgcgaggtggtggggcccaaggtccgcaagtgcctggccaacggctcctggacagatatggacacacccagccgctgtggtgagtagcctcggaagcccctcccctcttcaagactattccttttcctgccgcaaacttagcattactgcttgcaagtcagcactttaaatccagtataccaaaattcacaaatacatttattgaatgactactacataagagcaattttgctctgtgcggttggaggtagtagagctagcagcctgcacagttcatttcatcctcccttcattaggccactgatcattggcctataacattgataattcatcttgtcagttattctctttgaggatcattagtggcagatgatgacaaaaaaattctaaaatgatttcatcacatttttgaatacctctgtcaccaacccagagaccatatgcccaagaaacaaaagccagtttaatattaatagaagccaactataataagaaaagcaaatctgattgtgcatccaaagttatatacatctacatatttcaaagccagagaaccgcccactgtagctgactttgaagagatcccattttgtgtgcttatagccccatcttgggttcctaaaatggtaattttttttttcttttgggaatgtgtggatgcttgcacaggtaagggaggattggaagataggtaggcaaatccttttcacatgtgattttctttagagcaggatgcttgtggacccaaacctgcacctgagtcccctgctctttaaagggaaagagccttcttcaactcgcctctcttcttattttcctatctctccacagtccgaatctgctccaagtcttatttgaccctggaaaatgggaaggttttcctgacgggtggggacctcccagctctggacggagcccgggtggatttccggtgtgaccccgacttccatctggtgggcagctcccggagcatctgtagtcagggccagtggagcacccccaagccccactgccagggtgaggggaacagctgcctgcatgcagctgatgaggacgcttgtgtgaggatgggagtggggtgggaatggataatgggaaagaatggagagctataaaaatgtgggggaggacactggaaaggggagatgaaagtccctttttcctccatcacctgcctcaaacttcctcttgcagtccccggtatcctctgtaggttgggggcttccttcctttaccttttaaaaaaatcttcctgctcccgattcttagacctcacgttttctcttttcctttatgaatctcacctctctcaccttcttcaggtttaaatactccaattttccctttctctaaacttagaaatttccatgcatcaccctcttctagaattcatccctcaccattccttatataattgatttattgtaaagactcagaaataaatcaaacattctactaagaaaaattgagaaggggagctctgggggtggaaacatattagggtaaaagacttaaaattggaggcagcattatcagaagatgaagaacaactcagggatggggtgggaagaagacaggtccttttctgtacttcctagacaacctccattattccctaagggaatcagtgttgtgtctgtctacttttttttttttttttttgccacgtaattttacaaactctcccttttctaggcacccgaactctctgccatcttctctcctgggatgcagtcatcccatttgtatgcctcatacttcctctaccctggtagattctttcaagatccttgggctttactttcctcacataactcagttattctgcttctagtttaccattttattctggaaattgagagtcccatccaggggtggacttatgacactactgaaacttagacttcaaggttcctcacctacagggccctcttcctgtgctctaataatatagagggctcgatggatatgtgttcatatggtaacaggcttttgtaaaaattgcagaaataagattttaacagcaattgcttaaagccaattgtatgtgtaattttttttcttaaagactcccaattttgtaatattcaggcaccacagaaccaagatctgccccaaacttagctattggcattcccgtctcaaattctgttgtcctatgaaaaatcgaagaagaaaataagtcctgacccccttacccccagacccaccttgttcttatccccaggcaccctcccctcagaaacgcaggcttctgctctccccggtcttcagcatggacaggtgtgggagggggctggggatcaggccagggaagctgggcgccagtggtaactcttctctgatccccgtctttcctgctgccagtgaatcgaacgccacactcaggtgagatgagaaacccttaccgcgcgcactgcaatgccctccccttcactctgcaccctccacccccctgaaattctgcccttaggctacggggcgtcgtcctttcgcaccttccccaacccaccccagtttgcggccacccccttccctccctacctgtttcctgcctccagtcccggttttccacgaggctgcggtctctccttgtccctgcttggctacacttccctgggctccacctcctcccagactgagcctcgccggtgtcaggcagagcccagcagagggcggcagggtgctgggagaccctgagctcccaccacgttttcccctgtggggttccttgcgaccttcgctggaaccttttccagcctgctgcctcctaggatttcacctaatggactttctcagcctgtcccacccatcccaaccctggccaggcctctcgcgctcttccccacatcttttccttccgtgtaccccttccctcgtcttttctcaattccatgtcctgtctccctttcttaggcttctgtctacccagccccaggctcccttccacgaccccaccactccctcaaaccagcctcccttccgtacccaactcgttccctccaaaaccgtttcctctcccccacatcctcagtgcttcactgtatcgactcatactcccacttcagacctcaggcgccagccccgtttctctcccgtcccactcgcatccttcccttcctaccctggttcctccgtgcttcagcctcccgcggctccctccgcccaccccgccctcctggcacgccccgtccccatttctcctcccctcgggtccccttaagtgagatccctcccttcctctttcgttcctttcctcctcgaggttgcatcccccctcccctccccgcccctccgactgtcgctcccacctcggcgctcgcttccctccccgcccccttcctgcctccccagctcccgcccgcccccccaccccccgctgccgcgcgccgcccgtgacgtcagagccccctcccagccccacatctccctcctgctcctcctcctcccctccgtcggtcagtcagtccgcgaggagagtccgcggtggcggcgacggtggcgagagccgcgggggccgtaggaagccaaccttccctgcttctccggggccctcgccccctcctccccacaaaatcagggatggaggcgcctccccggcaccctcttagcagccctccccaggaaaagtgtcccccctgagctcctaacgctccccaacagctacccctgccccccacgccatggggcccggggccccttttgcccgggtggggtggccactgccgcttctggttgtgatggcggcaggggtggctccggtgtgggcctcccactccccccatctcccgcggcctcactcgcgggtccccccgcacccctcctcagaacggcgcgcagtgtacatcggggcactgtttcccatgagcgggggctggccagggggccaggcctgccagcccgcggtggagatggcgctggaggacgtgaatagccgcagggacatcctgccggactatgagctcaagctcatccaccacgacagcaaggtagccctggacatgggggtgggtgggaggtgggggcttgcggggcagggggccagccagctgcacgcgcccccatctgtctgagtcgtctctgggattgcgaggcagacccctcccttgtgtgactggcaggagatgggctgggggtgcaggagcttggggagagtcgcaggggctggaggtccaagatgagggtctaggggctcaagatggttaagcatgctgcaaggcagacccttctgccccgctgcgggagtctcgcagaagtgtcggggtttggagaaactggtggtggatttaaggtattaggagacactgatcctctgagggagtaaactaaccctggaatgggttgggggtggagggaatgtcagaggtggggagctggattgggggtttacatttaccatggtaacaaggtaaaatcttggcgtaggttggagctggaaggaatagggacagaatgaggaaaattttgagagacttgagagctctagtttatttatcttaacaaaacagcaaggtagtggtgagccctacctgactccttctcatccttctattcccaaccctgttgagcattcccagactgtgggatagatggcatatggtgattggggaaggctaatgatcaagag

SEQ ID NO: 120135 - DNA, 1099 bp, Homo sapiens
tatagaggagacacttgtaaaacatttgaataaaagttgaacaacaaatatgacgaaagaaaagtgtgcaggccccgcacagtggcttatgcctgtaatcccagcactttgggaggctgaggcaggtggatcacctgaggtcaggagttcgagaccagcctgaccaatattgtgaaaccctgtctctactaaaaatacaaaatttagccagccatggtggtgtgcacctgtagtctcagctactcgggaggctgagacaggagaatcgcttgaatccgggaggcggaagtcgccgtcagtcgagatcacgccattgcactccagcctgggtgacaagagtgaaactccgtccccccaccaaaaaaaagaaagaaaaaaaaagaaaagtgagggtggagggagggagagcacgacgtgcgcgcaccctctccccttgtccactgctgccgcctccttcttctgccgctcctggtgctgcttgtgtgctcgtttggagcggacctggtacctcttttgtgaagcggcagctgaggagactccggcgctcgccatggccgaagaaaagcccaaggaaggagtcaagactgagaacaacgatcatattaatttgaaggtggcggggcaggatggttctgtggtgcagtttaagattaagaggcatacaccacttagtaaactaatgaaagcctattgtgaacgacagggattgtcaatgaggcagatcagattccgattcgacgggcaaccaatgaaacagacacacctgcacagttggaaatggaggatgaagatacaattgatgtgttccaacagcagacgggaggtgtctactgaaaagggaacctgcttctttactccagaactctgttctttaaagaccaagattacattctcaattagaaaactgcaatttgcttccaccacatcctgactactaccgtatagttttctctattctttcatttcccccttccccattcctttactgtacataaagtaactggtatatgtgcacaagcatattactttttttttttaaaactaaacagccaatggtatgttttgattgacatcaagtggagacggggcggaaaaatac

SEQ ID NO: 120136 - DNA, 1108 bp, Homo sapiens
ttgcagggaggcggaggttgcagtgagccaagattgcaccactgcactccagcctgggcgacagagagtaagactgtctcaaaaaataaatgaataaataaaaaggaagaagaagaagaagaacaattgcaatcctccctggctctagaatgtcatttaaaagtcgagtgtcttcttccttccctgttttgaagcagcccttctcatgacaggcttgcttgccaaggttccctctgaccttaaatctcttccttttggtgtcttggacagggcagttcagagtgataggaccaagacaccctatccgggctctggtcggggatgaagtggaattgccatgtcgcatatctcctgggaagaacgctacaggcatggaggtggggtggtaccgcccccccttctctagggtggttcatctctacagaaatggcaaggaccaagatggagaccaggcacctgaatatcggggccggacagagctgctgaaagatgctattggtgagggaaaggtgactctcaggatccggaatgtaaggttctcagatgaaggaggtttcacctgcttcttccgagatcattcttaccaagaggaggcagcaatggaattgaaagtagaaggtgagtagtgccatataatattaggtattaactgttgggtggccaagaacaattattctctcaactgagatgagatccctcaacccaaacatctcagtcctgggaatgatttccataaaaatgtacacatcaataaacagaaactcatgcttagggatgtctgttgcatcattattcagagtagcaaggaaattgggatcaaaatcaatgcctttgagtaggtaagtgacagaatgaacaatggtagccatactgtgaatattatgcaggcattaaaaagattattttagcactaggccagatggtttggaggccttctataaggtattattgagtgataagagcaagctgctgtaggatacaaaaacaaaaacaaaaccctagggcatggtggtttgcctcgcagctactcaggaggctgagacgggaggctggcttgagcccaggggtttgcagttacagtgagctatgattgcaccactgcactcca

SEQ ID NO: 120137 - DNA, 1232 bp, Homo sapiens
tacgtgtaaacgatctatttacctctgttttgccattcctgaaaagagagatcatgtgcataaggagttaaacagaataagataacatttttgtaaagtagttagaatagtgcctggcacataaaaacagtacatgagtatttttattatgattttaccaatcctaaatgcaaatgacttcttatttaaagaaagaaaagagaagagaggaagggactcaaccaggagccaggggtccttgttcccccaggtgactggaactagagtgaaataccaagttgacctgggagggcctagacatgccggaacttaccaaaagtccggtggagattctctgaaagagaaacaaatggaaatggatttagtagggcactcaaaaaggatcttttatcctgagtctttgttatttaattacttaaaacttgttctaggcacgacacacccactgtagagaaagggaaactgaggggaaaacagggtattgagagggagagacggtccaagaacgggaccatttccgttatgccaaaaaaccaaaaggcaagaattgggagaaacgatgactggaactcacctatctctgctcgaagttttcctaaaatagaaaaaggcaacattttagttcctgcatgttctggctctcggtggggaccctcccacacccagcgcctgggccccttgtgcaggctatttctctgcagcctggaaacaacctcaggagagtaggaagagcactggatttaaagccaatggttgcggctctttctctagctatagtctagatacaatagcgaataaagaatgtgagcaatgctccaagccagcacaagcatccaatacatcccagctgctcttcgccccttttcttggattctcagttcacagagctgctccagcccactgcgttgccactttgtttatctaaagccacttcccatctgaatgaggagggaggagctgaacatttagtgagtagctagctactttgtgactggatttgtagtaggcactttgcatgactttaatcctccctacaatttaggacgaaggatgttttctctatttgacagacaaggcaactgaagcttggagaatctaagaattttgctatagagttcagtacctgagatggaattcaaacccaggctgcctgactctaacattcagattctttctgctcagccatgagggctgaaggcctttttttgtgtggaagaagtaaacaagcaggc

SEQ ID NO: 120138 - DNA, 2347 bp, Homo sapiens
tcttcttcttcttcttcttttcttttcttcttcttcttcttccttcttcttcttcttctccttctcttctccttctccttcttctccttctccttcttcttcttctttttctttctttctttttttttttttgagacagagtttcactctagttgcccaggcaggagtgcagtggcaccatcttggctcactgcaacctccgcctcccgggttcgagtgattgtcctgcctcagtctccctagtagctgagattacaggcagatgccatgacgcccagctaatttttgtatttgtagtagagacagggtttcaccatgttggtcaggctggtttcgaactcctaacctcaggtgatccgctggcctcggcctcccaaagtgctgggattacaggtgtgagccaccatgccaagcctctgttggagttcttacagtgaattttgtgttattcttcctcattcactgtagaaggcaagaagaaagagcttcgagaacaacatcccagtctgagagatgaggggactagtgatgacaaggtcttccttgcatgcagaggggccggccagtgccccctatctgccccagctgggactatggacaggacccgggtgcttcaagcatcccaggctgggccaccctttttttgctacacctgtggcaaatgtttcagcaggcgctcctacctctatagccaccagtttgttcacaatcccaagctgactaacagctgcagtcagtgtgggaagttgtttcggagccccaagtccctcagctatcacagacgcatgcatcttggggagaggcccttctgttgcacgctctgtgacaagacctactgtgatgcttctggactaagtcgtcaccgccgcgtccatctgggttaccggccccattcatgctctgtgtgtgggaagagcttccgggaccagtctgagctcaaacgccaccagaagatacaccaaaaccaggagccagtggatggaaaccaggagtgtactttgaggattccaggcacccaggctgaattccagacacccatcgccagaagccagaggtccatccaggggcttttggatgtgaaccatgcaccagtggccaggtcccaggaacccatatttagaactgagggtcctatggcccagaaccaggcatctgtacttaagaaccaagcacctgtgaccaggacccaggcacccatcactggaaccctctgtcaggatgccagatccaactctcatccagtgaagccctcaagactcaatgtcttctgttgcccccattgttctttgacttttagcaagaaatcctatctctccagacaccagaaggcccacctcacagagccgcccaactactgcttccattgcagcaagtctttcagctcattttccaggctggtcagacaccagcagacccactggaagcagaagagctacctttgccctatctgtgacctctcctttggggagaaagagggccttatggatcactggaggggctataaaggcaaggacctgtgccagagcagccaccataaatgccgggtgatcctgggccagtggcttggcttctctcatgatgtccccactatggctggggaggaatggaagcatggaggtgatcaatctccccccaggatccatacccccaggagaagaggcctaagagagaaggcctgcaaaggagacaaaacaaaggaggcagtgagcatcttgaaacataaataaatggcctttctgactgagctctttctttgtgtttagttttcctgaggactgacctctggggtaatgaggctggagtagagggagacaggtgcgtggataaggaaggaaatacataaaagacaaggggttagaagtgtgcttatgaaaacttgtattattattttttatttatttatttatttatttatttatttatttatttatttatttttgagacagagtcttactctgtcactccggctagagtgcagtggcacgatctcagctcactgcaacctctgcctcctgggttcaagcgattctcctgcctcagcctccggagtagctggtattataggtgcccaccactatgctcagttaattgtttgtatttttagtagagatggggtttcaccatgttggccaggctggtcttgaactcctgacctcgtgattcgcccgcctcggcctcccaaagtgctgggattacaggcgtgagccaccgcacccggccaaaactcgtatctttattaattagcacctagcttgtttgtttgtgtctgaccatcaagtagtagttgttgaataaacagtggatactctgatagatatgaagataggagaaaaggatgagaggaagg

SEQ ID NO: 120139 - DNA, 1070 bp, Homo sapiens
gctacctctgcctcccgggctcaagcaattctcctgcctcagcctcctgagtagctgggattacaggcatgcgccaccatgcccagctaatttttgtgtttttagcagagaccaggtttcaccatattggtcaggctggtctcgaactcccgacctcgtgatctgcctgcctcagcctcccaaagtgctgggattacaggcgtgagccaccgcgtccggcctcctttcctttctatacttcacagttgctggccttgtgtctgtcttttaatatttctctcttccttccatggttttatctttctcttaggttttaattctctgaatcttgagactggatgttaatcttgtacacacacacacacacacacacatatatatttatataaacttcttgagtctctcctgttcttccagaagccagtcacctttgaggatgtggcagtgaatttcacccaggaagagtgggactgtctagatgccagccagagggtcctttaccaggatgttatgtcggaaacctttaagaatctaacatctgtgggtaagaggctgggcttccctcagcaagccccctgtcctaagggccctggaacatctggtttccctggacaggtagatcagcttacaattagtttcactgacccctggttctatgctttccaggtgtgaaagatctgagtcactaagctcagtggtaaagagaagaaatgatagcctgcatgaaggcaaagataacacttgtaacatgatgacagtgttctcaaaatatgcaaatttttccattcatcaaacaaatatttactaagtcactcctgagaaccaggtactttgctagcagctggccttttaatgtctcctttccgcatctacatgtcccaggttatggttcttaaacaaaggctacaggaggtagcctgttgtccccatcagatgtgaaggggccatacctgggaccaactcaactctttctcattcccacacatcagccagaatctttctgcataagccagagctaatcaccaagcttgagcaagaagaggaacagtggagagagtttgtccatctcc

SEQ ID NO: 120140 - DNA, 1594 bp, Homo sapiens
agtgcagtggcgcagtcttggctcatggcaacgtccacctccagggttcaagtgattctcctgcctcagcctcctgagttgctgggattacagatgtgtgccactatgcccagctattttctttttgtatttttagtagagacagggtttcaccatgttgaccaggctgatctcgaactcctgacctcagatgatctgcctacctcagcctcccaaaatgctgggattacaggtgtgagccactgtgcctgtcctccggaatttttcatttaatatttttgaaccatggttgaccatgggtaactgaagcattggaaagcaaaaccatgataaaggggaactactacatgtattgaaaatccagatcacagaattgtgtgtgtgtgtgtgtgtgtgtgtgtgtataattttggtcatggaagagatcttagagagtgtctcctttattctcacatttctgatgaaaccaagtcagaaagaataaagagactcactcgaggtgatctgtgacagatcctagcctggttaccccagctacatgatttccaatggtactgagtctaacattaacattaggtttaaacattaacttttgtagatcaagaatgtccacttgtccttggaaaattatttagcatctctgcattaggtccttaagacagggccagtaattgttacctcattgctgagagcatccagtggcacactgtaggggtttagtaactgctggcattccctgaccaaataaggaagctgtttcttaccctccctcttgctgatatgttttgtttttctctgacctcaggtttctagaagcagggtagaacagacggcagacacctagcccaggctggtgttgttactaaacaatggcagctggtgagccaagggtgaccagggccctgaactcggtggcccagctttgagggaagcaaaattgttctcaattgtggaagaggagaatttggacagcagaacaaaaaaggaagacagcctcttggagcagatacatttgtcacaggaagccacatcaaaccctggggcctttgctgggcctctccatctgcccagttactgggaggtagatagccccaggaaggaatccagtcaggcctgggcaccaggccaggagtggataaagctagaaagagacaccacagaagagaagatgtttgaacagctgaagccaatcgaacctgtacagaagacgctcccatgggtgggcgaggtagctgccaccctgcaggaagccatgaagagagattgctggagggaggcacgggtgaagaaggtgaggagactaagctagagagaggtggggtccaggtcctggactccaggagctctttcatacatactcctgcctgcaggtcaaatgaaatctcagattgttccagactgaacgacatccagaaaaaggagctgcaagacctttctccatctcccgcaccatcctggcatccttcatggagtacttcctgaaatttgttagagtggcagcattttttccttcgctttgctttcctgtttatattctgcatatctgcatatcctctttcctctcccccacatcttatctttctccctttctctt

SEQ ID NO: 120141 - DNA, 1858 bp, Homo sapiens
cctggcacgtgttgaaaaagtcggcatcccagaaggaagattctgggcggatgggcatcggggaaggtagtcccaaccaatgggaccgtttctgagcacataagcgcattcagtgggtgctaacaagcgcctgctttgccaggcgacagtgagcaaaaccggctttgttcccggccaccggaagcttcgaggctggggttccggatctgggcgcccaatgacaaactaagcgcggaggacagggccaggagcgcccaccagggcggcgatctggtgggtaggtgcagggcaatggctggaaagggtccccgaagccctgagcagagaccaaagggccgtgcgactgcaggaaggccattttgcttggctgacaggcggaaaactcacgtggctggagtagcagggttggtgacgacaagggtgaatcccactaagcattgcaactgtttgcggtgtgaggggtgagggggattctcatcattctcagaattgctgtggataaagggttttgggttggagagagactgggtgcactcaaaggactgaaagatggcgacgacacattccctcagaggatttacattctggaagggtggggacaggcccgggtacagataagcccgcaggcggcctccagctcttacagtcgaaagtctgatgagttatgcccagtctccttcctcctcccgccggcatgaggtttggggccctgtggatgaaggaagttcatgggaggcaaacgtgcctgggcaagcaacagccgcagagattcagtccccacgggggttagaatccacacttagggcctctgcctaccgcctccagcaaatgccatcttgaggactagcggcagcagtaggtcttctctgccagagaactggaaggccaggttcttgagggcactgttactaaggcgtttttttttgtttgtttgtttgtttgtttgtttttgagacggagtttcactctcatttccctggctggagtgcaatggcgcgatctccgctcaccgcaacctctgcctcccgggttcaagcgattctcctgcctcagcctccctagtagctacgattacaggcatgcgccaccacgccgggataattttgtatttttagtagagacgaggtccatgttggtcaggctggtctcaaactcctgacctcaggtgatccgcccgcctcggcctccccaagtgttgggattacaggctgagccaccgtgcccagccttattaaggctgttttgaagtgcagttggctggaaagtggaagaataatccaagatctgcatgcctcataaaaggagtgcgaatggttttgaaagacaggaaaggaaagggagagagaggaaagaaagagagaggaagaaaggaaggaaatcaaattcatatcccaggaatgcacctttcatgacaacattttggagatccaattaactctattcctcgagggcgtttttccttgctggtattttcagttctattaacacttctcaaaaagtgaaaggaaaaaatagtcaacagggttttttggtctttattcttttctttctatctctagtaagggagatgtgggtgagtggctgtcagcaggaaaaggtgagagttcagctatgtttgcatctgagcaggaaatttccaaggatgagcagggaactccagtgctgggctcattgtgagccctgaataagtgattgctcttgggttgttagcagtattcttcacaaagatctgtatatacagtggttccccttatccacaggtgatatgttccaagagctctagtggatactttgtttttgttgttgtttgaggcagaatctcgctctgtcacccaggctggagtacagtggcacagtc

SEQ ID NO: 120142 - DNA, 1026 bp, Homo sapiens
ttggtcaggctggtctcaaaccccccacctcaggtaatccatctgcctcggcctcccaaagtgctgggattacaagtgtgagccaccgtgcctggccaatattttagattttaaaaggatatttttataactagtgctcaggaaagaaaaagaaagtggaagtaaaaattatctacttttcgggcggcttaccttcactccctcattgacagccagcctccacaccagccatatctgtccagtttagactgcagcccagtcctctcccaggctgctcaatcagaatccaagagagcagaacatcggcacttgtgtgtggtcagcgggctgagaacagaagaccggactcttttggcctcctcctcaggttgagacctccccattgtcacctttggctttcagcaactggacaggacaacgtacccaagggggcgccccagtcccgtgttaggctcggaatctgaagtgtttcccaaatccacgctgacatagatgtttcctctccacctagtgaccgtggattctgacctcgggacagagcgaggtttccaggccaaaacaagtggttcccaggttacaagtggaccccacaaacatactgtcacttctgctgctgcttccagggataaatgtggcttatcctggggaccaacccctactctccatccctaggatgggggagaggaagggaaattctcagggcattggcctagggagttggagaagctgctggtgaagtgaaaacaggagcagaatagggacattagagataaaggggcatagaaaggaatcagctctgatgacacctgtgtaggataaatgggttctgcttggggagaggctcacaggtttctaactgggatggtgtttttaacatggatgataattatagctgtgtcagttttacaagcgatcagaaaactacacttaaattttaggcaatttttgtgcttacagagatagtataatgcgcttacacacgaagaaagggaagaagacaaggggagaagaagtgattataggaat

SEQ ID NO: 120143 - DNA, 1033 bp, Homo sapiens
ctctcacggcttgaaaggtgagaccttggggggcctgatgtgtgggggatgttgggggggaacagtggacacagctgtgctatggggttctttgaatttgatgttttgagcatgcgatgggctgccaaagtgtcatccattactgggacagatatgaatttgttcatgaatattttttctatagtgtgagacagctgccttgtgtgggactgagaggcaagagttgttcctgccttccctttgtgacttgaagaaccctgactttctttctacaaaggcacctgaatgtgtctgtgttcctgtaggcataatgtgtggaggaggggagaccaacccaccctcatgtccaccatgaccctcttccccacgctgatctgtgttccctccccaatcatctttcctgttccagagaggaggggctgagatgtctccatctttttctcaactttatgtgcactgagctgtaacttcttacttccctcttaaaattagaatctgagtaaacatttactttttcaaattcttgccatgagaggttgatgacttaattaaaggagaagattcctaaaatttgagagacaaaataaatggaacacatgagaaccttccagagtccatgtgtttcttgtgctgatttgttgcaggggaggagaatagatggggctgtgcctagtgggtgctcaggccagtatggactttatgtggtcactgctcagctgggtcatctttgctccttcattctccttggcccttcagtagaaccttgtcctaccaccacctgtgatcacagggacttggatgtcacctacggtggtccctgcatacaaatctcattgtggtatcaagagactaattttcagacctgtccagctcttgccctcctcccagggctctttcctggattgtatttttcatcttgcctccaatctttttaaaggaagcagattctaaaatttgcagagaggaggggtcccatagtttctcatcatagtgaactttttgttggagctcctcttctgctctcttactcttc

SEQ ID NO: 120144 - DNA, 1040 bp, Homo sapiens
gagcctctccacgcacgtgccctccaggtaggccctgatctgctctgcaaattcttctgcctcccacttgcgcttggtgatctgagccgccatgtccgccgcggtccaggagcgcaggtcctagttccgggctatgtaatccttgccatcgttggcgtgctgttcatacccgcggaggaggcgcccttccagccccaagtcgcagccatacattatctggagggtgttagaccctggccccgcccccgcggtcagccccgcccaccgagccccgcccccgccccgaccaacccgcggggattttggcctaaacggaaaatgaaacctggtaaaggcgcctgggcctctcccgggtcgaggatctggcgggtcccgcagcctcggggtggatcttggagccggagactcgcgggggggacccgggacgtccgtgggggatgaggaggggtcgtgaccttcgccccaggccggggtcattcaccggcctagctctggtggtagtagcggcgcggcatgggcaggttcactcttgtcagtctgtgcgcgggcctgatgttccgtgtgctccggtcccaatactccggtccctcctgctccaaccacggcgactgcggctacatcctcggagtcgccgcgtcgctgtcgaaccgcacgaactgcgtgtcgtccacgtagcccactgcgatgtaccggggctccccgcgacccggccgggacacggcggtgctgaaataccttatggagtgggtacctgggggcgaggaggggctgagacccgtccgaccctcctccttgcgctgctccccgggtcctgcgccccagtgcgcgggcccctacctcctccccgcagaggccatttccctccggatcccgcactcacccgcccaggtctcggtcagggccagggcccccaagagcagcaggaggagggttcgggacgccatgaccccatcctcggcgtctggggagaatctgagtcccaatgggttcgcggggacttctggaacagggaccccagcgacgccgattggcttcgctag

SEQ ID NO: 120145 - DNA, 3575 bp, Homo sapiens
gtcccggccgggtcgcggggagccccggtacatcgcagtgggctacgtggacgacacgcagttcgtgcggttcgacagcgacgcggcgactccgaggatgtagccgcagtcgccgtggttggagcaggagggaccggagtattgggaccggagcacacggaacatcaggcccgcgcacagactgacaagagtgaacctgcccatgccgcgccgctactaccaccagagctaggccggtgaatgaccccggcctggggcgaaggtcacgacccctcctcatcccccacggacgtcccgggtcccccccgcgagtctccggctccaagatccaccccgaggctgcgggacccgccagatcctcgacccgggagaggcccaggcgcctttaccaggtttcattttccgtttaggccaaaatccccgcgggttggtcggggcgggggcggggctcggtgggcggggctgaccgcgggggcggggccagggtctaacaccctccagataatgtatggctgcgacttggggctggaagggcgcctcctccgcgggtatgaacagcacgccaacgatggcaaggattacatagcccggaactaggacctgcgctcctggaccgcggcggacatggcggctcagatcaccaagcgcaagtgggaggcagaagaatttgcagagcagatcagggcctacctggagggcacgtgcgtggagaggctcgcagacacctggagaacgggaaggagacgctgcagctcacgggtaccagggaacacaagacgcctccctgatcgcctgtagatctcctgggctggcttcccacaaagagagaaggaaaatgggaccaacactagaatgtcgtcctctctctggtcctgagggagaggaatcctcctgggtttccagatcctgtacaagagagtgactctgagggtctgccctgctctctgatacaattaagggatgaaatctctgaggaaatgaagggaagacaatccctggaatactgatgaggggttccctttgacaccagcagcagccttgggccccgttacttttcccctcaggccttgttctctgctttacactcaatgtgtgtgggggtctgagtccagctcttctgagtccctcagcctccactcaggtcaggaccagaagtcactgttccctcctcagggactggaattttccacggaattcggagattatcccagatacctgtgtccaggttggtgtctgggttctgtgctcccttccccaccccaggtgtcctgtccattctcaggatggccacatgcgtgctgctggagtgtctcatgagagatgcaaagtgcctgaattttctgacacttcctgttagacctctcccccagacacatatgatccaccattccgtctctgactataaggccaccctgaggtgctgggccctgggcttctaccctgtggagatcacactggcctggcagcaggatggagaggaccagactcgggacatggagcttctagagaccaggcctgcaggggatggaaccttccagaagtgggcagctgtggtggtgccttctggagaggaacagagatacccgtgccatgtgcagcatgaggggttgcccaagcccctcaccctgagatggggtaaggcaggagatgagtggagggggggtcatgtctcttaggaaagcaggagcctctctggagaacttcagcagggtcggtgctgggggctgagggtcagggacgctcaccttccccttttttcccagagcagtcttctcagcccaccatccccatcgtgggtatcgttgctggcctggttctccttggagctgtagtcactggagctgtggtttctgctgtgatgtgcaggaagaagaactcaggtaaggaatggatgaggagtggggtctgagatttcttgtcccactgagggtttcaagccccagttagaagtgtgtcctgcctggttactgggaagcaccatccacactcatgggcctacccagcctgggccctgtgtgccagcacttactcttttgtaaagcacctgtgacaatgaaggacagatttatcaccttgatgattatgatgatggggacctgatcccagcagtcacaagtcacaggggaaggtccctgctgaggacagacctcaggagggcagttggtccaggacccacacctgctttcctcatgtttcctgatcctgtcctagatcagcagttacactttcaggaaacttctctgggatcaaaggctagggggtttgtttagggccgtatggccctgactcctttctggcctctcataggacattttcttcccacagatagagtgagctactctgaagctgcaagtaagtatgaagtgggctgatccctgatccttgggatattgtggtcgggagcccatgggggagctcacccaaccccagattcctcctctagccgcatctcctctgggctctgaccaagtcctgtttttgttctaccccaggcagcgaccatgcgcagggttctgatgtgtctctcacggcttgtaaaggtgagacactgggggacctgatgtgggggggtgttgggggcaatagtggacgcagctgtgctatggggtttctttgaattggatgtattgagcatgtgatgggctgtttaaagtgtcacccctcactgtgacggatatgaatttgttcatgaatattttattttatagtgtgagacagctgccttgtgtgggactgagaggcaagatttgttcacgccttccctttgtgacttcaaaaaccctgactctctttctgcaaaggcacctgaatgtgcctgtgttcctgtaggcataatatgaggaggtggggagaccaacccacccccatgtccaccatgaccctcttccctcatgctgacctgtgttccgtctccaataattaatcattcctgctccatagaggtgaggctgagatgtctccatctctgtctcaactttatgtgcactgagctgtaacttcttacttccctattaaaattagaatctgagtataaatttactttttcaaattcttgccatgagaggttgatgggttaattaaaggagaagattcctaaaatttgagagacaaaataaatggaagacatgagaaccttccagagtccacatgtttcttatgctgatttgttgcatgagaggagagtagatggggctgtgcccagtgggtgctcaggccaccgtgcgctttatgtggtcactgctcagctgggtcatctttgctgctctgttgtccttggctgtatgatccgtccctacggggcttagcgggttttctccccgtgtgcggagatgagagattgtaataaataaaagcacaagacaaagagataaagagaaaacagctgggcccgggggaccactgccatcaagatgcggagaccggtagtggccccgaacagctgggctcgctgatatttattgcatacaagacaaagggcagggtaaggaaggtgaatcttctaaatgattgacaaggtgaagcaagtcacgtgattacaggatagggggcccttcccttttaggtagcatatgtca

SEQ ID NO: 120146 - DNA, 1041 bp, Homo sapiens
aaaaacaaaaacaacaacaacaaaaatctacacctccattcccagatcaagcttactctctggcaccaaactccatggggtgatttttcttctagaagagtccaggtggacaggtaaggagtgggagtcagggagtccagttcagggacagagataatgggatgaaaagtgaaaggagagggacggggcccatgccgagggtttctcccttgtttctcagacagctcctgggccaagactcagggagacattgagacagagcgcttcgcacaggagcagaggggtcagggcgaagtcccagggccccaggcgtggctctcagagtctcaggccccgaaggcggtgtatggattggggagtcccagccttggggattccccaactccgcagtttcttttctccctctcccaacctacgtagggtccttcatcctggatactcacgacgcggacccagttctcactcccattgggtgtcgggtttccagagaagccaatcagtgtcgtcgcggtcgctgttctaaagcccgcacgcacccaccgggactcagattctccccagacgccgaggatggccgtcatggcgccccgaaccctcctcctgctactctcgggggccctggccctgacccagacctgggcgggtgagtgcggggtcgggagggaaaccgcctctgcggggagaagcaaggggccctcctggcgggggcgcaggaccgggggagccgcgccgggacgagggtcgggcaggtctcagccactgctcgcccccaggctcccactccatgaggtatttcttcacatccgtgtcccggcccggccgcggggagccccgcttcatcgccgtgggctacgtggacgacacgcagttcgtgcggttcgacagcgacgccgcgagccagaggatggagccgcgggcgccgtggatagagcaggaggggccggagtattgggaccaggagacacggaatgtgaaggcccagtcacagactgaccgagtggacctggggaccctgcgcggctactacaaccagagcgaggc

SEQ ID NO: 120147 - DNA, 1030 bp, Homo sapiens
gggcgtctcctccgcgggtatgagcagtatgcctacgacggcaaggattacatcgccctgaacgaggacctgcgctcctggaccgccgcggataccgcggctcagattacccagcgcaagtatgaggcggccaatgtggctgagcaaaggagagcctacctggagggcacctgcatggagtggctccgcagacacctggagaacgggaaggagacgctgcagcgcgcgggtaccaggggccatggggagcctgctcgatctcctgtagatctcccgggctggcctcgcacaaggaggggaagaaaatggaaccaccaccagaatatcgccctccctcctgtcctgacggagaggaatcctcctgggtttccagatcctgtatcagagattgactctgagggcccaccctgctcttcctgggacaattaagggatgaagtctctgagggagtggaggggaagacaatccctggaagactgatccgcggtcccctttcaccccacagcaaccttgggcaccaggacttttcctcccgggccttgttctctgcctcacactcaatgtgtcggagtctgactccagctcctctgagtcccttggcctccactcagatcaggaccagaagtccctgctaccctgctcagagactagaactttccaaggaataggagattatcccaggcgcctgtgtccaggctggtgtctgggctctgtgctcccttccccaccccaggtgtcctattcatcaggatggtcacatgggcgctgctggggtgtcccatgaggaatgcaaagtgcctgagttttccgactcttcctttcagaccccccccaagacacacgtgacccacccccctctctgaacatgaggcataacgaggtcctgggttctgggcttctaccctgcggagatcacattgacctggcagcgggatggggaggaccagacccaggacatggagctcgtggagaccaggcccacaggggatggaaccttccagaagtgggcggttgtggtagtgccttctgg

SEQ ID NO: 120148 - DNA, 1110 bp, Homo sapiens
gccccgccgcgggcgcagagctggcgctctagcccacggagttggttaactcctctcaccggcccctggaaagggttccaagtcctttagtacccgacgctgtctgggaattccgggcgtttcggctccttggtcgcagaggcaggaggcgtgcgtggcaggagggttcgggttatatactcctaggtcctgggacagaatagttacgacctctgggacaggaactcttctctcttttgttaataaacttccaactccctcctcagacccgaccgcatgtctgtcatggacctcgccaatacttgctccagctttcagtcggacctggatttctgttcagattgcggctcggtcctgcctctgcccggggctcaggatacggtcacctgtattcgctgtggcttcaacatcaacgttcggggtgagaggcttgtacgcaggggtcctggcggagggcgcagggtcggaagcttggggaactcaagatcggttgggttgaggaggggatcctagagcaggacatcaggcggttgtacatttggtctagcgatgaaaactgagggaaaggatgtagggcctcctggcctaaccagccaggggaaaggggaggtttccggtgtcagctctctctggttgtctccataaccagttcttacttgcctgtgcagactttgaggggaaggttgtgaagacttcggttgtgttccaccaactggggacagccatgcctatgtcggtggaggaagggcctgagtgccagggacctgtggtaagctaatgagatcaagaactggctccataaggtgggtaggaaagaaatggaggagtgattgcaaagctctggagagttttgtgcccaattccaagagggaaaagagatgtaaaccatcgacgtttgagaggcgtgatcgcctgattcctgtgggaagtaaggggatatgaccaggcctccctaacccaccagtttcttcccaggttgacaggcgctgccctcgatgtggtcatgaaggaatggcataccacaccagacagatgcgttcagccgatgaagggcaaactgtcttctacacctgtaccaactgcaagtgagtattctttcccctccctctg

SEQ ID NO: 120149 - DNA, 1060 bp, Homo sapiens
tttaagacctcatttttgtctttggtgttctgcagtcactatagtatatcaaaatacgattttcttttattctgtttgggatttgttggactttctgaaactgagagtggacttttttttcatcaaccttggaaaattatcagccatcatctcttttaatattctctttcccccatgttctcagtcctcacattctggacctcgaattagttactagaaagaggtttctctcttctgtcctccatttctctcaccttcttttcatattttcaattgctgttctctttatgccaccttctgagtaatttcttcaggtccctcttccatgtcactaattctgtcttcagtttatttcaagtattattattttttactattgttattattttgagttctatttaattacttttcaaatctccttaatttttaaataattatcagttctttaatcatattttaaattgttccttttattattctttaaatatatatttaaaatattaaatatggttattatattctatgtcttataattctgatatctgcggattttgtgtgtctgatgctgctgtcttttgtttctgctgtctctctcatagtgctttttttctttgttttgtgatttttgactataaattcgagttttttagaacttgaactgtaggaattctttgaggccttgggcgagtgctgtattctcagcatttgtgtttcttttctaggtgccttgaagcactatcaagctggaattactttaaataaattcttggcttcatgttttttggagcagacagatagtatgaatttgagctgcaaatccatgtaagggctagcttacagttagaaattctcaggagagagttttctctctttctacctactgagacagtcaaattccccttctatagagttgaattttttcttttcttgttcacttttacaagaaagggcagccttttgcagttcccaaatttatgcacgggatctcctatcagaccttatacattttgtccctcatttcctatgcttccagtgactgtcaaaacagtataaagggcac

SEQ ID NO: 120150 - DNA, 1068 bp, Homo sapiens
aaaaaaattttttttaaataaaaagaagattttttttcccagcgtgtggcttgcctattttcttaaccctctttaaatgagcagaagttttaagtttttataaggttcagcttatccttttttttttcttttacagctagtgctttctgtgtcctaagaaatctttgctttgaggttataactcattggatatatttttaatcccagaatttttagttgtcttggaattagaattggaagtttgtttaggggagccagtcctcaatgatgtcataaataaaagtccttccttgattatttgattgcatatcttatcttatactactagaaactcatcttttggtgaatataacaagtcctttctttcctcataggttccaggagaaggaagactcttgacctttttcctgggcaactctacagtccctccctcctttcggaaggtgaaggatactgggtttttagatgccttgtccatcctgtctggttgcaatgttttgctcccagaagagaatcagatcatcatgtggggattaccattgttcctggagtactcctacccttagttgaatttccttattaaagttatatttttctataagaccctgacatatgtatgttacttataatctgtcttattccaaaaggaatttaaatgagtttccagagatatatttatatgaaaaagaaaagggggaaaaattaggacaaaaaagtagagtcaggaatgaggctaatataaacaaaaagcaattgtaagtattgccatactatttaaatctatttggttcctgagtttaggttaagaaaaactaggaatttggatagtgagacatttaacagaaattttaaccagatctctttagcatataaatttggacaacaaaaaatctgatactaagtaatgccactaagtgatcactataggtgagtattttattagtattgagataaatacaatacacagttgacccttgaacaacacaggtttgaactgcttgagtctacatatatgtggattttcttctacttctgagacccataagatagcagcacatttaagccctc

SEQ ID NO: 120151 - DNA, 1027 bp, Homo sapiens
gggagggagtgggaaaggttagtaagaggggactagataggtatgctcatccttaaccttctaggagaaccggagccttaccatcaaacttcggaaacggaagccagagaaaaaggtagaatggacaagtgacactgtggacaatgaacacatgggccgccgctcatccaaatgtgagtaattgttggcccgcagtagccctggagttctggctcccttcagcatatcttgtatctactcatatccactggctttccagaagcccccagatgttcatagttctgtcacttttttggtggtgctgtggtatcagggaaagaggtagggaagggctagaactggaattgcctaggtctgacagcaagaagtgtcagaggtgggagaagtggggctttgaattcgtggctctctaagaggacaagaggggtggggcctgagtcccagagggtgggcctggggaagctggatcctggaaggtaggagaaaataggaattttcactgagtttgagtgggaatggaactgactatatatcttacccttcctcctctttaactgggctcctccctctaaatctaggctgctgtatttatgagaaacctcgggcctttggcgagagctccacggaaagtgatgaggaggaagaagagggctgtggtcatacacactgtgtacgtggccaccgcaaaggacggcgtcgtgcaaccctaggaccgacccccaccacccctccccagcctcctgacccttcccagccccctccagggccaatgcagcactaaatccctctctcctccagcattcctgtgtctgtctggccctaaatgtatccatgtggctacttctccagccccctccttccctctcttctgcctgatagagggaagaggaagaggaggacgaacagagatcctgaaattctgacttgctgctattccagaacccagcctcctgggtttccccagtcctcatttttcctcccaatacccacccttctctctcgagggatctaggcaccttggtcccag

SEQ ID NO: 120152 - DNA, 1068 bp, Homo sapiens
aaaaaggctgtgagcatagaaagcagtcataggaggttggggaactagcttgtccctccccacccccagatcctgcaaaagaggtacaaagcttcccagagggccacagggcccagaccagagtcaagcctcttgttttaggagaaacctcagtggacaggcagggtagcccagtccttagatctgtggggaaggccctgagcccttctggagctaggagtggcaagagtgggagtcaagtatttgaccagcagagcctctatgtaggaatcatggtcactttaccaatactgatggggagggcctgttccccattgcaggcctagaatggtttgaatgggagaagtcaggaagtactgtagtagctgtaggggagagaagattctgagagccagaaggcaggaatggatttggttttgagcagggacgtggaaacgtggagaccaggtgaggtctcattattttggggcgaaaatgtgggttgctattaatactcctgcaatgggcgtgtgaatgtgttcccagaaatgagtggggaattccacccccaaaaagcagctgcagggccagtggccgggccaaacttctagttggagacgagactcagctttccgctggtacaatgcggagcggagcacgagggtcgcaggtgcagaacagcgggaagatgcgctcccccagggggccaggcgcctggaaggcgtaaagcaggtcgagtgagcggccgtcgtagaaggccacgcggccccgctcccagtccaggtccacgcgaatgcgccgcggcgggggctcaacaccgcccagcagggtgggttcgggtgccgtgagggcccacaggcggccgccgcggccctccacggcccacacggcccccgcagggcacagccttacgcagcccttgcgttgcactgattccccggccgcgcccactgcatagtggctctcctcgtcgtccgcatcctccccagaagagtctctgcaggaggcggcgtccgcagtctccacctcccagcagtggcggccggccccgaagccctgcgcacccagcacagctgggagctgatcgaa

SEQ ID NO: 120153 - DNA, 2649 bp, Homo sapiens
tttataaagcagtttagttatggtgatttagcagaatacaaagccagaaaatgtgtcacacttataccaaattaaggatgttgagttatattactaatgtatgcaactttaattttgtttaacgctatctgccaaaataaattttattccctctgacttaaaaaacaaaacaaaacagtgatgctgtttttttttttttcccttgtccccacagtgagcgtcaccctggacccacagtcggccagtgggtacctgcagctgtcagaggactggaagtgcgtgacctacaccagcctgtacaagagtgcctacctgcacccccagcagtttgactgtgagcctggggtgctaggcagcaagggcttcacctggggcaaggtctactgggaagtggaagtggagagggagggctggtctgaggatgaagaagagggggatgaggaggaagagggagaagaggaggaggaggaagaggaggccggctatggggatggatatgacgactgggaaacggacgaagatgaggaatcgttgggcgatgaagaggaagaagaggaggaggaagaggaggaagttctggaaagctgcatggtgggggtggctagagactctgtgaagaggaagggagacctctccctgcggccagaggatggcgtgtgggcgctgcgcctctcctcctccggcatctgggccaacaccagccccgaggctgagcttttcccagcactgcggccccggagagtgggcatcgccctggattatgaagggggcaccgtgactttcaccaacgcagagtcacaggaactcatctacaccttcactgccaccttcacccggcgcctggtccccttcctgtggctcaagtggccaggaacacgcctcctgctaagaccctgagccctgacatctgcccccagccccaaccctcagatgcttcacttctttggaattccaggactctcaatggggggacgggatgcctggcctaagcacctggagcaggggaccccatatccactggtagccacctccccattgctgtggccccctgaaatctcactcagtgctgttgctccatctactgccctaatggggctcttttcccacctcctgctggtttcccgagggaacttctgaccctggagtccatgagggctcctttcctttttgaccacgaccttggccccagctctgcactctctggaataagggcccgatgcagcattttcttgcccagtgtggcaagacctcagaaaaaccagtcaattacgcctaagatcattttgctgtccttaaaccccccaggttccttcttgcacaaatccactctgctgcccaccttccctggcattttaaacagacctaccccaccccaactcagagttaagcatacatggcaatgctgaaaataaacaaaatccactgaggcttcccaggccatttaaagcctggagtaccagcgcatatcatctcatggggtccagagtggagtccaggcttctctgaaaccagggctgagcatatttccatagccaaggaggtgggactccctggagctatctgtggtcttagggaaggatccagacatacacggctttggggtacaagctgtgatcactgatcaataaattatctctagattggtccttgtgaggggagttttaagaatccagaacatcttgctcttgatcagcacatccaaaaacaccaagacaaacatccagtggagcagaacctctcctgcctcgggagttctgaccgggttccccagcagggtgttaagcctctgtctctggccctaccagcatccaggttccactttcctaggagagagtggagatgggaagacagggaaaggaaggcagcaggaggccacaagcccaccaggtcttcatgtcaagagagggagtaacatgtcttctcattgcccacggacccaacctctgtccaggtgcccctcatcatcacagtttaacacaagctcccctgctccagccaaattgatctcccagtcttgtccttacccattccaagtgctctgccagcccctgttcatccaagttttaagtcctccaccctgttctaagagactgttccaacggctctgggcctcagtggtcacttgaccaccattgtctcagagctgcccactttgtgtgtgtcacatgctgcctgagtcacatgtacatcttatttctgcctctagttttgtaagctcctggagggcggataacatcttatactactcttgtattctcatggcacctagtgcagtgctgggcacagagtaggtgctcaataaagacttgttgaatgaacagcctggagatctgtatttgtaggtctatatctatattatatctcaaatgccaccagacctcagtctggctacagagaaattccactgatagcagtagccgaaggttttccttctgtgccttctgtaacagtgtaactttgctttctgttctctgcacacatgctgtcatttctggaagtccctcaaaaagagcctactgcggaacacagacgagttgttgcgtggctccacctttttattcctcctgcagtggtgcccttgagctgaggtccagcgttttggagcaagtgatgactctccctgagaagggagacctccagtatagcaca

SEQ ID NO: 120154 - DNA, 1525 bp, Homo sapiens
cagaaatgtgctaccagtctctgggcacttgcttcatagcggggggttgggatgtgcctctgacttcttgtcttattcctctggagtaaagctcacaactcttcccaaacttttggaagcagtcatcagcagccacaatttgttaattccatttgtttcccaaatctcaccctctccaggaagccagcctgcaccccaccggcccctgctcccatcccccttcactctgctctcttttcccgtggtgcgtatcactcacgtagtatgatgtatttgctacattgattattgtctgcttccccctgctagaatgtcagctctacagaagtagggatttgtctctctctctctttttttttttttttttttaactgttctgaggcttctagatgagtgcctggtacctaggaagcacttaataaatatttgtggaatgagtgaaaggaaggcaaaaatcaattaatacagggtattaaggaggcttttgactcacaaaagggaatctgagcatgtcagaatagccctcttcccactcaccctgccctaccacctgtctgtcacagagatagcaccaccattctcccccctgtacaaaccatgctctgttcttgtttatccttgaccagtatgtccagttgaatctgtctctaaaatacctggaatgtattgcttctctctttttctccctactgccaccaccttagttcaggccatctttagctctcccctggtccacggcaaaagcctccggaccaacctccccatgttcctcttgcctccttagtcccttctctgtggggcagccaagtgagtggtcacttagggttttggctcactgctgtacagtgacgcaaacagaatagaagtttatttctgcctcagttaacagttcagaggtgcagggtctagagctatcacagtagctgtacataagcttatccaagggactgggttacttccatgtggttcttccaccagcttctagggatgttgtcctctgctgcgtggtcaaagttgggctcaccaccaccatgtccaaaattcagttggggtaaaaaggaagtagaaagcaattttctttttttaaaggacaatgcccagaattatggtcattgctttctatcacattccattggctggaacttagtctcatgaccagaccttgtcgtaggggatctggaaaatgtagtcttcccaggtggccgcctgaccagcaataactccgggggttctattattaaaaggaggaaggggagagtggactctggaggttacacagcagtctcagccacatgtagagcggatcacacatatcatgcccctacttgaaacccttggtgggtttccactgtacgtggagcaaaagtgaaactccttaccatgcatatccagccctgcgcagtctggcctctgccgttctcaccaagccctttcctgttttaccttacctctcttcatccggccagtacttcttatccgtcaattctctgcgcaggtatctcccagagaggttgcccatgtcatc

SEQ ID NO: 120155 - DNA, 1083 bp, Homo sapiens
atctgaaacatggagatgataatccttactgctgccaattagtctgtagattgcatgagcataaaatgaaataactggcatgctgtcacttcaaaaaataaactttttacacaaaactgttcaaaaaactaaatggtatagtagaaaatggaagggaagattattaatatcatttaccatcctccatcctcatcactgccatcacaagccctcttaacaagtcattggcagacacttagcagctggtggaagctttttatggtgttgtggttgggggtggctgagggagggctgaccagcagctcctctcaaagacccagaggatctggaagagatagggtaactggggaagggagacagagatggccaggttttctttggcccatgggattaccacacagagaacaagatggaaagcagacaagggggcctcggggcacctcctagaggagggggctttgatagtgagaaagggagggtttggggctgaagaactggctgtgaagctgaaatggcaccacatctcctcccccccgggagcctctggggatcacacttaccctgaagagggcccagtcccctttggaggggtagagggctcaaccttcctgctctcataggctgggaggggaggggctctctgatggtattcccccacttgcactgtttagggtggctgggtctgtctgtcagcagcagagccacccaggatctctaggaaggtggagtcccaggctaatggcagggcaatagctaggagggagagatagcaaggcagactctgcagtatgtgcactgggacagactgcagaaggaggcggccacctgctcctcattgttgtgaattcagatgtacagaatgaggactggcagggattttagaccttccagttcagcccctactgatgaagtcactgaggtccagagagtgggaggagtttgtcccaggccatggggtgggtgtcaggtcacagcttgagcccagatgtcctgactcctgggctctgagctcttgttcttattttgtccagaatgtctctctggccccctcttttcctccagatgtcattctgttctctcaga

SEQ ID NO: 120156 - DNA, 1741 bp, Homo sapiens
gtgaaggagcactgtgtccacagtagacattgtagatttatatgtgtatcattatgagtttcccagcaggtagtgagagattttttattacagttggtgcattacagcgattttccaacagatagaaggaaagggtgttgaggctctcccaacagcaaggtataggctagtggctgtcctgctcttcactctaccaagctaatctttctgggtttccatatccttatctgtacaatgaggaagttggactagatctataaggtcctcttctcgttgacattgtgtgaaccttgtaggagctggtggtgtctgtcgattgactgagtgctggagctggcagccctgtgcaggctgccacctttgcccctttactgtgcttgctcctgactctatgtcgcgtctccaaggagaagaagtcctcaccagtgaacggagacctctctgaactaaggataccatggccacgtcagccccactacggagcctggaagaggaggtgacctgctccatctgtcttgattacctgcgggaccctgtgaccattgactgtggccacgtcttctgccgcagctgcaccacagacgtccgccccatctcagggagccgccccgtctgcccactctgcaagaagccttttaagaaggagaacatccgacccgtgtggcaactggccagcctggtggagaacattgagcggctgaaggtggacaagggcaggcagccgggagaggtgacccgggagcagcaggatgcaaagttgtgcgagcgacaccgagagaagctgcactactactgtgaggacgacgggaagctgctgtgcgtgatgtgccgggagtcccgggagcacaggccccacacggccgtcctcatggagaaggccgcccagccccacagggtaagccctcttcacccccgagggtgccttgccaccttctctggatgctccaccttgcagtcctcagaggactcagcctgagtctcccttcctgccccagcccagagcatccacctgttgccactgcttgtttttccacaggaaaaaatcctgaaccacctgagtaccctaaggagggacagagacaaaattcagggcttccaggcaaagggagaagctgatatcctggccgcgctggtaagtgaggctgtttcaggaagccctgaggcggtgcgcccgtgtagggcagggtgagcctgggcaagtaggcggcagctgggaggtgtttctaggcgctgctcacagggaggatgggtgtcagcctggcagtagcagacctgggttttagcccaagtgctgtctttctgagccgtgtagtcttgggcctgtttcttgtctgagagacaagtgggctgcctggatgtcagctagagtcccttccgttttctgtgactgtcaccttgaaggcagggcccatgtccagctgctggttctcttctgccaggggactgaagaaggtgtggcttcattcttcctttcaaagagagagagagagacaaggttgcctgagagtggagagggtttagaaggagggagctggctccagggtaagaactgagagggaagggctagaaaacagctaaggcaggtctgccaattctgatggcactgtatgtagtgaggtccaggcccaggatcatggttgccagtacagtgggacctcctccatatctgtgggttccgtagcggcgaatttacccaaccatggatcagaaatattcagaaaaaagaaaaagcgtctctact

SEQ ID NO: 120157 - DNA, 1020 bp, Homo sapiens
aagaggcatgataaagggcttgaaagcccacagacacgcccagtaccactcctttttcctctttccaaacacttgcagtatgttacaactgaaaaactgctgagccaggcttatttcctcaacagtaaagccaaggagttggaccaggcaattcctagcatttctttctttttttttttttgagatggagtctcactctgtcacccaggctggagtgcaatggcacgatctcggctcactgcaacctctgcctcccgggttgaggtgattgattctcctgcctcagcctcctgagtagctgggactacaggtgcatgctaccacacctggataatttttgtatttttagtagagatggggtttcaccgtgttagccaggatggtctcaatctcctgacattgtgattcacctgcctcggcctcccaaagtgttgggattacaggtgtgagccaccgtgcccggccaattcctagcatttctaccagcattactaacatgtaggaacttgatattactttcacttgacagttaaattccttgaatccttcatttgagctttgaaggtgcttgattttcccctcattatgtctcttaaagtcacacatacctagatccattagtgcttccagttggaatttattatcagcactataagaatctcttatatttatgtagtccttttacgttataaaacactttttatgtattattgtactagaccctcaatgagtggacgttatatccctgttttgtttactcttgggtcttatagactgggggttttatttctgtcccattaatgtcactactgacagaggccactgaactctgttgtgatggactttcaccatacataatcattaatagtattgatttgcctgtaattcaggttgcttcattccagcctcgcagtcacctctgtgccctgctggttgtcttcccagcgctgctgtagttgccttccatggatctataggagagcaagtcctccaggtactgccctgtgacgatgttgttga

SEQ ID NO: 120158 - DNA, 1049 bp, Homo sapiens
tttacctcttattgtggaaacctgttgagatcacagagaatatactgacggcataaaagggcagaaccatagcagggtgcggtaagttggggaagagtttttggagagggtgaattttgcattggacctgacagaattgtgtatggggaaggggagcggttattctggtctgctcacatctctcatactcaacctcatttctcctaattctgaaatcttgagatcctctatcactaagaaggaaaactactgtccaacagggacactttattgctcaccccatatgtgaaagtttgtcatagctaaggctagggtgcttttggtcagtatcagcagaatatatgccccctttcttttgtcagcattactccgcttacaaagcccttccatgtagatgacctcatctgagcttcctaacaaaggagctggtattagaccccattttacagtgtgcctgggtagggaagagagtgtagtggattgagcagaggccttggcaccagacactgcttcctagccatgtgctcttgggcaagttgcttaaccctgctgagcctcagtttcctcagaaggagtctgtataagcaagggaagggattggtcatagaagtggtactgtgtttcatttatctggttatggcagactctcaaaaacaaatggttctatacaactaacattgtctgcaattcccctgaatccattcacttgttcagtaaatgtgtattgagcttctacaaggtgtcaagcaccatgatctctgtatcagtgatttaaccatttttgatggttactacagacctctttaagaatgtgatagaaaactgtagctccctccccagaaaacttttctagctttttattttgctttgcagtgagccaagatagttccactgcactcgggggacagagtaagaccctgtctcaaaaaaaaaaaaaagaaaggaaccatttcaaattaggtgggagacatggagctctaaatactacagcatccattgcctagaaatacaggtattctcagccgggcgcggtggctcacacctgtaat

SEQ ID NO: 120159 - DNA, 1634 bp, Homo sapiens
ggtaactgggaggaagaccacagaggtagattgccattatcatcccatcgtatcaagggcatgtactaacatgatttatgacttaatattgatttgggtgagatagtgtttttcaggtttctccactgtacagttagtctcttttccactctttgcgtgtattgtcctctttagaaggaagtcactaagtgcagcccatacctagggagccaagagttatattcccccttcttgagggcaagtatctacatattattgtttgcagttattctgcatggaagatttgtttctctcttcccccaatttattaatttattcaatcattaatttcagtgtagactcagggacatttattttatactttggtttataatccaatactacttaattttgttgctcaaattactgtggctttggctgttgggagctcttttcacattggctcctgtgctctttcatagtatttttatagagctttttgctaatgagacactcgtacttatgtgaccttgcctcaacctcaaatagcctggtaaacttggcaaaatattttccccttgttaagaggtaaggagactgaaggcctaaggcagtgggtgacttcttagatatcacttcctgcaggggagtaacaggttggactcagattgtgtgtgaccaccacagaagacactgcaaacccccgaagagagtccatggtctgtattgaggcttcttggaatgacttcagacttggacccccccaggatcagaatagaaaagacacagagaatgggaaattggtttgagaagacaaaaacataaattggctggcatcaggatgaattagattttgccagctttatagaaatggaattttgttcttccccccaaaattgtgtgtgtgtggagggaggccaagagatatctaggtaatgtgtgtgggcaagaatgtctaatctaaagagagccctggaagcctgctgctgaagcagaattttaatgtgggaaaggggggtgtgtagtgaaagggggaagaatggagatggcagggctctggaattagaggaggtcattcatttcacaaacatttgcagaccccctactttgtgccagatattggagataaaaaggtcagtgaggcatgacctttgggttcacattctggtgggagagaagacagataaaaatatcaattacagccacttatccatagcttagttttccgtggtttccgttacccatggtcaacctcagcccaaagacagtaaacagaaaattccagaagtaaacaattcataagttttagatgtgcattgttctgagtagcatgatgaaatctcttgccctcccactgttccttcatcacaagaagggtaagtacagtacaagatagtttgagagagagagagaccacatgcatataacttttattacggtatattgttattctgttgtgttattattgttaatctatttctgtgcctactttataaactttattacaagtgtgtatgtgtaggagaaacaggtttcagacatccactgggggttttggaatgcatctcctgaggattgaggggactcctgtatgaatgtatctttagcggatggggggtgctactgtatgaagcactgtgatagtgctattgtag

SEQ ID NO: 120160 - DNA, 1004 bp, Homo sapiens
agaaattttgtatctctcagtcccactcaaggcagttgtctcaagctacaggagaaaataatcataaacaaatccagggcagtcactgtacctggtgacactctgaacagcctaccacatggtcaagatgtctaaatccagagaacccctcaacagaatcatgtcccctctgcctcacccccacccacttcaggcccccccatgtctcacctttacaagtatcatgagatgcatcagagtactgagcacaattgctgcctggggtagaacaaaaataggaactggtcagagcccacaggagatgtggctaaaggaggaatcttgtctacactgtcccaacgatctcagggagcagccctctaatcccccatactaacaggcagcccgagcatagctcctccttgttctatctgtgagaaaaaaacaacctgtgagaggtcagggaggacatggggcatgaagtccttaaggaaacagcaaatcctggaccccaggaaaatttccagaactgtgactgcagacccagggcaggatcaggaaacatgaggaaagcaggtgtggtgactggaccaactgccctcctgaggtctgtcctcagtagggatcttcccttgtgacctgtgactgctgggaggtccccatcaccacaatcatcaaggtgataaatttgtccttcgttttcacatgtgcttcacaaaagagcaagtgttggcacacagggccccaggctaggtcggcctgtgtgtcgacggtgcttcccagtgatgaagcaagtcacaattctacctgtggcttgaaacccacagtggaacaagaaaacccagaccccacctctcaccccttccctacctgagcttttcttcctccacatcgcagcagcaaccacagctccagtgaccacagctccaaggagaaacaggccagcaacgatgcccacgatggggatggtgggctgagaagacggctctgggaaaggagagggaggtgaggggttctgaccccca

SEQ ID NO: 120161 - DNA, 1082 bp, Homo sapiens
gcagcattcagatattttttcattctgctgagctgtgagccacttctcaatcttccatctggctataccccatgatagagaaaatgacatttatctctcagcatcctgtcttataattaaagaaacacatcctccttaaaaataaataaataaataaataaaaaacccagaataaagcaacacttaaatgtgggtctgagacccctccccatcctgggcattctccaactactgatctcagtgatatcaaatctggctgagcaccaggtttgctgtgggcttgttgtagaatactcaggcctctccacagatgcccctgtgtcagaatgttgcgcatggagtgcaggaattgcttattaacaagcctcacaggcgaggctgatgcatagcctaggaatcctggtctgtgttcttgctaccaaaagtgggatctgaagaccagcagcatcagcgccaacagcaacattatataagtaggaaatctcattctcgattccagatcagcttagacttaaggtgatgtccaggtgattcctgtccacaggaaagtctagaactccctggtctatgtaccttctagatgtggggtcaggactgtgcagtctgatctaggtgtgttgtctgatcagatcctttagcaacagaggcctagtgttcagtccttgttcctgttctcttctacagccaatcactcccttggagacgtcattcagactcaaggctttaaataactgttatatgacatcacctcccaagtctatttctcctaaatgtctccagattcatctgtccaactgccaacccgactacctcactggtatttctcagcggcatctcagatcccacgtctcccatagtgactgcctgcgacgtcccctcctctcatatgctcctgctagtcttctcattctcagctgatggcaactctttttagtcacagtctgacatttttggtatcctttactcttctttctcataccccagatttagtccattagaaaatgcggtataaagtgattggaaatagtaggaatccaatcacgtcccactatttccactgctcacaccccagttgaagtaac

SEQ ID NO: 120162 - DNA, 3082 bp, Homo sapiens
cctcctccttcttccgcaggcaccgctagacccggccgcggccgcccgccgacaccccagcttccactgacacgagcctcggcgcggcttccgcttccggcgagtattgtgtgtcgcgccgcggggcgggggcgaggggaggaggaaggagggaggcagcgctccggcggctccgcgccccgcactcccggacccgaagccgggaaggtaggtgctgtcccgccgccgcgcccgagcctggggcctgcgctcgccggccggctccgcaagccgcgtcccagcgccccgcgactgcgtcaccggccccccgcacgtaaccacagctgcctccgcccgcctcgggcccgggcggacgttttgccgccccggcgacgtcagcgcgtccggcgttgcttggctaccccgccgttcccccgtcccgctgctgctcacctccccgggtgaaactctgacgcagtcaccgcgggtctcggcagcgtcatagcggcgggcatcccatctgcacgtcacacctctttctcacctggacacgcatcccttcctaccctgccagccacgacgtttcctctttcccctctccaatgccccagccccagatctggcggaagaagatggagaacgggggtgggacagagttgtggacaacctctcaggagagggtcgcaaggtgggaccctgaacagtggtagaaacaaaatgagattgtccctgaagtttgcccttcagctgagacacaaggagtagaggaagaggaaggactaacgcagaggcactcaaggtctcactatgactgtagttgagagtcctctcccttcttccctaaccctttccccatttctctcaccacttctttgccagtctagatccgtcctggtgccttactgtgcatacagttctactcgtctcaggtgaggaggccacttaatttgtaaaagactgaggaaggggtaggatcaccacaagtcaaagttggattcccacagatagaaatcatctgactgaacttctctcctattgctgacagaagaaattcaaatccaaagaagttatcagttcctactccaaatcaaacacatttgtgtgtgccaacaatatatacaggaacaattgttgttaacctacctcattacatggccacttatctctcagcacatagatctaccaaatttccttccttccagtaggtccctggagaaggatgggggtcgggaggagaaaaggttatggggatagttaaatcaacttacccatggctaaaagtatggatgttttaaggatggagtagggggccagccttgtgttttataaatctctcctatgcatttccaattcttctgaggctgcgcttgagggagatctcattgcctcttttgtgtctcttaattcgcaaccactccaggacctataagttggagacacactatgcccagggtgttagttatcaatagctatattgaaagattccagtcactacaaatagactcgttgctctcttttcaagaagtcgttggcctgagctcagcaatatttaatatggttgccataatttatcagttttcagcagttctgagtgtccagatgaacacaagagaaatggaatgttgcgtgaaatgtcattccaagaagagagcagatttcctttaggctagtctgatggataaaaggaagaataatttcagattttcctgaaaagaggaggttgcctttgcctcattcattccatttgttagcctttagagcagtggtatctaaccctttcaatatgaggactctctttgcttatctgtggtggctgataaaaattatgcatggaccttctgtggtggtgatagaacaaaagttatgcatggacttttttttttttaagcttatcagctgtcattagtgtcaatgtattttatgtctggcccaagacacttcttccagtgggcccagggaagccaaaaggttggatattgtgatttagaagaatgagagaacagtgtcagagaatcaagcttagactccagtggattaatcataaagctcttataacattaaactttaaaatatggttaatttaagaaatgttaatatttttatgacttttttacttctcagattcctttcttgtctgttagaaacgtatgtcaaacgaggatacagtgtctggaactattggttctaagatataagtggaatgagcctggatcaggagaagtatgctgagctagagttgaaggaagcttctctttctaacaagagaaagcagaggtaagagacaagatagatcaattgggggttgtgtgtcagtttactaacaagaaaaaaaaggttgatggctgggagtcacaagttttgaaaatggagaaacaaagaggttgaattgattggaagagaagatggagaataacaagaaggggcaaatctggagttaggacttaacatagggataaatgtcgggtcagggatgcaaaaaaaaaaaaaagaaaaaacctccaattaatatttttattttctctgtcctcttccccactcccaagttaaattatggcagagacaagtctgttagaggctggggcctctgcagcctctacagctgcggctttggagaacttacaggtggaggcgagctgctctgtgtgcctggagtatctgaaggaacctgtcatcattgagtgtgggcacaacttctgcaaagcttgcatcacccgctggtgggaggacctagagagggacttcccttgtcctgtctgtcgaaagacatcccgctaccgcagtctccgacctaatcggcaactaggcagtatggtggaaattgccaagcagctccaggccgtcaagcggaagatccgggatgagagcctctgcccccaacaccatgaggccctcagccttttctgttatgaggaccaggaggctgtatgcttgatatgtgcaatttcccacacccaccgggcccacaccgttgtgccactggacgatgctacacaggagtacaaggtggggaagcagacacacgatgtcagtgtgggtaaaaagggagaagcggcagaggatgagatactccctaggtagagatcgtaagctcctactactcact

SEQ ID NO: 120163 - DNA, 1105 bp, Homo sapiens
tggagtctttctcaccctaaggacagggtggaagagggtggtatatagggaagggccagataggcaacttcatttggcttgtgtgcatctggcctggaactggtgttaagccaggcttttgcttgtttgttgccatccctcaccctttgccatttcccttttcagagaatgtaaatgattttcatgttaggccaaaataaacaacttatagggtacatatgttgtcataaaaggtaaaagtgatgcatgccaaaccaaactaaaccaatttggattatctgctattcgggtaatcttcacagaaatgactgagagaagaatctgcagtttactgagggcatttcagttcctcctaccacctcaacaggactttgtccagactctcctcctcttacctttgtgccttgactgtggttctttgtggcaagatactttggttggttaaaataatatggaacaaaggatccactgaagtgatctctgtgttgtgtggtaatttggtgacagccttgtactgatgtgtaagaatcactgggtgttagacatgcatgttcctgggtctcacccttagtggttagtcaaggtctggggtgggccggacatctacattttatttatgagacagagtctcgttctgtcgcccaggctggagtacagtggtgatctcagctcactgcaacctccgcctcccaggttcaagcaattctcctgcctcagcctccagagtagctgggattactatggactatagccatgcaccaccacacccggctaattttagtggagacagggttttgccatgttggacaggctggtctcgaactcctgaactcaagtaatctacctgcctcagccactcaaagtgctaggattacaggtgtgagccaccgtgcccagcctacatctacattttaaacacaccactctcatttgagtccgaaaacccttgtgaaactagttccagaggaggtttcagccatgtccttcctcccagctggagccctgcttgtctgtccccgcctggcactgggtctgaaattggagagaagtcatcctctcctgacttatgctgccctccccatctcagggttcattgatcttctac

SEQ ID NO: 120164 - DNA, 1093 bp, Homo sapiens
gatagaagaggtcagagggaggggtgtgaggtgaatgtcagtgtggggagtggggtgaagtttcaggggcaggggatgctgttgacagatttctgtgctgtacctaagcctaggagttagaaaccattcactcagaaagtgaggatcacctactgtgtgtccagcactgcataacaggaagtgtgtttctttggtaggtggaatagtaggagtaaactgtgctttctgaggaccgggagtccttttccctccctccagcaccctcatgatccttcccactttcacccccactggcaccagtgcttttttttaatgtattacctctgtgccttccgtctgtagatcttacaggcatctgcctcggacctcaggagagtagggcagaagctctagctgggtataaattgcacataaccatctccccaacgtagctacataaagagaccagccttctgtcctgaaaatggccgatttaagatcctcacctgctccactaggtctctaggtgatataattggtcatgagcttgaggaagacaaaagcactgaaaattcataaagggaccctgggcatggattgctggggttgtgtttagaaaccgatgagtttgtgaggcctccgggaggctcccgagggcgcggggactacgtttcccaggaggcctcgcgcggacgcccgggcggggctgtgcgaggggtggggctgcgggaggccctggagcgcggcggtgatggcggggccggtgaaggaccgcgaggccttccagaggctcaacttcctgtaccaggtgagtctgcgacaagggccccacggggacggtgctcggcgtcccagagtgactgctcccctcccgcaggccgcccattgtgtccttgcccaggaccccgagaaccaggcgctggcgaggttttactgctacactgagaggaccattgcgaagcggctcgtcttgcggcggtgagacagccacggggcgggcggcgggcgggacgcgggaggaacgcgagagggagcgcgggcgccagaccactatcctcctccgcccccagggatccctcggtgaagaggactctctgtcgaggctgctcttccc

SEQ ID NO: 120165 - DNA, 1104 bp, Homo sapiens
gacaattatagtaggagaagaggacaaaaccttgacaccagcctggacttagggatctgggatagcctcttattccttggaaagttctagaatcgggatgagctagcccagggtagaaggtgaaaagggatttctggtcctggcctgtgtggatgctgagtgactgagaaaagctggagtcagacctccaaaaactcttggtgtggggctgagaatcaggcacgagagaaactcccccgtgattcctaatactgggagtcaaagagaactgctcatcagttcatctgaaggatggaatctccagcgagactagattccttaattgcccctgagagaggtctggccctttaagagagtcactctgtggtataggatctcctgtacctcaggtgacagctccctctcctgatccaagggaggagtggtattctggcctccatccctgtttcttctactgtttgaggtctgtcagctgtgggcacagtcctagcccaagaaggagatgggagagtagccctgtggaccctcttacccaggtgaagcagcgtctccttccccttctccaggtatttgtggagccactccacgcatgtgtcttccaggtaggctctctggtgctccgcctcagaggcatcatttgacttttgctcggagatctgagccgccgtgtccaccgcggtccaggagcgcaggtcctcattcagggtgagataatccttgccgtcgtaggcgaactgttcatacccgcggaggaagcgcccgtcgggccccagctcgcagccatgcatccactgcagggtgtgagaccctggccccgccccttagtcagtcccgcccaccaagccccgcccccgtcgccaccaccctgtgggcattttggcctaaactgaaaaagaaccgggtaaaggcgcctgagactctccccggtctagggtctgggcgggttccgcagccttggggtgaatctgggacccgaagattcgaggggacccgcgccgtccgtgggggatggggaggggtcgtgacctgctcccctggccggggtcactcaccggcctcgctctgattgtagtagccgcgcagcgtccgcagattcactcggaa

SEQ ID NO: 120166 - DNA, 1046 bp, Homo sapiens
aggctaacagctgtgggaggcttctctcctcttctcccttcttttttcatgcattctctttgcaagggaaagttctcttaggagtttagtaggttctcagtctctgaaacctgcttcctctacccattctcccactctgcaccttaggaatcccgttatctacatggggaggggaggtctaaatccagctcccttttggagtttgtgccattctccgatttgagcagcagccctgtgtgccccctgccgccagacctgctcattccaggagcttctgggagaaggaacagtaagagaggaactgtgtcccaagctgatgtctcttaatgagatttttacaggaattgttcaaattcagcaaatatttattgagggtctattgtgtgtcttgacctgtgctgagcaccaagcatataaggatgtaccaccagagcctgacctaaatttgaagcctggccatgatcaaaaccccaccttcaggcacccaagtttttggattaagaagggtgaatgatgttctccaaatcctgggggctcatgcagtataattctaggacttcatgttgatacaaatttttagttaaggcaaaacgcttgtgaaaatgttgattaaatgtgtacgagtagttttaattactggtgaacaactagcgtgcacatttatgatttgagcagaacagccctttaagtacagtgttaagtttcattgtttaaaagcttggcagctacgagtatttgaggtacataggggcgggcacagaaccagcctcctgaattccatttactctggtttgggggtggaacaaagatgatccagtgcagggtctgagctagaacctagcaggtggccagaaccattttagggtttcacctcagcatttcggcagaaatcagctctctcgtgagtcagggcaccttaggctttgctgtatatccctttgttaagccagcagctagactcctagattgaattcttttagaaatgggagaatgagcttttttattgactgccagtgttgtctgtattggatgatagcaaaaagtgt

SEQ ID NO: 120167 - DNA, 2455 bp, Homo sapiens
agtctgctaccaccagggccttgtctctgagctacacctgctgagtggggagctggaggcagagaactctgggttgactttcactgctccatcctcttatcaactctgtcctaggttgtgaatttcccgccagcactttatgagtatgtgactggagaacttggactggccctggtgctggttttgaacaaggtggatctggccccgccagctcttgtggttgcctggaagcattatttccatcaacactatccccagctccacgtcgtccttttcacctcttttcctcgggacccccgcaccccacaggaccctagtagtggtgagtgggcaatgagagagggcaacttgggagaggtgagttggcaggggacaaaggggagaacagagaggcttattgacaagggggcacctggtcttgggcctaagggtggtgggagagatgagaggcctaagcccgtgtgcccatccttttgtgccctctgatctcagtcttgaagaagagtcggaggcgggggagaggatggactcgggccctggggccagagcagttgctgagagcctgtgaagccatcactgtggggaaaggtatgtggcccttagaggagggctgtaggaggacatgggggagaccaaagatgcagaatcattttgctcacctttcctgaagccaacccctctatggtggatatgtgcaagaggccaggggaagggacagaataaggagcagactgacttggtgggacgagaggcagcaggtagtcaggagcctcagtggcttgctgcctttagccttcccagtacttttcagaagctcagagaaacgtgcgtgattccagggagggtagggtcaaatgacttttgggagattctctgacctgctcttatttaggttggcactgtacaactccagagggtgccagttacataatctgtgcagggcacagtatgtgccatcatgcacagcagccctggggagaacctctttaatcttctccttctttgagcagtggacttgagcagctggcgggagaagattgctcgggatgtggctggggccacctggggtaatggctctggggaggaggaggaagaggaggatggcccagcagtcctggtggagcagcagactgattcagcaatggagccaactggcccaacccaagagcgctacaaggatggggtggtgaccatcggctgtgtgggtaaggaagtggcagcttgtgcgtggtggcctccaaggaggtacagagttttcatattcggagaagagagagggcgatcaggtctcattaggccccagggtgtctgaggggtgatctctgccagtggcggtgggcaaggcagaagaggcgtctgctgcagtggaaggatcatgacagcctgagttaaattccacctcttctcagctgtgaggtcttgagtaagtgattttgctactctgagtcttagttactttgattttaaaaataaggacattgatacctgagtaaaagaatggatgacggccatgtgtgagggctcatgcctatatagtcccagcgctttgggaggctgaggtgggaggattgcttgagaccaggagctcaagactagtctgggcaacatagtgaaaccccatctttacaaaagataaagaaaactagccaagtgtggtggtatgtgcctgtagtctctgctacttcagaggctgaggcaggaggatcacttgagcccaagagttcaaggctgcagtgagctatgattgtgccactgcactccagcctggctgatagagaccctgtctttaaaaaaaaagaatggatgtgaggaatgatgggaatagtgttaagagagtgtaagaatgcctgacaaatagtgataacaataataacaattattattgttaaaactcagtatttatatggtgcttactatgtaacaggcactgttttaagtggtttatataaaccatttgaattgtagtaattagtctgtagtacagtgattatcaaatcatagtaggagctcagcaagaattagtattcttctaggttttaaccctttaagtttgttgccaaggagaatctcctcttaagggctttgtctcagctcacagtggaggaaaaaggaatgtatgattaggacccagggcccgtcttcatttagggtgggagaggtaagaagagaccttggacaagttatggtatctgaggtgatattggaaccaaaaagggcccaacccagaataaatttgggagtgtggagtaggtagttgggttccttggaagtgccctgacttatctctgtgtcctttttgtctttggaagaacctgccttactgctgagtgattgctcctctttccagtcatttcacccggctgtcccttccctgacttctgatcctagtctccctgtcacaaggagcctctgttccctctcttagcagcctctgctctagctgatctctattcca

SEQ ID NO: 120168 - DNA, 1093 bp, Homo sapiens
gaaagagagcagcccgggagcaagttctacagccggtcagtgctgagttgttggagctggacatccgggaggtgtatcagcctggctcaggtgagtgagagcaagacaggcattgggctggggaaggagtttggaaaggtaaaagccgactgtgaggaaggaggggtctgggatgtactcttgaatcctgaagatttcctcacacttggactttttcctgaattcccagttctggactttcctcgacgtcctccttggagctatgagatgtccaaggagcaactaatgagccaagaggaacggagcttccaagactatcttgggaagattcatggggcttactcctctgagaaactcagctactttgagcacaatctggaggtgacagtgtactctagggacaggagtggggcatagtgacctatggtcaaattggtttgggatcaggctggagagggactctgttttcagtttctcttcctgatcctgtctttttagacatggaggcagctgtggcgggtgttagagatgtctgacatcgtcctgcttatcactgatatccgacatccagtgagtactagggataagggtgggcaaggaggagggagaaaggtttttcaggggcaaaggtcagaggcaagagttgggagacagagaggtatctatcttcctgtctttctaatctctacctagtgctgatgtccgcagttaggaactcagttttttattctcttatagcctgtcattcctcccttggccagctcactcttctcttcaaaacagccatgtcctgtcctttagctcatcacagaccaatagaaaatccaagtgttggagctccagggattctatgaatgcagctggggacttcctcctgcccagcccaaagatgccctttcttccttatctcatttctctagcactgccacatcagttgctacagaacccacctggaatgctagagtagtagttaaggctgtagactgctgctggactgccctgtgtgaatcctagctctgcaacttcactcttgtcctccagtgggagaaagggaggtctgtgaggaccatttaggttggaggtccttaataat

SEQ ID NO: 120169 - DNA, 1251 bp, Homo sapiens
cccgcgtgccccttcctcactaccctccaaatcccgctgcagccattgccgcagacacgatgccgaaacgaaagaagcagaatcatcaccagccaccgacacagcagcagcccccgctgcccgagcgggaagagactggagatgaggaggatgggagtcccatcggtgaggggtctgggagggatgtgcacatgcctgtcaagcccgtccgggcaaggggctaggggctaataaggtgcgaaggagggggctgtaacggaaggaggaagggcgcacgcgctggggagggatggaagtggggctctcccaaatggagccttgaaccaggagttctcttactggaaccatcaacctcaatacggccccagacctttctggagaaggcgggggtggagagaataaagagctcttttgcgcagccgcagaacagtaggggaaaggggtagtagagatgttgcagattgcgatgactgggatgacagtttgtatccagactttgactgaaaaggtacaggtgcagctttctctaaactagtcctctggccagcagttaaggtgagggattggttcatgtctggagacacttaggttgttttggatagcgacggtacggtgaagaaaaaaagttgtcagtatcttttcctgcattatcccctttgattgaatatctactttttgcaaaccctgaaacagctttgcagaaaaaagggcagatagatggggtgagaactcccaagactgctgaaaatatacctgactttactggttgaattaagaaataagtaatacaagaaaaacacctaagaacagaatcatcagtcctttaatccattctgatgaccatattttcatgtctgctcttaggaccacccagccttctgggccctccccccatggccaatggaaaacctggcgaccctaagtcaggtgaggaggaaggggccctgatccttgtattaggtcgtagagaagacagcaagggaggggataaaacccaggaaggacttaaaaataaaagatcagggattccatccctaaatgaatggagagaagttgtatatttgctgatttaaaaactcaatgttgtaaaaatgtcacttcttcccaaattgataaacagatttcatgcattccaagtcagaacacccataatgtttttgtggaaatacacattattatagggaaatgcaaaatatcaaggcgactatcaagacaatcttgaagtgggagggcttactatgaatatcaaga

SEQ ID NO: 120170 - DNA, 1011 bp, Homo sapiens
ctataatatataaagaactcttccagacaagccatttgaaaaattgacaaaaacacaggacaccttattaaaatggagatctaaatgaactaaaggtctaaatgaacaagtactcaatatcattaattgtcaagtaaatgcaagataaaaatataccactttgaaattagaactcttgtgtactgctgctgggattataaaatggtgaaactactatagaaaacaatatgaagaggttcctcttaattaaaaatagaactaccagatgacaaaaaaattaaaaatagaattaccccagaactcctgcttccaggtatatatcaaaaaaaaaaaaatggaaagcagggtcttgagatatttgcagactcatgttcatagcagcagtattcacaataacaaagaggtggaagcaacccacatgtccactgatggaaggataaatgtggcgtgtacatacaatggaatattattcagccttatgaaggaagaaagtgctgtcacatactacaacatggatgaactttgaggactttatgttaagtaaagacatagtgtattattccacttatctgaggtgtctaaagtcaaattcaggggctgggcatggtgcttcacgcctgtaatcccagcactttgggaggccaaggcaggcagatcacttgaggtcaggagttcgagaacagcctggccaatatggcaaaaccctgtctctactaaaaatagaaaaattagctgggcatggtggtgcacacctgtaatcccagctactcgggtagctgaggcatgagaattgcttgaacctgggaggcagaggttgcagtgagtcgagatcacgccactgcactccagcctggatgacagagcaagattgtcaaaacaaaaaataaaaataaagtcaacttcaaagaaacagtagaatgatggttaccagaggctgggggaaggaagctggaggaaggggagttttgtttaatgggtacagagtttcagttttgcaagataaaaaacttt

SEQ ID NO: 120171 - DNA, 1121 bp, Homo sapiens
agctgcttgtgaaactcagccaggttgtctaacctggggtcaagtttgggtgactggtgcagagttacttcctaaaaggccactctccctgcctttggatttcatagtttctctgtcagtagcatgatccccaccgctatggtctatctatgatcaccgtgctttgtgaaactgtgcatccccttgtagcctttctcagtgtccgtggcatttttgtgacttcccagcactagaataagttttcctgccaaaatgagtgaggcgcttggtgccctctggactttcccacttcccaacatgggagaattgtgaactttccatcagactgcctccctggccctccccattcttctcctgttggttattctgagtctgacacagacccatgacatgtcttataaagcctccaatggctttatcctacctagatcccttccagcccattttaattagactatgtcattgtgaggccaccagtccattcatttgaattctgtgaatctccaccttgcctatctttgggtagaagctggacagtactgttgccctcttccaatcctcttcccctacatccctggcactggttgttttctgtgaaaacagcagtgaacaggttcagttttgaactggccctgaggaaatgggtcaggagttgtattggcaagagggaggggtgagagctgttggagaactgagaatgaggttttttttttttttttctttttaactttttttatattagtaataaatgcagtggaaaccagcattttatttaatccctgtgttctagtcatctctggagttgcagatgaagctgttctcacctggtggagtcagcttattctttagttcatacacactagtgatggggaatgacaaagcttaaggttcttccaggctgaaaaaaaccaatggaggttccattagcctgtaggcatcaaccagaacaagctgccttatgttcaagggcaaagttttgtaagaaaaaggaaaggccaggtgtccgtggagttatttttaaatattttactttgcagagtttgtgtttatggagtggtaatgatgaaggagtctttcagcagcaatttgcagaatgcctgtgggccaggcaatataccaag

SEQ ID NO: 120172 - DNA, 1679 bp, Homo sapiens
actcctcattacttcagttatttgcttaaatgccatcttcttagagaggccgccaccagagatgaagccagcctctcccccaccaccaagtaggctttaccttttcttttggaaccttcagtacacctggaattacctatttaaaaatctctcttcctatagcctgcaagctccagaggagaccacatttgtcttgttcattgctatgatcccctacgctagcacaatatctgacacatggtagctgtttagtagatacttagtggatgaatgaatagagatgggaatgattatttctgcaggagttgtgagacagtacaaatatttaaggagtgatagttaagctagaaaaataataaaataggatagaggctacagagatctttgcaggggggatcagactgctttggaatttgcagataagcattcacgatgtccgcttaactttctagacaaagtggtgaagaaagggaagaaggacaagaagatcaaaaaaacggtgagaaaatgagggttgaggataagaaatgactatggatgtttccaagctaaataaatagccatgtgaaggaggtgggaggtccaagggaggagaaaagatcttgtcaagagaggagataggcagggcacggtggcttacacctgtaatcccagcgcttagggaggcagaggtgggaggatagcttaagcccaggaatttgagacctgcacactccattctccacaaaaagaaaaaaaagagagagacaggaggtaaggtgagggtggagtggagggccagtgggccaatgtgtggcagagcacagcctgcttggattgctcttggaaacatgtttacctgtagcttaactccctttatagttctttgaagagctggcagtagaagataaacaggctggggaagaagagaaagtgctcaaggagaaggagcagcagcagcagcaacagcaacagcaggtacaagtgccacagggcccaccaatcctgggaggcatctgggttccaccaacccctttccagcccatgttgctccattcagctgatggggaaccctctgtgaggcagaaatacagcaggggcctgggcttcattttctcactgttcttttgctctcagcagcaaaaaaaaaagcgagatacccgaaaaggcaggcggaagaaggatgtggatgatgatggagaagagaaagagctcatggagcgtcttaagaagctctcagtgccaaccagtgatgaggaggatgaaggtaaatgacctgagggggaatgggtacctggaatccatgagtcatggagagtgatacctcataccctgatcttcaagttggattcaattggggggccagacattgtaattctttcctatctcatgttctccccctgtcatttcagtacccgccccaaaaccccgcggagggaagaaaaccaaggtaagccatctgtgtggtaaacggagactccaaggatgcaaccttgaccatcctactgacttctgtggccctttcattctctagggtggtaatgtttttgcagccctgattcaggatcagagtgaggaagaggaggaggaagaaaaacatcctcctaagcctgccaagccggagaagaatcggatcaataaggtgacagtggtggctcgatcagtcactctcactccatttagcaccttctggccatggt

SEQ ID NO: 120173 - DNA, 1050 bp, Homo sapiens
tccaagtaaaacaatcggagtaagaaaataattgtgttctgtgaaccttatctcaatgtctgatgacatgggctgtttcactttggggttttttgtttattttttgagacagggtctcacactgttactcaggctggagtgcaatgacgtgatctctgttcactgcagcctcaacctaccaggctcaagtgatcctcccacctcagcctcccgaatagctgagactatgggtggcaccaccatgcctggctaatttttgtattttttgtagagacagtattttagcatgttggccaggctggtctcaaactcctgagctcaagagatccacctacctcagcctcccagagtgctgggattacaggcgtgagccagcatgcccagccagcatgggctgtttcatggtgatgggaaactggtagactgtggcttcaaatgtagtttttcctaccttctcagatggagtatgagcgccaagtggcttcattaaaagcagccaatgcagctgaaaatgacttctccgtgtcccaggcggagatgtcctcccgccaagccatgttagaaaatgcatctgacatcaaggtaaggtctcaaggggccccttccagtccacttacctagggaagagccagttctctcatcttccctgagtggctgtggtgtgtgaatgggttagttcagtgggaagaaagattggaggcattttccacaccttaggttctgccaacttgagcaagaagatagaaaaaccagtagaagtggggtccacccttggcagaaaatagtgtgggacagactagactagctgaggatgcatggggctcccattacaggcagcgaacagggcggggaccggctgtggggagaggaaggggattatgctggaggtagcggtttgtcagaggcttccctgcagggagaaagtggccgctcctgtcccaaagggagaattttcatgtgatcatcccttccctctgccacctctttcctgatggctgcagctggagaagttcagcatctccgctcatggcaaggagctgttcgtcaatg

SEQ ID NO: 120174 - DNA, 2502 bp, Homo sapiens
ccagccaagaatagaagaaattgtggctatggagttggaagggatgtggagggagactggagaccgggaaagggatgctaaggaaaggaggggagggtcaatgaggaacttgagagtgttttatttggaacaagtacaaagagctgggcagggtcaggcaaaacagaaatgtaattgaagggaaagaaagatgagactcttggctcttgaggctgcctgactgttctccctctgcctcccagaggtggtagcagatgagacaccagcagtccaggctgttcttcgagctgacaccaagcgattgaagctgctggaagaggagcggcggcttcagggacagctggaacaaggggatgacacagctgctgagaggctagagaaggtagaggagatggcgcaggggacacgggcaaagacttgggggttcctgggaccctcagacgtgtgtcctcttctccctcctcccaggtgtatgaggaattgcgggccactggggcggcagctgcagaggccaaagcacggcggatcctggctggcctgggctttgaccctgaaatgcagaatcgacccacacagaagttctcagggggctggcgcatgcgtgtctccctggccaggtgggccattcacctcactgccctcccttccagcctcagaccaccggggcccttttcctctttcccttctcattcttccaaggccaatagggaggctcaaggcttacctctccctccttactatctgtgttgtgagaacttagggtctttctctatttatctccctacttggtggtgagttctcatcaacataccctgcagctgggtgcaatgggtcacgcctgtaatcccagcactttggaaggcagaggcaggaggattatcttcaacccaggagtttgagaccagcctgggcaatatagtgagactctatcttcacaaaagggggaagaaaacatatcctagcctgggcaacatagggagaccctgtctctacaaaaaatttaaagatcagctggatatggtggcgcacgctgtggtcacagctactctggaggctgaagtagaagtatcacttagacctgggagatttagactacagtgagcccttattgtgccactgcacgacagcctgggcaacagggcgagaccctgtctcaaaaaaattaaaccgtatcctgcccgagaacttctctgaggagagcttgggaaggagtgttcatggtctcaggctctatctccgagttttctctggggttgtctgagcaaggatctttctctccctgaccctgccctctgctacccaccctctagggcactgttcatggagcccacactgctgatgctggatgagcccaccaaccacctggacctcaacgctgtcatctggcttaataagtgcgttacggcctttgcatcattggttcccattctgcactttcttccccttccctccctgccctgttttcctttagcccttctccactgtgcctgtgagtggagctctattcagacccccctttccctcccagcccccgttgtctgcctgcttcctctgaattctctctcacttgaccactgtgacacttacaccctgttctctgaaacccagctacctccagggctggcggaagaccttgctgatcgtctcccatgaccagggcttcttggatgatgtctgcactgatatcatccacctcgatgcccagcggctccactactataggggcaattacagtaagtaggattgtgtgtggatgcagggaagagatagaacctcgaaaagaggcctgagtgggagggcctatttagataaactgaatcctgtcagaattccagacagtgatgcctaccccatcaccaccagtccctggttgtccctttgctgggaagaggagcaaccactgatgcctggtcccctcttctgccccagtgaccttcaaaaagatgtaccagcagaagcagaaagaactgctgaaacagtatgagaagcaagagaaaaagctgaaggagctgaaggcaggcgggaagtccaccaagcaggcggtgagcacctgagggacttctgggctgggggccactgttctctcctggcagtggaggaagaaggagactctggaacgctggcctacatttcaaggactgccgcgcagggctcaggtttctcttttttcctcttcctctccaggaaaaacaaacgaaggaagccctgactcggaagcagcagaaatgccgacggaaaaaccaagatgaggaatcccaggaggcccctgagctcctgaagcgccctaaggagtacactgtgcgcttcacttttccagaccccccaccactcagccctccagtgctgggtctgcatggtgagtgccgcgggcctctgctgctccacaggaagcaccggaagcatgtatgtgcaccctaaattctccaccaaggctgagattgctcctgttctccaaggccagcacatgagagggactttgcagggactgaaaagaatataaat

SEQ ID NO: 120175 - DNA, 1074 bp, Homo sapiens
caaatcgatggtgactttgaagactacaagcgggaggtgttggaggccctgggtgaagtcatggtcagccggccccgagagtgagctttccttcccagaagtctcccgagagacatatttgtgtggcctagaagtcctctgtggtctcccctcctctgaagactgcctctggcctgcagctgacctggcaaccattcaggcacatgaaggtggagtgtgaccttgatgtgaccgggatcccactctgattgcatccatttctctgaaagacttgtttgttctgcttctcttcatataactgagctggccttatccttggcatccccctaaacaaacaagaggtgaccaccttattgtgaggttccatccagccaagtttatgtggcctattgtctcaggactctcatcactcagaagcctgcctctgatttaccctacagcttcaggcccagctgccccccagtctttgggtggtgctgttcttttctggtggatttaatgctgactcactggtacaaacagctgttgaagctcagagctggaggtgagcttctgaggcctttgccattatccagcccaagatttggtgcctgcagcctcttgtctggttgaggacttggggcaggaaaggaatgctgctgaacttgaatttccctttacaaggggaagaaataaaggaaaggagttgctgccgacctgtcactgtttggagattgatgggagttggaactgttctcagtcttgatttgctttattcagttttctagcagcttttaatagtcccctcttccccactaaatggatcttgtttgcagtcttgctgacagtgtttgctgtttaaggatcataggattcctttcccccaacccttcacgcaaggaaaaagcaaagtgattcataccttctatcttggaacatgggtctctttcctttttttttttttttttttttttgacagaatcttgccctttcactcaggctggagtgcagtggcatgatcttggctcactgcagcctccacctcctgggttcaagcaattttcctgcctcagcctcccgagtagctgggattac

SEQ ID NO: 120176 - DNA, 1045 bp, Homo sapiens
aagtggtggacatcgtccccatgaaggccctggacacggggggccccatggccaccggcctcatgatgtccctggtcaccgaggccatgaccatcgagggccgccacctcatgagcaccgtggccatgatggtcctggccacgggggagggggccaccgagggcacgatggaggccacagccatggaggaggtgaggatgctccctgtcccccatatgccttttggttgtcccatacaagcttttggggagtgggtgagagtcactactgttggtagctaggcagaacgtgaggtacccgtctctttgatgtcctagtatgcatagcagttcctactctatgcccttcccccaaatccccaagattgtctctgaaagacagttctcaggatgtcatggacaaggggtggtgagggtggcattgccctcagctatttcctgtctaactgttttgccatcgttcccacagacatgtcaaaccgccctgtctgccgacatttcatgatgaagggcaactgccgctatgagaacaactgtgccttctaccacccgggtgtcaatgggccccccctgccctagggaccatttgcctgccctgttcacacaacccctgtggactgcagcctcgctctttccaccctgttatggcttctgtgaggcccattttcccttttccccagctgatgaggagccggccccctcagttcccacttgcttgggttcctgggggttttctgatcactggtgcgcattgatgtacatattttcctccagtctggggaggagagagactggaaacgttcctggactgctgaagaggagacccagttggcttcactttttgagaagattcgccctgtaccccaaacccctttccagtattacccttaatgcttgagaacctaaagctggttatcctggcgaacacccctacccttctattgcgggtccccacatgcacacagaactctgacacaggatcagctgcacttaagaaatcatcccagctaagttcattattcctcatggggtggggagatgctgaa

SEQ ID NO: 120177 - DNA, 2167 bp, Homo sapiens
acgtagctgctccaggagatgccactccccctgcagagaagaaatacaagccactcaacacaacacctaatgccaccaaagagatcaaagtgaagatcatcccgccacagcgtgagtctaaagtggggaagatgtactttgaattaggagcaaacttttttttttttttttttggagacagagtctcactctgtcacccaggctggagtgcagtggcacggtcttggctcactgcaagctccgcctcccgggttcacgccattctcctgcctcagcctcccgagtagctgggactactggtgcccgccaccacgcccggctaattttttgtatttttagtagagatggggtttcaccatgttagccaggatggtcttgatttcctgacctcgtgatccacccacctcagcttcccaaagtgctgggattacaggcatgagccaccgcacctggccaggagcaaactcttatgggaatgaatgtccctgggaacgagaagttttttcccttctcttttattatttccctccattttcctttgatttcttggtatcccttactttttgtacctctggaactcccgtttcaggggtcacttaggagtaattttagagataagatagggacgtgtgccattctgtgactggtcaggggcacctggtaaggtgatctgtcatgttcacaagggctcacttcgtcagctacctgagctataattcacatccaaagctatggcttgcctgccatgagaaacctagaataacaacaagaatatcctgtgtgaatcctcctgcatgtgcttcctggtcctcttgagcttatcgtgtcctaagttgaggcagggtcttcactggctcattttatgcctggactgtgtttgcaggtgtaggattatgaaggaggtctgatgatgccatttggtgctctttctttttgtagctatggagggcctgggctttctggatgctcttaattcagcccctgttccaggcatcaaaattaagaagaaaaaaaaagtactgtcacctacggctgccaaggtatgggctcccagaagtaggtttcagtgacagagtataaaaggtaaagtagaagaaagggcacagcagctaggagttgtcggggaggacaacaagaggcgttttgccttggatatagactggtgcaggtgagacattgtggagacagagtcttcctttatataggaactgttgggggactgtgcctgggaccctggactaattgccttgcccttggctttccagtcagttcattaacttccttttctttcacaatagccaagcccctttgaagggaaaacgagcacagaaccaagcacagccaaaccttcttccccagaaccagcaccaccttctgaggcaatggacgcagaccgtccaggcaccccggttccccctgttgaagtcccggagctcatggatacaggtaatctagaaactggttcagtttggggggttttctgaaaggagggatctgggtctgaaacctcttctgcttccagcctctttggagccaggagctctggatgccaagccagtggagagtcctggagatcctaaccaactgacccggaaaggcaggaagaggaaaagtgtgacatggcctgaggaaggcaaactgagagaatatttctattttgaattggatgaaactgaacgaggtaagaggtcatttcctacgtaataggtgtgtttaagggattttgaaaggacttggttgtgcttactttccctcttgcttttcttcccctgccgacagtaaatgtgaataagatcaaggactttggtgaggcggctaagcgagagatactgtcagaccgacatgcatttgagacagcgcggcgtctgagccatgataacatggaggagaaggtgccctgggtgtgcccccggcccctggttctgccctcacctcttgtcacccctggaagcaatagtcaggagcgatatatccaggctgagcgggagaagggaatccttcaggagctcttcctgaacaaggagaggtgagcagagtggggttcgtgccctgggatgttgagtgcttggacactcctgagggaacatgagctggggtaattacggggtggaggttagaaattactttcagggtctgaattaataacttgactatcattcttttttct

SEQ ID NO: 120178 - DNA, 2276 bp, Homo sapiens
gtctaggaggacctgcttgatttccatgcatccatttgtctcaatctctggcacctactcccagatctccttagggagggattctgttttcaagttttgttttgttctccatcatctaccacttcagctgatacatatcttgccatgtgtagtgattatgactcttaatgggctaagataaaaaggactcaagtcttataagacatttagctcaaacacccaagattggcccaatttctatcaagctataggctgtttttcaagccaaatttatcagcaactagggaagacaggacttaacgataggtgtaaatgccctggagagttgaacatcttgttatgggaactgatcttagctttaatacgatctagtgaagttcagccatcctaggaaggatgctgctgggagggagggacaggtgtgctgccctactcctccaatcgaattgctttcctgttcagtcacatatgctccccatgcttaacttgccagggctattttctcagtagtggcaagtggtctgtgtcgatttttcatatctaaaaaatagcatagttgaataattagtcattatactttgtcaaatatagagatgtggtttattagagggcctactcgggtagtccttgccacccatttattctgtgggtttgtttgttttgtcctcttaccatagaaaccaccatcatgggttcgggtcccatagaccccaaagaacttctcaagggcctggacagcttccttaaccgagatggggaagtcaaaagtgtggatgggatttccaagatcttcaggtgagtctttacccctttttgtattcactgtgagtagagaatattgtgtgttaaaacatggctgcagttgaggcacactggaatgatcctggaaaggaaagggaaagatagtcagtgcaataggattaaaatgtaacaattttaggataagggataggaaaagatgatcacttgtttctgaccataatggaaactggagatttggacgtccacggtcccaagggagtcatgctttggaatgagagcagggtagcctggtaacagaattctagattgttttggttcgtgttccacctacccataatgttattttccttcagggattctcaggtttttcaggggagagtaaataactaagccagtcttgaacagactattagggacagttgttgagggatagccttatcacctggaggcagaatggaattcatcctgtgtgttacggaggcagcgatgctctcctccccaggtcagagactgcggtgtctctgttctcccataagtttccatgtcacactggatccatcccatcttcctagaggtatatgtgactccccttctctggagcaaagtcccaagtcattaggaatctctaggcagttcacagagaggcgcttttgctaagagaagagatactggctgcttcatttctaaccctaactcatcttctgcagtttgatgaaggaagcacgaaagatggtgagtcgatgcacttacttgaacattctcctgcagacccgttcaccagaaatattggtcaagtaagtggggatctggatggttggaatgggaaggtgtagcgaaaagatggggcggtgaggcatggggttcctcggtcattgatgggagactgggattgtaggatgtggtactgtcaaaacctagaaagggcattactgatagactctcctgcctgcctgcagatttattgacgttggcggctacaaacttcttaacaattggctgacgtattcaaagacaaccaacaacattcccctcctccagcaaattctactgaccctgcagcatctaccgctcactgtagaccatctcaagcaggtacctttagtctttaaaccctgattcttccttttttggtttagtctaatggatgaaaaactcaaactgactgatgtggctgtaatcttgggcctgtgaggtagaacagcagaaaaaaaataggaatttagaagaagaagacttggtttgaatttatctcctttaataggtgtgtggcggctgggcacggtggctcacgcctgtgatcccagcactttgagaggctgaggcgggcggatcatgaggtcaggagactgagaccatcctggctgacgtggtgaaaccccgtctccactaaaaatacaaaaaattagccaggcatggtggcatgcgcctgtagtcccagctaatcaggaggctgaggctggagaatcgcttgaacccaggaggtggaggttattgtgagccgagatcgcaccact

SEQ ID NO: 120179 - DNA, 3171 bp, Homo sapiens
tgtgtagttctagtttttatagaaccagtttttattttcactttccttcactcatcacaactgcttgtaatttttccccacttcagctgccaggggtgaaaaaacaggcaaacctaagactgggaagctttgaggatgtgtgtgagcgtgtgtgtatgtatatatgtgtgtagagggagatgggaaagacacaagggcttgcaagagtaacttggagataaacgggcctaatgacactgaagtgtgccatttctgcttaggaaccagtgggcctcctgcatttggtcgctttgtgtaatgagaatcgggggaaggtgggtacttttaggactttcttctaaatcgccctcattcccacctctcagtttggggataaactgtattcagtgctgtatcacgttctgcacttgattagttcctgtacattggtactaggataagaagtgaatctttaggaaaggaggcggcagttgtaaactcaaggcagggggaatcaagctacggtttctggtaagcaaaacctttctggtattacatttcacaactttcattttttttttttccccaaagagccaccttttttgaatttctttttccttcccttctaaaagaaattcctaaaagcattaatgaaaaaatgatgtcctcttcatttttcaactcatgcagtgctgtggcatttggtgcatgttcagaagccatgccctatctgagggtggtattgggtgtctggttcctttcttcccccaaatttttcaaagtcaaatctttatcagactctccatataattttaatttttaaaagtcctgcactgaagcgtggaggttctaggcagaattggaaagtataactgccctctggtgacctgggtgagacttagggctaacttcctactgggtacagattctcaaattattacttaagcttctggattggatgggagggactcttcacatgtctgttgactacaagctttttttgttttgttttgtttttttcttttaagcagtttgccatgtgcctctgcagcatatcttccttgggagctgaacattctacccactggggttcctgatctctagtgagccaggggattaataaagaagatcttccttaacatgggagatgggaagccaggtctactaggggaaccacatccattcagaaaatcttggaaaacctgatccttgtagtttgtggccagagttctagtctggggtctttttctatgagtcagggtggtatatcattttgcatctttattggaaggcagataagcttttgaggagctcatgtatcaggtttgcaaaatgactgaggggtaggggcttactacttggaagaaagctatgaccttgtgatgaatcacctgagagacataattcagtccactattgtgtcaaactaggaagtgcctaaaacactgaagaaaggaaggggaacataaggggttaggtacaaatcattttcatttccagaagtgcctctaaattaaggtaaatttgggacttttttctccttttgttagaagacagttattttttaaagagctctgacttgcacagaatttttatcctgaaccaattcagtcctgtttcattggtgatgggtgtggaataactttagctatgctggatattttttcaccctatttaattgaataaccctcaagtaaaattcattttgaaggcaggagttggtgtcacagacgtttatctctggtaaaaatggtagaaaattccccaatgccttgtgccagtagagtatggctctgcctgaaacattctccataaggaacgcatagcttaggatgaggtggaggtaggccagggggttgctacctcactccccaccttctgtatgttctgcagtcaagaaaatagcagctcattaaaagaagacataatcatgccgtggattacttgtggttccagaaagctttcttaagctttcattctagactccagatcttgagtaggtaatgttacaacacttagtcacggcccctgcctgccttcatcaactcagtttgccttctctgctgtagccctgtgcccgaaatgttggactttacattcctttccacttgagcgccttggaaattgtttggtttttttccaaaatatactgacttcaaagcaaggaaactaggttataagacacttggggtccttaattttaaataagaactaatcttcctgaaggaaggccatcatgagaaaacccacttacattttatcaagattggtgctcatgagacaaaatttcacttatatttccaaaatataagtagtggaaaatgaatatttaacgctaattttgctttgtctcttagcttccctttgactattaatgtcttttattcttgtttatacatgtgggaataaaaaagtccctggatcccatttccagcagagggcactggacagaatttagctttgtactcattggtccatttttctaagactggctcttctttcttgtctcccatcctcttaaggaacacttgagctcagatgacagtttatttagtgtctgaaggaaataggggtagtaggtctatttattggcttagcttgtagttggatatgcaaaaaggaattctccagggttatatatattcaactctgggtttgaatcagtcaagggtaactggtttgaaatgatgtttaattcaaggccttttgtcaaattgcatatattttgctttaggaatctaatggtaggtatgtgtgtatatatagagagagggagttttaaaaatttcttagtctcttgattgcttatgatatgttgttattggaacccatacattgcttttccagtctccaacagatgtgatatctgttttatgtgtccctttatcgtatctctttatagtttctatagatcactttatagtatctcactacatgggaagaatacctttatttctgtgtctgtctctgtgtgtgtaggaatcaccacacttgagtggatttggcccacggacatctaatcttttccagtattctccttgaatgttttttctctgacctcaggttccacttgtatttgtggaggttccagggcagcagcgacttctcaacatttcttgcctcatctctccctctgttcagcccacaggttatgatctccagagccaagattatactcctacccttcctggc

SEQ ID NO: 120180 - DNA, 2431 bp, Homo sapiens
gctcttaggtttctaccaatcctgggtgagaaatgttctccagggcggaagtggcggaagcagaggaaagggaggtgctaggctcctggtcacgcgcacgcgacagggaggcaggaaggaggcggaagagagtgccagggaaaggggcggagcaaaggtgaagtgagagtagccaatcagttggcgagttgtcatttgggttgaccaatgagttcacgcctcgcgtataatgtctcgcgacaagggcgtttcactagcacgtttgggcgcgttgggcggcgtccgggtataaaagactccacccgagcgggcggccgccattctggggttcgtttagaggtaagtttgcctactttgtcgtctagtgggtaaaattttgcggagagcgttggatctgggaagcgggatagggatggatgggttcatttgagagccacggcttaaagcggttgcgatcaggatgggacacaggtttgtttggggacaacaaagatggcatttgtgagtgttttgaagcaacccgtactgattacatctttctcccttgtgttccttttatcccaggtttgaattttctcggagaaagacaggccggccacgaggaaaacagaaacaagccgcagcaacatctaagcccttgaaaggatcctgagagaggggggaaagggaaaacagcagccaccagcccaaccacttgtgtcttctgccccttcccacctatcttgcccaccccaccagcccacgctgcttgggacttgaaatctgtggccgaaggaccgtcactacataacttcaaaaataatcaaccaccctcccttcccaaaccacccaaattcactcatccagcgtttacttttttgaatccactcagaacttttttctgcgacccccctccctaaatggagttgggtgggggggaaatgaatactgagttggcctttattttttaaaagactttttgatccaatgaggccccctaaataattgagttttgggtcctggttggttgttttattttttttcctccaaaattttaccccctcccccctgagcccgaggtgctgacgtcgcaaaaaaattggatagtaagtgtcgaattttcaaaaaccagccttgcaacaagaaatcaacgtttcccgttgtgaaaccaaaaataatgagaggaagaaatgagaccatagaacaaatagagaactggagaaggaccaatctggtcacttaatctccattaaaaagggcctgtgggtctaaacagtcttgttctctctcccctaccacctatctcttccctgccttgctgcaggcaaagagagggtggagggagggccagcaagtgaggattttgatggttaacccttggtaatccagccaatttccagactgccaaagccatatgtgtttatataaggaggaatggttaccttcctctggttagcagcagtcttcaaaagggttaatgagctcacatacaagagatggtggatcttgtggcccagaagtaccacttctttgtgtgtgagacaagcagggtgcctttcaatttgccagattaataagcaatctgtacataaagattgcagggtaaggagatgggcagagagaagtaatagctcgctataactttttaaatgactgttaaatcctctcaattttaatgtaatttgcttggggtatatttgtgtggttaaaataggtggcaatctaggaataaagattgcaagacacttaggacaaaatataatcttagtgccagtacatacaagataatagttggggaggtaaagaatgtcttataattgttgcagattgcataggtatttaaaagcaaaagagtgattaacattttaacttgatattttttggtgggggaggtacagttaaatagagggtggaaaggttgggaaatgtggaatttaggagtataattttaaaagccatttagtgcaattgaatgctagctttctaaaagatttgtgtcgttaaaaggaatttttttcttccctgcttcaatatggcgactttccttgtccttttgtcttccaagcggcgttgcaggttgtgtcttgacccattttttttcctgtcctcccacctcaaccctatttgttgagaggggtccaagtccttcctccccctttccctctatagggaggatgggggtggtcgatggtagccggttgaacctccgttgcaaattcagttcttccctgcagaaaattgttctttttaatattttaattgctttaattttcactacgctcttactgatcaaaataggtcaaagattattcacgatggggaactggtttttgattttttttttttttttttttactaaaaaggtgttttataatgtaactgaagctaccggcagagccgggtggctttttagtttaagtcctctttctccattacaaaatggcgtccctcc

SEQ ID NO: 120181 - DNA, 1034 bp, Homo sapiens
caaaaaagtaaacgctggatgagtgaatttgggtggtttgggaagggagggtggttgattatttttgaagttatgtagtgacggtccttcggccacagatttcaagtcccaagcagcgtgggctggtggggtgggcaagataggtgggaaggggcagaagacacaagtggttgggctggtggctgctgttttccctttcccccctctctcaggatcctttcaagggcttagatgttgctgcggcttgtttctgttttcctcgtggccggcctgtctttctccgagaaaattcaaacctgggataaaaggaacacaagggagaaagatgtaatcagtacgggttgcttcaaaacactcacaaatgccatctttgttgtccccaaacaaacctgtgtcccatcctgatcgcaaccgctttaagccgtggctctcaaatgaacccatccatccctatcccgcttcccagatccaacgctctccgcaaaattttacccactagacgacaaagtaggcaaacttacctctaaacgaaccccagaatggcggccgcccgctcgggtggagtcttttatacccggacgccgcccaacgcgcccaaacgtgctagtgaaacgcccttgtcgcgagacattatacgcgaggcgtgaactcattggtcaacccaaatgacaactcgccaactgattggctactctcacttcacctttgctccgcccctttccctggcactctcttccgcctccttcctgcctccctgtcgcgtgcgcgtgaccaggagcctagcacctccctttcctctgcttccgccacttccgccctggagaacatttctcacccaggattggtagaaacctaagagcgcatgcgcactgagaggataccgctaaaaatcgccttcaaaattgcttaaaaggcaaactttaacaatgcgatctaagagtcgtagtgactggccaaaaaaaaccgcaattttggggtctaattcgattgtgacgcagttgaaattagcttctcccccatgccttccctttcac

SEQ ID NO: 120182 - DNA, 1072 bp, Homo sapiens
tgacccctgtccaccctcagtcatgcataaccagctttttaaaaattatttaactaattaaggggccatgctaatctctgtatcgttgcaattttagcataacatatgtactccccaagcgagcgccacaaccagctgttaactatgcaagtggtgactaaatctgtgttgctctggaatgtccttggggaaattagggatcccaatttctaccaaccttgctatttctcaataaggtcaggatatattcttacgacctgaggacagtttctcagctctctttattaaatcagtttcttatcggagttatgagagcttaactccgtcctttgaattgaggtttccctccagtcttgtgtactcacctctctggaggttcttggtggggcacggtgagataggaaggcttgcccagctgccactccctaaagtgggactgaagagtggtgacagaggtcaacacagaaataataacagccttggtagctttaaaactagcgttaggactcaagtttgttctgccctgtagaatgttgaccttcagcttttatgaaaatgggcaactcagtgacttcattggattgatttggagactcacctgtcttctgcatcccctccccaccacacatcttagttccaagaacctagatatccttcctcttactttattcttccaccagagtcaatttatttccaaaaagcaagaataccttttatgtactagatttttttttcttttttctttacacgaaatctcactctgttgccaggttggagtgtagtggcgcaatcttggctcactgcaacctccgcctcccgggttcaagtgattctcttgcctcagcctcccgagtagctgggactacaggcgcatgccaccacgccgaactaatttttgtatttttagtagagataaggtttcaccatgttggccaggatggtctcgatgtcttgacctcatgatccgcctgcctgggcctcccaaagtgctgggattacagacgtgagccactgcgcccggccttgtactagactttttatttgtcttctgaaataagattgttttttaggc

SEQ ID NO: 120183 - DNA, 1444 bp, Homo sapiens
gagaccagcctggccaacaaggtgaaacgccgtctctactaaaaatacaaaaaaaattagctgggtgtgatggcgggcgcctgtagtcccagcttctcaggaggctgaggcaggagaatcactggaacctgggagatggaggttacagtgaaccaagattgcaccactgcactccagcctgagcagcagagcgagactccgtctcaaaaacaaaacaaaacagagattataattaattacataactgagagagagaaatgttacaaatttagtagcatgggtgattctgcttgcattctactctacaatgtacctgcttttttttcaagagtctcatttcctagttaatttgctgagagagagttctatgtaaattgtaaaattattcttagtatataaattatattcagcatactattaaatacattagttgtttatacatacacattacaatatcattttttgggtgatttctgggatttccaatgaccagccccagtttttcacctaaaggctgacgttagaacttaacctctgcagcccaggcgcggtggctcatgcctgtaatcccagcactttctgaggccaaggtgggtgtatcactaggtcaggagttcaaggccagcttggccaagatggtgaaaccgcatctctactaaagatacaaaataattagccaggtgtggtggcaggcgcctgtaaccccagctactcgggaggctaaggcagagaattgcttgaacctgggaggcggaggttgtggtgagctgagatcgcgccactgcactccagcctgggcaacacagggagactctgtctcaaaaaaaaaaaaaaaaaaaaaaaaaagaacttaacctctgcataagagatttctatgggagcacagtgacagaatatgggatgtgcaaggatggattcagtgaattgatgaagccaaactgggacatgaaggaggatggcatctggagagctgtagaggggtgaaggtggtccatgtgggtgtgtagggattgtgtactttcgatgtccaaagatcctgctgctctccctgcctcttttcctcacgtttctctaccactttcccccacagaacgtgaagctcttggagcaatttgtctgcgcccacacgggtatcatcttctatgctccatacacaggttagcccatcatccctgcaccaccagagagcttttccttgtggcatgccttgtttatgtagttggccaataggtatttgttcagtggctcctgcttatagcctaaaaggtctggctgaaccttttggaaatcttggcttgctgggggctaaagtaattaaatgtggacaaaagaaaacaacaaatacagccaggcgtggtggctcatgcctgtaatcccagcactttgggaggccgaggcggctggatcacctgaggttgggagttcgagaccagcctgaccaaca

SEQ ID NO: 120184 - DNA, 1825 bp, Homo sapiens
gttacattgtcccctgtcctttctcctgagtgtcttactttatcattgtcctgtctccttgttctttgtctttccatccttttccctcctattttacaactgctggtctcaatgccttaggaagttctttatataaatgtctggccctggactacatggcactgctgcataagttagtaaaaagtatacccctctgctagggcagatgcagcttcatagtccttgttcagcactgcacagctttgtaagcaagagccccagcagtatgtcagcccacacttgccctctgggccggtcacctgtttgcagtatacaacatgcataaatgtacctggtggctctgactggtccttccctttataatcctttttcttacttcatctaaaccaccctcctcattgcctcttaaatttcttttcttttttaatcccttaggtctcctcatttaccacatcccccaggttgaaccacgggaccttgacttcagtacctctcatggggctgtgagtgctactccgccagcccccaccctggtctcaggtgacccctggtacccatggtacaactggaaacagccaccggagagagaactgtctcgccttcgccggctttaccagggtcatctccaagaagagagtggccccccacctgagtcaatgcccaagatgccccctagaacaccagcggaagcctcctccactgggcagacaggccctcagagtgctctgtaggagctgtagactgggaagagaggccaggcgtggtggctcactcctgtaatcccagcactttgggaagccaaggtgggctgatcacttgatcccaggagtttgagaccagcctgggcaccatggtgaaacctcgtctttaccaaaaaatacaaaaattagctgggtgtggtggtgcacacctgtagtctcaactattggggaggctaaggtaggatcacttgatcccaggaggcggaggttgcagtgagttgcagtcacacccctgcactccagcctgggtgacagctagaccctgtctcaaaaaaaaaaaaaaagactgggaagagagctagagggactaggagataatgtgtatgtaggtttatgtgatgggatatcaccctgaagagttgtgtcttttgtggccagtgacaaatccaggaaatgaatgttgctgatagggataaatcttgaggctgagggcgggtggtacagatgtgtatgggaaaccccaacccctatatattgtaaatagatgggctgggctaaacattgttgccgtttcatacttctaccaactcagcttttacacaataaagctctactgtctctggtttgctttgggctgtttccgatgaatgccattagcggggggtgggctgagtgatggtcttttcatataagcaattgggtgatgctgtggggagataagtggtcaggcttaagccagccttgcctgtgacgcctgggactagaagccggggatgggcagctgtgccactctgtcaagatgccttgtgggcccccactccacagcatggcccactgttcactgaggggataaaaggttggacagtgagacactgggccaaggaagactacgttgccatggcactcactgccgtgggatgcagggatggaaaggagtggcactgctaggggcacagctggtttggcaagaaaaacgggggccctgtcagttgccaggacgctagggggcaaggtctacaggcggggctcctggaaataaagactccgagaggcggtgcggcgagaggaggggcggaagtgacgtcgtgtggggcgggtccgaccgcgcacaatgggccatggag

SEQ ID NO: 120185 - DNA, 1661 bp, Homo sapiens
ttcctcacaataaccttaagggaggagggagtgtgccaccttgaaaggtgtgacagaagtttgggtttcagaagggtggggtgggaaatcagattggaagactcccaggcaaaggcagggagccttcagtgttaaacctgggttggagttgtggcccaggttcccaggactgactgcctaggacccgctaatttagtgagtatctgactctttatttcttctctttctctagtgttgatctacagcagcaaattatgaccattatagatgaactgggcaaggcttctgccaaggtactggagagtttttagatggagtaaagggaggacctctgtggggatggtatataagggaggcctgggtccttcggagagacttgcagaaagtctgacttaatcttccctgcaggcccagaatctttccgctcctatcactagtgcatcaaggatgcagagtaaccgccatgttgtttatattctcaaagacagttcagcccgaccgtgagtgccacatgctcttccatcccatacttaattccttccttcctcagcccttcccccatctttgactatctcttgcagatagataccactagcctgttcattattttccccgtcctacagggctggaaaaggagccattattggtttcatcaaagttggatacaagaagctctttgtactggtgagtgttattggatgctaggagttcgtataccttggtttctgagaacaaaagtgctggaggttagggggcagcagagatgccggggttcctaaaacatttttattgtttctctcttaggatgatcgtgaggctcataatgaggtagaaccactttgcatcctggacttttacatccatgagtctgtgcaacgccatggccatgggcgagaactcttccagtatatgttgcaggtatcactgacctcttcactggttcatccaaactaggggctcctttgccctgagcccttccagaagccctgcctcccaccccccatgttcccatgtcattctattcccttcccaggcttctggcttcctgttggcatgctttccccatacttcctcctaccctgagtctccttttccctgcagaaggagcgagtggaaccgcaccaactggcaattgaccgaccctcacagaagctgctgaaattcctgaataagcactacaatctggagaccacagtcccacaggttagaggtttcagagaatagatccccactgagcattcccattgaatttatttgttatttatggcaaagaagtagtgacttatttcctatcacataggtttcattttctacaaccaggctctttctttctcttgtggtaccatctctcatcctgtagtgacttctttctcatctattttgatttttttttttgagatggagtctcgccatgctgcccaggctggagtacagtggcgcaatctcagctcactgcaacctccacttcctggtttcaagcgattctcctgcttcagcctcctgagtagctgggactacaggcacccaccaccacacccagctaatttttatatctttagtggagacggagttacaccatactggccaggctggtctcaaactcctgaccttgtgatctgcccgccttggcctcccaaaatgctgggattacaggtgtgagc

SEQ ID NO: 120186 - DNA, 1026 bp, Homo sapiens
tcaagtgatgtgcccacctcagcctcccaaaagtgctgggattacaggtgtgagccaccgcacacaacccttatgcctaatttttttttgagacagagtcgctctgtcacccaggctggagtgcagtggcacgatctcagctcactgcaagctccgcctcccaggttcacggcattctcctgcctcagcctcccgagtagctgggactacaggtgcccaccaccatacccagctaattttttgtatttttagtagagatggggtttcaccgtgttagccaggatggtctagatctcctgaccttgtgatctgcccgcctcggcctcccaaagtgctgggattacaggcgtgagccaccgtgcccgaccccttatgactaattttcaacccaaacatagccagctcattttcacctccttgttttcacatagttcattactcatctggtcagtcagtatttattaagggtccagaataatatgcattccctgtcctcatggagctttggcctaatatagggaaggaagtcttgtttataactaagtgcagcaaaatgttactaatgctacccattcatccaataaacattgagtgcctggcagtgttctgggcactaggaatggtttactcaatgaaacagacaacagcctgggcaacatagcgaaactctgtctctacaaaaaatacaaaaaaaaattagccaggcgtggtggcacgagcctgtagtcccagctacttgggaggctgaaatgggagaatcgcttgagcctgggaggcagaggttgcagtgagccaagatcgcgccactgcattatagcctgggcaacagagagagaccctgtctccaaaaatgaaaacaaaaacagaaaaaaaggccaggtgcggtgcggtggcccatgcccgtaatcccagcactttgggaggctgacgtgggcgaatcacttgaggtcaggagtttgagaccagcctggtcaacatggtaaaaccccgtctctattaaaaatacaaaaattagcggggcatgat

SEQ ID NO: 120187 - DNA, 1102 bp, Homo sapiens
ccttctgttggctgctgaccctgggggcagcccagctcaacgtcgtcgcaccaggtaataggagttgaagggctaaggagcctcacagctataaaagaggatgttagaaatggcaaagggcaatttgaatccatcagagagatggatcaataagatgggtggcttggggggggtcctgaaacctttcaagaaaaatatttgtgcaagtgatctgggaaaaaaatgcagtgaaggagcagaataggaccttatatggagcctagggaccctggctttaatgtgagagttatgtggaatggtaggaagaacaccgagatccatcgagttgggggaacagagccttctaagattgggaaaatcttcgcttaatacttgctggggaaggggcagtgtctgacagagagtgggaagccactggcttgtgtgccaagagtccatcgcagcaggcagggagtgggcatttcctttatttctctccctttctcttcacctctgacttctctgtttttctctcccccgccccccgccatttcccatctcccttcctcccatccataacatccttccacagctcccttccccgctctgaggagagtcgatactaacagctaccctctccctgccctgggagacctggggtgggcagggaacccctccctgagaacctcagacccactcttccattgcatcctgtaggacccagtggaacctgacagagcccataggattccctcttctactttcttagacagcagggatgtcagggtctcaaactgcctaacactttgtagcttttcttaacacaaaagcaccccttctctcctaacttgggctctgaatactttcccaacaggaagtctgatctgttgccagacttcttggttagatggctcatacatttatctagagaagcacactcttgcttgctgtcaaactttagaccaccatggaaggtctaagggcatcctgtgccagggaaactttttaaggaattttatctatgggataaaccccatattccctctagtgtctactggtggctctaatactgctttgtgctgcctgccacacttgccctttgagcctgcgaatggccgctagt

SEQ ID NO: 120188 - DNA, 1044 bp, Homo sapiens
catttttgtaaaccatcccagcactttgggaggccaagatcagcccaggcaacatagtgagaccccaactatacaaaaaattaatggtgcactgtgatgtgtgcctgtagtctcagctacttgggaggctgaggcagtaggactgctttgagccatgatacgccactgcagtccagcctgggcaatagagcaagactctgtttcaatttaagaaaaaaaaataacaacaacaaaagatctatgttggaaagaagggaactccattgatcttttctctctcctaggtactggagattgagagcagttggcttctggaggtggctccccattattataaggccaaggagctagaagatccccatgctaagaaaatgcccaaaaaaataggcaaaacacgagaagagctagggtaagagaaggacgtaaacagaacctgacaccagctccttttccttctatacattatttaatacctattaaataaaattatttttggaataaagcttgtgggaacatttgggatctagagaaagtgatatgtgaaattctatctcatatagtcagttaaactttattatttacaagttaaattacacagcagctttacacagcatgagatggaaaggaaggaaggagagaaacgaggagaggaagctggctcctgagattcttggctgcctccacctccttctcttgggcgtagcagtcttcagtgctgcctccactccaaggtcaaggatcagggcttggaacacaggtttaagtcaggttctggctctgacagccccagggccaccagggctcccactagcagcttcttcacaggcgttggaggtgagtgtgaaggcatcagctgcagggagaaaggttaatgccagttgggggaggcacacaaatgttctaccctttaccccacccagccctacctaggactcactttatctagacgatggcgacaaatgaggccactggaattcaggtagaaagtggagtaggcatcataggtcctggggaatagagggaggcttactgagggagaaggtg

SEQ ID NO: 120189 - DNA, 1035 bp, Homo sapiens
acaggcatggaatcgctcactgtcacaccctgcagcaaggtcagcctggggatgcatgggagtgggggaggtggagttggcccacagagaaggtccaactcagaagcagggtgggggcttcctagggaaccgggatgagcagtttgcatccttccagatttcttgcataaatactgcctttttcttttccctgaccaaattgtcagccagcctgttcccctttctttccaggcctcagccaatcagcgagctggcagggcaggtcgggtggctgcagggaagtgcttccgcctgtataccgcctgggcctatcagcacgagcttgaggaaaccacagtgcctgagatccagaggaccagcttgggcaatgtcgtgttgctgctcaagagcttaggtgattgggctacctgagagaggagggaggggctggagtcactgtcctttgaagggactctgttccatccatcacacctctttctagggatccatgacctaatgcactttgatttcctggaccctccaccatatgagacactgctgctggctttggagcagctgtatgctctgggagccctcaaccaccttggggagctcaccacggtgagtcgggggacagcatgggtggaggcaggatgataggggtcaggatggctccagggacccctgtagtagtagcgggaaacctgagggaggactgggctcaactctctctctcttctccttagtctggtcgaaagatggcagagctgccggtggaccccatgctgtccaaaatgatcttagcctctgagaagtaagccctcgcctccacctgggcccccagcacacaaacaggccaggcctcctctgtctccagggtcccctttgtctgtctttttctgttcatcatactatcccttaacacataataaagtattagataactctgattgcccccttttgaggcccacaagggtaagacacttgatcctatccttgattccactgcgcccggccccttgaggaacttacttgttcctaaggtttccaactaga

SEQ ID NO: 120190 - DNA, 1955 bp, Homo sapiens
gactctgtctcaaaaaagaaaaataaataaagtccaaactttcctgtcatcaaaggccctccctaatcttagccccaaattgtttttagccttgtctcctactccttcaccacatgaacctcccactaagcctactagctcacactctgacctcaaacataccttgggccttcctctgatgacttctcagccatttttcttttttgagatggagtctcgcattgtcacccaggctggagtgcagtggcacaatctcagctcactgcaacctcctcctcctgggttcaagcgattctcatgactcagcctcctaaacaggtgggattataggcgcacgccaccatgccctgctgatttttgtattttcagtggaggcagggtttcaccacgttaggcagcctggtttcgaactactgacctcaagtgatccgcccacctcagcctccgaaagtcctgggattacaggcgtgagccaccgcacctgacctcagacatttctcttaaaggtccatatcaaatcccacctcttagcacatcaaggacttcccttctccactgaatctactgtgcatactttccagatcacatatttggctctctcttggttcacaccatatttctcctctcttcagtcccaggaacaagggactggctgctcctcagctgtgtgcagcagtgcgcaggactcaccttgcatggggcaggcacacagctttttcactactagttgtgggaagcataggggtgaagagtgtgggtttctccaactgacctttcgtgccccaggtggtgtgggctggaagatacgggcctgcatgtcagagggcagattggcataaatgggcagcaccaggagctcccggattttggagcccaggcggcggcagcgatcctggagcatctcacaggcagcctcaatctcctcctggatagagggtagggagagcagcaggggtcccagagtcacagaaggccaacatgccggccctgtcttcccctgggatacatcatcccctctccccaccatgtcaggcacctgtcctgtcaggaacaccaggatatccccagggggctgggtcacatggatctgcaacacagatactacacaagcttccaagtagtcagcctctggagcctggagagcagaaagagatggggtcacaggagggccacctgcttaggcaaacctttcctctcctcccaattcaacatacactttatcctagttcccctttgaaccttccattccatctttccctccacaggataaccttctccaaaggcctcagcttttctgccacagacttaagcccatcctccctgagggggcaccttggtgtagaagatgtccacaggaaacctgcgtccggggattcgaaacacaggggcgtcatcaaagaaggtggaaaaacgggcagtgtccattgtggctgaagccaccaggaccttgagctcaggtcggaagcgagcaacatccttgatcaatccaaagagaatgtctgtgtgtagggtcctttcgtgtgcctcatccaccatcaccacgctggggagggaataggagagcaatgagggaagagcgctaggcaatgcagtatcagacaccagagttaactggatgagaggggagtaatggacacaaagagttcaagaatgactgttgacggagggggctctaaggagaagtcagccatcccacttatgtagagcaacagaaagtcagagaaggccagggccccatgatctgcaacctatcccagcctcagcagataataggagacaagatgtagaggctgcacactgaggccaggacaagttagccataccctctagttcagtcaagagtctgcttagactcagcagctgctcttactagaaaaagttgaaggatatgttttaggctgggcatggtggtagctcacgcctgtaatcccagcaccttgggaggccgaggcagg

SEQ ID NO: 120191 - DNA, 1068 bp, Homo sapiens
caatttgtgtgggggggaagggtgggcagaaggcagaggctctcactcattctctaacattattgccccctctcccacagatgagtcctgccggcggtgaccatcttccaacatagggatatacctccctccttcttataactgaagatcctggagcccggaagattcagggcagacagaccctgataatgagcctggcagggaagggcaaccaacatcttgtaacttgctttccccaccctgtttctgggggcagagccaattgcccaatttctaccctaatccaaagtccctggtgtgggtggggttaaacgtgctggtgcatcctaggtcatccaagagtgagcgccaagtcctgagaaggggcacagaactccctggagggtggagatggagcacctgccccccatggcagggtacactctccccacagccttcctccccaccatcccgtggggactctcgggatttaagcactcgtctctctgggaggcccagaccccactccatttataggcacatctccttcatttcctaggtcactgcccctttgtttacagctcctgcctcctcccttgaccacagcctggtttacaaattccatcagctcccagccccacctgccaaagtcccaggtttacaagccacgcttacttgctgtgtctgcgtggaattctctcctctgtcccctccagtctcctcattggagtgacctgaaggtgtggcttcctccactttttctcagtattactttgccttagttttccccaagagggaaggctggaactcttaactctgtaccccttgatagttatttaattctgtttctcctagtggttcacaattgaactgaattgagatggtgtcgggtggctaaggagacacctcacctctccttccccattgtgccgcctttatcaattgcctgttttgttttgtttgttttttaactttccataataaaatggagttctcttcaactcgtctgcttctccttctttgggaaaaaaaaagggtatgtgaggggaggctctggtggctgggggagaggaaaatgatgggggatga

SEQ ID NO: 120192 - DNA, 1002 bp, Homo sapiens
acatttctctcttctccctcacgccaactttccttttcgcccttctctctctttctcacatcctagagacggtctttaatacgcattaaccctgtgctgccacatctggctcctgccctcattgcctccaatccggactcttcctctcacatcacccccaccacccccaacttgggctcacaacttctcttcactttttccatttccccagttctctgccttccgtctttccctctgtcctcatccttagcccctctgccctgctttgtgtcccacctctccccctccacttcctctcctcccaccctcagtctcacccccgggctgtctcactctctggagcctctccttcctgttctctgtccccagtgctccctaccctcacctcaagacgaccatggccaccatcccagactggaagctacagctgctagcccggcgccggcaggaggaggcgtccgttcgaggccgagagaaagcagaacgggagcgcctgtcccagatgccagcctggaaacgagggctcctggagcgccgccgggccaagcttgggctgtcccctggggagcctagccctgtgctagggactgtagaggctggacctccagacccggatgagtctgcggtccttctggaggccatcgggccagtgcaccagaaccgattcatccggcaggagcggcagcagcagcagcagcaacaacaacggagtgaagagctgctagcagagagaaagcctgggcctctggaggcccgggagcggagacccagccctggggagatgcgggatcagagccccaagggaagagagtcaagagaagagagactaagtccgagggagaccagagagaggaggctggggatagggggagcccaagagttgagcctgaggcctctggaggctcgggactggaggcaaagcccaggagaggtgggagacaggagctcccgactgtcagaggcatggaaatggaggctgagtcctggagaaactccagagcg

SEQ ID NO: 120193 - DNA, 1050 bp, Homo sapiens
ggccacctgggtgccgctcctctgctttgtgctccatgtcatctcctggctcctcatctttagcatccttctcgtctttgactatgctgagctcatgggcctcaaacaggtgaggctccgagatccctacctatgacctctgacccattttagaactcctcgttccctttcaagggtttccctcctcccatgctcttctactgtctccctgcttctccctcgtggcccttccctttgactttccctcgtaagggcagcaagcatgggcctcctgggcctggggaaggtacatggatcagaagtcaggatcagggatccaagtctcagaaggggggttcctgggcctgagttctagaagggtggtgcctggaagaggaggaaagaagtgcccaagatgagaaaagggcttgactccatttctaagctcttctccctctcttaggtatactaccatgtgctggggctgggcgagcctctggccctgaagtctccccgggctctcagactcttctcccacctgcgccacccagtgtgtgtggagctgctgacagtgctgtgggtggtgcctaccctgggcacggaccgtctcctccttgctttcctccttaccctctacctgggcctggctcacgggcttgatcagcaagacctccgctacctccgggcccagctacaaagaaaactccacctgctctctcggccccaggatggggaggcagagtgaggagctcactctggttacaagccctgttcttcctctcccactgaattctaaatccttaacatccaggccctggctgcttcatgccagaggcccaaatccatggactgaaggagatgccccttctactacttgagactttattctctgggtccagctccataccctaaattctgagtttcagccactgaactccaaggtccacttctcaccagcaaggaagagtggggtatggaagtcatctgtcccttcactgtttagagcatgacactctccccctcaacagcctcctgagaaggaaaggatctgccctgaccactcccctggca

SEQ ID NO: 120194 - DNA, 1011 bp, Homo sapiens
tatttcttttttttttttctttttttttttcttttgagatggagtcttgctctgtagcccaggctggagtgcagtggcgcgatctcggctcactgcaagctccgcctcctgggttttcacgccattctcctgccccagcctcccgagtagctgggacgacaggcacccgtcagcgcgcccggctaatttttttttttttttttttttgtatttttagtagagacagggtttcaccgtggtcttgatctcctgacctcgtgatccacccgcctcagcctcccaaagtgctgtgtaattacaggcatgagccactgcgcccggcctagcaagagtatttcatagacagtatgcggtgtgcttcacttggcttcatattaggaggtattattttagtgatggtaagactggttagtgggtcctgaacccatttctaggattctttttcacctgattttgcctttgctctgtcttccccagcctcagagagttgtgatcacatgccctcaggacttccctcattgctccattccactacgggttgggctgcccctcctctcgcctgagttcctgctgactggagtgctgaagcaggaagccaagccagaggcctttgtcctctcccctttggagatgtcatccacctgagaactccactacccttttccctcccagaccacgaattagaagatatgtggaagaaagaactcagggcgttagaaaggattggggtatattgatacaacttgtcctggaacatgggtgggaccagaaatctttatgaataaatgaaaagataagggatttggaagccacaggttgttttttgtttgtttgtttgtttttttaatggccattttattttatttgtatttatagttttttatttgtatagatttaggggatacaagatttcttacatgcatgtattaaatggccattttaaaattagctagtttcatgctcagatgtcataagtggcagctatctttagccagactgttgcagttattg

SEQ ID NO: 120195 - DNA, 2831 bp, Homo sapiens
acatctcaggttactaggggaagaaaaagtagatcctctgtcaagacccctgaaacagttgtgcccacagcccttgagctccagccttccacctccaccgaccgacctgtcacctctgaacccacctctcaggctactaggggaagaaaaaatagatcctctgtcaagacccctgaaccagttgtccccacagcccctgagctccagccttccacctccacagaccagcctgtcacttctgagcccacatatcaggctactaggggaagaaaaaatagatcctctgtcaagacccctgaaccagttgtgcccacagcccctgagctccggccttccacctccacagaccgacctgtcacccccaagcccacatctcggaccactaggagcaggacaaatatgtcctctgtcaagacccctgaaacagttgtccccacagcccctgagctccagatttccacctccacagaccaacctgtcacccctaagcccacatctcggaccactaggagcaggacaaatatgtcctctgtgaagaaccctgaatcaactgtccctatagcccctgagctcccaccttccacctccacagagcagcctgtcacccctgagcccacatctcgggctactaggggaagaaaaaatagatcctctggcaagacccctgaaacacttgtccccacagcccctaagctcgagccttccacttccacagaccaacctgtcactcctgagcccacatctcaggccaccaggggcaggacaaataggtcctctgtgaagacccctgaaacagttgtccccacagcccctgagctccagccttccacctccacagaccagcctgttacccctgagcctacgtctcaggctactaggggaagaacagatagatcctctgtcaagactcctgaaacagttgtccccacagcccctgagctacaggcttccgcctccacagaccagcctgtcacctctgagcccacatctcggaccactaggggaagaaaaaatcggtcctctgtcaagacccctgaaacagttgtgcccgcagcccctgagctccagccttccacctccacagaccaacctgtcacccctgagcccacatctcgggccactaggggcaggacaaataggtcctctgtcaagacccctgaatcaattgtccctatagcccctgagcttcagccttccacctccagaaaccagcttgtcacccctgagcccacatctcgggccactaggtgcaggacaaataggtcctctgtcaagacccctgagccagttgtccccacagcccctgagccccatcctaccacctccacagaccagcctgtcacccccaagctcacatctagggccactaggagaaagacaaataggtcctctgtcaagactcccaaaccagttgaaccagcagcctctgatcttgagccttttacccccacagaccagtccgtcacccctgaggccatagctcagggtggtcagagcaaaacactgaggtcttccacagtaagagctatgccggttcctaccacccctgaattccaatctcctgtcaccacagaccagcctatttcccctgagcctattactcaacccagttgcatcaagaggcagagagccgctgggaaccctggctccctcgcagctcccattgaccataagccttgctctgcacccttggaacctaaatcccaggcctcaaggaaccaaagatggggagcagtgagagcagctgaatcccttacagccattcctgagcctgcctctccccagcttcttgagacaccaattcatgcctcccagatccaaaaggtggaaccagcaggtagatctaggttcaccccggagctccagcctaaggcctctcaaagccgcaagaggtctttagctaccatggattcaccaccacatcaaaaacagccccaaagaggggaagtctcccagaagacagtgattatcaaggaagaggaagaagatactgcagagaagccagggaaggaagaggtgaggagagggttgggaccacaaagctgggaaaaatgacttcagggctctgaaactcccaccaagatttttctcaatctcaggatgtcgtgactccaaaaccaggcaagagaaagagagaccaggcagaggaggagcccaacagaataccaagccgcagcctccgacggaccaaacttaaccaagaatcaacagcccccaaagtaagagacaaaggcatgggactttgtgggagacagagatgaggggaggatgcaaggagacctagaggattgtagagatgggtgctgatggcatgggttgccgtaaccacctcaggtcaacccttccacaggtgctcttcacaggagtggtggatgctcggggagagcgggctgtgctggcactggggggaagtctggctggttcagcggcagaggcttcccacctggtcactgatcgcatccgccggacagtcaagttcctgtgtgccctggggcggggaatccccattctgtccctggactggctgcatcaggtgagaggccaagggatgatgacagaccgatatagtggcaagactgctcatatagtgccctagaaagtggtggaagggaagaggcgttacaggaagacaggggcattggtgagccagaagcctgcattgatttaaaagacattttgtgagctctctctaaatgctaggcagcagagctgattgaggggctgggctgagctttgatgctgactgctgccgtccttagtcccgcaaggctggtttcttcttacccccggatgaatatgtggtgaccgaccctgagcaagagaagaacttt

SEQ ID NO: 120196 - DNA, 1178 bp, Homo sapiens
aacgttaaatgttataactaccacccttattcccagcttacctttaataacctgttcagatttattattcatgagtttatctaaatcctttctcatcatatttattatgtcaacctgtacttccctttccctcttcctctccctcttttctctccctctccctctctctctcttccttcctccccttccaggtaccctagatgaaccatgggaggtcctggctacacagccattctgtctgagagagtctgaggactctgagacccagccttttgacacgcaccttgaggcctatggaccttgcctgtctccacctagggcaataccaggagaccaacatccagagagcccagttcacacagagccaatggggattcaaggcagagggaggcagactgtggataaagtcatgggtataccaaaagaaacagcagagagggtgggccctgagagagggccattggagagagaaactgagaaactgctaccagaaagacagacagatgtgacaggagaggaagaattaaccaaggggaaacaggacagagaacaaaaacagttgttagctagagacacccagagacaagaatctgacaaaaatggggaaagtgcaagtcctgaaagagatagggagagtttgaaggtagaaattgagacatctgaggaaatacaagagaaacaagtacagaagcagacccttccaagcaaagcatttgagagagaagtagagagaccagtagcaaacagagagtgcgatccagccgagttagaagagaaggtgcccaaagtgatcctggagagagatacacagagaggggagccagagggagggagccaggaccagaaagggcaggcctccagcccaacaccagagcctggggtgggggcgggggaccttccgggacctacctcagcccccgtaccttctgggagccagtcaggtggaaggggatccccagtgagccccaggaggcatcagaaaggtaagtgaaggcagaggggaacccaaggtgatacacaggcctcgtgataatcaacccctgggcaaccagctgcttggaactcagccacctttgtgtttactttctgtctaggcctcctgaattgcaagatgccacctgctgagaaggcttccaggatcagagctgctgagaaggtttccagggtgagagctactt

SEQ ID NO: 120197 - DNA, 1844 bp, Homo sapiens
gaaccccagacttctcaattcctgtacccccaagaactgctcactttttgtacaaaaacctcaggcatagaggaaaggaatcttgcgcaaggtcgtttttcatttacaaaacaaaaaccccatgaaaaccaaaccggtacccacccattcgtcacttcattttgcagcatggacaacaataggggactacaactcccaaagaggactgcgctcgtccactggctcagaggccaatggacgcctggtacatgaccggcatcgactaatcagggccaggctcgatgaggctttgtctccctaccgcgcgcggggccgattctcccgcctcccagccccggcgcacgcgcgccccgcccagcctgctttccctccgcgccctcccctctcctttctccctctcagaaccttcctgccgtcgcgtttgcacctcgctgctccagcctctggggcgcattccaaccttccagcctgcgacctgcggagaaaaaaaattacttattttcttgccccatacataccttgaggcgagcaaaaaaattaaattttaaccatgagggaaatcgtgcacatccaggctggtcagtgtggcaaccagatcggtgccaaggtaagaattttacacctcttttatttctttttacaaggaaaaatccaggtaagttatgaaaaaatggttgtggggcatttgcacccgctatccttaatcaagatttgcccctctcaagtttgttacatttatatatataacaattgtagctagcatttgcctttggaaagctgggaatcatttttcttggcaggcacattttggagaaactagtaaaagggctcttcgggtttgggggcgggaagaccgaggacttataagatgttacttaaaagggcttctaacggtccgagaaccgggcagggagagagatgcggaaacggtcgcagacaaagcggggcgaggttttgcccatgtgcatcccgcccaacccccctgcggggtacttagggccaaaccggagcgggaaggggtgaggccatcgggcggctgcagagagctccagcgcaagggtggggggcgatgcgccagggtgggctgcgctgggcgctacctttcacaaaagaccagggaccccaacgcgcccgcgaccccagagggccggtcctgtatttgttcctgggtggaaggagaataagaacgggattaattttacttgctttcatggcccctaagagagacttttttagggcgtgaacagatatgtcgagaaaatgggggtgtgtggttttctttaatgagtccctcaggacttaatgggagagaaagaatcctttaaatcaaggggtagaaatgtagcgaaggaataaaaattccgaggccaagggggattttttttttttgcgcgcggttacagtgtagcgggggaggggcgggaggaagtgcggctgctacgttgtagcagaagggcggggccctgcggggcggggccggggcgccgtgggcgcgcggggacaatgcggcgttgcccgccggcaggggcgcgctaccttgggccccgcccctcgcgcgcggaatttttgtccctggccccgcccacgcgcgaagtcttttgtcggcggctcgacctgcgcgtgcgccgcagtcacgtggagggcggggggggtggtcgactgcggcggcagctctttcctcagacccccagccttttgtgcgccgcgcggtggggcggtgcccagcttgggggaaggagagcggcgcttatcgaagtgtggtcgacctccatccgcccaccgagcacttgggacccgctgcacatatccagagcagggaaagctgtggctttctcgggggagcg

SEQ ID NO: 120198 - DNA, 3795 bp, Homo sapiens
gatgggaggatcggttgagcctgggagttccacgctgtagtcatccgtgattgcaccactgcactgcaggctgggcaacaggaagaccctgtcttaaaaattagaagaagctgggcgcggtggctcacccttgtaatcccagcactttgggaggccaaggtgggcggatcacgaggtcaagagatctagaccatcctggccaacatggtgaaacccgtctctactaaaaatacaaaaagtagctgggcgtgttggtgcgcgcctatagtcccagctactccgggggctgaggcaggagaatcgcttgaacccgggaagcagaggttgcagtgagccgagatagcgccactgcactccagcctggtgacagagcgagactccgtctcaaaaaaaattaagaaaaagatgaaataaaatggtagttggggacatagttggctgggacttgacctgttgtggtctcgttgctccccctcggcagttctgggaggtgatcagtgatgaacatggcatcgaccccaccggcacctaccacggggacagcgacctgcagctggaccgcatctctgtgtactacaatgaagccacaggtaagggcaggagcccgggcagctcaggttcccttccctgtctcccacttatctgggatctctttccatttctgggcacgccttatcccctttgggtgaatctgtcattttgtccctttcgtgaaccaccgtcggggccaaagacgtctgctgccacctggtggcgggacctggaatgacaagtctctgatccctgctgtctcccatttccagtatatctataaaccttcccttctgccagatttcacagctcttaactttattctctgtaggtggcaaatatgttcctcgtgccatcctggtggatctagaacctgggaccatggactctgttcgctcaggtccttttggccagatctttagaccagacaactttgtatttggtgagttatacagatgatattagcagatgatataccatcgtgttcaacttatttgggtgcaaggacacagcaaaagttaggagatgattgttgtattggagtgctaatacagaaatgtgttctgaaatctaacggagggtagaggtagtgcctactattgctggtaaattatggggcagtagggggagaatatatcacagtgaaggagaaagaagatacatccgagggaattatttgaaaagttgaaagatggaaacatcatgtatcttccataccctgttaattgagcttttctcctgactgcattccaggtcagtctggggcaggtaacaactgggccaaaggccactacacagagggcgccgagctggttgattctgtcctggatgtggtacggaaggaggcagagagctgtgactgcctgcagggcttccagctgacccactcactgggcgggggcacaggctctggaatgggcactctccttatcagcaagatccgagaagaataccctgatcgcatcatgaataccttcagtgtggtgccttcacccaaagtgtctgacaccgtggtcgagccctacaatgccaccctctccgtccatcagttggtagagaatactgatgagacctattgcattgacaacgaggccctctatgatatctgcttccgcactctgaagctgaccacaccaacctacggggatctgaaccaccttgtctcagccaccatgagtggtgtcaccacctgcctccgtttccctggccagctcaatgctgacctccgcaagttggcagtcaacatggtccccttcccacgtctccatttctttatgcctggctttgcccctctcaccagccgtggaagccagcagtatcgagctctcacagtgccggaactcacccagcaggtcttcgatgccaagaacatgatggctgcctgtgacccccgccacggccgatacctcaccgtggctgctgtcttccgtggtcggatgtccatgaaggaggtcgatgagcagatgcttaacgtgcagaacaagaacagcagctactttgtggaatggatccccaacaatgtcaagacagccgtctgtgacatcccacctcgtggcctcaagatggcagtcaccttcattggcaatagcacagccatccaggagctcttcaagcgcatctcggagcagttcactgccatgttccgccggaaggccttcctccactggtacacaggcgagggcatggacgagatggagttcaccgaggctgagagcaacatgaacgacctcgtctctgagtatcagcagtaccaggatgccaccgcagaagaggaggaggatttcggtgaggaggccgaagaggaggcctaaggcagagcccccatcacctcaggcttctcagttcccttagccgtcttactcaactgcccctttcctctccctcagaatttgtgtttgctgcctctatcttgttttttgttttttcttctggggggggtctagaacagtgcctggcacatagtaggcgctcaataaatacttgtttgttgaatgtctcctctctctttccactctgggaaacctaggtttctgccattctgggtgaccctgtatttctttctggtgcccattccatttgtccagttaatacttcctcttaaaaatctccaagaagctgggtctccagatcccatttagaaccaaccaggtgctgaaaacacatgtagataatggccatcatcctaagcccaaagtagaaaatggtagaaggtagtgggtagaagtcactatataaggaaggggatgggattttccattctaaaagttttggagagggaaatccaggctattaaagtcactaaatttctaagtatgtccatttcccatctcagcttcaagggaggtgtcagcagtattatctccactttcaatctccctccaagctctactctggaggagtctgtcccactctgtcaagtggaatccttccctttccaactctacctccctcactcagctcctttcccctgatcagagaaagggatcaagggggttgggaggggggaaagagaccagccttggtccctaagcctccagaaacgtcttcttaatccccaccttttcttactcccaaaaaagaatgaacacccctgactctggagtggtgtatactgccacatcagtgtttgagtcagtccccagaggagaggggaaccctcctccatcttttttgcaacatctcatttcttccttttgctgttgcttcccccctcacacacttggttttgttctatcctacatttgagatttctattttatgttgaacttgctgctttttttcatattgaaaagatgacatcgccccaagagccaaaaataaatgggaattgaaaaaagctgcgagatgtgtgcttatttagggaaacacggctggctgatggaggcatggggcctgagttcagttgcactgctctccttaaattgacacttaatattgagtccctgtcctacggattcaaccaactggatattgggaaaagagttgtactggacatgtatagacttctcattattccctaaacaataatagtataaattatttacataatatttgcattagattaggtattacaagtaacgtagagatgatttgaagtacacaggttatatgcaagtactacattttatatgagggacttgggtgtctgccgatttggtatctcagggaggtactggtaaggacactgactgctttatagaccctcacatcattgtttctggtacccaaactgctctgagcaccagtcagtctttactgtagtct

SEQ ID NO: 120199 - DNA, 1056 bp, Homo sapiens
ttcccaatatccagttggttgaatccgtaggacagggactcaatattaagtgtcaatttaaggagagcagtgcaactgaactcaggccccatgcctccatcagccagccgtgtttccctaaataagcacacatctcgcagcttttttcaattcccatttatttttggctcttggggcgatgtcatcttttcaatatgaaaaaaagcagcaagttcaacataaaatagaaatctcaaatgtaggatagaacaaaaccaagtgtgtgaggggggaagcaacagcaaaaggaagaaatgagatgttgcaaaaaagatggaggagggttcccctctcctctggggactgactcaaacactgatgtggcagtatacaccactccagagtcaggggtgttcattcttttttgggagtaagaaaaggtggggattaagaagacgtttctggaggcttagggaccaaggctggtctctttcccccctcccaacccccttgatccctttctctgatcaggggaaaggagctgagtgagggaggtagagttggaaagggaaggattccacttgacagagtgggacagactcctccagagtagagcttggagggagattgaaagtggagataatactgctgacacctcccttgaagctgagatgggaaatggacatacttagaaatttagtgactttaatagcctggatttccctctccaaaacttttagaatggaaaatcccatccccttccttatatagtgacttctacccactaccttctaccattttctactttgggcttaggatgatggccattatctacatgtgttttcagcacctggttggttctaaatgggatctggagacccagcttcttggagatttttaagaggaagtattaactggacaaatggaatgggcaccagaaagaaatacagggtcacccagaatggcagaaacctaggtttcccagagtggaaagagagaggagacattcaacaaacaagtatttattgagcgcctactatgtgccaggcactgttctagaccccccccagaagaaaa

SEQ ID NO: 120200 - DNA, 2066 bp, Homo sapiens
gcgtatccccaactgggacttccgaggcaacttgaactcagaacactacagcggagacgccacccggtgcttgaggcgggaccgaggcgcacagagaccgaggcgcatagagaccgaggcacagcccagctggggctaggcccggtgggaaggagagcgtcgttaatttatttcttattgctcctaattaatatttatatgtatttatgtacgtcctcctaggtgatggagatgtgtacgtaatatttattttaacttatgcaagggtgtgagatgttccccctgctgtaaatgcaggtctcttggtatttattgagctttgtgggactggtggaagcaggacacctggaactgcggcaaagtaggagaagaaatggggaggactcgggtgggggaggacgtcccggctgggatgaagtctggtggtgggtcgtaagtttaggaggtgactgcatcctccagcatctcaactccgtctgtctactgtgtgagacttcggcggaccattaggaatgagatccgtgagatccttccatcttcttgaagtcgcctttagggtggctgcgaggtagagggttgggggttggtgggctgtcacggagcgactgtcgagatcgcctagtatgttctgtgaacacaaataaaattgatttactgtctgcagtcttgagtgtatctttgcaagcgccgactccccactcctcccggccttcagatggcaaggaccggcgggaggcgccgtggccgagtccccagcccgcgcacctccctgggcccaggagccccttttcctggagtcacagaacccagcatccggttgccggatgtagtctttcattgcccagtctgcggttttcccaggtagttgccccgcggcgaatccgagatgtggcaatcacccttacgccagggtgccaggcggaggtcaagtccctcacccgggggcggagcgtggcgcggcgtgggcgggattcccggctcaagaagggcggtgactggggcggcagggatgtggccctccccgggctaaccaggcagcccggctgggcccgagagccagcgggcgggcgggctgcggactctagcggggcctgccgggaaaggggcgggccgagcgcactgggccgaggcggggcgaagtgggggtgcttagtccgttgcggggggcggggtcgcgtctgccgcagcaacggggtgcggcagggtggggaacgcgggagcggggccagctcccaggaaagctggtctgcgagcggcccctgcccggctcccaggtccctgcgcgaccccgcccttcccgagaccccagccgggctgccgcccgcgtcccggaaggtgagtgggggaggggagatggagcctggggctgccgagaagcagggagagaggggaaaggtctgcaggcctctgggcgcgggggacctttatcaaagggagcggcgaggggaagggagggaccatacgcaggcggagaagaggtagctggggatcttaaggattttgtagggaaaagccttagcggacccatgggtgtagaagggacgggccgtggcggatgcagactgggagggcctgacgggaaagggaaaggatgggcccctgtggacgccacagcgcgccttccccatccgcaaaggctttccctccctctcctccagctccagcctgaaccatgtttttcacttgtggcccaaatgaggccatggtggtctccggtaagtactgttgttcccttcccagccagtgaccccagaacccctgtgagtctggcctctgccccttctccctctccctaccaacttcccagcaccagacttctgccccttgatggccacgaactgcccagtttgattcccaccattccaaggcccagactgcttcccctccagctcccagattctctcctgtgggttgctgtcccctcacccccgccagttcctcagtcttccacattcaagctctgccaccgttcctcactgccccacaccttgcagggttctgccgaagccccccagtcatggtggctggagggcgtgtctttgtcctgccctgcatccaacagatcc

SEQ ID NO: 120201 - DNA, 1026 bp, Homo sapiens
cctcctggggtgacctgccttccttgtctttagacccgccctcgtctccaaggcaactcagcctttcctcagtccctcagaggcagccaccttctggaagtgggaactggggggactggatgtctgggtctcaggaaggcagagcagggataactgggcccaagatgccctgaacctgataagaggtggcagtcgagtccctcaggactccagggcctggagacttcagtacagggctctgagaccagtacaggttaggatagcttttcctgcagcaggggaggggagagtagttacttgggtttgtaaggagatgccatttagaatagttttatgtggggtaagcttcctgggcctgaggaacagagtagggattttcaaactttaatgggcacaggtcacctgggaattgtgttaaaaggcagattttgattgagcaggtcaagggtgagcctgagattctgatttcttccatgcttccaggtattgctgatggtccagggaccaccctgggcctagagggctataggggacagtaagactagaaggtgctggggtcccctctgcccttctcttagaattctggactcctatgtgggagggcagcagggtgagctggtccaggcttatctgatgtttaattctatcatatcctcaacaaggaattgcccaacctttcctgggacatatttattttttaaaagtcaaaatgattttcatattcttttacatatcttatgattttacataaatgcatttatgttacaagatttagaaaaatagtacaatcaacctgtctttttaaatttgcttttcttttgccccgttcatgttaactcttgttatattgtattctattgttatattctattatatattctctccttctagacgtacacacaggtatatatacaaacatgggtgcttgtttattctattttcaaaaggtgggatattttttatacttctgttgcttgcttttcatattcaacagatatacatggaaatcacacaaagttaggaata

SEQ ID NO: 120202 - DNA, 1602 bp, Homo sapiens
ttagagcatgtaaatcagatacgtcacacctagctgacacccccatgctggctttccactctgccagaacaaaagctgagtccctagctggtgcaggatgctcagcctgacctggctcctgcctgcatcacttgtttcttggcgcctccttggccacgctgcctttcttcttgttgctggaacaagccagggctcgttcccacagcttctggacattttctctgtgcctgcaaagctcctcccctaaataaccacaggctctccctcactccattcagttctctgccaggtgtcacctccttagagagccttttctggccacccacctcactgctctgtccatacttcctgcctcttgttcttcgcagctgttttccctgctgggatctcagtcctacaagggtggggagtgacgttcaccactgagaacgcgcctggcacagagcgggcactcagccaacttctgctgaatgaacagagggaatgggctgaaatgaaggggaagctgaggcaggggtgcagggctgtgaggattggggagaatctgggcacaatgggatgataggcttggagacaaatggatggagccaggcaaggagaagagggcagctgagcctgaagtctgaggatggaacatcagagctgcgacagagccagaggtctcagctgcagatcttcatttcacccatgcctggctgcgccccacagtgctgtgtgctcggtgccacccctcatgggtctctaagtggccactgtgggctgggccagggagcagctggtgggtgggaagtaagatctgacctggactccatcccacccaccccctgtttcctggcccacaggtgatctcaggcaatgaggaccctgagggagtggtgctgaaggaccttgggccccccatggttgcccgactggttcgcttctacccccgggctgaccgggtcatgagcgtctgtctgcgggtagagctctatggctgcctctggaggggtgagtggctcagcttcctgggaatctgtttcctgagcaggggactggagggtggggagtgtggagaatgggcatccaggatcccttctcctgctgggaagctgtcactctgaggagggggctagccagcattgtctcctccatgccaatgagccagtggagagatacaagaagggacctgaaacctgcccaggcctgatgcagggatgggggatggagccttagtgcctctgacccccatcctctcaccctgccccagatggactcctgtcttacaccgcccctgtggggcagacaatgtatttatctgaggccgtgtacctcaacgactccacctatgacggacataccgtgggcgggtaagaaaggcccctgcaggatatggagtttggggtgggagggaggactgtgtgtgtgtgtgtgtgtgtgtgtgtgtgagagtgtgtgtgtgtaggggggctggtaagtagggtggggagtgagatggaagagctgagaagagggatgggttaggtggggcctcaaagggtagcactagggtgaccactagcccgtatgacactgtatgaaaaaggcacccctttgctaacacacattgttggaaattgctgc

SEQ ID NO: 120203 - DNA, 1108 bp, Homo sapiens
gggccttgctcagaattcccccaggggatctcctcctctcccctcgcttcagcctggaggaaaagaggggagcgtgggggtgggaagggagagaggttccaggagggcctgggataaggaatgtgtgacaagttaacccaggaacatggacagaaaggctggaggtgactatgcaagagtggtgaagggacttgggccctgccatgacgtcccttctgctttctctcaccctcactcccctctgagtccagattggggagcacaataaaagaagagccccctagtgttggccaggcctgggagattgagagggaagtgacccttggcctcacgtgggcattccacctccacatggggagccagagtgaccgggcccggggagtgggctctctctcctctcctggatgggaatctgcgaagctgcccccagtgaccttctgtcggttcccttctcagctacccaatgctgctgcatgtggcagcccagatcgcctccggcatgcgctatctggccacactcaactttgtacatcgggacctggccacgcggaactgcctagttggggaaaatttcaccatcaaaatcgcagactttggcatgagccggaacctctatgctggggactattaccgtgtgcagggccgggcagtgctgcccatccgctggatggcctgggagtgcatcctcatggtgagcagcccgaggacagccaggttggagcagggcaggtgggagaacactggccgccactcacagccctggtctccatcagtcacacactttctctgggttgcattttacagaatctcatctataatatgaggttctcctagcccaagggactggggaaagcaggagctgcagtgtgatgggcaagaatccaggagccaagagtgggtactggggatggagacagggtggcagagagctcaagagatgaggttgggcgaggaagctggagatagaaggggttgggtagggagaccgaaggtcaggaccagaaagtgggggtggatggagaggaaggaggagcagaaggaagaggtgggccagggccctggagagaggaccagagcatggagaggaaaggcagagcccaagggagag

SEQ ID NO: 120204 - DNA, 1066 bp, Homo sapiens
actaaagaatatttgttccctgactctcatccacactgccacaatgcaggtgtacctgtcccggccgcctgcctgcccgcagggcctatatgagctgatgcttcggtgctggagccgggagtctgagcagcgaccacccttttcccagctgcatcggttcctggcagaggatgcactcaacacggtgtgaatcacacatccagctgcccctccctcagggagcgatccaggggaagccagtgacactaaaacaagaggacacaatggcacctctgcccttcccctcccgacagcccatcacctctaatagaggcagtgagactgcaggtgggctgggcccacccagggagctgatgccccttctccccttcctggacacactctcatgtccccttcctgttcttccttcctagaagcccctgtcgcccacccagctggtcctgtggatgggatcctctccaccctcctctagccatcccttggggaagggtggggagaaatataggatagacactggacatggcccattggagcacctgggccccactggacaacactgattcctggagaggtggctgcgcccccagcttctctctccctgtcacacactggaccccactggctgagaatctgggggtgaggaggacaagaaggagaggaaaatgtttccttgtgcctgctcctgtacttgtcctcagcttgggcttcttcctcctccatcacctgaaacactggacctgggggtagccccgccccagccctcagtcacccccacttcccacttgcagtcttgtagctagaacttctctaagcctatacgtttctgtggagtaaatattgggattggggggaaagagggagcaacggcccatagccttggggttggacatctctagtgtagctgccacattgatttttctataatcacttggggtttgtacatttttggggggagagacacagatttttacactaatatatggacctagcttgaggcaattttaatcccctgcactaggcaggtaataataaaggttgagttttccacaactgtgtgagtgggttc

SEQ ID NO: 120205 - DNA, 1033 bp, Homo sapiens
tgagtcaccgcgcccggcctggagtgtgtattatcccaattttatggggagtaattgtgctcactcggctcaccaccaagtcgccagagcgcgcctccgcaaggaagccctccaggcacttctactttcccggacccgcctcccgctccagccggttacacgcgccgttagcagcgtgggcggagttggttctgccttcgcggaaccaactggtccagcttctggtgtctcccctcgctcaattaaaagccagctcctctcctttcggcttccccacggtgcctttcgggatttgtagtcagacgcgcttcagccggctctaaggagagcaaaggcaagactccaattcccagcatcccccgcgcccggagagtgcagcgtctattctcatcctcttcacttttccactcctccccttacctcccttctcttctgaattctccattctgggctcttgcctgtgaaatctttctttgctttccccatcttttcctcgcattttttcaccatctttccctcaatctccaggagccaatgcgagactttggctccgattaagcgacggcccgagactcggggtgcgcgaggaggatcgacagagtggtgaggggacctaggagggcgggagtggcagaggtatgagagagagagaggtgagtgggaggcgaagagtgagaggaaggcagggagaagctaggagatcggaaggcgtgggtcagggtgaatgacgtgaagtagacttgggaagggaaaagaggtggctttagatttgggaagcatggaggggagaggttaccgccgtacttagcagaagtgggctaagagatagaagataggaaggacgggcagatttggagcttgtagactggtctgaccaggatgggatggaagagagaggtgtgggctcaattttctttgtccctgtttagccaaagatgagacaagtcattgaaatacaaaatgatcttgcaaacactggacagttaacaattctgtcacttggtaattgagggaagactggagttgaagggca

SEQ ID NO: 120206 - DNA, 1072 bp, Homo sapiens
taaagttatgatagctagcagtgcggtcccgggcgcctccccgtggggtttgccttcgcggcggactcgctcctctggtctacagcctttggaccggtagggagagggtggggccaaagccagctgctgcgcatgcgccggccggggccccgcccccatgcgccgcgcggctccagggccacgttccagggtcgggtttggtggattcctcagtccctgccgccgcggggcgccctgggatagcggcggggcctcctggtgagcgcgcgccggggcggcctccgggaagtgggagacgctgcgggtcctgggcccaggccttgggatgggcgggaaggcttggccgcgccgggctgtgggcactgcaggaggcccctgtgcaggtggagatcgccgcggccctggcgggactccttgctggctcttgggcgcgctgatgcccatcatctccctgagtttctgagccctatctctcatgtgtcagtggtcaccgccgaatccagacactccggccctgttccggaagagccctgatatccgtggctccatggcgctgtctgtcgataccatgcactctagctctcaaggaggaaaggttttgtggaagggaatagagacttggaataacagacctgtgctaattagagacaggaaagatggaacaaggggagtgacccttctccacccccatatcctaatgtgctctctctctatccagaacagatctcggcccctttccaaacactcctgatgcctcatttgcctctcgcctcttttcgaccaccattttgggggctgaggcactcacggggcctccccaggtttcactccgtttctacacagtcggagccccatggatctcccatctcccggaggaaccgtgaagccaaacagaagcgcctgcgagagaagcaggcgactctggaggctgagatagcaggggagagcaaggttaggggtcagacagcttgtccttgggtttctgagacttgagaggggctggaggagaccggctgaaatgcagtctggggtatactggatcccagcctcttctgctttctcttctcagtca

SEQ ID NO: 120207 - DNA, 1049 bp, Homo sapiens
acatttggtggagtttctaagccttatgtgtgtggatattatatatgcattagaatattcgtgtgtgtgtgtgtgtgtgtgtgtatttatatatatatatatattttctttctctttacttaccccaatttctcttgtctaaatctcaccttcttccactcgcccattcccacctttcaattcccatggaattaccctcattcttctgggtctgttatctcatgccatctctgtgaagcatccttggatttcccacaatatggctatccctcctctcttcctatagaatcttttgcctcttttaatatcttagaaaaccccatactgggtttgtaagtccatttctattagcctctagaggctagatcaatgccatcctcacttgattttcctccaacacctggcattgctgggggcatcgctgggcctggtacataggaagtgcttgggaagtgtttgctgacaaggatctctctgggcacaggaaaggtggagagatctgtgagcagctgcgagctctgggtgcctccctggactgggatcgagagtgttttaccatggatgttgtgagtgttctgtgccttggtccctgtgagtgatgggcgatgtttagggatctgtgtggggcagggaggaagcaatgcctgggtccctgagcagggtgatgggctgagaagtggctcttagaggtggacactcaggtcattccagggctcctcagtggctgtgactgaagcttttgtgcggctctacaaggcggggttgctgtaccggaaccatcagcttgtcaactggtcatgtgctttaagatcagccatctcggacattgaggtgaggcggagagagggaagcaggtttgtgagagctctgaggcagagtggtcaatgattaagagctcagactctggagccagggtgcctggattcaaatctgatgcctgcctgttacagctgtgtggcttttggcaggccgtttagtctctttaagcctcagcttcctcagtctgtaaattagagatgatggaatgcttgcatcgtgggggtgttgta

SEQ ID NO: 120208 - DNA, 1024 bp, Homo sapiens
aactggcagcactggttttcccatattgggtaagggtagggtaaggggagctcttgtggagatggggaggggggactgactggttattctaagacttcacgaatgtcctcccggcagggactggtgtgtctcccggcagctgtggtggggccatcagattccagcctacctggttgtagaggaccatgcgcaggtgggtaggaagaagcacccggagggccgagtgtggcacagagcacctagcccaggagtcagagctccgcagggccaagtcccgctcctgcctggtcatgtgcttcatgctcatagtcatgtaaccttctgcgcgatcaaggctccctgaagtggcatttctttatctcacccctgggggaacctggccactctaagaccacatgaggacgtgaaaaccaagtgacatttacacctgtcagctgttcttcctcactctccccaaccccttcctacttttgcagggagaagaggactgttgggtggttgggcggtcagaggctgaggccagagaggtagcagcggaactgacagggaggccaggggcagagctgaccctggagaggggtgagtgcctgagctggggagggatgtacaggggagcgggggcctgggcatctgggcctttgaggggaacagatcccaagatacagaaggtagggtcaggaaagttgggaatggagccaaaggggacagccctggtctctgggggtgggggttggcctagaatggtggcagcagtggtctgaggtcctagaagccaaggttccaactgtccccattctttttctgtttcccagatcctgatgtcctagacacatggttttcttctgccctgttccccttttctgccctgggctggccccaagaggtgaggtgggttgagagggcgaaagtgaaggggaaacgataaggaagggatggctgggcccccacagaggcttgaggggggcctggggcctgggcctcttactgctcctcttccccctagaccccagaccttgctcgtttc

SEQ ID NO: 120209 - DNA, 1041 bp, Homo sapiens
gaaacccccctctgttgacccctccctgcccccaggtgcttcttcatcccatggttcgggacaggcagggccggaagatgagcaagtccctggggaatgtgctggacccaagagacatcatcagtggggtggagatgcaggtgaggacgaagcacccactagagggacaaggtttgcagggtttgcaggagagaggaaggcaggctgagggaggagtgaggccagcaggtgtgacccttatagaggcagggccttcgacctgggtcgtgaattgcccccttccatccccaggtgctgcaggaaaagctgagaagcggaaatttggaccctgcagagctggccattgtggctgcagcacaggtgagtcatcgctgcctgccccccaccagctctagctcaccacctctggcttcctctgcaacccaggtcctggccctgcagccacaaaggcatctgccacccttcttcttcctctggttgcagaaaaaggactttcctcacgggatccctgagtgtgggacagatgccctgagattcacactctgctcccatggagttcagggtaagcctgggcgaggggtgtcggggtgagcagagggcagcgggcacctgtgcaggggcagggcaggggcaggacttctggtgctgctgccacctacatgcagactacctcgattcttcccttccagcgggcgacttgcacctgtcagtctctgaggtccagagctgccgacatttctgcaacaagatctggaatgctcttcgctttatcctcaatgctttaggggagaaatttgtgccacagcctgctgaggaggtaagagaaaacagaggtgcttgggagtagggtagtcaggtgtcagagggccaaggtggcatctggaaggaaaggaggcaggggagggggagtcaggccatcctgccccctctgcctgcagctgtctccctcctccccgatggatgcctggatcctgagccgccttgccctggctgcccaggagtgtgagcggggcttcctcacccgagagctctcgctcgtca

SEQ ID NO: 120210 - DNA, 1019 bp, Homo sapiens
gggatctcggaatctttgctagaggccaatgtagtcacagactgcagtggttcctgaggttatgatggaagccagagtgatctcagagcctgtggtggtttcaggcgctttgataaagactgcagtaggcacagatactatcttggagagagtggtgctcttggaggctatggtagagtccatggtgggcacagacttggtcacggagtctatagtattctgatagagtgtggtggaggctgtggtggacacagacgctgtagtggtcttagcaggcattacggtggctgtggagaacccagactgtgtggttgtcacaggagctttggtggagaccacagcagtctcagaacctgtggtcatggctgtggtcatggctgtagtcacttcagtggcagaggtggaagctctggtggtctcagagcctgtgctgctttcagaggctgtagcgaagactgtggtgggcacagatgatactgtgtggtgtccggtgttctcagagcctgtggtagaggttgtggtgggcacagatgctgtggtggtctcagcaggtgttggaggggctgtagagggcgcagactctacagttgtcccagaggcttttgtggagattgcagtggtcgcagagtctgtggtggaggctgtggggatctcagagcctgcggtgattttagaggttgtggtgaagactgtggtgggcagagatgttatcgtagaggtcgtggcggtcttggaagctgtggtcatggttttagaggctgtgttgggagctgtggaaggtgtagatgttatcacagagggtgtgttgttcttggggactgtggcggacacagatgctgtggtggtgtcagtaggtgttttggtggctgtgtggggcacagactctgcagctatcacagaggtttgagtggagactgtggtgtcctcggaggctgtgatggcagcaatggtagtttcagacatggtggcctcacaggctgttgtgttcttagagcctgaggtggaagctgtggtgggca

SEQ ID NO: 120211 - DNA, 1106 bp, Homo sapiens
atctgcccatctcggcctcccaaagtgctgggattacaggcgtgagccaccgtgcccaggcttttttaaaaaaattaattaattttttggtagagacaggttttcaccatgttgcccaggctggtctcgaactcctgagctcaagtgatccaccctgccttagcctcccaaagtgctggattataggtgtaaaccaccatgcccagccctggacaagttccttaacctctttgtgcctcattttcctttactgtaaatgaggataatattagtaccacctacattcaatacacttaaaatagggcctggctcataacagtaagcactagatgaatgttggctactatagtctaataaccataacactcctacagctgactttaccaagaggcagtggcaaaactcaaatgtgaatctaggctttctgaggctaactgcctcaagtcacggagaaagacatgcccagattattaaaaacattattcaacatagaactgccctaacccaggaacagagtgcctcagcaaagctggaaactgaatcaagtctaaacttggcctctagtggcctcagaacatccccactgtgatatctttctgatgatatcccaggtcctgtatgagctaaacgggaccaaaaagggtcagtctggcagagagcttctgactgtgcacacttctggtgggaagatgaaggtctggaccacgaccatccatccaatctgatgggagtatgggaggcaggcagcagggtcttgtggagaccttactcattccagcctggcgcttcaaccacccaggggcaaagctgccctgcttaatgctcaccttggctgctgtggtcttccaggctgaccctccagtcatcaccccggggctcggcatgcagttcggcgtggatcccagagatgaggccaggctcctgctggggccgcagggccacatcacacaggtcggccctgtggcccaagcgataggtgcagccagccccggcgggggggtggaaggtgtagagatcaccgcccctgccgccccctatgcgcagcagttggaagcagggcagcatgggcggtgccccctctgcaccacctcttccacttcaggcat

SEQ ID NO: 120212 - DNA, 1157 bp, Homo sapiens
gcctggccaacatggtaaaaccctgtctctgctaaaaataaaaaaattagccagacgtggtggcacatgcctgtaatcccagctactcaggaggctgaggcaggagaattgcttgaacctgggaggcggagtgcagtgagctgagattgcactactgcactccagcttgggcaatagagcaaaactccatctcaaaaaaaaaaaaaaagaaagaaagaaaaaaaaagaagaaagaaagaaaattggaccttaggacagtgagggcagggatcctttgtaggaaagcacaagaaacacagacttgttcctagctgacaaggagtgtactgcctggtacctgtcacctgctgaggggcttaggatgtgagggagaatctgactacagtttcatattcttccccagaaatcatacagatttctccactcctgactctggtcatttctgtttttgtcctccatatttgcctggtgccccaccatcaacaggtactttggtcaataatgtccgactcccaagaggtcacaggctggaattgagtgatggagacctcctgacctttggccctgaagggcccccaggaaccagcccctcggagttctacttcatgttccaacaagtacgagtcaagcctcaggactttgctgccattaccatcccacggtctaggggagaagcccgggttggggctggtttccggcctatgctgccctcccagggggctccacagcggcctctcagcaccttctcccctgcccccaaggccacactgatcctaaactccataggcagcctcagcaagctccggccccagcccctcaccttctcccctagttggggtggaccaaagagcctgcctgttcccgccccacctggggaaatggggaccacgccttctgctccaccacaacgcaatcggaggaaatctgttcaccgagtgttggcggaactggatgatgagagtgagcctcctgagaacccgccaccggtccttatggagcccaggaagaaactccgtgtagacaaagccccactgactcccactgggtaagtggagtcctcacttggccctctcagtgttttactgcttttcgattccttgtatccctaggctgtgaggaggtccccctgcctggggggatgggcacgggaggtggaa

SEQ ID NO: 120213 - DNA, 1041 bp, Homo sapiens
agcctgaaagttccccatccttaggcactagaagaatggggttaaagccatatgaatgtaaaaagcaggacatgctcactccggttgttttataagcactgccccaccccacctctcatgttctcctgcacatatttttcttttcctatcagagctaacccaggtcttgccattccatctattccacctcccgtgcccatccccccaggcagggggacctcctcacagcctagggatacaaggaatcgaaaagcagtaaaacactgagagggccaagtgaggactccacttacccagtgggagtcagtggggctttgtctacacggagtttcttcctgggctccataaggaccggtggcgggttctcaggaggctcactctcatcatccagttccgccaacactcggtgaacagatttcctccgattgcgttgtggtggagcagaaggcgtggtccccatttccccaggtggggcgggaacaggcaggctctttggtccaccccaactaggggagaaggtgaggggctggggccggagcttgctgaggctgcctatggagtttaggatcagtgtggccttgggggcaggggagaaggtgctgagaggccgctgtggagccccctgggagggcagcataggccggaaaccagccccaacccgggcttctcccctagaccgtgggatggtaatggcagcaaagtcctgaggcttgactcgtacttgttggaacatgaagtagaactccgaggggctggttcctgggggcccttcagggccaaaggtcaggaggtctccatcactcaattccagcctgtgacctcttgggagtcggacattattgaccaaagtacctgttgatggtggggcaccaggcaaatatggaggacaaaaacagaaatgaccagagtcaggagtggagaaatctgtatgatttctggggaagaatatgaaactgtagtcagattctccctcacatcctaagcccctcagcaggtgacaggtaccaggcagtacactccttgtcagctaggaacaagtct

SEQ ID NO: 120214 - DNA, 2219 bp, Homo sapiens
aggtgcgtgccaccgtgcccagctaatttttgtgtttttagtagagacggggtttcaccatgttggccatgctggtcttgaactcctgacctcgtgatctgcccacctcggcctcccaaagtgctggaattataggcgtgagccaccgcgcccagcaaagaacttctaaccttcataacctgacaggtgttctcgaggccagggtctctctttctgtcctttcacgatgctctgcatcccttggatgtgccagtttctgggggaagagtagtcctttgttacatgcatgagtcagtgaacagggaatgggtgaatgacatttgtgggtaggttatttctagaagttaggtgggcagcttggaaggcagaggcacttctacagactattccttggggccacacgtaggttcttgaatcccgaatggaaaggggagattgataactggtgtgtttatgttcttacaagtcttctgccttttaaaatccagtcccaggacatcaaagctctgcagaaagaactcgagcaatttgccaagctcctgaagcagaagaggatcaccctgggatatacacaggccgatgtggggctcaccctgggggttctatttggtgggttcccctctgcagattctgaccgcatctcccctctaaggagtatccctgaacctagtggggaggggcaggggcagactaccctcacccatgaagaggagtagggagagggagaagatgctttgagctccctctgggaagaggtggtaagcttggatctcagggtcacaagggccctgcgtgctccctcactttgcttctcttttgactggcctcccccagggaaggtattcagccaaacgaccatctgccgctttgaggctctgcagcttagcttcaagaacatgtgtaagctgcggcccttgctgcagaagtgggtggaggaagctgacaacaatgaaaatcttcaggaggtaagggtgggagggggatacccggggaccttccctttcttggcctaatttccattgcttccatcactggctcgtagctctccgtctttggtgcagtggttctcagtgggatggagtgaaattcctcagttctgctgggataaggtccagagccaacccttccaggatcctgccttttcacaccaccacctggctctgctgacacatctagtcacagacccctgtgatgctgttactcagcaagtccaaagcttgcccttgtcacccccttcccacctgcacagatatgcaaagcagaaaccctcgtgcaggcccgaaagagaaagcgaaccagtatcgagaaccgagtgagaggcaacctggagaatttgttcctgcagtgcccgaaacccacactgcagcagatcagccacatcgcccagcagcttgggctcgagaaggatgtgagtgccatgtctctctgcgggctccatctctttcccctgtcaccacctcgctttccctagctctggctcctccaactgctctagggctgttggctttggacagaatgtccaagcagtcaggcctgtctcagctcattctctaatgtcctcctctaactgctctagggctgttggctttggatagaatgtccaagcagagtcaggcccgtctcagctcattgtctaatgtcattctcctttctgtcattcacttgcaggtggtccgagtgtggttctgtaaccggcgccagaagggcaagcgatcaagcagcgactatgcacaacgagaggattttgaggctgctgggtctcctttctcagggggaccagtgtcctttcctctggccccagggccccattttggtaccccaggctatgggagccctcacttcactgcactgtactcctcggtccctttccctgagggggaagcctttccccctgtctccgtcaccactctgggctctcccatgcattcaaactgaggtgcctgcccttctaggaatgggggacagggggaggggaggagctagggaaagaaaacctggagtttgtgccagggtttttgggattaagttcttcattcactaaggaaggaattgggaacacaaagggtgggggcaggggagtttggggcaactggttggagggaaggtgaagttcaatgatgctcttgattttaatcccacatcatgtatcacttttttcttaaataaagaagcctgggacacagtagatagacacacttatcttggtttgtccttcagtt

SEQ ID NO: 120215 - DNA, 2040 bp, Homo sapiens
aaggccccatctctactaaaaataaaaaaactaacagggcacagtggtccaagcctgtagtcccagccacttaggaggctggagcagaaggattgctttggcccagtagatcgaggctacattgagccatcattgtactccactgcactccagtctgggcaacaaagtgagaccctgtcttaaaaaataaaaataaaaaaagtttctgtgggggacctgcactgaggtcctggaggggcgccagttgtgtctcccggttttccccttccacagacaccattgccaccaccattaggcaaacatccttcgcctcagtttctccccccacctccctctcctccacccatccagggggcggggccagaggtcaaggctagtgggtgggactggggagggagagaggggttgagtagtcccttcgcaagccctcatttcaccaggcccccggcttggggcgccttccttccccatggcgggacacctggcttcggatttcgccttctcgccccctccaggtggtggaggtgatgggccaggggggccggagccgggctgggttgatcctcggacctggctaagcttccaaggccctcctggagggccaggaatcgggccgggggttgggccaggctctgaggtgtgggggattcccccatgccccccgccgtatgagttctgtggggggatggcgtactgtgggccccaggttggagtggggctagtgccccaaggcggcttggagacctctcagcctgagggcgaagcaggagtcggggtggagagcaactccgatggggcctccccggagccctgcaccgtcacccctggtgccgtgaagctggagaaggagaagctggagcaaaacccggaggaggcaagtgagcttcgacggggttggggtgtggggaggtggtcatgacagggcagcctgatggggaagtggtcacctgcagctgcccagacctggcacccaggagaggagcaggcagggtcagctgccctggccagggaggggtgtgtatcaactgctggcagccctggcaggcaggggccaggtgggaagtggaagctggatttcgaagagacaactgccggtgagggcagagcagcctgggagagtcggaagctggcccaggctggcctttgctctggcccagcccttgtcagggtctctcacatctcctaggcctgcccagggtctggtcactcattactggcccagcaccagacccagcttggggttggtttgagccccttttcccacccttagtcctgcttgaaaatttgacccttatcagacccaagattttggccttagggttaagcatagcctgagggtaaaaacagtgctcattccaggattattgttcctgaaagtctagggtgtgactcgtttctgataggatctcctgtttgggctgtgtgtgtgcgcgttgtgagctgggtttacctccagtcaagtatagggcttgtcttccccggatctctgcctcaggccaatgactggccactgtgttaaggtgcacaccctggcaccccttgtagaaagctggattttgattgacttcagcctcagttccaaagttgtaaacaagaaaaatggtgagagatttctccaggccatttgcaaatatagagctgctgcgggattgaaggcatccagccctgctgaggactattaaagatgtatcttccagtccttcaaggcgacaagtgtaagcaattagagattaaatactaagccttgagacctcacagaaaggtgtgactggtttctggagtgaccgagaagccccaacctcttcgcaggaggtcactgctgagccttgaatgataatggctggcaattgtggtccacttcctaagtgcctggctgtgtgctccgtttatacatcattatctcattaaccagcacaaaatctcctagggggaggtattattatcctatttaacgggttttaactgctaaatgatgaagcgaggatttggaccagtgtttattccaaaaccccaaaacagaatttggaaaatccaagatag

SEQ ID NO: 120216 - DNA, 1107 bp, Homo sapiens
acaaaggtgccgtgatggttctgtcctggggattgagatggctggggaggggcctcctcctgttccgaagcatgttcctcccacccccaccaggccccataatctacctgccttttgggcagttaaaggccgagaagtgaacacagctgcaaccccactgccttgtagaccttccggcagacctgtggcaggtattgaaatgcacgcatacaattaggctcaaaaagtctacacagacaggagatgggcacacgaacagaggcaacataagagtgggggaaaagtctcaaaagactcacggatgccaccaagatgaagacagctggccacgggacacccatccccttagaaggcagatagagccactgaccccagcagacaagcccaggcagggctgagcctggagcctgcaatgagaagccttacttaagtcgacagaggtcagcgtgcccagtccagacctggccttctggccttcgaagctgtggggagccctggcccagagccccctctggagcccccagacttaccccaggccctccactgagatcaagttttgggagcagacagacaaacatcatccctcacagacaggcattccgttggctattctcttgcaaacagaatcaagcactagaccagcagcatgagcctcaggatactcaggccaggcccagaaaaacagaccctgaaggggagcttagggcagccttcctgcacgcctccacaaatcactctccacctcctctgcgtctttctgccagccagccccactaaacaaagcacatccctcaatctgccaggctcggggagggacgcacgatgaagctggacgcctgagtcccccagaggaaggaggaactagatacctaggtccctgtggggggcccttggtgcccgtctgaggctcagtctttgaggggattgcagaggggggttgctggagctccttttagcgtctctgaaggggattctgtgtgaggggattgggactggggggttggggagcaggaagcagtccccaggggagccatccaggcccattcaagggttgagcacttgtttagggttagagctgccccctctggggaccgggattgtccagcc

SEQ ID NO: 120217 - DNA, 1016 bp, Homo sapiens
ccagggcaggatcaggaaacatggggaaagcagttgtgggttctggaccaactgccctcctaaggtctgtccttagcagggaccttcccctgactcatgaatgctggaatcaggaccccaacaccataatcatcaaggtgatacatccgtccttcattgtcacatgtgcttcacaaaagagtaagtgctggcacacagggtcccaggctgggatggcccatgtgtggatggtgcttccagtaacaaggcggggcacacttctacctggggcttgaaactcccagtgggacaagaaaacccagaccccgctcttcaccccttccctacctgagctcttcctcctacacatcatagcggtgaccacagctccaaggacagctaggacaaccaggacagccaggccagcaacgatgcccatgatggggatggtgggctgggaagatggctctgggaaaggaggagaaggtgaggggccctgacccccaagcctcagccctgacccggctgaagggctccagaaggacttctgctttctctgataagagatgtgaccccccattcccctccttaccccagctcagggtgaggggctcttgcagcccctcgtgctgcatatggcacgtgtatctctgctcttgtccagaaggcaccaccacagctgcccacttctggaaggttccatctcctgctggcctggtctccacaagctcggtgtcctgggtctggtcctccccatcccgctgccaggtcagtgtgatctccgcagggtagaagcccagggcccagcacctcagggtggcctcatggtcagagagggggtggtgggtcacgtgtgtctttgggggttctgacgggaagagtcagaaaattcagacactttgcatctctcttgggacactccagcagcgcccatgtgaccatcctgagaatggacaggacacctggggtggggaaggcggcagagaacccagacgccagcctggacacaggcacctgggataatctcctattcattg

SEQ ID NO: 120218 - DNA, 1048 bp, Homo sapiens
gggagccttccccatctcctatagatctcccgggatggcctcccacgaggaggggaggaaaatgggatcagcactggaatatcgccctcccttgaatggagaatggcatgagttttcctgagtttcctctgagggccccctctgctctctaggacaattaagggatgaagtctctgaggaaatggaggggaagacagtccctggaatactgatcaggggtctcctttgaccactttgaccactgcagcagctgtggtcaggctgctgacctttctctcaggccttgttctctgcctcacactcaatgtgtctgaaggtttgattccagcttttctgagtcctgcagcctccactcaggtcaggaccagaagtcgctgttcctccctcagagactagaactttccaatgaataggagattatcccaggtgcctgtgtccaggctggcgtctgggttctctgccgccttccccaccccaggtgtcctgtccattctcaggatggtcacatgggcgctgctggagtgtcccaagagagatgcaaagtgtctgaattttctgactcttcccgtcagaacccccaaagacacacgtgacccaccaccccctctctgaccatgaggccaccctgaggtgctgggccctgggcttctaccctgcggagatcacactgacctggcagcgggatggggaggaccagacccaggacaccgagcttgtggagaccaggccagcaggagatggaaccttccagaagtgggcagctgtggtggtgccttctggacaagagcagagatacacgtgccatatgcagcacgaggggctgcaagagcccctcaccctgagctggggtaaggaggggaatggggggtcacatctcttatcagagaaagcagaagtccttctggagcccttcagccgggtcagggctgaggcttgggggtcagggcccctcaccttctcctcctttcccagagccatcttcccagcccaccatccccatcatgggcatcgttgctggcctggctgtcctggttgtcctagctgtcct

SEQ ID NO: 120219 - DNA, 1062 bp, Homo sapiens
atgggtcacttcaaccccatgactccccagtcgggactgtggcaaatgcaatagacttcagtccagtctctgtgcctggagaagaaagggaagctggtcagagcccacaggaggaggtgacccacagggagccagtagtaggtgggtgtgagggtgagtatgacagagcagttacttgggctcagcagtcagactgtctccttagagtcatgagtcagcccattgacagttactaaacttcctagtgacctcagtttccttgtctgtaaaatggggctgatagctgtctctaggtcatagggctcttgtgaggtttaaatgatttaattcatgtaaatcccttaggaacgtgactgacactttttttaaggtacaattctgtaaaagagtgggacccatccatttaggtcctgtttccttattccaggtgtgatgaaaccagctctccccaacacttatcctgacccccgttctatgcctgcaggtggagcgctgttctgtcccctacaacctatggtgtggggggcaaccaggaaaaggccagggtggtgccaagtatgaggaagtcacagagtaacacacacacatacacacatacatacccatacctgcttatatacataaatatgtacagatacatacatatacgcacttataaacacgcacatacacatagatgcccatacctgtttatacatccacatgtgcacagacagacacacacacattacacagtcccaattccttgattcagtttggggcctgggtaattccagttcaatctcttttaagaaatttaagaatctgaaagagaaagacctgagaatttttgtcccacaagagacagacccacttcctaggcactgtgggactttctgagccccatgtggccctgctcctggaagctcatggaggagcgggaaaatctgacttaacatcaaggttctgaagtccagaggcagccctaggaactggccttccctgggtaccaggcctccgggagtccagcaggtccccttcctcctatctcacctatgacgtctcagcctgccttccacagcc

SEQ ID NO: 120220 - DNA, 1035 bp, Homo sapiens
cctcctgtcccacgtctcctgcgggctctgaccaggtcctgtttttgttctactccaggcagcgacagtgcccagggctctgatgtgtctctcacagcttgaaaaggtgagattcttggggtctagagtgggtggggtggcgggtctgggggtgggtggggcagaggggaaaggcctgggtaatggggattctttgattgggatgtttcgcgtgtgtggtgggctgtttagagtgtcatcgcttaccatgactaaccagaatttgttcatgactgttgttttctgtagcctgagacagctgtcttgtgagggactgagatgcaggatttcttcacgcctcccctttgtgacttcaagagcctctggcatctctttctgcaaaggcacctgaatgtgtctgcgtccctgttagcataatgtgaggaggtggagagacagcccacccttgtgtccactgtgacccctgttcccatgctgacctgtgtttcctccccagtcatctttcttgttccagagaggtggggctggatgtctccatctctgtctcaactttacgtgcactgagctgcaacttcttacttccctactgaaaataagaatctgaatataaatttgttttctcaaatatttgctatgagaggttgatggattaattaaataagtcaattcctggaatttgagagagcaaataaagacctgagaaccttccagaatctgcatgttcgctgtgctgagtctgttgcaggtggggtgtggagaaggctgtggggggccgagtgtggatggggcctgtgcccatttggtgttgagtccatcatgggctttatgtggttagtcctcagctgggtcaccttcactgctccattgtccttgtcccttcagtggaaacttgtccagtgggagctgtgaccacagaggctcacacatcgcccagggcggcccctgcacacgggggtctctgtgcattctgagacaaattttcagagccattcacctcctgctctgcttctagagctccttttctgctctgctctt

SEQ ID NO: 120221 - DNA, 2014 bp, Homo sapiens
accactgcactccagtctgggggacagagtgagaccccatctcaaaaaagtgtttaattaatatacttgtgagtggtctatttgcatttaaaactgctttctagaattaggatagctcccttaggtttaatgttttggtgagcaggaatatcagttacccctccagatcttaattctagttttttatcactttttcatgaggtgatctcatcctcatctcctagcatgtctggcaattttgatttctgaactctgtgctacctcagaggccagcttccttagggaaaaatcagtgctgaagtaaagttatatttccttttctgctctaaatatatagtgggggaataagagaaatgaagaggaattcctgagaacgtaattactagaaactcccctctcccacgtaatgtctctcacacaccatggacccctattcccccaatttgcgaccccccaccccaccccacaacaggtggtgatctttgtgaagtctgtgcagcggtgcattgccttggcccagctactagtggagcagaacttcccagccattgccatccaccgtgggatgccccaggaggagaggtgagctgaagatgggaaagatattttgtgtccttgggagaaaaagacagttgagagaagggaatctcaacatgttttaaatttcctttctcacaaaggctttctcggtatcagcagtttaaagattttcaacgacgaattcttgtggctaccaacctatttggccgaggcatggacatcgagcgggtgaacattgcttttaattatgacatgcctgaggattctgacacctacctgcatcgggtaaacctcacaggctgaaaaaatcccactctcccattcccttgttttctgtttgtacatcttcattcctgcctctgggtctctttcctcttcggtcttccagtgctaccctctgtctccctccaggtggccagagcaggccggtttggcaccaagggcttggctatcacatttgtgtccgatgagaatgatgccaagatcctcaatgatgtgcaggatcgctttgaggtcaatattagtgagctgcctgatgagatagacatctcctcctacagtgagtactgatctcatgaaaccctttaggtcctccctgttccttagtgtgtttgtccgaaatcccatcacataggtcatgggcatctgatgcataatggacacttgactggttcatgccccctggtctttgatgctgtgttgggatgtttttctgacctttatgtggggtgtcttgtcttctctcatcatattacatcccttccctcacccccacgtccgtcctctgaacccaggcagtacaccagtgtctgcatgtgtgccgtgtgttcctgcctcactttccccttttcatgccttattctgaccatgctacgttttcttctcagttgaacagacacggtagaagactcgcccattttggaatgtgaccgtctgtccttcaggagaggacaccagggtgggggtgaaggagacactactgcccccacccctgacagcccccaccccatggcttccatcttttgcatcaccaccactcctgaacccccatttctgatttgtcagaatttttttttaacaaaactaaaaatgaaacacatgtgtctgtggtatctataagtgcttcgtccctttattgtatttggggtgaggttattttagggcatggtccagggtgaattcctataaggcctgggtgccctgcctgctgtgagatcaaaggggaatgggactaagactgcagagccctggctcccccactgcctgccaattgcctgcgctttgtggtctcttccactttctctggcctgggaagacgctggggtgtttatgatcccaaggctcctggtgggtggtgcgtgtattttcagcgccggagggtgctgtgggcactgggggaaacttaggcgcctcctccaaggctctcttggtgcctcctcatctgttccttcagcttctggatcttgagcaccag

SEQ ID NO: 120222 - DNA, 4822 bp, Homo sapiens
gggcctggctttattttatttttatttattttatttctttttgagatggagtatcactcttgttgcccaggctggagtacaacggtgggatcttggctcaccacaacctctgcctcccaggttctcgtgcctcagcctcctgagtagctggaattataggcgtgtgccaccacacctggctcctttattttttaaatgaagcctggcctcataaatgaaggaagttggttagattaagtcagtagaactgaattattgtcctgactgctccgactagccatgtaactttaggcaatcaccctcagtgtttggtgggggggacataaaatttttaaattaggtgccctctaaagttagttttagtttggaaacatgctaaaaattggtttagctcaaacagagtgggaaccctggggggattggactctttccttcctctgttttgagactctttgcttctggctcggcaggttgctgttttttttggtggtctgtctatcaagaaggatgaagaggtgctgaagaagaactgcccgcatatcgtcgtggggactccaggccgtatcctagccctggctcgaaataagagcctcaacctcaaacacattaaacactttattttggatgaatgtgataagatgcttgaacagctcggtgagtggcagtgctggggcttggctaatgctggggagttgttctttggagccaaatgatgtttatttgaaacaggagcacctcagtgcaaggacgactcttatctatcacccatgactgatggctctgggttccctggttggtctttattatgcttttaagcacagtaaagggtgtcatctatcatctttctatgatttttgtttttaacctttgagaataggggactttgataattttaggcataagtcatcaccaccaccaccgttttcattatagattcatatactgggagtcatagcggagattctaaactgaaagagaagacagtacccttctggcatctccagcacagcatttacagtcagaatttatagctgaataagtgtctagactcaggtctgggattaatgtagagagtgtttgtagcagtttgtgtgatgtggtattctagtgtgccaggtggggttaatggaagatttttctgtaagaattgaatcttggtgaatgagagtggggttggacataggccccataagtcattacaaatgatctttggcaattctatatggtgagctataaaggtgggctccaggtagggatgtcatatttgcctgacttgatagaaaagtaatccagagagtcatagatggactctgatatctggaatataatatgtgcttgatatttgtagtctgctgaaggctggctggggcttgggcaggaaagggttgggagaaggtcccataaagcatgttttgaaggccttgagagcctctgcactgggctttatccccatttcatagttgggaactttggggttttaccttatttcttgcttggttaaaacaaacagctggaatctgatcccacttcttgattccaagtccattgctctttccattgtgttgttactatttccagcaatcttcacctcactgggaagtctacctctaatctttgtttatcatacctgcttattttctcctacaatttttttccttgttcttgtagacatgcgtcgggatgtccaggaaatttttcgcatgaccccccacgagaagcaggtcatgatgttcagtgctaccttgagcaaagagatccgtccagtctgccgcaagttcatgcaagatgtaaatacccttctaccttctctccctccactccccgcccgctgcctcctccccttcctcgccctcttcctcagactcccttgtcattcaagtgccaagaaggcggcttgtgcccaactgggagtaatgactccttgaagagacatacagaagcagagacagctagtgttagggcctgcgcgggtgccagggaaactccggaagacttggtcgggttaatgtgagagcgggtagtgttcgactttttcataaatcacaacatttttgaacctcttctccctttgggggagggcaggatttttctgccctaccacccacccatccatcgtctcttacatgcaccctacagccacgcaccctcaaggtggcatcgagcgtacagctggagccttctgctcaccaaaactcctacttcccggtggcaggagagcaagagagggacagacagatggcagggcatgtccaaaagaagagcatcagcacaaatgaatcctccccttccccacctccaggggtgggggcctttggcacctcaatccccgataccctactccttcccacccacatctccttgcacccatctggaacctcggttgatgtgagccggcaacagagaagcaccgtggcgcggcgagggaatgcagacggcacccagcggtggatggcggcagcggaggccgcggggaaacctgaccaggaagctgaggaccaaaccagcctctttttccgttcccggtttttttcctgaacccaacgcgtgccgtgccccgtttcccccaatatgtgttggggaggggtgtcctgaatggggtggtagattttttttcttaaaaaaatttttttgttttttttaatactcagaggagagggacataggaaaggtaaagtggatgtaatcgggtggttgttagggtttggggctaggtggggccaattgcataagcagtggagtgtgttcttcccctccctgcagtgttccttcccgtgggatgatcactctttagctgtatttggggctagaatgagatttgaaggaggccatggaacttctctttagaaagcctgccttggctgggcctggtggctcacctctaatcccagcactttgggaggccaaggtgggaggattgcttgagcccaggaatttgagactagctggggcagtgtagtgagactttgtctctaccagaaaaaccgggcgtggtggcgcatgcctgtagtcccagctacttgggaagctgaggcaggagggtttgcttgagcccgggacgtggaggtggcagtaagctgtaattgtgccactgtactccagcctgggtgatagagagagaccctgtatcaaaacaaaacaaaaaacaaaacctgccttctgggattgggcttctggtttttttcccatgacacacgcatcctttcctattttgtcctctgggtcttcatattaactatcttcccccaggatagtataaaaagtgttaggaaagttgggctttggagttgtggtaatttctgtctttgttactttcctccccttcagggggttttttaattttaaagatgaatgcagtgaggtataatggtgtgtgcctgtagtcccagctattcaggagactgaagcaggaggatcacttgagcccaggaatttgaggctatagtgtgctatgattgtgccagtgaatagccactgcactccagcctgggcaacatggtgagatcctgtcccttaaaagtgtatctgctgctctgaatttggtattttaacaccacttactgatacctttcctgtaaacctgtagatggtttaattcttagtcaagagaccagtctcatctaaaactatcctgttgtggtctgacggcaagtaactcatcttgagtaatttttgtttctccttaagtggcattttgactgtccattgcagcattctgatcttaaaagacatccactttgctaatgcacacgagattctcttagttgaagtaggagaatcaaatggagcagttgtcctccccccaccccatgttcttagaagcacctctgatggagttattctgaccttgagtcactgcctcccatcatttcccagatgtttggtccttgctctccctttgagaatcatctcccattttctttcctctcccacctctatttgaggtaatggcatctgtgccattgggtggtttcactgctccttgacttcatttgcagtttctttcccatgatagtttttagttgggcagtcttaaaactcatctgataggaaggaaattagatgtaatgtgagagagaccacagtaaaatgtgggtatttttgggagtggggtggggttttcaatcttctctttcctccccatccccccatggggtgtattggagatcaacttcctccacccccccaggtttaacccccccactctgccctcctcccgttccccacccccttcctcccccccagccaatggagatcttcgtggatgatgagacgaagttgacgctgcatgggttgcagcagtactacgtgaaactgaaggacaacgagaagaaccggaagctctttgaccttctggatgtccttgagttcaaccaggtcagttagacgtccagtagggggatgagcattggagcactccagctgtagcagaaacctggatattaagtacacttttattgaggaaatcacatgtgtgatgtgggagagaataatgagggtataaatatcttaggggctgagcatgagtaaggtgggagctgcttttctattctatggctggcacgggtatgtcctcaataacctcaaggaaaataaacttcaaaaattaagatccttggccaggcacggtggcttatgtgtgtaatcccagcacttggggaggctgagggaggtggatcacttgagtccaggagtttgagaccagtcggggcaacatggcgaaacttcatcactaccaaagaagaaaaaaattagccaggtgtggtggtgtatgcctgtagtcccagatactctggtggctgaggtgagaggatagcttgagccc

SEQ ID NO: 120223 - DNA, 3360 bp, Homo sapiens
gcatcaatgagaggcggcgctcggcgtcccttggtcttggtatttgcggagggcggggctcttctcaccttccttgtcctttcttgagctctttctcggccctcggtgggactgggaggaggagctggtttctgggcccagttggatttttctcaccttgacttgcccaacttaatttggagtgccttccaagtgtttacgatacgattggtgtcattgtatgtttctccaaaaggagtctcaccttcgtagcgtaacagtgatgtgagaccacttggtaaagatcctgttaaagcctgggcggggattgcctttctctgtcacctattagctttcttattgtagggtggagacatgaattttgtttttttgtggccgagccatttgtcttgcaccgcccctcccccccatgctaattacacaaggcttgcttaaacagcggaagggaggatactgagaagtgggaggctgagagctatgggaggtggacggcggccatatgatgttttcttttcgaaaggtgagcgctttgcgcagtgatgaccctcatctatcacccttgactgatggctgctgagttaggcatccataacggtgggattataatagggaaagcggagtcttcctttgaggacttttcaggactctacttgtcatctccattttccactttactaagttattagtcgtattttaccttttattatctattctatttcctcactgttactttcagatcaagaatttataagttggtcttccccttccaacttttctggtttccgctactgtgattgctaatcttgttgggaacctctgtcctaaccactttccctggtactgctttttctgttctgttatatttgcttttcgtttttatgttttgtatctgtttttctttccaggtaaaagtttcctggtttagggaaagtgggaactggggatggaaaagaggtggtgaaggctgtgctcgtgattaagtcttgcttttttttttcccccctccagctcttctgttagaaatagtatctttgttttcctttgctgttcctcaatcccctactcttcaccccttgttttcacctattttgcgagaacccatccagatcccccttcccttcttcccctgccggcccagttatggcagagaacgatgtggacaatgagctcttggactatgaagatgatgaggtggagacagcagctgggggagatggggctgaggcccctgccaagaaggatgtcaagggctcctatgtctccatccacagctctggctttcgtgacttcctgctcaagccagagttgctccgggccattgtcgactgtggctttgagcatccgtcagaaggtaaattttctcttgggcatgtagtgctcattgggctctttaagggtacaatacaaagatgtgtttgtcgttgctcaggtggtggtaagggtttatacttaaggctagatcagggccaggtgcagtggctcacgcctgtaatcccagcactttgggaggccgaggcaggagggtggccacttgagctcaaaagtgcaagagaagcctgggcaacacagcgagactcctgtctctacaaaacgttcagaaattaagcaggtgaaggttgaggcttcagtgagccgtgattgcaccactgtgcaccagccggggcgacagtgaggaagaaaaaatcaggggataagtatcaaaaacaattttggatagaggaggcttatacaggcttattctttctttcgtgatagcaccaaagtgctaatgatccaaaagtgacttccaggtctgccattcattcttgtgactggcttttcttgtctgcttatttttaattttgtcacttgacttctaattttaaatttccagaaaggtcctgcttggacctgtagtctccctctgttgggccaggccaactgtggtctctggaaacctctatgactggtttagagatgactggcttctgggtcaggtaccaagtccttcattttgtccagggttgtagtagttacgtgacccgaagtatagcaacctaagcaggagaagtggtctgtggcaggtattcaaatgtcatgaattgttacagattaagaaaaataaggacagagctaggatcattgaaggtgagcggttggtagatgcaaggggtttgttactaggactgggaaggcctagatctggaggaggctaaagctaggaggaattaggagagtctgattttgaggtgaatgtaattgagcagagagaggtaaaatgggtctggaagttggcaagaaccaggtaaatactagactttgagaattgagtggtaagaaatgggcttggcatggtgaaaaaggtagagttatctggagactgaagtctaatttatcttcctccccccccaacttttagtccagcatgagtgcatccctcaggccattctgggaatggatgtcctgtgccaggccaagtcgggcatgggaaagacagcagtgtttgtcttggccacactgcaacagctggagccagttactgggcaggtatatttggggagagtgctggggaggggattttggttaggactataagggaagggtgtttttgtcctagctacatgatgcttgcagagccatgagcacatgacctctgttacccttgacaacctgacagctgtgggggatgttctgtcgcaagcgtggggttcatgatttagatcacataattgaagtcatttattatcggcccaggtgtgtttttgtgacagtcacttccctagaggggataatgaagagctacatttaccatatgtctccgtctacttcctgcctaaggtgtctgtactggtgatgtgtcacactcgggagttggcttttcagatcagcaaggaatatgagcgcttctctaaatacatgcccaatgtcaaggtaagccaaggtaaagagacctgagagtgagggtgtggcaagttggagggataagaaacttgtaggccaatagtctctttaattttggagaagctttagtttgctgtggtgtaacagagtgttgagttcctatgtaacaggaggattcgtaattgggctatggatgatgcttaacacaagaccacccttttcttactactttatactgactttgaatcatatcagtttaataattttggggtatgtggcagagaaagccggaaactttaaaacagctccagtggtgtgtgaatattgaggattctggccaagtgcacaatggcttacacctgtaatctcagcagtttgggaggccaaggcgtgtggattatttgaggtcaggagtttaagaccaatgtggccaacaggatgaaaccctctctctactaaaaatgcaaaaattagccgtgc

SEQ ID NO: 120224 - DNA, 1053 bp, Homo sapiens
cttctgccagttccctccctcaaagaaatcctccaatcaaaatcacctcccaccataatccctgtcttctttccatcccctagaaatcctgggaggcaggatccaataattttcctgtgacacttataaatatcctgctcacatctgaatctccttgttgttctttaaccctcactgggactttgtaaacttccaagtcattctcacctaaaccctctgtgaaatttgtaatatggggaagtaggaatgtggaaaacatcctgacttcagtgtctggccgatgtgggtccctctcttgaccctgtcacttgctggctgtgaaaccaggacaagctacttaacttggtagcctcgatgtcctcctctgtgaaactgggatgataataatgcctaccttgtgagggttgcttcaatgattaggaatcattctgtaaagtctagcacagttccttgcatgttgtagcagtgattcagtaagtagcaaccctgtgatactattaccaccacctgctcactggtcaaaacctacacagctgtttcctcacgtccatcactggctctctaattccacttgttcattctgtgaccctagttattttctgaaaaattggttcttctcttttcccagagaccttctgatctccaaaaagaggagatgactacatttagcccctctcttataattccaggtagataactgcattttgtagcctctctttgtttttcttttgctgatctttgtctttattagattttcctcctttcctatttccccaaagacttatcagatgctcattgctttctaagatctaaaatgatactgtgttccctcatatgcatgcccttcctttctatatccttgacaccttactttcccattgtaacaataaaaaaagtatcaataaaataattattggcaaataaattggtgagttgaagcagcctccttttgcctcatcatttctcattttcagtcactttgttttttttttttttgagatggagttttgctcttgttgcccaggctggaatacaatggcgtgatctcagctc

SEQ ID NO: 120225 - DNA, 3557 bp, Homo sapiens
ctatgtctgctttttcatttttcctgttcctcgtctcctttctcccccaaccccgtttttcttcttgggcctctgcccccttacttcgttgtctacatcctttttttttttgccattcctgtttccatatattttccacctgctttcgtattcattattttctgttagttttggtctattcgctacatgactcttgtattcgttttcccttcatatatttatcttcacagattggcctcctcaaacacctacgaagcaacatccatcttatctctagcttgtcataaagttctttctccccaattttagctttcattctgggcctgtctggatttccctgctttcttccccactatttctcatctctttacactgttcccgtccataaacgaatgcctggtcactctggaatggactgagagacctgtcgtccggcttgcttagggagctggaggtatcgagtaaagaaacactggtgatggacatttttaatgaggataggaaaacgaagatggctctggccttggccctctgttttctggcccatggttacagggtgctaaggtggctccataatgctttttctcagttcttcatatggtaaaacagtatttcatctggaggcgattttttccaggagccaatacaggagcaagtttaggaaaagatgggatatttcaaatacttgaggttcctatagcctgggagtatgtacagccctagttgttctatgaggatttctctggtaccaacccccattccggctgagcaagctcataaaatccttaaactcccagcataccttcctgcaaaccttcccagatggacacgaggctgctgggctgggagcctggggtacagggccctgggggcatgattagggagcttgtgtccaataaacagggaatctaaagtgttgtttcttcttctctgatggaattgtatgcttcttttttagttttctcttgcttgaatttgtcctgttgtaagtctctgaaacgattttggtggagagagaagagattattacttgtagggaattactctttgtagacaggcacaaagggcagagtgtttatactaggaggatgctggatttttacttagatttccttgacaaaggtgtctgggggaaaggagggaacatggcatttgagctatgagggagctaagtagatcatggttgcttgagaagagtgggcagtttacatagactggaggaaaagacaccagagggcctcatatctgagtccctaatgataatgcaatggagtttttaagtttctgttatggtctgtacaggggacagagactgagacacttgctgtctggcccacaggctctggcacgttttgggggaggtgcctgcaggacccaacatactcaatgagcttccagcgcaatgtccgatcgctcggggccgactgccaagggaaaggatggaaagaagtattcctcgctcaacctgtttgatacgtataagggcaagtccttagagatccagaaacccgctggtgagagtcctgcaaagatgcttctgatggttgaaagctaggcatgcatggggcatacgttttagagctctttaaagggaagtggctgtagtagaaataccaaaagactagaggagatttcccaactttacactgggtcctttaaagggggtgtgggctctgggtgaacaccagttatcctcctacaaaggcgtgtctgtggttccctgtctttggacacgtaagaattggaggaaaataaatgtggatttgggaaactttgaggccagcttgcttcttgcaggctcatgatcaaccaatctcacataaaagtattgaatgttacatatctcagccttcttgatagggatttcatagatttttttttttttttttttttttttgagaccaagtttagctcctgttgcccaggctggagtgcaatggtgtgatcttgacttaccacaacctccacctcctgggtttaagcgattatcctgcctcagcctcctgagtagctgggattacaggcatgcgccaccacacccggctaattttgtgtttttagtagagacagggtttctccattttggtcaagctggtcttgaactcctgacctcaggtgatccgcctgcctcggcctgccaaagtgctgggattgcaaagtgtgagccaccacaatcagcgcgatttcagagattattaagggcaggggaaggaatcccttctaagagaagtttggaggaagtaggtaataaaatattcaacatgtataaatgtgtcccaggataggaggccatcagatctcccacatgaggcattttcgaccctctctccgtcttgttctccagttgcccctcgccatggcctgcagagtctcgggaaagttgccattgcccggcgtatgccacctccagccaaccttccaagcctgaaagccgagaacaaaggcaatgaccccaatgtctcactagtgccaaaagacggaacaggatgggcaagcaaacaggagcagtccgaccccaagaggtagacagaggcttgggggacctagagtgatgggtattttaacttgaacttcagggagcattggggcttggtttagtccagccacgtctgagccagagacgaagaggtccctttcttacctattgcaggttccttgttaaatgactaaggaatggtactaaactttagctttttgtcttggagagagagcatgaaaaaatagacaacagcctacaaaggatgacaaaattaatttgtccttatatttgtaaatggtagcaatgggcatgatttcagtcctgagtctccaccagttggagaagtcagggaggcatctcaggtgtgaataaccttcccattctgtcccctcagttccgatgcctcaaccgctcagccgccggaatcgcagccactgccggcttcacagacgcctgcctccaaccagccgaaacgacccccagcagcccccgaggtacctggagaactggaggggtggggaggaagaatggttcatagctgccccacccacatcatttatcatctttctgaacacttccccagaacactcctttggttccaagcggggtaaagtcctgggcacaagccagcgtcacccatggagcacatggagatggtgagtgcagcacttaattggggagctgtgtctgggcaccatgggatgcatgaaccctgcactgtattttcagccaagtgaccttggtcctctttggctaaatcaaggaccacccatattcagtttcatggaggcacatgagcaagtttaagtctcagtcttatatgatggagtgtagtggtgccagaactgacctccttggggaataagcagttattctgtaggggggtgagtttgaaggcgggaaacctgatggtctggtacctgtcagagccttccactttttttttttttgagacggagtctcattctgtcacccaggctggagtgcagtggcgcaatctcggctcactgcaacctctgcctcctgggttcaagcgattttcctgcctcagcctccagagtagcgggactacaggcac

SEQ ID NO: 120226 - DNA, 1358 bp, Homo sapiens
atgctctctctccaagacaaaaagctaaagtttagtaccattccttagtcatttaacaaggaacctgcaataggtaagaaagggacctcttcgtctctggctcagacgtggctggactaaaccaagccccaatgctccctgaagttcaagttaaaatacccatcactctaggtcccccaagcctctgtctacctcttggggtcggactgctcctgtttgcttgcccatcctgttccgtcttttggcactagtgagacattggggtcattgcctttgttctcggctttcaggcttggaaggttggctggaggtggcatacgccgggcaatggcaactttcccgagactctgcaggccatggcgaggggcaactggagaacaagacggagagagggtcgaaaatgcctcatgtgggagatctgatggcctcctatcctgggacacatttatacatgttgaatattttattacctacttcctccaaacttctcttagaagggattccttcccctgcccttaataatctctgaaatcgcgctgattgtggtggctcacactttgcaatcccagcactttggcaggccgaggcaggcggatcacctgaggtcaggagttcaagaccagcttgaccaaaatggagaaaccctgtctctactaaaaacacaaaattagccgggtgtggtggcgcatgcctgtaatcccagctactcaggaggctgaggcaggataatcgcttaaacccaggaggtggaggttgtggtaagtcaagatcacaccattgcactccagcctgggcaacaggagctaaacttggtctcaaaaaaaaaaaaaaaaaaaaaaaaatctatgaaatccctatcaagaaggctgagatatgtaacattcaatacttttatgtgagattggttgatcatgagcctgcaagaagcaagctggcctcaaagtttcccaaatccacatttattttcctccaattcttacgtgtccaaagacagggaaccacagacacgcctttgtaggaggataactggtgttcacccagagcccacaccccctttaaaggacccagtgtaaagttgggaaatctcctctagtcttttggtatttctactacagccacttccctttaaagagctctaaaacgtatgccccatgcatgcctagctttcaaccatcagaagcatctttgcaggactctcaccagcgggtttctggatctctaaggacttgcccttatacgtatcaaacaggttgagcgaggaatacttctttccatcctttcccttggcagtcggccccgagcgatcggacattgcgctggaagctcattgagtatgttgggtcctgcaggcacctccc

SEQ ID NO: 120227 - DNA, 3380 bp, Homo sapiens
gtctgccgaacagtcgtctgggcccggaccaagcctccgcccccaaagtgagtggctgccttttggccaagacattacctattgcatctcagagctaggtgctggcttattcaccttcctccccatcactttcagctgtgttcacttgtcctccaatcattgatacctctctctaccttttccaaaatacagattctacaacttggagggacggaggtgggcgtggccctgatgagctggagggcccggactccaaacttcatcatggtcatgatccccggggtgggctacagccttcaggcccaccccagttccctccctaccgcggaatgatgccgcctttcgtgagtcttggtgtcttgtcttggaacgattacactggaagctggagagctaggaatcaggacttagtctttgacctatgagatagaagggagggtgggaggatgattgatagcaggcttaaggagctagaagggtatatgactgtccctctgagcagctactgttggacccttttacagatgtatcccccatatctcccgttccctccgccctatggaccccaggggccttaccgataccccactcctgatgggcccaggtgagcaatccaggtctgggtttgtggctgggggcaggggaagcttattgggggaggagatggttttctagccaggaggctcagtctaggatcagtctcgcatgtggttatacaacatgccatatttcattttcttttttgtgtacagccgttttccccgtgtggcgggcccccgaggctcagggccaccaatgcgcttagtagagcctgtgggtcgtccctctattctcaaagaggataatctcaaagagtttgatcagttggatcaggagaatgatgatggttgggcaggtaagtggatattaagggtcaagaatttggatcttgaaaggcaaaacctaatgaggaaaaaaaaatacagggttatgtgggtgaaaggcagacattgaagtgtaggaagaccaggcccaatggctcacatctgtaatcccagtgctttgggagtgttaggtgagaggatcgcttgaagccaggagttcaagaccagcctgggcaacacagcaagaccccccacctctacaaaaaaaaaaaaattttttagttgggtgtggactgtgcatctgtggtcccagctactctggaggttgtggtgggaggatcagttgagcccaggagttggaggtcacagtgagctatgatcgtgccactgaactccatcctgggcaacagagcgagacttttaaaaggaaaaaaaaaaaagagtaggggaggatggatggggaataccaagtccttgcaaagtggtgagaggagtaagaatgacaagacttcattggtggatctagacttcggagggaaggatattggcattggtagtccatcttgttacatagttccagactacctcccaagattggagggcagaatgcttgggttactaatactcatatttcccctcaggggcccatgaagaggttgactacactgaaaagctcaagttcagcgatgaggaagatgggcgagactctgatgaggagggtgctgagggccagtgagttagggccatcaggggagaagaggagggggtcttggtttgtattttggtaatatactcttagaggagtatattagttgcagctgattttaatttcactgttgatctgctcacagcagggattcccaatcagcttctggtgaggaacggccccctgaagcagatggcaaaaagggcaactcccccaacagcgaaccgcccactcctaagacggcctgggcagaaacctctcggcctccagagacagagccgggacctcctgccccaaagcctcccctacccccacctcaccggggccccgccgggaactggggcccccctggggactacccagtgagtgtctccaataagggattgagagggtcagctgtgggaaattggtgtcagctgagtaattgaagcggttgtgatatagaggaaggggggtgctaaaaatgggctgtgtgaagtgccaggctgcagaacatcctgggaagcttttaaatatctttggtaataggggagtctgggtaagaagtgagaaactgggatgctaatgaggaaagaagaaaaaggagccctgggtgtttgggtttcggaaggagagagggaacagaaaaataaaaagactagggtggctagatagctggatctgttagtatgcatcagtagtccaagctactcagcaggctgaagcagaaggatcacttgagcccaagttcaagaccagcctgggcaacatagcaagacgtggtctcaaagaagaccaggataatgagtttgtcaccacccagagagatcaaccccaaagcctgggtcgttgcatcctgcaagtagcgacagttgatttgttgtaaaagagatgatagaaagcatagtaactgattcccctggccctgctgggtcttgccaattgacaggatcgtgggggtcctccctgcaagcccccagcacctgaagatgaggatgaggcatggcggcagcgacgaaagcagtcgtcatctgagatttccctggcagtggagcgggcccggcgacggcgagaagaagaggagcggcgcatgcaagaagagcgccgggcagcctgtgctgagaagctcaagcgactcgatgaaaagtttggggcacctgacaagcggctcaaagcagagcctgctgccccacctgctgccccttctaccccagctccaccacctgcagtccctaaagaactccctgcacctccagctccacctccagcatcagccccaacaccagagacagaacctgaagagccagcacaggcccctcctgcccaatctactcctactccaggtgtggctgcggctcccactctggtgagtggtggtggcagtaccagtagcaccagcagtggcagcttcgaagccagcccaggtatggagatggggataggtactaccagatgtcagatcactgcttcaaggtgcttaaaggtgcagggtggtaaggctggggataaatgaagtagaaggcagttgttttggtttattggactatcagtgatagtgttctatcatttgtatatctgaaggagggaaggttttgtctggaatcttaggttgtagtctaataccatttcttggcagagtactgtagctcacgcctataatcccaacacttagggaggcttggggtggaggatcgcttgagcctagggagtttgagaccagcctgggcaacaaagcaagaccctgtcggccaggcatggtggctcacacttgtaatcccagcactctgggaggccgaggcgggcagaacatgaggtcaggagttcaagatcag

SEQ ID NO: 120228 - DNA, 1751 bp, Homo sapiens
gggtgatgggattggtcccacccgccagccccctagtcagggcttgggctaccccaaatatcagaagtcgttgcctcctcgtttccagcggcagcagcaggtgaaatcaagttgtttaccctctaagggctgcttttcttcctggcttcggtccctaattctcttcataagttaccttctgggtccctttgcttctttgtccagttgtctccattgtcacgccaatttcccctagtccaagttttttctttgctgattcctttgtccatgtgtgctttgagcctctctcatcttgtctttcctcctttcctaggagcagctcctgaagcagcagcagcagcaccagtggcagcagcatcaacagggctctgcccctcctaccccagtgcccccatcaccaccacagcctgtgaccctgggggctgtgccagctccacaggctccacccccgccccccaaggccctgtacccaggtgctctgggccggcccccacccatgcccccaatgaactttgatccccgatggatgatgattcctccttatgtggacccccggctcctccagggtcgtccccctctagacttctaccctcctggtgtgcatccctctggtaagggggcatgggaggagtgagaaacaggaaagtcccctcagtcttaggcattggatattagggtcttactgtgactctggtacgataggttttgcccatcatagtgatgagggaagggcatatgcttggcactgctgagatagctctgttgcaaaaatgggcttagttaagaaataagcagtggttggccaggcattgtggctcacgcctgtaatcccagcacttagggaggccgaggtgggcagatcaactgagttcaggagttcgagaccaccatggctaacgtggtaaaaccccatttctactaaaaatacaaaaaagtagccggcgtggtggcgctcgcctgtagtcccagctactcgggagactgaggcaggagaaacgcttgaacccaggaggtggaggttgtagtgagccgagattgtgccatcgcactccagcttaggcaacgagcgaaactccgtctcaaaaatgaatgaatgaatagcacaactccatctcaaaaatgaatgaatgaatgaaagaagcagtggtccttcatttgccaggatttatttggggtgggttgattctcttgtagggaatctgagtggataaccttgttatataagagcaggcaaggcccggacctactgggaacaagagatggaagagctgacttgaccgcgaggggagatgctttttgggctggagggcttgtgacatgaataggattatttttctttttctttggtttcttcaggcctagttccccgagagcgttcagacagtgggggctcaagctcagagccatttgaccgtcatgcacctgctatgttacgggaacggggcactccaccggtggatccaaagttggcctgggtaggagatgtcttcaccgccacacccgctgaaccccgcccacttacctcacctctgcgccaggctgcggatgaggatgacaaggggatgaggtgagtcttggtcatgagaaatgggtgagttcacagtgaaaggatctaggcctgggagaaaggtactttgggttagtggtagggatagggatgaacgggaaaggagaggctggatggagtggctcatgcctgtaatcccagcattttgggaggctgaggcaagaagattgcttgagcccagcag

SEQ ID NO: 120229 - DNA, 3210 bp, Homo sapiens
gggccctcgtccagggagcagtcgtcgtggaatccctccagaggagccaggggccccaccccgccgggctgggcctataaagaaacctccaccacctacaaaagtagaagagctgcctcccaagcccctcgaacagggggatgaaacccccaaacccccaaagccagacccactcaagataaccaaggggaagctagggggccccaaggagaccccacccaatggaaatctttcccctgccccaaggcttcggagggactattcgtatgaaagagtgggtcctacctcttgccggggtcggggccgaggcgagtattttgccagagggaggggttttcgggggacctatgggggacgagggcggggagcccgaagccgggaattccgcagttaccgagagtttcgaggagatgatgggcgtggaggtgggacagggggaccaaaccaccctcctgctccccgaggccgcactgccagcgagacacggagcgagggttcagagtatgaggaaatccccaagcggcgccggcagcggggctcagaaacaggcagcgagacccatgagagtgatctggctccttcagacaaggaggctcccacacccaaggagggaacactcacccaggtccctctcgctcccccaccaccaggagccccaccttcaccagccccagcccgcttcactgcccggggtgggcgagtcttcactcccagaggggtgccatctcgccggggccgaggaggagggaggccccctcctcaagtttgcccaggctggagccctccagccaagtctctggctcccaagaaacctcccacaggccctttgccaccaagtaaggagcctttgaaagagaagttgatcccagggcctctgtcccctgtggcgcgcggaggcagcaatggaggtagcaatgtgggcatggaagatggggagcgaccccgaaggaggcgacatgggagggctcagcagcaggataaaccgcctcgtttccggaggctgaagcaggaacgggagaatgccgcaagggggtctgagggcaagccctccctaacccttccagcctccgctcctggacctgaggaggccctcacaacagtcacagtggccccagcacctcgccgggcagctgccaagtctcctgatctgtcaaaccagaactcagaccaagccaatgaggaatgggagactgcatcagagagcagtgacttcaccagtgagcgccgaggggacaaagaggcacccccaccagtactgctgacacccaaggctgtgggaactcctgggggaggtggaggtggagccgtaccaggtatttcagccatgtcccgcggagatctgagccagagagccaaggatttgagtaaacggagcttctcaagtcagcggccaggcatggaacggcagaatcggcgccctggcccagggggcaaggctggcagcagtggcagcagcagtggaggaggcggtgggggtcctggaggaaggaccgggccaggacgaggcgacaagaggagctggccctctcccaagaaccgaaggtgggtaggaacaaacaaatttattgtggtttaaaaattggaggagggggaaaaagcctgagggaaagataagtttgggtggagtggagattgtggcctgaggggccatgggctctagaatgtcagtaggatttccatgtctggctaaggcaactggaaagcggttggtagggtgttagagtcaagaacacccacctatgtattcattgctggttctttgctttccagtctgtgcatctgtatgcataggaatccttagaaggactcaaaaacacctggactttaatagggaagagaataggttgtaagcagaagttgggaaacataacttgtgggaaaaagtaacgatttagtggatactggagctaatgctctgttttctccagtcgtcctccagaggagcgtcccccggggcttcccctgcctcccccacctcccagcagttctgctgtcttccgcctggaccaagttatccacagcaaccctgctggcatccaacaggctctggcccagcttagtagccgtcaagggagtgtaactgcaccagggggtcatccaaggcacaagcctgggcttccccaagcccctcagggcccctctcctaggcccccaacccgatacgagccccagagggtcaacagcggcctcagttctggtaagctggaggggttatgggtgggaatatctccatccccagagaaggtcaagtgctggagggagcgggtggagaacctggcctagggaccctgctgctgggtgcgtttctgcagggagcaagggtagaagaattgggaggtggagtagagaggaaaagttagggtcagtggcagagccaggcagatgctgaccctttttctctttcccagacccccactttgaggagccggggccaatggtgagaggggtgggtgggactcctcgggactctgccggggttagtccctttccccctaaacgtcgggagcggcctcccagaaaaccagagctgctacaggaggtaagggatgggtttgagattgtgcttcactgcactcttactcgtgaaaattcttctgggttatgttttctctgttttctttcctgtttctttcactgtgtttttactccagaattctcagtattagtctcccatgtgtctcccttgttgtccccacaccctgtgtcaccccactctgtcctggcttcctataattcccaattcccacccaattcatgttttgcttctggcccttctcatctgtaggaatctttgccacctcctcatagctctggattcttgggctctaagcctgagggcccaggccctcaggcagagtccagagatacaggcacagaggccctgacccctcacatctggaaccgtttacatactggtgagtaaagctgagtgaaaggactatggtagaagggttaagaatgagaggggcttctgaactgtcatctcctcacttctcttctggttggtgctcccttctccagccactagccgaaagagttaccggcccagctccatggagccttggatggagcccctgagtccttttgaggatgtggctggcacagaagtgagtgagggtgggagggtgtgtctgagctgggacttttttgagcactggtcataccccccacctgctctgggttgagtctggagctgttctctcacttggc

SEQ ID NO: 120230 - DNA, 2365 bp, Homo sapiens
tccttcccaggccattcctgtatcacgagactgggagctgcttcccagtgctgctgcctctgctgagccacaatccaagaacctggattctgggcactgtgtcccggagcccagctcctcaggccagcgcctgtatcctgaggttttctatggcagtgctgggccttccagttctcaggtaggccccgcttcccattgcatgaccccttcagtgaataataatttttttctgcctggtatgtatttataatcaagcctttctacgttgcagagttgtgagataccactttgtcacatcatttttctccctactttttgcttctatgggtgggatggtgatcttttttcttgaccacagatactaaagctgtttcaaccgtgctcctctcctgcagatctctgggggagccatggactctcaattacatccaaacagtggaggcttccgccctgggacaccctcactgcacccttacaggtaagactcgatgcctgtggatcacagaagtacttggagatgtgtttcggggagagggaaggggaagacacagttctagggtactagaagctagtggacttaaggcattgctaggactctggcttcctaacagcttttctccccacaatttattttcagatcacagcccctatacctaccccccggcccagcccctccctcagcactgctctctgggttagctctcaagggccagtttctggatttctccacaatgcaagctacagagctggggaagttgccggctggaggagttctctaccctccaccttccttcctctactctccggctttctgccccagtcctttgcctgacacatcgttgcttcaggtaagaggggggcaggtattagatattgggggatagggtagggagaatgattttgtgggggttgatatatttctccctgtttcccgacaggtacgccaggatctgccatccccttcggatttttattctactcctctgcagcctggtggccaaagtggctttctcccttcaggggctcctgcccagcaggtatattgtatcttcacacttccccttcatttgatttctctgtccagttgctggctttgattttccctggttttctgacattcctccctgcccccaacatgcacacccaaatttcttgttacagatgcttctacccatggtagactcacagctgcctgtggtgaactttggctccctgccgccagcaccacctcctgccccacctcccctttctctgttacctgtgggccctgctctgcagccccccagcctggctgtgcggcccccacctgctcctgctactcgggtgctgccttcacctgccaggcccttccccgctagcttggggcgagcagaggtaaggtacaggaactgaggggctagggagcgccaagacttgggagtagggattctgtatttcaaggtaggcagctcatgatttttttcccctcagctgcatccagtggaactaaagccgttccaggattatcaaaaactgagcagcaaccttgggggacctggatcatcacggactcccccaactggaaggtgaaacggaatagggatgtggactttccaagtgcttccttactttggaaccagggtctggatcctaggcttgccttagacgcccttcttcccttaggtccttctctggcctcaattcccgtctcaaggccacgccttccacctacagtggagtcttccgcacccagcgcgtcgacctttaccagcaggtgaaggagaaacccttgtggccccaactctaaattcgagttgccacctgatttcctgtccttccgtctcatcgctgacctctcactgtgactcactgtttaacacatgcctgtcccctaggcctccccaccagatgccctgcgctggatacctaagccttgggagcggacagggccgccacctcgagaagggccctcccgacgggcagaggagcctgggtcccgaggggacaaggagcctgggttgcccccaccccgctgagggagttcctcttgccccctacccccggggcttgtatatagattataaatatataagggggaaaggggtgggcggggaggggttctggggctggggcctcacttcccctcctcccccttcccctggtcccctgtccctggggctgtttgttaaaaaagagtaataaaaggatttaaaaaaaaaaacttctacaatgatttgggggatgagttgtttgcattgtcttaaagcatggtgctgagtgatctgtagtttcagtcagggaaatattcattacttattccagtgagctgttgaaactaaaaacatgaccatcgtattggatctttaaatttttgtgagtctggaat

SEQ ID NO: 120231 - DNA, 1004 bp, Homo sapiens
atccggctcaccctttccatgagtcaaccactccactgagtctccatgctagtggagagaggggaaattaagagtccaggatgtggtttttacagcagaaatgccttcctaattctctttggcactagccaaaactaaagtgaatgtgcttgaacgtgctcttcaaaacgaaaggcagaaggggtcaagccatccgggattcagagctaggtaatccacaagaggaaacccaccttaaaggaaaatgggatctaagcacatggggattaggcagctgagcaactaatacaggactgctagcaaacagactaaggtcaagtcctgtatggttatgcaacaaccaagagcaagtctgaatcccagaaaaagtttcctcattaaacgaggggaggggagactgaataacaagagctcccaccatctctacatagtttgattccaggcatgacggggaaacctggatagagagagaggcttagggaagaggaaaaccaaccttgcgtctcttggcaggcataccactgaggtaggcatcactcagagggggctgcggtttcaccttccgctggctctgaatgtcctgctggataatagggacccattcctggggaggaaaagagaaaatagtaatgtccttgactttcagctgccatgacccactggattacttcctgacacttactggggggactgcagctgcccaaggttctgtctcagctgaagctccatcctgttcatcccgggagcccccctcaggagcaggaggtggacctcgggacatggcctcttctgctgttgttccaggggctggggaagcattctcccgctgggtgtcagatggcgggaagagccaggcttcagaatttttagcctccaaacctttctcccccagccctccactccacattatctggcccctcaacctccccctctctagagtacctgaggctcaggggaagctctttctgctccctgaacttccattggctcctcaggaagtggct

SEQ ID NO: 120232 - DNA, 2501 bp, Homo sapiens
accatacttctgctttaagcagtgaagatcagaatgtaactccccatcttcccagacccgttggtttgtgccctcttgatgccgtattatttccgtgtgtcttcattctcacctcactttctgttctttgttctttctttatttgccaggcaacacagacagcccctccaccacccccacctcctccacccccaccacctgccccagagcagcagaccatgcccccaccaggctccccttctggtggcgcagggagtcctggaggcctgggtcttgagagcctgtcaccggagttttttacctcagtggtgcagggtgtgctcagctccctgctgggctccctgggggctcgggctggcagcagtgaaagtattgctgccttcatacaacgcctcagtggatccagcaacatctttgagcctggagctgatggggcccttggtgagcaaaaaggatgctttggcttgctccaggaaggggcagccagaggaatgtagatggccttggtttaggggtgttgccaaggtgggatgaggttgatgatctggttgtgggtgggcaggccaggtggtaaaggccattgctaacatctgcccttgtcccccaggattctttggggccttgctttctcttctgtgccagaacttctctatggtggacgtagtgatgcttctccatgggcatttccagccactacaacggctccagccccagctgcgatccttcttccaccagcactacctgggtggtcaggagcccacacccagtaacatccgggtaaatgaaggccaggggccccagaactctcctcttttgcacattttattccttatttctgactgcttctctgccaggtaaagctccaattgcccccacacaagccctggacttgttggggtcgaggtggaagtcttgggaggactgaggctttgaactaaacctgttctgtttcctccacagatggcaacccacacattgatcacggggctagaagagtatgtgcgggagagttttgtgagtaacccttctctattcctttcctctcctgggtctggtcaaggcagctgcctcctccactcccagtcttatgattcttgattttgggatctttgtgttatcttgtctctcagtccttggtgcaggttcagccaggtgtggacatcatccggacaaacctggaatttctccaagagcagtttaatagcattgctgcgcatgtgctgcattgcacaggtcaggggctggccaggcgggggcaagtggggcctgttgcatgtgcagggctgccacgtgccagcattccctccttgtattttgcccacagatagtggatttggggcccggttgctggagttgtgtaaccaaggcctgtttgaatgcctggccctaaacctgcactgcttggggggacagcagatggagcttgctgctgttatcaatggccgaattgtaagcaccacctagccccagatccttagccttttgtttcctgaggtttccattctctgcagttttcatttttcttttctaaactgacattctgtaacctggatctaatctatttctaaaggtggttgagggttttgtgttctaaatctgctttctgtccctcagcgtcgtatgtctcgtggggtgaatccctccttggtgagctggctgaccactatgatgggactgaggcttcaggtggtactggagcacatgcctgtaggccctgatgccattctcagatacgttcgcagggttggtgatcccccccaggtaagggacctgttgggcgatggggtcagggtacttgagagaactggagagatctgagaggaagtatggtgttctttaatttcacagccacttcctgaggagccaatggaagttcagggagcagaaagagcttcccctgagcctcaggtactctagagagggggaggttgaggggccagataatgtggagtggagggctgggggagaaaggtttggaggctaaaaattctgaagcctggctcttcccgccatctgacacccagcgggagaatgcttccccagcccctggaacaacagcagaagaggccatgtcccgaggtccacctcctgctcctgaggggggctcccgggatgaacaggatggagcttcagctgagacagaaccttgggcagctgcagtccccccagtaagtgtcaggaagtaatccagtgggtcatggcagctgaaagtcaaggacattactattttctcttttcctccccaggaatgggtccctattatccagcaggacattcagagccagcggaaggtgaaaccgcagccccctctgagtgatgcctacctcagtggtatgcctgccaagagacgcaaggttggttttcctcttccctaagcctctctctctatccaggtttccccgtcatgcctggaatcaaactatgtagagatggtgggagctcttgttattcagtctcccctcccctcgtttaatgaggaaactttttctgggattcagact

SEQ ID NO: 120233 - DNA, 2029 bp, Homo sapiens
ccggcctatgtctcactacaccacccccatggtgctccagcaggcagccattcccatacaggtgggttagggggagtctggcctgagggagagtgaggggtgttgatagagtgacccagggtagctactgggcctgaaggaggttaggaaaggaggagactggaaacatggtgatgaaggctggagatactttagaggtttatcatgaggttttcttggttaggctcttgtatttttctcacatctgcctgtccatctgtctttttcagatcaatgtgggaaccactgtgaccatgacaggaaatgggactcggccccccccaactcccaatgcagaggcacctccccctggtcctgggcaggcctcatccgtggctccgtcttctaccaatgtcgagtcctcagctgagggggctcccccgccaggtccagctcccccgccagccaccagccacccgagggtcatccggatttcccaccagagtgtggaacccgtggtcatgatgcacatgaacattcaaggtgagaatagttgctggcgagaagagcaggatcagcatgatgagggaggttcatgctgaggtgtgagggaacagggtggggaagggagaggcacatgctggtggtggtagcctggggaccagagcagaagcttaagtagacagatgtggggggtgtgggggttggtttgtctttggaggtgtgtttgtgtggtgaagggagtacctctccctgtttagatggagggaaaggcaggctttctgattgggggattatgggcctgaagtatgcctgatctcagaaggatatagttaggccttggccctacctacctcagggccactgtctctgtctccctgcccagattctggcacacagcctggtggtgttccgagtgctcccactggccccctgggaccccctggtcatggccaaaccctgggtaagagtgagggcatcagggcaggctgagctctgggtagagaaagggaagggctgagtgggtgggttgaaggggtccaggttcaaggttacatcagacccgccccccaggctccaccctcatccagctgccctccctgccccctgagttcatgcacgccgtcgcccaccagatcactcatcaggccatggtggcagctgttgcctccgcggccgcaggtaatgacctggaaggggaggcttgggaggtagggcacagtccatggtggcagctggctggcaagggcctggccctcagccctcttcggtctgtctcttctgccacccacaggacagcaggtgccaggcttcccaacagctccaacccgggtggtgattgcccggcccactcctccacaggctcggccttcccatcctggagggcccccagtctctgggacactggtgagcaagggtcggggagttctagtgcgtaacagtctagggagagactcctgtggtggtgcatggaagggcaggtctgaaattctcccttgctctctatccagcagggcgccggtctgggtaccaatgcctcgttggcccagatggtgagcggccttgtggggcagcttcttatgcagccagtccttgtgggtgagttttcattcttccccactcagagtttaaactcctttcctagtctgctcactggcactttccagttctttccatattttcttggttcctgctttcctggaatggggctgctgtagtgtcttgtgtcttcaggtttcagctttttttttttttttttttttttttgagatggagtctcactctgttgctaggctggagtgcagtgtacaatcttggctcactgcaacctctgcctcccgggttcaagtgattctcctgcctcagcctcctgagtagctgggactacaggtgcacgccaccacgcccagctaattttttatgtttttagtagagaagggggtttcaccatgttggccaggatggtctcgaactcttgaccttgtgatccacccaccttggcctcccaaagtgctgggattacaggcttgagccatcgtgcccggccagc

SEQ ID NO: 120234 - DNA, 1048 bp, Homo sapiens
tacaggccgggcacagtggctcacgcctgtaatcccagcactttgggaggccgaggcgggtggatcatgaggtcaagagatcgagactatcctggctaacatgatgaaaccccgtctctactaaaaatacaaaaaattagctgggcatggtggcgggcacctgtagtcccagctactcgggaggctgagtcaggagaatggtgtgaacccaggagacggagcttgcagtgagctgaggtcgcaccactgcactccagcctgggtgatagagcgagactctgtctcaaaaaaaaaaaaaaaaaaaaaaaaacaaaaattagccgggtgtggtggcaggcaacttaatcccagctacttgggaggcagaggcaggagaatcgtttgaacctgggaggcggaggttgaagagaatagaagctctgctggtccagagaaggattgggccagggctctgggagaccagggagaaagagggcacatgtggtccctgttgactgtgagggtgggaatctgaggaaggctttggctcattgccccttgggtttgtccacagccatccttcccctgcggagtatgtcgaggtgctccaggagctacagcggctggagagtcgcctccagcccttcttgcagcgctactacgaggttctgggtgctgctgccaccacggactacaataacaatgtgagccctttgatggccctgccctttctcctcagccccagtactcccaaaacagaacaggctgaaatgcagataactctttccctccctggaaaaacattgcaacagggccaggtgcagtggctcacgcctgtaatcccagcactttgggaggccaaggtgggcggatcatctgagattgggagtttgagaccagcctggccaacatggtgcaaccccatctctactgaaaatataaacattagctggatgtagtggtgcacacctgtaatcccagctactcaggaggctgaggcaggagaatcgctagaactcgggaggagggggttgcagtgagccgagattgcactactgcactctagcct

SEQ ID NO: 120235 - DNA, 1043 bp, Homo sapiens
ggcagggggataacgtgtggtcaggagttccaatccagcctggccaacatggtgaaaccctgtctctactacaagtacaaaaattagttgggtgtggtggcacgcgcctgtaggcctggctacttagaaggctgaggcaagagaatttcttgaacctgggaggcggaggttacagtgagctgagatcatgccactgcactccagcctgggcaacagagcgagactctgtctcaaaaaaaaaaaaaaaaattacagatgcttattatgcatctaatttgtgtcagtcttatgctagttgctagcgagtcggagataaaattgcagagccatgccttcagggagtctagttaggatactttctctgttcagtctcctgtagagtaatcctctgcagcagtcttaccctgcctttggtatcctgactctcccctaccttcagtgtcgaggagggccccaaccgcagcacagtcagccgcccccgcagccaccggctgtgaccccggagccagtagccttgagctctcaaacatcagaaccagttgaaagtgaagcacctccccgggagcccatggaggcagaagaagtggaggagcgtgccccagcccagaacccggagctcactcctggcccagccccagcgggcccaacacctgccccggaaacaaatgcacccaagtgagagatggagggaatctttagtgggtggggaatcctaagtgaagtatggggagaaggaaatgaaccatggcaagggagggaaaggattacttggaggtcttagttgaagggttagcattgaggggcgaggaggggctctctcggtataggtaaatgacgctaggacaggcagctgagaagaactgctgctctccctacggcaaggaaatccaaatggtatctcctgagcctgatcggaattctcctctgagttcacgaaggcctgctctctttcttagaattagtctttcaccattgtaggtgcaggattgtggtggggagggtgggagcagttcattttcttctccctatcctctcatgggtgg

SEQ ID NO: 120236 - DNA, 1677 bp, Homo sapiens
gcagtggtagagtcccagctggtgactgtttttcaggcatttacggtagccacctcaatcttctagcgctcaagcgcgcgcacagacgtgaacgccgccagaggggggagggggtggggcgatgcttaagtgtccacgcatccgtagtgcgacgcacgcaggcgtagtacggtcccccgggcgacagcggtggcggctcctcggggtgctcggctccctcccacctaggccggccccggcccgactcgccctcagaaactcactgtttggggctgcggactttctcgtcgtgccccacaaaagtaaagcttggggacctggggggagccggaagtatcgcttcgagatccccaaatactatcggggaaacggaagtggccgtcggtggcaggtttgggggagaccggaagtgacggtccgtggggaagtcgggggcggagccgcggggtggtgggtgtgtgtgtgtgtgtgtgtgtgtgtgtgtgtgtgtgtgtttggctgtgggttagttgtgccgttctgctggaacaccgtgggaaggcagtagacgcgggcagtcagctagcaggtctgtcgccccgtgagtgccgtttcgggtctatagtgagttaggagggttcgatgggcgtggcgcgcgtgcgcgaaaccactttctccgcagagtgtggggcgaccaccgctttcgcgttgtcccaggattttccgacctctggggcgcttgtcctgccgtgaccggtgatgacactagtctctggtctcgtgcttccttcctaatctgactggctccctgcttattgtgattggcgtcgtggagcccctcccacctctcgtcctccagctccctaagccgtcgatctcctgccctttgtgtttctctccctgtgccccggaatcagaagggggatggggacaggtgtgaatgtgtgtgtgtgcaggagaaactttttaggtattggggcagggattaatgctagggagtctttcgggtacactctggtctgggcaacagcgggccttccttccttcgttcttctttagagacctgtcggccatggagcctaatgatagtaccagtaccgctgtggaggagcctgacagcttggaggtgttggtgaagaccttggactctcaaactcgtacctttattgtgggggcccaggtgagacacctcactagttctggaagacacctttagcttttcctcgtttaggccccttagcctgagagatgagcttgattttctggtcaccagattttctttttttttcttttttttgagatggagtcacgccctgtcttccaggctggagtgcagtggcgcgatctcgactcactgaaacttccacctcttgggttcaagcgattttcctatctcagcctcctgagtagctgggattataggcgtgtgccactatacccagctgatttttgtatttttagtagagacggggtttcaccatgttggtcaggctggtctcgaactccttacctcaggtgatgtgccctcctcggcctcccaaagtgctggtattacaggcatgagccaccgcacctggcctcagattttatttttattgatccctttgttcgtattccagtagaacgttttctgatgttttgtgagtgaggctgattttgttctgtcctccacatggatagaacttaatgcagagggaa

SEQ ID NO: 120237 - DNA, 1135 bp, Homo sapiens
acacgtataggagactctccccgagatcttctagggagtgacccatctatttttgtttgggaagaggaaactccgaaatgggatcgcggaagacttaaagggccaggctgatttttttttcctactggtatgtcttacggggtgggaaagtggtttcagaaagaggctggtgtttattgttggtgaggatgggggtgggggccggacgcaggacctctggacaacagtctcatggagttttattaatctttactaaggagcaaagtcggtattgtagggttccatgtttttacgcaaagtctctctcccttaggccctgcagagtcctaagttgtggggttactttagtggcaggaaagtgtttttgactactttttctcatcccagcaggtctctgaggctgtggttgctacagggtcaccacgagcttggcttacttgtctcatccttcccttgcctggtatcattttctcagttctcccaaaagccatgtcccggcccttgctcatcaccttcaccccagccactgaccccagcgacctctggaaggatgggcagcagcagccacagcccgagaagccagagtccaccctggatggggctgcagcccgagctttctatgaggccctgattggggatgagagcagcgctcctgactcccagagatctcagactgaacctgccagagaaagaaagagaaagaaaagaagaataatgaaggcaccagcagcagaagcagtggcagaaggagcatcaggaagacatggacaagggagatcccttgaggctgaggataagatgactcaccggatactgagggcagcccaggagggggacctgccagaacttaggagactgctggaaccgcatgaggcaggaggagctggggggaatatcaacgcccgggatgccttctggtggaccccactgatgtgtgctgctcgagcgggccagggggcagctgtgagctatctcctgggccgtggggctgcctgggtgggggtctgtgagctgagtggcagggatgcggctcagctcgctgaagaagctggcttccctgaggtagcccgcatggtcagggagagccatggagagacaaggagcccggaaaaccggtaaggggaaactttagctc

SEQ ID NO: 120238 - DNA, 4025 bp, Homo sapiens
actgattcgcactaggggcccaacaggcaataaggacccagcggattggccgaggataggccagtcccctgggcagcagcgccgcgccgggactagaggggaacgtgaggagagctgcggaaagagatccagcctggctccctcctttccccgccctaagtcagcctcttcacccagtgagcacaaaactgtattgcccagactcccgggccccgaacgccatacctggcttccgcttccggtggcttctcgttgtgccccgcccgcaagcgccctcctccgggccttcgtgacagccaggtcgtgcgcgggtcatcctgggattggtagttcgctttctctcatttagccagtttctttctctaccggggactccgtgtcccggcatccaccgcggcacctgacccttggcgcttgcgtgttgccctcttccccaccctccctaatttccactccccccaccccacttcgcctgccgcggtcgggtccgcggcctgcgctgtagcggtcgccgccgttccctggaagtagcaacttccctaccccaccccagtcctggtccccgtccagccggtgagtctgaagtcgtcgctgctccgagtcccttgtcgctgggagcggcacatggggtctccggactttgatgtgggggcgggggaggaagcgaccaggtccggcacgaaggagggagaggtggcctgaggagcggaggggggatgtgtggattccggtgaaagggacctgacaatcgcccccaacccgtgagaaaaggaggagcccagttcttgcttgagaatgataaacttggaaacccttgggaaaggcgtgggggtcatgcagagacttgtattggtagggagcctgagtcgaggtccctgccggagttgacacagaggagagagggccctggccttcgggagctccagggatgtgggtcgggctggtgggtcaaagtatctgttggcttctttcaagtggtgggaccccaaagaatgtttaacttcaaagaaaaggggctgagatgtaaattagaggagctggagaggagtgcttcagagtttgggttgctttaagaaagggtggttccgaattctcccgtggttggagggccgaatgtgggaggagggaggataccagaggcagggaaggagaacttgagctttactgacactgttctttttctagctgacgtgaagatgagcagctcagaggaggtgtcctggatttcctggttctgtgggctccgtggcaatgaattcttctgtgaagtgagttctcttcaacctccctacttgccagcttcacatatcttcccaccagacgttccttcacatattccacttctgcactgttctcttacatgctatttgaaaacttcctatcagcaaagagtcccccctataaaccccgacgaacctgtgctaaagtggcaaaactggggcccaagtcctgagtctgccaccgtccagcaatataacgttgggctagtcaatttgtgtctttttcttttttttgagactgggtctcactctgtcaccgaggctggagggtagtggtgcgatctcggcttactgccacctctgcctcccaggttcaagcgattctcctgctccagcctcccaagtagctgggattacaagtgcctgccaccatgcctggctaatttttgtatttttagtagagacagggtttcactatgttggccaggctggtctcgaactccagacctcaggtgatctgcctgcctcggcctcccaaagtgctgggattacaggcgtgagccattgcgcccggcctgtatcttttgttactaaagtggcactgctagtacttgtctcaggtggcctttaggaaaactgaaatgctacacattgaaatgttttgttcagaaaccatgctgttcagcttccaccttccttagccagctgagaggacaaaactggttcctagagacgggatacaggagtggagtagggacaaagatcttgaaaagaatgtctaagaaaaagattgctgtatctacttatccttagaaaagaaaagccaaagcttttatgggagagagtgtaggtgaactagggagagacacaagtacttctgctgagttgggagtgagaaacaagcacaacagatgcagttgtgttgatgataaggcatcacttagagcattttgcccaggtcaaagatgaggattttgatatgggttccctcttggcttccatgtcctgacaggtggatgaagactacatccaggacaaatttaatcttactggactcaatgagcaggtccctcactatcgacaagctctagacatgatcttggacctggagcctggtgaggcaccctcagggttgttttgtgtgtgtgcgtgcactatttttctcttcaaatctctattcacttgcctgaattttgaaatttcctttggttctctgatttctttaaccccaaattcatgctttattttgatcctccacctgactcttgtctagttttgtgacgtatatcacttgttctcatgttttctaaatccgcaattcagacctattccaaaatgcgtttcctcatgggtctggtttgttgtctgtttctcctgctttgcaccttccagtctagaatttcatcttctgcattgacattgttgcagttatgtattgaggagggagttgggagggagagcaaggagcagaggctgaaaaggtgtgaagggaaggcagagctgtcttcgtttgatgcaagggtcagaagcccaggtttctgggtcccatgcccagatgttggatggggtaaggcccaaaagtaggtgctaggcaaactgaatagcccgcagcccctggatatgggcagggcacctaggaaagctgaaaaacaagtagttgcatttggccgggctgtgtttcagatgaagaactggaagacaaccccaaccagagtgacctgattgagcaggcagccgagatgctttatggattgatccacgcccgctacatccttaccaaccgtggcatcgcccagatggtgaggcctctctgctcctacctgcctccttctgagcagtaagagacacaggttcctgcagcaagaagtcatgtttaagccctgtttaaggaagctagctgagaagaggggaagaaccccagaacttgggcctgggaattgaattctgattgggggtcatcctgaagggattgttttcagggagggagacagaccttgaatcagagagttgtgatagactgcctcttcctcaaggaacaaacaacaaatggctctgatggtttgtagcctgcctaattggaagaaaggcaacacagaagtttgagagcccatctagtccagagaaggggcctctggacagaggtgggaggagtgggggacagagtggtatgggttgggctgcgaagggagttgcctcttctttacatctacctgccaaccccttccattgtattcacctcagttggaaaagtaccagcaaggagactttggttactgtcctcgtgtgtactgtgagaaccagccaatgcttcccattggtgagtgttgaagaagggaaaggaaagcaccgtgtggcagtcttatgggaaggagttggggctcaacacattggagcctgagtcctgaggggaggttaggtaggaatagggggatacctggcctgctgagtctggctgtctcccaggcctttcagacatcccaggtgaagccatggtgaagctctactgccccaagtgcatggatgtgtacacacccaagtcatcaagacaccatcacacggatggcgcctacttcggcactggtttccctcacatgctcttcatggtgcatcccgagtaccggcccaagagacctgccaaccagtttgtgcccaggtagggagcagggagagtcattaagggtcaaaggaaaggcccaagatcccccagagaggggaggacagggcatggccctttcttgaggtctgcttctcccagaatcagggcatctccctgctgagtgactgtgggaaagttatttgattatc

SEQ ID NO: 120239 - DNA, 1049 bp, Homo sapiens
acaggtttcaccatgttgcccaggctggtctcaaactcctgagctcaggcaatccacccacctcagccgactccattctttttttttttttttttttgagacggagtctcgctctgtcacccaggctggagtgcagtggcacaatctcggctcactgcaagctccgcctcctgggttcacgccattctcctgcctcagcctccctagtacctgggactacaggcgcctgccaccacgcctggctaattttttgtattcttagtagagacggggtttcactgtgttagccaggatggtctcgatctcctgacctcgtgatccacccgcctctgcctcccaaagtgctgggattacaggcgtgagccaccgcgcccggccaactccattcttttgagcaagatacttaacgtgggcgacaatgttctaatgtcctagatggagtctctggctaaatttctgtgtcttctccaaacccagtgcatgaagctcttcttgaaaccccagggcagaggctgtgtgtgcccccattagcgctgcaactccttaagggaagatatactgagtctccactggaagtggagatctgagacttaatcaggtgatgtgatgcctgaaatttggagttagaagaggcaggtgaccacagctccataatgctccaccgttagcaaacaggtggatagctgatactggtgccctctcctctatcccattccaggggggcaaacgatgggaagtgtggaacatgaagctctggagccagctgcacagttctgaatcccatcctcccagatccaacagaagagttaatcccctgaaaactaaatttttgttcagctaagggaagctccttaaatgcaaagaggagctgggcatggtggctcacatctgtaatcccagcactttgggaggctggggcaggaggatcacttgagcctagaagttcaagactggacagggcaacatagggagactccatcagtacaaaaaatttaaaaattacccaggcatggtggcatgcacccgtgttccaagctactctggaggct

SEQ ID NO: 120240 - DNA, 1046 bp, Homo sapiens
gctctgcccatctgttatgagagttcatgcaaatcccaccattcgtgggtttcagcttggggcgccatggcattacagtttatctgaccataagactggagctcagagagggatagggagagcaatcagcataccacacaatagcaatggtcacagaagataacagacccgaaaacgagaaaggaaaaacatctccatagtccccttcctgaaagagatccagctggtaatcttccaaggaaaagacatggctgggtggtcgagcaggtcagcctctgaggagtatttgtaatccctttgcttctcctcttatggaccctgtggaatgagaagcttccattccccttggagaaaacagaaacctgccctttcctcttccctgcaaagctcttcatgggctgccctccctgcccaaagggagtttttcagtcccaacttggccccccagcccttccttcctgcctccttcctaggtgatctgctgtgaggggaatgctgggttttatgaggtgggctgcgtctccacgcccctggaaggtaggacggtgactcagcctccttatctccgccctttgaaagggaatgtccctgcctcccacactgacctgacctcccctggcctctgctttctctgggtgaggttttgagtctctcagctttagggaaaagtccactcgccatttgctttgataaccttacatccctcccctggcctgtgtccctagctattatgcttttcattctgttccattcccccaccacacaccccacacaatcacatgctgctccctgtgctgcctcagaacctctggtgtcatctcctatttctgggaaggcttggagttatttgcatctaagctggggggtacttctgctcttccttcccccagggatggagaaagggctgtgggccacaaggtctcagtccctcctccccctgtgttacagctggatattcagtcctgggctggaatcatccaggctttgctggaagcacggtgagaccatctcaggaatcccttccttttcctgaattatgtctgttt

SEQ ID NO: 120241 - DNA, 1033 bp, Homo sapiens
gcctctgcctgccccacagggagggtttgcctctcctgctctcctaatctctgctgcctcaacaggtctcaccatgtcccctgcccggggaaggctccgctgctacatctgtggcttcaccaaaccctgccaccctgttcccaccgagtgtcgggacgatgaagcttgtggcatcagtattggcacttcaggtaggactctggtccaatggcccttctccaggaggctccctacctccatccatccggcctttcctgtggcccccgcctcagcatgcctctttcatcccacagaccagagtgagatcactgagtgaaaaagctgcctctcaagggcccagtgccctctgccaggctatgccacctactggctgcactcctacactctgtggcaccactgctgcgagcaggacctgtgcaacatagccgcttccccacagcagctcaccagcctcctcgcctccctgcccctctttgtggccagcttcgctgggagaggacacctcctccactagcttccgtggatctgcagcccccaacccaggataccccccgccatcactgcggccctggaaacacctgcacagacactttgagacatgcccgagaacctaattttgtacagagaccccagatctctcagcagacccctcacagacccctcacaaggcctggggaggcacctgcccagagtccaacctcataaagaacacctattctgcgtcttttgtcttttctagatgcccattgctgatgccccgtgtcagcccaggtcactggcaaggcaggcattttgatgacactgtggatctcaggcaaggggatcaaaggagcatcaggtatggtaaggaggagagtcttgctaggaaagactaatgtggtaggtcgggaactcaggatggagggcttgggggactatgaagagtacctttaataaaaggtctatctaggagtccagtaatactgcagatactgcagtgtgtgtgtgtgtgtgtgtgtgtgtgtgtgtgtgtgtctgtgtgtgtgtgctctaa

SEQ ID NO: 120242 - DNA, 1049 bp, Homo sapiens
agcataagggctttcatggcgagggtcctgagaatggtggcaaccacagcagctgatagagtagattttcaaggatccagctctaggagttgagtggcctttttggaatttataaacccaaaggctcctcccttccctgcctctggtagcccctcccttctcacttactacgcagctgaccagagaaaagacaaggggtgggaaggcactgagcaggactgagtggggagtagggatgggagagagggatgggggaaggcaggtgccactagtggccaatgccattgtggttcttggtttcaggccaagatgcccttcctggtccccagctaagagtcctgctgctcagtcctctgaatgagcatcatcaaaggcctctgtgatttacagtgtccatggtggcagcttctgctggttcctggaaaatggacaaaaggatgtggcccaaattaattgctgaatttgggtccctgggtccctgctgggcattgataggggcatgctggtggaaattgggggaggaatgggtcaaattaatctccattcagcccccactcggtctttccaatgcctgctcagcaataagtgactcactgatggcttctgtgatgccacagcagcagaggcaggggctggggctactcatccaggagagccaccacaggtctgctaagtagggctgcctcaggctcccatgaaggttctcaggatgtcacccgtgctccacttgcgcttggtgtggccttgttgctccagtccagcagcagcaattgtcctaggtgtggctgtgtgcacctgctccaaagcacctccccagtcaaaacctgccaacttgggcagggtaccaagccaggaggaacagcatgggcacagagaggtgaggtagaagctaaaataagaatagaaatagtaggccgggtgtggtggctcacacctgtaatctcagcactttgggaggccgaggtgggtggatcacaaggtcaagagatcgagaccatcctggccaacatggtgaaaccccatctctactgaaaatacaaaaattagtc

SEQ ID NO: 120243 - DNA, 3443 bp, Homo sapiens
aagacctgggcgctcttaaccacccccaacgcccttgtctgcatgtctttttctctgtctcctccttttctgtttcttctcccagacaggtgaagaaacaagaaaactaagaaatccgagcggttggagggggagtctgtgtggatgggatggggacgccgggggaggggctgggccgctgctcccatgccctgatccggggagtcccagagagcctggcgtcgggggaaggtgcgggggctggccttcccgctctggatctggccaaagctcaaagggagcacggggtgctgggaggtaaactgaggcaacgactggggctacagctgctagaactgccacctgaggagtcattgccgctgggaccgctgcttggcgacacggccgtgatccaaggggacacggccctaatcacgcggccctggagccccgctcgtaggccagaggtgagcgccgtggcgcgggtgtggtatggggaaaggcagaaggaactggatgtcggggctttggggaagaattgaggatgggggtgtcacagctccgtgccctcttctcctatcctaaggtcgatggagtccgcaaagccctgcaagacctggggctccgaattgtggaaataggagacgagaacgcgacgctggatggcactgacgttctcttcaccggtgaggctggggggaggcataggtcttggcacagggaagtagagtttgggagactcggccgtctggagccttgtttctaactcactcccgccctcaaacctccgcggcctcccggactcaggccgggagtttttcgtaggcctctccaaatggaccaatcaccgaggagctgagatcgtggcggacacgttccgggtgcggagcgggaccagcctagggagggagggggtgcaggtgggggtcggaagggcctgggcgcccgctgaggaaatgagaggcagagagcagcctatgtttgaagataccccatcacccctcccgcgcccctgaatacctcccttcgctctccctaggacttcgccgtctccactgtgccagtctcgggtccctcccacctgcgcggtctctgcggcatggggggacctcgcactgttgtggcaggcagcagcgacgctgcccaaaaggctgtccgggtgaggagggggcggggccaacgaaagtgggcgcagttctgggcccgggaggccgggagctgggaggcttaggaaattagccctaacccctgccctcaatgggctgtccatcttacatgaaagaacacaggagaaaataagaagttacaacagcaggactgggaacaggggtgattaatttgctcttccggagtttcaggaaaccccaaaggtggcacctaaactgtgactctaaggatgggtaggacagataggaggggctggggaaggtagggggttgaaaataactgcatgtgattccaaggtggaaattagcaaaggtaactaaagtacttagtgtctgacatatcgtaagctctatgtgcttgctgtcattattttccacaaatgtcagtccgtccccagcccttagtggtggttgagcaggcagacacagctgtggagaggttctgagactcgaacacttcctctttcctctaggcaatggcagtgctgacagatcacccatatgcctccctgaccctcccagatgacgcagctgctgactgtctctttcttcgtcctgggttgcctggtgtgccccctttcctcctgcaccgtggaggtggggatctgcccaacagccaggaggtgagagagggcaggaactccaacaccaagcaccatcagagaaaagagtttcaggctttcctagtgggaggaaggaagggtaccttctctagaagcctgggtggggccactctgagctggctggaagagtggcctggctcagcctgaggtctcactcccctctccccactccatgtcttccctgtgcaggcactgcagaagctctctgatgtcaccctggtacctgtgtcctgctcagaactggagaaggctggcgccgggctcagctccctctgcttggtgctcagcacacgcccccacagctgagggcctggccttggggtactgctggccaggggtaggatagtataggaagtagaaggggaaggagggttagatagagaatgctgaataggcagtagttgggagagagcctcaatattgggggaggggagagtgtagggaaaaggatccactgggtgaatcctccctctcagaaccaataaaatagaattgaccttttagactgggctgtgactggtgtcttactggggcaaagggatagggcagggctgaaacctgagtttggggtcagtgcagggaagaaggcctcttattcaaaaatcttgttaggtacttatcaactcattgcccaaccatgtcataggtacttgagcacaagatgaacaagacagaatttctatcatgggaagtgtgtccagggcagagaaaagagtgtatgggtggattgctcactgaatttatctaaatgttagatgattcagagactggtagattaccagtccacccctatttgataaagaaaaagaaatgacacttccagggacattcattttcattcattcatttaatgaggcttagcaatgatatcaaaagggtcagtctcctgacgttggggagctcacagtacatgcaaatttcttacaaattgaaatacaggttgtcatggaacaatttacagaaggctgtttctatgagggaaataaagggggtgcgccctagggcatcaaagtatatgcaaggggtggccaaggagggtcaccttcccagaaaaggccatacttgaactaaggataaataagaattagccaggcagatagtgtgaaggagggaaaggggtaatacaggaagaaggaattgcactgggcaaagacattttggggctagggagaattctctaaggctggcattttctaagatgtgcatgtggaatgacacaggtaagcctggagagtggacaaagtgctgtagtaccttgtatccaaagccaaggcacgtgggcacagagctgaagctaaggagagtacttcagttctgtaataagggctgtcaggagcagttatctcttgagtaggatctctctgacttcagggaggaaagcaagggtaggaggatgaggtggggctatgggtaatccaggaaggaagtgagcagagtacattcacgtggcagcgctgggcatggaatacagtgtgggtttgacagtgatgttaagatagaaagactggacttcatggctcattgtgtgggagtaagagagaaaggaggtctgcgtgactcccagtttctgggttgggcaactgggttgttaaagagaatacagaggagaattaagtgagcagcttcagagatgacaatgagttgggtttgacattcagagtgcgaaatgcctgag

SEQ ID NO: 120244 - DNA, 1025 bp, Homo sapiens
gatttcagtaagtgagaaggaaggctaacgacagtacaagacagtgaggagttgagctggttttatcatgtcggcctggggagaagggaaagccaaggtggcttccctgggtctaacatgttggtccctctcctctccccatcctcaggtggtgtgtaagaagtaccggggattcaccatccccgaggccttccggggagtgcatcggtacttgagcaatgcctacgcccgggaagaattcgcttccacctgtccagatgatgaggagatcgagctcgcctatgagcaagtggcaaaggccctcaaataagcccctcctgggactccctcaaccccctccattttctccacaaaggccctggtggtttccacattgctacccaatggacacactccaaaatggccagtgggcagggaatcctggagcacttgttccgggatggtgtggtggaagaggggatgagggaaagaaatggggggcctgggtcagatttttattgtggggtgggatgagtaggacaacatatttcagtaataaaatacagaataaaaatcaagtgtttttacgcaatggggatttaaagtgtgggcgacatggaatgaggggtgggtcagtgatcttgagctcagggcagaagccaggaattaagaagggaaatgtttgtggtggggctgctatgtttcgtgccggtccgccggtccgccgttgcgctgttctgaggtctacgaagcgtttgcagccccgtcgccagggccggccagatctgggtgggcctgggcagcgctcgctgggcggtgccgatttctggcaaggggggcgcagtctggatgtaatgggcgaggcttagcagggcggaatgggcgtggcccgaagaagccccgccccgtcccgcttagacaatgccccggagccgccagaccgtcgcgcccctgccccatcgtagtatatgagctcgcctacacaaggacccgcgctaaaagccagagctcccagtccccgaggcttgaagacggggactcccttc

SEQ ID NO: 120245 - DNA, 1645 bp, Homo sapiens
ctgtagggccctccacatctctagcgcgaggcccagggccccttgactagactccccacccaaagacaccttggattggaggtgtagagaaccaaaactctggctcccaaaccccacccacctctcctgtcttcagactctactcccttcaggaacccagaaatccaggcttctagcctacaactctggcctcactgaagttccacacccttccctctctaggattcagatcctcccaagttctccaggacctcctccctctacctacctcccacctgtcctcagtgtctggggaaccagaagcctgcctttgcaaaacagtttcccattgatctgccttaggtttgacccaggcccaagggcaaagagcccatagtgaggggacagtgtatgtgtcatgactaggcagaaaacagctggtctgggagtgggaatgcagggactggcctagggatgggtggggtgcatcaggcataaccttgggttggggttacttttcaggctggcagtgatggggccaagattgggaactgcccattctcccagagactgttcatggtactgtggctcaagggagtcaccttcaatgttaccaccgttgacaccaaaaggtaggcctgcttatgttccttgaaacacccctggtgtacacatgtgtgcaaacacacacccacccgagtccttctgtcatgaacatttttgccctccccctggagtccctttcttatcccacgtcctccattccccctttctggttcttcctgacccccatttccagtcctgattcctgatcctttctccaggcggaccgagacagtgcagaagctgtgcccaggggggcagctcccattcctgctgtatggcactgaagtgcacacagacaccaacaagattgaggaatttctggaggcagtgctgtgccctcccaggtataggggcactcagaaagtggagaggtggagcagggagattctgggaaacagacagtttgcagaaatggaaaacagagatggtggtggggctggggcaggagagctagctgaggttcctcccaggaagacatcttacctcatttttcccattggctttcaggtaccccaagctggcagctctgaaccctgagtccaacacagctgggctggacatatttgccaaattttctgcctacatcaagaattcaaacccagcactcaatgacagtgagtcttgtgggtcagaggcctgggtcctgggaggaatagagaggacccagcgggtaggagacattaggggcacctggacgttcagatatcagggagatgaagcagatgttcgtaaatttcccccagcttcccatttttgctttacctctatatttccctgcattttcattggccaagacttttaagcttttctcatttgttccctagcctcttctgccccactgaggacgttagttggctgctggcctgttttctggcagaatagggtcatgcttaagaacagtcatcactctagatccagactacctgagtacaaatccaactagccgtataattttgagcaatcatttcacctctctgtaagtccatttccagatccacaaaattaggatgacaatacctatttcatgggttgatataaatttttttttttcttttttttt

SEQ ID NO: 120246 - DNA, 1004 bp, Homo sapiens
gtcgggttgtactcagattaatgaagcagggaaactgaggcagaaaagagtcctgtgttcaggagaggtcggagaaacaaggaggttttcaggactcctccttaacacccccatccccatcctgtgggagatccgaggattccccttccggactcactccctacatcgtcgagtcccgcccccctccagtcccctccccaggttcagggcggggccggtcggtgagtcagcggctctctgatccagcccgggagaggaccgagctggaggagctgggtgtggggtgcgttgggctggtggggaggcctagtttgggtgcaagtaggtctgattgagcttgtgttgtgctgaagggacagccctgggtctaggggagagagtccctgagtgtgagacccgccttccccggtcccagcccctcccagttcccccagggacggccacttcctggtccccgacgcaaccatggctgaagaacaaccgcaggtcgaattgttcgtgaaggtaagaacacttctctcctcagccacccaaattcctggaagccaactctcacctttcccccggtccagccttaactccccaatcccttccctccttgactcccacccccaatcccacgtgcactctttggttgaggggtggttttgagaggggaagacattaacttgttagcaagtaatgagaattctaggatcaaccctgaaaagtttgtaaaagtgcaagtttctagcagactaaaggaagggaagtggagaaaaaggagaattcccaaaagtgagactggggtggggttagagggcgagctggtgaagggacagtgggggcccagcagggtttagaagggacagaggggaacctcagttaggacatgtgtccctacaagatctgagggtgagtagtgcagtaggagaggtgtgtgtgtgtgtgtgtgtgtgtgtgtgtgtgtgtgtgtgtggatggagacgcttcagggaagacggtgtgttgagggaggcctgaga

SEQ ID NO: 120247 - DNA, 1033 bp, Homo sapiens
agttggagaccagcctgggcaacatggcgaaaccccgtctctactaaaaatataaaaattagccgagcgtggtggcacgtgcctgttatcccagctactgggaaggctgaggcaggagaatcactgtaactcgggaggcggaggttgcaatgagctgagattgctccactgcacttcagcctgggcgacagagcaagactccgtctcaaagaaagaaagaaaaaaaaaacagggttgggaagagctgggcaagtctcttacctcctgagtggctgtttcacattcactaaatgggggtgatgatgcctatctcagagatttgagaaaatgattaaattatataagacatggtaaaccctacacttatgagtgattctaatagtgatttcctttcttccttgctggacagatccatctgtgtgtgctgtggaattcaggatacttgggcattgcctactatgatactagtgactccactatccacttcatgccagatgccccagaccacgagagcctcaagcttctccagagaggtggggatggaaccatgaattcctctgctctctgggattgcagatgtgttacacacacacacacacacacacacacacacacacacacacacacacatattttttttttctagacagagtcttgctctgttacccaggctcaagtgcagtggcgcaatcttggctcactgcagcctccacctcctgggttcaagcaattctcctgactcaacctcccgagtagctgggactacaggcgtgtgccaccacacccagctagttttttgtgtgtgtttttagcacagacggtgtttcaccatgttggccagggtggtctcaaactcctgaccttgtgatccgcccaccttggcctcctaaagtgctgggactacaggtgtgagtcaccacgcccagccatgttttacttacattaactcacctcactgtctagcatattttgtgttgctgtaaggaaatacctgactctgagtaatttgttaaaaaaaaaaaaaaagttttat

SEQ ID NO: 120248 - DNA, 1003 bp, Homo sapiens
cctggaaaatagtaactttccctggtgctctgcagcccccaggagatttaagatttaccccgattccactgctgatcccctcccaggttcgagcacttggagggctgctgaagttcctgggtcgaagaagaatcggggttgaactggaagactataatgtcagcgtccccatcctgggctttaagaaatttatgttgtaggtgattcaccccaaccccaaccaaagtaatgtgggattgggaggcctgaaaagtaaagtgggggtggggtgtggatgtggctgtgacccagtgggtcaagtgctctaggacacccgggagaatctaagggctaatgagactttgggaagaagactgggacaatattcagagagggggacaaaggaagtggagttgtggaacgaactcagactgcttcctgcttttttgttttctgtcctcaggactcatctggtgaacatagatcaagacacttacaggtaaagaggtggaggcatgctgctgtctctggggagggagaaggattaagtttaatgccccaataatcctaatgaggctctagtttccctaatcctggggctattaagatctctctccttgaaggaaagggaaggggggttttgagggaaagagaggaagaaaagcataaagatactagctttcttttctatagggagaaactgaggcaaagaaaagtaagggacaaaccttacatcaagatatgatctcggctgggcgcggtggctcatgcctgtaatccccgcgctttgggaggccaaggcgggtggatcgcctgaggtcaggagtttgagacctgaccaatatggtaaaaccccgtctctactaaaaatataaaaattagctgggtgtgttgtgcgcctgtaatcccagccactcaggaggctgaggcaggattgcttgaatccaggaggcagaggttgcagtgagctgaaattgcaccactgcactccagcctgggcgacagagcgagactccatctcaaa

SEQ ID NO: 120249 - DNA, 1039 bp, Homo sapiens
ccacctcacttttaaatcttctgcatgtatttctgtcttccttcctagactgtgagcacatctgggacagggaccatatctttttttgtttatttgttttgttttgagacagagtctcgctctgtcggccaggctggagtgcaatggcgtgatctggctataacctccacctcccgggttcaagagattctcctgcctcagcctcccaagtagctggaattacatgtgcatgccaccaagcccagttaatttttgtattttgagtagagacagggtttcaccatgttggtgaggctgatctcgaactcctgacctcaggtgatctacccacctcagcctcccaaagtgctgggattacaggcatgagccactgtgcctggccaggaccatatcttaattgtctttgtagtttcagtgtttggtacagtgcctctcactgtttctttttgcctttgagatcttccctctttgttactgtgatcttccctactggtctttgttcttctgagtctgtccctatcaccacctcaacccgagctggatgtggcctgtcctcctttttgtgtttctctcacagactgtgtacagtgccctgggcctgagggatgcctgccgctccctgccgcagtccatccagctctttcgggacattgcccaagagttctctgatgacctgcaccatatcgccagcctcattgggaaagtagtgagtagaaggaaaaagggagtgcacccagggaggtcagggagagagaatgcagtgtgcaagatggggaaacatggaagatattgaggtcaattggataaagaatgggatggtgggaggaggcagcagaacttcagggaagtatctggagggtgagagttaaaggaggactgcagggagaattggggcccaaggagagctgaggaacaggacagagggtgccaggtcctaagaaacagtacttatctcctcaggtggactttgagggcagccttgctgaaaatcgcttcacagtcctccccaacatagatcctgaaattgatgagagtgagt

SEQ ID NO: 120250 - DNA, 4790 bp, Homo sapiens
ctcactctatcgcccaggctagagtgcagtggcaccatcttggctcactgcaacctccacctcccgggttcaagcagtacttgtgcctcagcctcttgagtagctgagattacaggcacgcgtcaccacacctggctaattttttttttgtatttttagtagagactaggtttccccatgttggccaggctggtctccaactcccggcctcaagtgatctgcccacctcagcctcccaaagttctgggattacaggtgggaatcacggcgtctggccctgcttcatgcgtttttggtatctttccgcccccagcacctgaaggggaagaacgtgatccacccattcctgtctcggagccttcccattgtcttcgatgaatttgtggacatggactttggcacaggtgggcaaggggctggtcctgtggggagaggaaaagactggagctgcaccctagctgtccatcttctctcagagaaaaagaaaataagcttcagccaaatagacagagcttggggtggttctcaagggactgtattagacaagtgggggccaggagtggtctcggagctacatccttcagcaaaagaggtgagtgtaggaaggaactccgtggagtccctcatgacctgggcatcctgatgtacacccaggtgctgtgaagatcacccccgcacatgaccaaaatgactatgaagttgggcagcggcacgggctggaggccatcagcatcatggactcccggggggccctcatcaatgtgcctccgcctttcctggtgaggctgcctgaggcaagagtgcccgggtcagggagatggagggatggctgggcatcgccatgatgaggcctcattcctacccagggcctgcccaggtttgaggccaggaaagcggtgctggtggcgctgaaggagcggggactgttccgtggcattgaggacaaccccatggtggtgccactttgcaagtgagggtgggggcctgggacgggaggaagatggagggctcctcagggttttaccgcctggccttctcacctacgtgtacccccagccggtcgaaggacgtggtagagcctctgctgcggccgcagtggtacgttcgctgcggggagatggcccaggctgccagcgccgctgtgactcggggtgacctccgcatcctgcctgaggcccatcagcgcacatggcatgcctggatggacaacatccggtgtgtagggtcctcagtgtgggaggggcttgccgagggctgagcagggctcactcgggccaggctccatcaggccctccctgatttctcctccccgacatttgcagggagtggtgcatttccaggcagctgtggtggggccatcgcatcccagcctactttgtcactgtcagtgacccagcggtgccccctggggaggtgagcagagggccagagctagctgctgggacaccctgctggagtggtgggtttactgggtccttggtggggggaggggcagggtgagccagaagcagacacacccccttgggtaatcactgcacctgtggcaggaccctgatgggcggtactgggtgagtggacgcaatgaggcggaggcccgggagaaggcagccaaggagttcggagtgtcccctgacaagatcagtctccagcaaggcaaggcggggctttgagggtctggagggagttgtggggggcagagctccactccctctgacctctgacctttggcctctctcagatgaggatgtattggatacctggttctcctctggcctcttccccttatccattttgggctggcccaaccaggtgtgttcctggggccggggcttggcgggacaggggactggagggtgggtgttggctccccttcacaccctggtctgccctcagtcagaagacctgagtgtgttctaccccgggacactgctggagaccggtcatgacatcctcttcttctgggtggcccggatggtcatgctgggcctgaagctcacgggcaggctgccctttagagaggtgcggagacagccgagaccctcccatcgcccccagcctcctctcctaccgtcctgtgctgcagcgcagaccccgcgtggctggggcatggggttagctgtgggcaggcctgacccgggggctggtgtggggttgaaatccagcctgggccctgctcagtgattcctgtgcccagggcttcatcttcccagaggaaggagtgcttctgattcacataaaggcgctcaacgagctcttggggacactcagtgggacctgaggttcacagtggggtagaccagacacagtcctggtcggggcactgaggccggggaaggagaggactgagtctcatgggcctccccacctgctctgcaggtctacctccatgccatcgtgcgagatgctcacggccggaagatgagcaagtctctaggcaatgtcatcgatcccctggacgtcatctatggaatctccctgcaggtgggctgggtgctgggccagccaggaagggccgtggggctgtggtcacagccacctgactgctcccactccaccctcagggcctccacaaccagctgctgaacagcaacctggatcccagcgaggtggagaaggccaaagaagggcaggtatggagggttgggctgggctaagcaggagcacagcgtggatggggctggctgaggacgctcctccccctgcctcttccctgtagaaagctgacttcccagcggggattcctgaatgtggcaccgatgctctccggtttggattatgtgcctacatgtcccagggtatggcccccaaagcgtccctcccagccactccttcctccttctgtgaggcccatccctcttctccaccctgagcctctggtgggcatgggctgggaagagggtgatgaggactcacatctcacccccgacccaggtcgtgacatcaacctggatgtgaaccggatactgggttaccgccacttctgcaacaagctctggaatgccaccaagtttgcccttcgtggccttgggaagggttttgtgccctcacccacctcccaggtaagggcctggtgggcagcaaagctggcagcactcacacaggctgtacccctgtccggagcagcctccatgtagctggggggacagatagacacagagacagacagttaaagggaaagcccagcgcattgggggctggggcctgtcacttcttcccagatcctggcacataggtggttgctttggactcatcagactctggatgaagatttgcccatgactcctgcccccatggggttctggcaccctcccctggcccgccggctgatacaccctctctccccaagcccggaggccatgagagcctggtggaccgctggatccgcagccgcctgacagaggctgtgaggctcagcaatcaaggcttccaggcctacgacttcccggccgtcaccactgcccagtacagcttctggctctatgagctctgtgatgtctacttggtgagaaggagcacagcggggcaggggatggtgggggcaggtgggcagcagagccctgggctcagttttgccagagttggccttgagacctaagccaacccatccccttcccagtcctcacaggcacagcgagggctcaaggctagacctccagccgtgagccctgtacctctcgtcccctaggagtgcctgaaacctgtactgaatggggtggaccaggtggcagctgagtgtgcccgccagaccctgtacacttgcctggacgttggcctgcggctgctctcacccttcatgcccttcgtgacggaggagctgttccagaggctgccccggaggatgccgcaagctccccctagcctctgtgttaccccctacccggagccctcagaggtatggcatggcctggagaggggagtctgacctgccctccaggccccctcaccccctcctccaccccacagtgctcctggaaggaccccgaggcagaagccgcccttgagctggcgctaagcatcacgcgagccgtgcgctccctgcgggccgactacaacctcacccggatccggcctgactgtgagcctcaggcccccatgtccgccccatcccactgtcccctcagcctactctgggacccagtgtccggcagtgactgcttggtttcctgtctccatggagctaggcctcacctttctccctccctggcaggtttcctggaagtggcggatgaggccacgggcgccctggcatcggcggtgtcgggctacgtgcaggccctggccagcgcaggtgtggtggctgttctggccctgggggctcccgccccccagggttgcgctgtggctctggcttctgatcgctgctccatccacctgcagcttcaggggctggtggaccctgcacgggagctgggcaagctgcaagccaagcgagttgaggcccagcggcaggcccagcgtctgcgggaacgccgtgctgcctcgggctatcctgtcaaggtgccgctcgaagtccaggaggcagatgaagccaaggtgtgtggcctgggtgggcatttcccacaccatccccttcctccatcaaaaccctggtctgggctggtccgagtgcagtggtgttgacaactaattgatcgtaaccagttacagatttctttgttccttctccactcccactagccttaaaaaacaaaacagcctggctcagtggctcacacctgtaatcccagaaatttgggaggccaaggtgggtggatcacttgagcccaggggtttgagaccagccaacatgg

SEQ ID NO: 120251 - DNA, 1189 bp, Homo sapiens
agcggcaccttgacaggatagcccgaggcagcacggcgttcccgcagacgctgggcctgccgctgggcctcaactcgcttggcttgcagcttgcccagctcccgtgcagggtccaccagcccctgaagctgcaggtggatggagcagcgatcagaagccagagccacagcgcaaccctggggggcgggagcccccagggccagaacagccaccacacctgcgctggccagggcctgcacgtagcccgacaccgccgatgccagggcgcccgtggcctcatccgccacttccaggaaacctgccagggagggagaaaggtgaggcctagctccatggagacaggaaaccaagcagtcactgccggacactgggtcccagagtaggctgaggggacagtgggatggggcggacatgggggcctgaggctcacagtcaggccggatccgggtgaggttgtagtcggcccgcagggagcgcacggctcgcgtgatgcttagcgccagctcaagggcggcttctgcctcggggtccttccaggagcactgtggggtggaggagggggtgagggggcctggagggcaggtcagactcccctctccaggccatgccatacctctgagggctccgggtagggggtaacacagaggctagggggagcttgcggcatcctccggggcagcctctggaacagctcctccgtcacgaagggcatgaagggtgagagcagccgcaggccaacgtccaggcaagtgtacagggtctggcgggcacactcagctgccacctggtccaccccattcagtacaggtttcaggcactcctaggggacgagaggtacagggctcacggctggaggtctagccttgagccctcgctgtgcctgtgaggactgggaaggggatgggttggcttaggtctcaaggccaactctggcaaaactgagcccagggctctgctgcccacctgcccccaccatcccctgccccgctgtgctccttctcaccaagtagacatcacagagctcatagagccagaagctgtactgggcagtggtgacggccgggaagtcgtaggcctggaagccttgattgctgagcctcacagcctctgtcaggcggctgcggatccagcggtccaccaggctctcatggcctccgggcttggggagagagggtgtatcagccggcgg

SEQ ID NO: 120252 - DNA, 1189 bp, Homo sapiens; identical to SEQ ID NO: 120251

SEQ ID NO: 120253 - DNA, 1002 bp, Homo sapiens
cccttcctggctggcccagcacccagcccacctgcagggagattccatagatgacgtccaggggatcgatgacattgcctagagacttgctcatcttccggccgtgagcatctcgcacgatggcatggaggtagacctgcagagcaggtggggaggcccatgagactcagtcctctccttccccggcctcagtgccccgaccaggactgtgtctggtctaccccactgtgaacctcaggtcccactgagtgtccccaagagctcgttgagcgcctttatgtgaatcagaagcactccttcctctgggaagatgaagccctgggcacaggaatcactgagcagggcccaggctggatttcaaccccacaccagcccccgggtcaggcctgcccacagctaaccccatgccccagccacgcggggtctgcgctgcagcacaggacggtaggagaggaggctgggggcgatgggagggtctcggctgtctccgcacctctctaaagggcagcctgcccgtgagcttcaggcccagcatgaccatccgggccacccagaagaagaggatgtcatgaccggtctccagcagtgtcccggggtagaacacactcaggtcttctgactgagggcagaccagggtgtgaaggggagccaacacccaccctccagtcccctgtcccgccaagccccggccccaggaacacacctggttgggccagcccaaaatggataaggggaagaggccagaggagaaccaggtatccaatacatcctcatctgagagaggccaaaggtcagaggtcagagggagtggagctctgccccccacaactccctccagaccctcaaagccccgccttgccttgctggagactgatcttgtcaggggacactccgaactccttggctgccttctcccgggcctccgcctcattgcgtccactcacccagtaccgcccatcagggtcctgccacaggtgcagtgattacccaagggggtgtgtc

SEQ ID NO: 120254 - DNA, 1002 bp, Homo sapiens; identical to SEQ ID NO: 120253

SEQ ID NO: 120255 - DNA, 2354 bp, Homo sapiens
ggttttaccatattggccaggcttatcttgaagtccccacctcaggtgatccacccacctcggcttcccaaagtgctgggattacaggcgcatgccaccatgcccagctaattttgtatttttagtagagacggggttttaccatgttggccaggctcatctcgaactcccccacctgaggtgatccacccacctcagcctcccaaagttctgggattacaggcgtgagccaccgcgtccggcctccctgcttctttatttagtccactgactccttgcctgaagcctctgctttctttggtgccaggccccactggcctggctcaccctctggtcctccatgccccctaacaggcaccgcatgcgtggggagaccaccctgtggaaccctggctgtgaccatgcaggtattgccacccaggtggtggtggagaagaagctatggcgtgagcagggactgagccggcaccagctgggccgcgaggcctttctacaggaagtctggaagtggaaggaggagtgagtatgcagcatccctgtgggcatcgcagccctgcctccctgtcccctatccagaagacctctgtcacctgtaaccccttggccacagggtcagaccctcccacagaggcagagtcagttggctctagggcccaggtaaatttcagggggatgggtgatctccacactgcccagtcagccacctgatgtctccctctagcccaggcacgagtgctgacctcagcctgtctgcttccaggaaaggtgaccggatttaccaccagttgaagaagcttggcagctccttggactgggatcgagcctgtttcaccatggaccctgtgcgtgggaggagtgtcaaagctggggcaggagtaggagtctccccagggtgggacccccacaggagaaagcagaggtgttgtggccctctctcaggagctggcccatgtaaaacaccatggagggctcagctgcaaatgccacttcccacccctcgccatggccctttccatatcatggcccttcatgttccctgtcttggctctgggagctccagattcctccagatggcacatgatcaggaccccgtctcccatggagcctgaactcccagtgtcctctgcaccagtacttgtccccagctgattgtcttcctcgccatctgcagcattacaaggcttgttgcctgctcttgtgttcccttagtcctctctccccctcaaggaaagaaggaaagtactcccctcagaggggtctttgtgctggccagtgggactctgtatgggcaaggcctcactggagccctgggtgtctgcctgggcctccaggcacaaggcccatctctctgacttctccctcctccaccccagaaactctcagcagctgtgacagaggcctttgtccggcttcacgaggaaggcatcatctatcgcagtacccgccttgttaactggtcctgcaccctcaactccgccatctctgacattgaggtgcgccccccaacctggcctgtctccatctccaatctaccctggccctggccctggcccctgggccacgcctctaaatacccattttacaggtggataagaaggagctgacaggtcgcaccctgctctccgtgcctggctacaaggagaaggtggagttcggggtcctcgtgtcctttgcctataaggtccaaggctcaggtaggagccaggggcaccaggatcctgggctgggagtggcaggaaggggccaaggccaagaccacaaggccttctgtcaccccagatagcgacgaggaggtggtggtggcaacaactcggatcgagacaatgctgggagatgtggctgtagctgtgcaccccaaagataccagataccaggtgggggactgtccacagttagggaaggagttctggccaaaaagggctcccatccttatggggtggaggggttggacttaggcccctggctgaggagaggaaactgggttagaaactggtcttcagcttctttcccagctctgagggtagagctattggggactgtttgggggagttcaagtgttgggatagtcagggccctggaaaggaaggacttgggcccagcccttcgtgcatttttaaaaagttaaatagccaggcacggtggctcatgcctgtaatcccagcgctttgggaggctgaggcaggtgaatcataaggtcacgagttcgagactagcctggccaacatagtgaaaccccatctctactaaaaatacaaaaaattagccagttgtagtggcgggtgcctgtaatctcagctactcaggaggctgaggcaggagaatcgcttgaacctgggatgcggaggttgcagtga

SEQ ID NO: 120256 - DNA, 1138 bp, Homo sapiens
gccactacaactggctaattttttgtatttttagtagagatggggtttcactatgttggccaggctagtctcgaactcgtgaccttatgattcacctgcctcagcctcccaaagcgctgggattacaggcatgagccaccgtgcctggctatttaactttttaaaaatgcacgaagggctgggcccaagtccttcctttccagggccctgactatcccaacacttgaactcccccaaacagtccccaatagctctaccctcagagctgggaaagaagctgaagaccagtttctaacccagtttcctctcctcagccaggggcctaagtccaacccctccaccccataaggatgggagccctttttggccagaactccttccctaactgtggacagtcccccacctggtatctggtatctttggggtgcacagctacagccacatctcccagcattgtctcgatccgagttgttgccaccaccacctcctcgtcgctatctggggtgacagaaggccttgtggtcttggccttggccccttcctgccactcccagcccaggatcctggtgcccctggctcctacctgagccttggaccttataggcaaaggacacgaggaccccgaactccaccttctccttgtagccaggcacggagagcagggtgcgacctgtcagctccttcttatccacctgtaaaatgggtatttagaggcgtggcccaggggccagggccagggccagggtagattggagatggagacaggccaggttggggggcgcacctcaatgtcagagatggcggagttgagggtgcaggaccagttaacaaggcgggtactgcgatagatgatgccttcctcgtgaagccggacaaaggcctctgtcacagctgctgagagtttctggggtggaggagggagaagtcagagagatgggccttgtgcctggaggcccaggcagacacccagggctccagtgaggccttgcccatacagagtcccactggccagcacaaagacccctctgaggggagtactttccttctttccttgagggggagagaggactaagggaacacaagagcaggcaacaagccttgtaatgctgcagatggcgaggaagacaatcagctgggg

SEQ ID NO: 120257 - DNA, 1138 bp, Homo sapiens; identical to SEQ ID NO: 120256

SEQ ID NO: 120258 - DNA, 1074 bp, Homo sapiens
ggccatggcgaggggtgggaagtggcatttgcagctgagccctccatggtgttttacatgggccagctcctgagagagggccacaacacctctgctttctcctgtgggggtcccaccctggggagactcctactcctgccccagctttgacactcctcccacgcacagggtccatggtgaaacaggctcgatcccagtccaaggagctgccaagcttcttcaactggtggtaaatccggtcacctttcctggaagcagacaggctgaggtcagcactcgtgcctgggctagagggagacatcaggtggctgactgggcagtgtggagatcacccatccccctgaaatttacctgggccctagagccaactgactctgcctctgtgggagggtctgaccctgtggccaaggggttacaggtgacagaggtcttctggataggggacagggaggcagggctgcgatgcccacagggatgctgcatactcactcctccttccacttccagacttcctgtagaaaggcctcgcggcccagctggtgccggctcagtccctgctcacgccatagcttcttctccaccaccacctgggtggcaatacctgcatggtcacagccagggttccacagggtggtctccccacgcatgcggtgcctgttagggggcatggaggaccagagggtgagccaggccagtggggcctggcaccaaagaaagcagaggcttcaggcaaggagtcagtggactaaataaagaagcagggaggccggacgcggtggctcacgcctgtaatcccagaactttgggaggctgaggtgggtggatcacctcaggtgggggagttcgagatgagcctggccaacatggtaaaaccccgtctctactaaaaatacaaaattagctgggcatggtggcatgcgcctgtaatcccagcactttgggaagccgaggtgggtggatcacctgaggtggggacttcaagataagcctggccaatatggtaaaaccctgtctgtattaaaaatacaaaattagctgggcgtggtggcatgtgcctgtaatcccagctacttg

SEQ ID NO: 120259 - DNA, 1074 bp, Homo sapiens; identical to SEQ ID NO: 120258

SEQ ID NO: 120260 - DNA, 1158 bp, Homo sapiens
gagccaggcctctctctcatcagccaggtgaggaagggcgaggagttggaggataggggcttccctggggccttccatgcaactcactttctttttttcctagaaatggcagaatcactggggcagggtcctgcgggagaggagggagaggggggaggtcagcatgggcaagacctcgggcatctaaaataccccatctgaaacctagtatggccgtccaagagggtccccagctggctgagtctgaatttctgcacctctctctaggccccgaggctcctgccctcccaaagacagctgctcagctcaagaaagaggcaaagaaacgggagaagctagagaaattccaacagaagcagaagatccaacagcagcagccacctccaggggaggtgaggcgagggtggagctggaaggaaagttgatgtgtgcggtgatgggttggctgatgcctgggcctatgtcttctccctcccaagcagaagaaaccaaaaccagagaagagggagaaacgggatcctggggtcattacctatgacctcccaaccccacccggggaaaagaaaggtactaggagtgggaaggggctcacccctcagcagccccttctaagttttcaccctatcttgctctattcttgctctcaccactttgtttggtgaggaattgcagaccccctgccctgcctctaggcccctcaaatgcctgtcctatgatgtgagtgacggagatcccgatccctctctgccagcacgtctccttcccagagtgctcccagccacggcactgagccctcccttcctctcccccagatgtcagtggccccatgcccgactcctacagccctcggtatgtggaggctgcctggtacccttggtgggagcagcagggcttcttcaagccagagtatggggtgagtaggcactgctgcccaggcccagagtgggtggggtggggaagggcaggactgaaggatgtgttgcctgggaggggctgggagaggtgacctgaggccttaaacatgtgccatccttctccaccatcagcgtcctaatgtgtcagcagcaaatccccgaggtgtcttcatgatgtgcatcccaccccccaatgtgacaggctccctgcacctgggccatgcactcaccaacgccatccagg

SEQ ID NO: 120261 - DNA, 1051 bp, Homo sapiens
ccgacacggagttaataccagctgcctgtggagcaacgctgccggccctgggactccgaagctcggcccaggacccccaggtgagggggttgtacagaagagggggaggggagaaattcagaggagggaagcgaggactggaatggacaatgagacaagaaggtagtacatcagatgtgggaaaagagtgatcaaatcccagattgccaactggtatggtaaccctgggcacgtttcatagacccgctgtgtcttggtcttcctatgtctatgaacacgcaggcaagttgatgtaatgcttgcctcactgagttaataggattaaaagatgtgcgcagagcacatagtttagtgccaggcacttttaaagtctcttagtaaaagtttgatgagtctgaaattgatgaggatagaagttatttgaattgtaggaaaagactgggtgagggagagatgacaattgctgggaggagataaaagagaaatgaaatgaggaaggtaagtgagaggagagataaccctgccagattgtaactatcagtccttccaaaggagacctgtgccttggtgtactttcaactctgcctccttgcatggtattgagcacatgatggaaaattagtatttcttgaatggatgaatgaatgtggcagaccctgacttgctccctcatattgtgatcaccctatctacaatagagtccttgcattcagaatgtctgtccaaacaaacaaataaaatagagtccctctcttctggaattccctgtttgttcccctcttttatttcttttcttttcttttttttttttttttttgagacagaatctccttctgttgcccaggctggagtgccacggtgcgatggtgcgatctcagctcactgctcaagcgattctcctgcctcagccttctgagtagctgggattacaggcgcccaccaccttgtccggctaattttttgtatttttagtagagatggggttttgtcatgttgaccaggctggtctcgaactcctaacctcagatggtctgctcgcctcggcctccca

SEQ ID NO: 120262 - DNA, 1001 bp, Homo sapiens
ctgtaatcccagctagtcgagaggctgaggcaggaaaatcatttgaacccaggaggcggagattgcagtgagccgagatggcaccattgcactccagcctgggcaacaagagcaaaactcttgtctcaaaaaaaaaaaaataataataataatggtgttcatcttcctttcctagtatctcaacatcaaactaactgacatcagtgtcacagaccctgagaaataccctcacatggtgagttggggtctgtggagaagaggaaacacctctaaagcaggaggcccctgggtggttagaggacatttttaagggtgttttcatatttgtccatctttgtctagttatcagtgaagaactgcttcattcggggctcagtggtccgatacgtgcagctgccagcagatgaggtcgacacacagttgctacaggatgcggcaaggaaggaagccctgcagcagaaacagtgatggctcctcctcctcttcccctccctctttcattggtgacccataaccccaagtcccagcccagaacccctaacccccaatacttgaaggggttttgtttttttactaatgatggttttgtgggttttttttaagggatgagtggatgagaggagtaatagggaacagctatcctctcttgagaaggggaggataagtaggctgggaaacttcaaagccttcccagtccccagcacctgcctttctcactacttctctggagatggtaggagagtttcctaggtctttccagggcagcatgtgattcatttggggatggaaggaatctgtcccgcatcgggaataaaatttatgatgcaaatttgtgttttggttctgttactatgtgttgggcagggggctgggacatggaaaaggatgtcgaattcatccaagcccctgttactctgcgttaacccagccaagaatccaactcagcttcccactactctccttggtataaagcatataatacagttgctctacaccatgtt

SEQ ID NO: 120263 - DNA, 1042 bp, Homo sapiens
tgtactgtttctcaggttcattgaggaggcactgagaacaaatgggatattttttccatgatgagggaaaaaaccccaaccctgagagagattcagtgaggatagcgggagacggaaaagttagacctcagagcacttctctgccaggcaagcttcggcagggtgcgggtgggatattttctacaattcattgaaaggagtgggcaggtacccgagaaaggtggtcgactgagagagcacagtggggaggccgacgtatgcagggcagagtctctctgggactttaagtgatgggctcagtgcagtgtgcagaataatttgggctccagcctttcagctctgtcaaccaattattctttcctgtgaaattttgagaactgtcagggatgcagtggggttcacaataccagtatttggtaatactgtcaaaggacactcctccctaccatgctccttcccacatgatggttttccccctctctcccaatagctcttctattcttttttcaagtcccttgtgggcaaggatgtggtcgtggaactaaagaatgacctgaggtaggtacctgttccaacaagtctgttgggggtgggtgtgcccagggccctggaacctctttaatttgagaaatatttcagggctaggcgaggtggaagatgtacagaagaaataaatggatagggtgcagtggctcaagcctgtaatcccagcactttgggaggctgaggaaggaggaaagcttgagcccaggagtttgaggctgcagtgagcagtgattactccattgcactctagcccaggcaatagagcaagaccccatctctaagaaaaattttaaaatttagcaataaataaatgccttgtgccttaaatttacagataagcttagagattgtatcgtgtattggaaaacaatacaaagcaatatatagtttaaagagtaaatacaggtcaggcgcagtggctcacgggctggacgtgtggctcatgcctgtaatcccagcactttgggaggccaaggtgggcgaatcacgaggtcag

SEQ ID NO: 120264 - DNA, 1210 bp, Homo sapiens
ggagcagcacccggctggcgctggccggccggcgccggggactttcttccgcctggccagacagatccctgttttttgtttttcaaaattcagaaagcatctccgaatatttgcccagaggagtgtgaaacatactttcctggtctttctttcactttgttttatttctgtgtggacaaacaatggggaaaatgccgcgcgtctagccaggcagataagaaaacaactatacccgtcaggcccccaacccggcgccgccataaatggccccggcctcgccattttagttctttttgcgaagtgggctcgtgggttggcagtatgagagttgtaatggcccgactgttgagtgagggggagcaggggatcccaacggcttgcgctgcctttgcgcagcagccggcgggcggccacgtcgcggcctggctggggtaggagagggcggtccccagtgcagttgggtgaactaccgttgcacactggagtttctggtgtctttgcttggaactgacctagctcgtggcagggggaactcggctagcggccccacagcccctgctgactcaaaacaactgtgagtggggttgggcgagtgattgcaaaatgggggtggcggtcgcccggggataggaagggagtgatgatgaccccaggtaactcttgagtgtgtcgctgatgccatcaccgcagcgctctgaccgccccctcggtccagcatttctcaggctcaacgagttcatggccaagattcctaatcttttgttctgtttcatttccccgttaggagttgtaagacgttcatcgccgtgttatccttgagtaaaggtgagtattaggtgcgagagccttttgaatgcctcttcggaaagctttgttcccaagcaagctttcgttcatgggcattatgcgcctccctgcccttttttttttttttttttttgagacagtctcgccttgtcacccaggctgaagtgcggtggcacgatctcactgcaacctgcgccttctgggatcaagcgattctcctgcctcagcctcccgattagctgggattacaggcgcatgccaccaagcctggctaattttttgtattttttaatagataaggggtttcactgtgttagccaggatggtctcgatctgctgacctcgtgatccgcccctctcggcctcccaaagtgctgggattacaggcgtgagccaccgcgcc

SEQ ID NO: 120265 - DNA, 1575 bp, Homo sapiens
cacccagttccctttcccacagaaacagcgggagccacggaagggccgcctcatcgtgtgtggccatgggacgctggagcgggacggagtcttctgtctcctcagcgatgatcatggtgcctcctggcgctacggaagtggggtcagcggcatcccctacggtcagcccaagcaggaaaatgatttcaatcctgatgaatgccaggtcaggagtccatgagatgttccctacccatttgaccctccctgccctccagaacatcatttcacgcacagacccagggtctgactgctccactcagtgccacacacccttgctcccctcggggacagggcattttccctgttccctccctgaggtcctgtcctctcccctcagccctatgagctcccagatggctcagtcgtcatcaatgcccgaaaccagaacaactaccactgccactgccgaattgtcctccgcagctatgatgcctgtgatacactaaggccccgtgatgtgaccttcgaccctgagctcgtggaccctgtggtagctgcaggagctgtagtcaccagctccggcattgtcttcttctccaacccagcacatccagagttccgtgagtgcctcatgggtggggtcagcagggagagccctgtgtctagacaaggcctgggcagagaccctctctccctgactctcctgctctccccaggagtgaacctgaccctgcgatggagcttcagcaatggtacctcatggcggaaagagacagtccagctatggccaggccccagtggctattcatccctggcaaccctggagggcagcatggatggagaggagcaggccccccagctctacgtcctgtatgagaaaggccggaaccactacacagagagcatctccgtggccaaaatcagtgtctatgggacactctgagctgtgccactgccacaggggtattctgccttcaggactctgccttcaggaacacgggtctgtagagggtctgctggagacgcctgaaagacagttccatcttcctttagactccagccttggcaaaatcaccttccctttaccagggaaatcacttcctttaggactgaaagctaggcgtcctctcccacaaaaaagtcctgccctcatctgagaatactgtctttccatatggctaagtgtggccccaccaccctctctgccctcccgggacattgattggtcctgtcttgggcaggtctagtgagctgtagaattgaatcaatgtgaactcagggaactggggaaggctgagcctcctctttggtgttgcggtaagataaccgacagggctggtgaaagtccccagatggcaggatatttggtttcagagtaaggactaggtgcaccaccatgactgactatcaatcaaaatgtttgtaacttaaaatttttaatgaaggataatgaatatttgtagagtctctatggttctgtcaatgcacatcttcgtgtctgttttcctcatgtatccttgtgagcctgggtgagttctggggagagacctgatgtgcgtactgcctgtgaaaatctgactttggcaaatcaaa

SEQ ID NO: 120266 - DNA, 1048 bp, Homo sapiens
acatgcatcgagatggatctcaacagataagaactgtttaaaagcatagccactatatcattatcacatctcacaaaattaacaataattccttaatatcatcaaatacccagcctgttcaatttgccggaaagggttttggtagacgttgcagaggctgctctggaatgggaatgctgagtgagtgccttcccctctgattgagactgagggagctgattatgcttatgctataggcagaccaaactgagtttgagcctggagatggaactctccgacagaacttgattcccgcagtccagagaagctacttcccacctgtcaactctgggaggggcaggagctactgggaatgggacgcccaggctccatactgaggcccccgatgcctgagcctactctatccccgtctaccctcccaggcccaccttgtgaactcctcgtgcccagggctgatgtgcgtcttccagggctactcatccaaaggcctaatccaacgttctgtcttcaatctgcaaatctatggggtcctggggctcttctggacccttaactgggtactggccctgggccaatgcgtcctcgctggagcctttgcctccttctactgggccttccacaagccccaggacatccctaccttccccttaatctctgccttcatccgcacactccggtaaggatggggcaggggcctggtcattgtaggcacgggggccccaggggtcctggagctgtctctgactgcataacaccctctgcagttaccacactgggtcattggcatttggagccctcatcctgacccttgtgcagatagcccgggtcatcttggagtatattgaccacaagctcagaggtgagtctggagtcggagtaggagtcaggagctggggaaggccattagggaggggcagtgaccaaacatgagccttcctcgctcccaggagtgcagaaccctgtagcccgctgcatcatgtgctgtttcaagtgctgcctctggtgtctggaaaaatttatcaagttcctaaaccgcaatgcatacatc

SEQ ID NO: 120267 - DNA, 1838 bp, Homo sapiens
cgacccagagacgttaagtgacttacccagggtcccacagcttgtgaatggtggagctgggattcacacacacagccaatcttgaccatttgctgctttggtgagcagggccagctgcccccaccctcactcccttcccacccacaggacagtggggggtggacgcccatcatctgggctgcagagcacaagcacatcgaggtgatccgcatgctactgacgcggggcgccgacgtcaccctcactgacaacgtgagtgagcgtttggttgaggtagggcagccccaggcccctgagcaaggtggaggctggattcaagggcccagctgcctgcacctcatctgttcccctcctacctccacaggaggagaacatctgcctgcactgggcctccttcacgggcagcgccgccatcgccgaagtccttctgaatgcgcgctgtgacctccatgctgtcaactaccatggggacacccccctgcacatcgcagctcgggagagctaccatgactgcgtgctgtgagcccctgccccgcccttgatgcccctgcccccacttcttgcagcctcagaccctgcattgggcatcctgtcccctcttcaggttattcctgtcacgtggggccaaccctgagctgcggaacaaagagggggacacagcatgggacctgactcccgagcgctccgacgtgtggtttgcgcttcaactcaaccgcaagctccgacttggggtgggaaatcgggccatccgcacagagaagatcatctgccggtgagccctgggcccctctctgcacccaagaccacctcctccccacccataccctccccaggctccattgcatcctcacaacattccccaacccctccccatgcaccactgaatccccagaaccacccacaggccccctccccactagggttgccagatacagcaaataaaaatagaagacacccagttaaactggaatttcagatgcacagatgcatacttttttagtgtgagaatgtcctgtgtaatttttgggacatactaaaaagctatttcttgtttatctaaaattctatgttaactcgctgtcctgcatcttacctggcaaccttactcccctgcccccagccccaggaacctccccaactctcttccttatacctggagtagctcctcacccccttttccagcttcccagccccttcttcccgtcttctgcagggacgtggctcggggctatgagaacgtgcccattccctgtgtcaacggtgtggatggggagccctgccctgaggattacaagtacatctcagagaactgcgagacgtccaccatgaacatcgatcgcaacatcacccacctgcaggtgagtagggggcccggggcctccccaaaaggacaccgagagctgccaagtacagttggacaagcttcaaaccagcaaaggcacctggccaaggaagggttggctgaaagggagccctggtgtggggtcgcatccccaccaggggagggatccttttcctaggtcacagcaaggtatcatatgagctcccagtagccctggggacaccaccatactgattacccgtcaccctaggaccatcaccacccactgttgtaacacatggaccccaaagaaaggacagtggttagggggtcagggggcatcaagagtagaggggcccagaccgatcatggggttgagctgacctctgcctcctcgccccagcactgcacgtgtgtggacgactgctctagctccaactgcctgtgcggccagctcagcatccggtgctggtatgacaaggtgcgtgccccttgccttggccacagacacccggcc

SEQ ID NO: 120268 - DNA, 1050 bp, Homo sapiens
ggggctccaggctaacccaggcaaaactgtaggtgctctctgaccctcagtgtgctccctctcggcccacagcccccggtccctgagaagcggccccctgaaatacagcatttccgcatgagtgatgatgtccactcactgggaaaggtgacctcaggtcagtcccatcccccacccccggtggcttgatgtggtctgttctgaaggtttcggtgataggccccacaccattctctctcttcttccagatctggccaaaaggaggaagctgaactcaggaggtggcctggtaagcagcagaggcagagcctctacccctcgggggctgctctgagggagggtcagaggtggggctgcatcccatcctcagtagaaatgcgcagggtgtcagtggcctcaatttttctgatctttttctagtcagaggagttaggttctgcccggcgttcaggagaagtgaccctgacgaaaggggaccccgggtccctggaggagtgggagacggtggtgggtgatgacttcagtctctactatgattcctactctgtggatgagcgcgtggactccgacagcaaggtgagacagagctggtctgccctccccgccggtgctcccccagggctggggctcactgtccagtcctccttgttccctgtttttctgctttctgtcctttttatcttctgaatatccactaagtcattgccccatgctgtctataactccttttttttgtggggggagacggaatctcattctgtcgcccaggctggagcgcaatatcacgatctgggctcactgcaacctctgtctccagggttaaagcaattctcctgcctcagcctcccgagtagctgggattacaggcacctgccaccacgcccggctaatttttgtatttttagtagagacggggtttccctgtgttggccaggctggtctctaactcctgaccttagttgatccacccaccttggcctcccaaagtgctgggattacagctgtgagccaccgcgcccagctgtaactcattttcaatgtgtattctgc

SEQ ID NO: 120269 - DNA, 1853 bp, Homo sapiens
cctgggagggggtctgggcattggaggctccgtgggtggccaccttggggagctggcccagagcagcgttccccccagcactgtagccccaccgcagggtgtggtgaaggcctgctatagcctgtcggaagatgcagaaggggagggcctgctgttgattcccggaggccgggccagcgtgggggccacctcgggcctggtggaagcagcagcggtggccatggctgcccggggggcggggggcagcctgggggcggggggcagccggggacccctgcctgggggcttctcaggtggaaaccccttaaagaacatcaagtgcaccaagtgcccggaagtgttccagggcgtggagaagctggtcttccacatgcgggcgcagcacttcatcttcatgtgccctcgctgtggcaagcagttcaaccacagcagcaacctcaaccgccacatgaacgtgcatcgtggtgtcaagtcacactcgtgcggcatctgcggcaagtgcttcacacagaagtccacccttcacgaccacctcaacctgcactcgggagcgcggccctaccgctgctcctactgcgacgtgcgcttcgcccacaagcctgccattaggcggcacctcaaggagcaacacggcaagaccacggccgagaacgtgctggaggccagtgtggccgagattaacgtcctcatccgctagccgcgcaggcgtggaggccaggaggctggggcccctgggctgcgtggaaaaagggctctttggcccaggagaattggggggtggggggtctggggcagaaaggtaagagtgggaggctgagcagatgcacacatcctgagagagggaagatgattccttggagagacttgctcttgagagtgcaagaatctggagctgggaaaagggttcttggaggccaggggaatacggggtcccagagaaagatttccttctcttagaagtgcatgtatatgtggagggagggaaaagggtcctatagaatgagggaagacaaaaatgttttattcctggctaaggctgcccaggggaaggttctgacatttctcgagataagaagggttggggggtgggtgggaacagggagggaatttggcaggaggacatgctcctgcttagaatagacctggggtgagggagtggtaaggggaaaagattactgagtcccagaaaaggaagtgggagacagttcttgcatgctggggaaatgagactgcgagtatgaggcttgctgaaatttgagggagaacaaagtaagacgccaggtaagagaacgtggggtgcgcatcctgggtagatattgggaagtgggggtacaatagcaagaaacaatggatagtcatgggggtgggggggatagggcacttagaaaagaaagaacacaagaagggctgttgggagggagggagaggagtagagacatacagtattttttaagaaaaaacatattttttaggattttttctggagtttggggttttagtttttctgcttttgttttccacaaaataaaaaacaaaaaaaaacttttttttttcctttacactctggcaactgcgtgtacatgactatcctgccctagacagcctctccctgtgatgctgcgttcttaatacctagaggtcacaactctgcatatcccttgcctgaaggagcccagccctaaacatgggagaggagtgtgacaagtgagctcctctggtcagggactcccccaagtccccacccccagccctccaccagttctgcaatctcaacacttagccaggtacctcacagtacaagtgattggcagtcgtggggatgcacatgaactctatttgagggacttaggatc

SEQ ID NO: 120270 - DNA, 1814 bp, Homo sapiens
cggccaacacagcgaaaccccgtctccactaacaaaatacgaaaaccagtcaggcgtggcggcgcgcgcctgcaatcgcaggcactcggcaagctgaggcaggagaatcaggcagggaggttgcagtgagccgagatggcagcagtaccgtccagcttcggctcggcatcagagggagaccgtggaaagagagggagagggagaccatggggagagggtgagggagagggagctctaggaacattcttgcatgtgattttggtacatgtatgcacttgcttctcttgagtaaatgatctaaatgtggaattgtcacatcacaggctggcatatgtttagttgtagtagaggctgagaaagtttcacccacgtacatgccagcaaggtaacagagtgccagtcgctctgcatcctctccaacacttggaattacctgttgtttcagtgttagccgttttgatgggtgtgtagggatgcctcactgtggtttatgaaatataaatgttctctgaaggagtggagggaccatcagctgacttcttccctgggtctctgggggctctgggacagacatgggtgcatccctgggttggaactgggaagcttctgctggcaactgaggccgctgaggaggcagagcctgatgggagggggctactcacctctgccttcctttgttcactcgcagctggccactgccccaacccaggcatttcactgggcgcagtgcggacaggcttccgctttggtcatggggacaaggtccgctatcgctgctcctcgaatcttgtgctcacggggtcttcggagcgggagtgccagggcaacggggtctggagtggaacggagcccatctgccgccgtgagtagctgccctgccctcctgagattcctcggcacacccggccactgccccggctgactcctgtgtggctctccccacagaaccctactcttatgacttccctgaggacgtggcccctgccctgggcacttccttctcccacatgcttggggccaccaatcccacccagaagacaaagggtgagtgtttgaggtggggtttctggttgagcagggtgctggatctgggccggagcaagggaggatgcaaccttcctggaggccaggagccttggtgggctcagccactgaaagggagggaggcagagaagctggacctgcttggcgagagcgcaggaaggaggtggggatctgaatcctccccttccacatttctccagaaagcctgggccgtaaaatccaaatccagcgctctggtcatctgaacctctacctgctcctggactgttcgcagagtgtgtcggaaaatgactttctcatcttcaaggagagcgcctccctcatggtggacagggtcaggaatcaggagtctgcctgcagcagaggccttcctgtgctcactatctctctctgtctccttcccctcctcagaaccccactcacagcccacctcctccaagaagtcttctcagattatactcatgccatgtaggaatcatgaattcaatttatacaatcataatttttattccacaagcactgttgggacactgtgctggggctgggcgacagcaaagatggaaaggctgaggtcttactttccaggaattcatcatctagaacagtggtctccacagaaaggtagtgagataacccacaggagtgaagcagaaaaatactggtgcccctgtggaataatttaaatcagattaataatttaatatttaataatttccttttaaaacttcaacattttgtgcaggctttaaaatgtgtgtgatagactgggc

SEQ ID NO: 120271 - DNA, 1033 bp, Homo sapiens
ggctggagtgcagtggtgcaatctcggctcactgcaacatccgcctcccggttcaagcgattctcctgcctcagcctcctgagtagctgggattacaggtgtgtgccagcatgtctggctaatttttgtatttttagtagagacagggtttcaccatgttggtcaggctggtcttgaattcctgacctcgtgatctgcccgcctcagcctcccagagtgctgggattacaggtgtgagccaccgtgcccggctcacctcttctttttttttttttgagacggggttttgctcttgttgcccaggctggagtgcaatggcgcgatcttggctcaccacaaccaccgcctcctggtgattacaggtgtgagccaccacgcctggctctggcttacctcttcttataaggacctcagtcattggattagagctcaccctaatctagtatgacttaatcttaacttgattacatctgcaaagaccctttttccaaataaagtcacagatactggggattaggactcgaacacatctttctgggggacacaattccaccattacagggaataaacaggataagaaaaccatagaacccagcaggtggtaggtgacacaagctaaggggtgttgccatgttgcccaggctggtctcaaacttctggcttcaagggatcctcccaccttgcctcccaaagtggggatgaaagtttgtctggggcattgcagttttagacaggaagaccagggaaggcctcactgagaaggtgacatttgagccaagacttaaaaaggtacgaaagtgagccatgtggaagtctgggggggaggagtgaactaggcagaggcacagctgggcaaagggcctgaggtgtgaccatgcctatggatttgaggaacttcaaagaggctgtgtgctgcaggagagtgaagggcagggagtggcaggaaatgaaggcagacaggtagcagtggggaggacgcaggggtccagctcatgtaggtcttgattggacacagtgagtttcagatgacagc

SEQ ID NO: 120272 - DNA, 1050 bp, Homo sapiens
ttcgtgacccagtctgcattactgctgtctgcttcagacactttgacccaaattttggggtatgtggcatatgtcactagaccatatcttggcttcacaccataacttgccacctgtgggtgaggagaacaaggcgccatggcattgaaaatagaatactgtgattgggagatttcagcgactttgctgggacagggaggctctcagtaagaggctcaagggctgaggttcatggaggaattaccagtcaagaaactgcttcaagtaaaagggaaggaggacagaataggacctggagattttcctggggccctgttgttcagaggggctggaatgatcagggagctagtcctggaagatcagcgagattccattcccccgagttcagggataggaggattccaccttctcaattaagttgactagacactttttggctcctgtgaagttgctggccccaatgctgtctgatccatctagcaccaggtagatgttcatggagcctgaagggtccaggacgatcttccgcttctgttgttcccctgggtgccaggagagtggctcaggctccagcattaacagttctgtcccttctccattttcccccagttccctgccctgcctcccttctctgtcttcaaacctgggccgtgcccatcctcagcatcgactccttctatggtctctgtcagggaagacaggaaagcttcggccacctcttgaggggtgtcgtacatgaaggagtctgggagagtcagaaatgaggtcaaatgtctgggagtgtcagggatacagtgaccaaagagacgggggatcatgggtttccagggtataaaaggctcagaagtgagatagttgtacagggaggtttaaacaaagtgaggaaagagcagggttgaggtggggagagaagacagtaggatggaagaccaggatctgacctgggggtacaggtcaaaggtcaccttggcaggaaggctccgtcccgctccaagagccaccttcctgacacgttcgccgctgggagccacgcagggtaagcccccggct

SEQ ID NO: 120273 - DNA, 1990 bp, Homo sapiens
tcatagtcataaaattcaggaattcctgcttcttttttcccattaatgttgtagttggggtgaaataggactacttctatctccaggtcccgcttctcccctcctgaagtaggagagtaggtaccacctctttgtgggcagcttcctgcctctggccccgtgtcattcctaacttcacgtcttcccccatccctgactggtctggggtgcaaggaatggggctgcattgaggatgggtggagtgtaggatctgtagaaagtgggaggtgttgcctggagagcataggtgcagcccaggaccttcagttgcatccttacctacgctgaccttgattgagtgttccttgtcatccacagtgaaacaatgtgctgctgtcagcacaaagtactcagacaccacagcccccatacagctctcgtgtccctttgaagggcgctggggacacaacagtagagagggaaagctcaactttcacaaaccaccatctcttatggccattttttccttcccctactcccatttcaccttgacctcacctcccccaagtccccactactgggattctgtgcttacaatgactgagatcttggcctgccatggttgcttgtggtaatcggtacccttcctgtgttcccaaaccatgccacagagactcagagactggctttcatctggcagagaaggagaatgtgctgaaaactcggaacacttcattcccaaatggcagcagccttttgggtaggagtctatggggagcaaaggcccaaaaggagaaagggaaagaccacgggtatttgtttcctcgtgttaggagaaaactgctatggtggactgaaaagggaaagaacttgggatcaagctgtcagaggcctggctgttttcaagcccacccttgttgctaacttgctgtcccttgacctcctttggcttctgtttccacgtgtcaaatgtaggactatagaaagatctctgaagtgctcagagctctgtgattctaaggttaagtgaacagtgccaggaaacaagaatagtgacactgaggtagagaaggaggaatgaagaaggctttccaggcaactagagcttcaggtgtagaggaagaatgaattacttcaggggaacctgaggagagttgtgttctttattcccttgtatctccctaccgatcatttggtagaaaacatcttccaggttttccatatccttgactttgaacacatgttgctcattgtctttcttggaagccaaagcattgatgttcacttggttcaccaaaggcccgaccccaaacacatagacatctgagggataaaaaggaaggatgagggtccaagccctgaggaagtggggtgctgggtcctaggcaggttactcacccagataatcctcccttgggtttttgcgatccttgccaatgtatagcaagtcccggatctcatcaatgacagtaattgggtccccgcccatgttgtgcaatcctgcagaagagacaggaccatgagggtaggagataaggaagataaactggctaaaggcagggatacacatggcagggtgagcaagttgaggaagggttagagatagttgatcacagggcttaggaagaattccttatgaagggtcacaggagagatgaacagccagctatgagtcacattcagggccccaaccatgggtatagtgttacaagtggacttaagggccacatgctggtctgagaaggtggggaggctgggacaggagagaggtcccttctgaccatcagtcatgaggatgatgacatggcgggtgcggttccagccttcaggagggacgtcatctggccagctcatcatgctgtacactgcctggagggccttcttggtgttagtccctgacttcaacttgtggtctgtggagagggaagagaccatcacctcacctggtcttccaagccatcttttaaccccagagaccaatctgcaactgaaatcccacatctttcaactt

SEQ ID NO: 120274 - DNA, 1031 bp, Homo sapiens
aggtgttgtcgcagctgttttaattcaatcccacgcccctgtccagcaggaaaccccttatagaaaacccaaatcctcatcttggagtttctccttcagccagggcagcacttgaaagaggttgatgtgaaagtctcgggcgtgagcaggtacctgcttttgccgcttctggtttttgcagacatccactactccccagctgattacaccaacctgcagaggcagtggggtgccatggatcattcagtagaattcctaatcctggaagcatggctgttcctgcttgtgtcttagctgacctaaaggaatcagactagggacccagctcagcctcgttcttgacacacgcaggcaagacatgcggtcctaaggtgaggcaggctctgcctacctcgaattactagccacatgcattgagctttcctgctttggggcccatgctgaccacttggcatctccccagataggaaagggaggactcacttgaatgaaacgacttctcttgtgaactatcaaggggccgccagaatcacctgcaaggagaggagaagctgtagagaaaaggactgttgggccttgggcacttgtagcacaaccaaagagcattctctcacctctgcaagtattggggtcagcatagggactcactcctccagtacaaaggaaccgaggggtgaccacctctgagatgtccttgactttgtcatagcctggggcatattgagcatctctctcacagctgcctttctgtaggggaggtgggaagcatggagaagtaatgaacagaagtggcttaggaaggattggggcctagagtgcctccttaggatgcccgtttctcaccttatccccattcttgatgtagacctccttccgagtcagctttttctcctcctcagacacaaacagagctttgatatcctgtgcagggagcagctcttcctctggacgaatagactgcgtcacttcagctgctcccaccactgtcatctccccattgcctttgtcactcagtagatgtcccctaagcc

SEQ ID NO: 120275 - DNA, 1268 bp, Homo sapiens
ggaagaaaagatcagaggaaacctagaagagggtgagggaagaggaacacctctggtccatggttgggcaacctcctgctccacactgaggtaggtctctcaccactccaggaccccgagaagggaccagtccccactttccagccgttccagaggagcatatctgctgatgatgacctgcaagaggtaaaggctcctaatttctgtccctgaggggttggggatggaggaatatgagagacaaatatattttggaccacatgtcagcaactggaaatcatcttaactgttcttggtctcttttacagtcatccagacgtccccagaggaaatctctgtatgagaggttagagagtagagataaggctgggcccatttggtggagttgattgcctgagtccttgggaggtttgggctgtaggagctgggctatagagggaatattgagtctccacagggtctgaggggagaaggtaaaacccccctttgatcttcagtctgcatctccccagctttgtgtcttctagtgatcgacttcgagaactaggaccagatggagaagaggcagagggcccaggggctggtgatggtccccctcgaagctttgactggggctatgaagaacgcagtggtgcccactcctcagcctcccctccccgaagccgcagccgggaccgcagccatgagaggaaccgggacagagaccgagatcgggagcgggatcgagaccgggatcgagacagagacagagagcgggacagggatcgggatcgggatcgagatcgagaccgggaacgggacagggatcgggagcgggatcgagaccgagaccgagagggtcctttccgcagtgagtgattttggctggaggtcaaggtgaccttaactgaggtttatgtgggtcctactaagtgaaatgtggcatggtctatgtcttgtgactatgatttgtgctcccaaagggtcggattcattccctgaacggcgagcccctaggaaagggaatactctctatgtatatggagaagacatgacacccacccttctccgtggggccttctctccttttggaaacatcattgacctctccatggacccacccagaaagtaaggatgacaacagggcatgatgagaagtcctgggagaatcctggggtgtgagacctgagggaagaagctgccctccctgcagccgcctattatcactgggtttggttgggtccagaagagccccttggctctccactgaccgtgttttctcttatccc

SEQ ID NO: 120276 - DNA, 1075 bp, Homo sapiens
tcgttgtgagcccgctatcagcggccagcgcgggcgcggccggagaccgtggggcccccggttgccgccccctcgggtaaggccctctgcttctcactcttcggccctttttctcatagccgtttctctgttcttcctctttgcgttgctctgcgggcgctacgctggctccaccgccttctctgccgttcaaaccccgcggttgtccttaccctagcgagggtaggggggtcgggtgccatcgtctttccgacggagtggatatttgtccctccttgaaccacatggtacctaaaggtgctggtgtctgtgatccctggagacaggagggaatgctggatgatcccgaccagcgggagcttggacagcagcctggtttaagcaaggggtagggaaagccaaagacaagagtaggcagacctgaaggggtggggttgggtacagtgtggacggcgtgtgaaccccgggtggtaacagtggagaaagatgtcttgggccctgcccctgaactaggagccaccatgttggtgataccccccggactgagcgaggaagaggaggctctgcagaagaaattcaacaagctcaagaaaaaggtgagggactgtgtgtggacatggcctaacctttcacagactctgcactctgagaagatatggggtgagtgtgagcgaatggggaagtttttctggcccatacctagagacatatcacctcacagtgtagcttcgagaggtgggctttcccaagccttggtgtggaccttctgtcttttctatgcaatttgccatggattgtcttcctttcccatggcttttagtaccgcttaagagctgatgatccccaagtttgttttttccagttctatccagtgttatactgaaaaacttcagatactcagtgttgaagctatcatctttctattcttgatcttccaaataagattgactacaccaattctgccacatgtttggactcaaaactctgacttccccactatttgcatagtcaaacctttgccaagtcttattgtttcttcttttgaagtaatttttcctgtttattcttcactgtg

SEQ ID NO: 120277 - DNA, 1032 bp, Homo sapiens
tttcctcccagctcatgcttagtttcctagtgaaggccagtggctctcattcttctctggaacccgggagcaccccttcccaagttctaagttctcctcacagcttgagcctaggcgtctggctccagccttgtctttctcctgcacagcatctctaccacttcaggaaccctcctccgcctgccagagacatgaagattctgctcatcattgctcagctcctcagagtgggccgggaggggactagaagagctgcatgatggtggctgagacagggtcaccttgggaaggcttgggagccaggatgagtgtcgggctctcgtgtgtgcaaaaggtcagatgtgactgctgctgtttgcctggtttctgacccagtggtggggtttgagcaatgcttctctgcccttccatggaaagtggaaccagaaatggtgccaaggctgtggctgttccctttcgtgtaaaatggtgctgttattactctgtcttgaaataggaaggtgggatttctggggaggctggtgaaggagggcagggttcttttctctacgtgtcatgttaaaattgccaaataaagtacctctgcctgtgatattttctggatgtcctttatttactgtgacgtgtgtttgggtgccttgtttaggggtagaggtgaagtctgagctttgcctcattcagagaggaaaggggtcaggggttcactctgacgttcaggccattctccctgtggagtggtgagggtgtacctaatctcctaaaccacggaatttctgttagggcctaaaaaagcaaaagcctagtatagttcaatttgtgttggaatgaaagtaagagacaagtgtcttagaagcctgtcattgttttgtgagggcctttaaatatcctgtactcgtgggccatgttgggcccttgtacgcccaggtatacatgagcttgtgtgcacctataccctgatacagatatacctggtagggggaggtgctcaggcactggaatgagaggagttaacggggaaggacagggttattt

SEQ ID NO: 120278 - DNA, 1017 bp, Homo sapiens
gagagctgctggacccacaggtgagaagcagcaggaagtaggtggagggaagagcaccatgcaggagacttgggagggagacaagggtgagggtccttccctggtgaaggtgcttgggtagatgactgggcagaggcggggggccgggaacctgctagactctcacttacttttttctcttgatgtcctctcctgtgtgaccccacactcaatgcccttttcttttcctaccctctccttgcccctgcaccaaactctgtccctgccatcctgtttaactcccgctatggatctgcctcctcactattgccctttctttttctctctgctcacctctacttttctgacctcctcccctcctccctgcaatccctgtttgcctccccatctcctcttccttaactctccccttctcacagagaccctgtcaggccgtggggccccgggggactatgaggagatgatgcagatcgagtgtgaggtcatggacaccagggtgattcacatcaagacctccacagtgcccccctcgctccgaaaacagccatccccaaccccaggcaatgccacaggtggccccttgccagtctctgcagccagccaggcccaccaggcctcccaccagcccctctacctcaatcatccctgacctctgccattcacactgacttagaacggggggagggggtaccaggtggccaggtgggactgtttcaaatttccctgatccccaggcttggggcaattggtaaaggaaagagcaggtgtgggggttaagcacttatttgaggtgggggtgttcacctctcttctcatcccttttcagaatatagggctcctctcattcctgtgaacccccagtcctggcttctttgtttgaggggattgtgtgaggttcagttgtggggtgggtggtgagctgctgcatattttttattttgtttctctagtgttatggcagtggaggtgggaatttagtccccaggtgggacaagggaagttttttcattttggagc

SEQ ID NO: 120279 - DNA, 1702 bp, Homo sapiens
ctgatgctgctcagcgagattgctgacccgacgcgtttcttcaccgacaacctgcttagcccggaggactggggtctgcagagtgaggcaccggggaggggagagggctgtggcaaactgtccctgaggcacgcgggaaagaagcgggggcctaaagaggaagtctgggcaaatacggaatccgccatctgaaggagagcggagcagggggctcgttgtgcattaagggggatacaaaagtcagggaagaactctgctccctgctggaacgtcgagttgttccggggtcggggaaggaggggctgaagcgccctggttgtatcacttttcaagtgggcgggcggtgggtctggccgagcggagccaatgagggatggggcgggggcttgtgtgcgatctgtaggctggggccaccgaacgaccccccgacgctcagcatttcttgcagacagcaccttgtattctggcctagatgaagtggccgaggagcagacgcagctcttccgttgcccggagcaggatgtcccggtattgtgtccccagcctttctctaacccttggtgggtggaaagtgagcccagaacctggacccattcacaggccataactcatctggagtcacccctactttctcatcctttctcacactcctgccctcttgtatcctcccttatttagtttgacggcagctccctggacgtggggatggatgtcagcccctctgagcccccatgggaactcctgccgatcttcccaggtaaggtagtctttgtcgttccctcagatttccagaaaccctcatcttcccactgtttcccagaaactacgtagcttcctatatcctcacgcttctacataagtgcctatcctctctccttcaatcccctatttttgtttcttctcccttgctgcggtacaggaatccccaccgacatgtccttgggtactttttggactcttcttaagctctgcttcctgataatttctaactccctttcctccagatcttcaggtgaagtctgagccatcttccccctgctcttcctcctccctcagctccgagtcatcgcgtctctccacagagccatccagcgaggtgagagagccatatccctcttactctctgtgacggggactctgcttcattcccttcacccgtgggtgacaaagaaatgatttaaatgatttgtgtgctatgagtcatgaggtgtgtgaggtgtggggggccttctccactacctttgccgtttccttaatatcttcattttccacatcccctttggttatctagcagtgaagatttttttgtttgtttgttttttgttttttgcttttttttgagatagggcctccctctgtcacccaaactacagtgtagtgacagggtcacagctcactgtagccttgacctcctgagctcaggtgatcctcctgcctcagcctcctgagtagttgggaccacagacacatgccaccatgtctggctaattttttttattgtttgtaaaaatggggtcttcctatgttgcccagagtggacttaaactcctgggctcaagtgatcctcccaccttggcatcccaaagtgcttggattacaggtataagccaccacgcctgatcttgggtctttttaatataaagagttatgtggggctgggaagaagagagttattgactgctgagaattctggaactgttct

SEQ ID NO: 120280 - DNA, 1038 bp, Homo sapiens
tgaggggcacgcccgggctggcatcagccctccaggccaccctgccactcacccagcacacggcaaaatgcagaggactacctttccctggtccgccccctggccgccccttggggaatgcaaacttcgtgttctgctgcggagccagacgcctgtattgggaagtggggagaatcaaggcggggaaatcggacttttgggtcgctgggggcaacgaagcctggagaggccttctttccattcccagaatatgtttgctgctttttcctctccccactggcctaaatggatcgctccgcctgtttcctccccagcacctagggcgcaatggaatattccattgcccctcctgtcctgggtctgtgttgcggggaacgctcgcgcggttgccagagaaagccccggacgtgacggatttgcgcgaccccaagcagcccgcccttccccctcccatccgtcattcccctgcgctctctttcctcacccttccccccgccaccgtgggttccagacttgggataagtaaacagcgggtggagcgaggcctacggacccaggccaggtgggagtctgcactcttcaaggggcctgggctgctgctcacgggtattaaagaactccgcgttgttcatggctgaggcgatgcattaggaagatcctggacctagagaacaagtcccccgaacgctgagttggaggcgggacttcgggtgcgcgttggtgcgtcaacgtggtgggggggtgtgtttgtagggagagggctggagtaagttaaaagtaggctattttgtgacacggacctggtgtgggagcgagaggaggtggcttgattgccgggcgtctgttccgagggaggagggtgttgccatctccctcacatgcccttatcacccctttctcaggcgggagcatgctggggctctgcgggcagcggctccccgcggcgtgggtcctgcttctgttgcctttcctgccgctgctgctgcttgcagcccccgcgccccaccgcgcgtcctacaagccggtcatcgtggtgca

SEQ ID NO: 120281 - DNA, 1913 bp, Homo sapiens
agatgggtagcacttggtcccaccaagagaggctgttactaatcttaacaggaaagataaggcctgtgtgcacaaagctgtaatgaataacactcattcagcagtaaatgccaaacccagaggaggggggctggaggggtgctgaggagatgtctgaactggggattggagaaggctttgtataggagaagggcctcagaagtggcagctggcaagcccagggatggttgtccagggttgggggaagagaactgaaaggttgaggaagagtatcactcggaagctgggccccacctgtgggcaaagacctgggtggacaggccatgatggtgctccccttgccccaggacaatgtcaggtgcgggtgctgcccccagtgcccacggaagggctgacaccagatgacgtcccagctctggctgacagagtccggcactccatgctcactgttttccgggaaatctccactgatggccggggtggtggtgactatctgaagaagcctgggggcggtgggtgaaccctggctctgagctctcctcccatctgtccccatcttcctccccacacctacccacccagtgggccctgaagcagggccaaaccctcttccttgtctcccctctccccacttattctcctctttggaatcttcaacttctgaagtgaatgtggatacagcgccactcctgccccctcttggccccatccatggactcttgcctcggtgcagtctccactcttgacccccacctcctactgtcttgtctgtgggacagttgcctccccctcatctccagtgactcagcctacacaagggaggggaacattccatccccagtggagtctcttcctatgtggtcttctctacccctctaccccacattggccagtggactcatccattctttggaacaaatcccccccactccaaagtccatggattcaatggactcatccatttgtgaggaggacttctcgccctctggctggaagctgatacctgaagcactcccaggctcatcatgggagctttcctcagcaccttcaccttccctcccagtgtagcctcctgtcagtgggggctggacccttctaattcagaggtctcatgcctgcccttgcccagatgcccagggtcgtgcactctctgggataccagttcagtctccacatttctggttttctgtccccatagtacagttcttcagtggacatgaccccacccagccccctgcagccctgctgcaccatctcaccagacacaaggggaagaagcagacatcaggtgctgcactcacttctgccccctggggagttggggaaaggaacgaaccctggctggaggggataggagggcttttaatttatttctttttctgttgaggcttccccctctctgagccagttttcatttcttcctggtggcattagccactccctgcctctcactccagacctgttcccacaactggggaggtaggctgggagcaaaaggagagggtgggacccagttttgcgtggttggtttttattaattatctggataacagcaaaaaaactgaaaataaagagagagagagatctgggtgttggtggttgcatttgttaaggaattgaagaagcagttcttgcccaggcaacctgcccccagccagaagactcaggggcaggccaagaacacaggcctccccctttcttcagctctctgaagtttccattgttcattgctctttggtggctgatagccttatctgcagctcacagtcggccaatcccagaggattagtgggtccggtttctgtataaattagggggcaggggtgctgtagaggcttcttatcgatgattgacgccgaggcccaggctgttgtcctcacaggagcctggttaatgacatggcagacacagtg

SEQ ID NO: 120282 - DNA, 1032 bp, Homo sapiens
catttacattcttttatctgtcactgggtgtaattataaatttgtgtctatgtgtgaacatgttagtctttgtatgactgtgtgtctgttggcattagtgacacgaacttttaatcttgccatttggcccttgggtatatggctgtgagtgttctgtcacaatcaccatatatgctgtgtgctgtgttcgtatatatatatgcaatacataccagtgtcagcgtaatggagtggttaggaacacaggcggcttagatttaacctagaaactgctgtttaggagctgtatgacctcaggtaagttatttagcctccctgggcctatttcctataaaatgtaaatagtaatagtactttctagactatcatatgcatcattttaagagtttaacttaatgtatagaccagtactgttctacagaaatataatgcaagccacaatgtaatttttttatggtagccacatttttacaaggcaaaaagagtgaaattaattttagtaatatattttcttgaatctgataacatccaaaagattataatttctttttttttttttggaaatggagtctcactccattgcccaggctagagtgcagtggcgtgatcttggctcactgcaacctccgcctcccggattcaagcgattctcctgcctcagcctcccgagtagctgggattaaaggcatgcgccaacaggcccggctaatttttgtatttttagtagagacggggtttcaccatgttggtcaggctggtcctgaactcctgacctcgtgatctgcccacctcggcttcccaaagtgctgggattacaggcgtgagccactgcgcccggcccaagattataatttcaaaatgtagtcagcataaaagattagtaatggatatctcacattttgttttttattcagtctttgaaatctgatgtgtattttacatttccagcacatctcagttcagactagctgcatttcaagtagccacatgtaggtggtggctactttctcggacagcacaagtatagaccat

SEQ ID NO: 120283 - DNA, 1038 bp, Homo sapiens
ttccgtcaagttttagccaatgagttgatttggagccatacgctccaaagtccaatagcaatccggacattctctaaaagaggaagcgaaggaaagaaaggggcttatagtgggcgaggtctataggtagtcccgagcaaattgcttatggctttggttatgactgacaactactcagacgaataaagccctccttggccaggcgacagcgtgtagcgagttattaccaatcccttggcattgcacattgacttagaccgtatcagccaatagccattgtgcgaaggcaggactgcactaaccttttcccgcccctaccctttgggccaatcctttcttttgaattctttgtgactggcaggcattcagaccaatagtgattaggaaaccttgaagcctgcccaacgatcgtgggcaggaggtggtttctggtttgttggggcgtgtgtatgtgtatttggggggactgaagggtacgtggggcgaaacaaaaccggccatggcagcagcggaggaggaggacgggggccccgaagggccaaatcgcgagcggggcggggcgggcgcgaccttcgaatgtaatatatgtttggagactgctcgggaagctgtggtcagtgtgtgtggccacctgtactggtgagaatcgaggaggggggcgggaggtggtgggtctcgcttatatactggagaggctaggagcgaataatcatacagtcatacagataatcggagggcacgttcccataggtgaagcccgacaggagacataagactttgctggtatgtgtgggtgggagtataacggtcgagatctgtggaaagaaaggtcttaggaaccaggagctgaggcacgtgatgtgctgagaagagaaggtggggcggggagtggcaggacaatgtgagacccgagccaccttaccccagagaagtgaggggtcttagctgtgcaggtggaaacaagtgagacacaaaggttaagggaggcacgcatcagttgagtcggggagaaccaggaaatatggatcacattcagat

SEQ ID NO: 120284 - DNA, 1293 bp, Homo sapiens
ctacaggcatgtaatgagttcacgacccatgtcatgaacctgctgagggagcagagccgcaccaggcccgtggcccccaaagagatggaacgcatggtgagcatcatccatcgaaagttcagcgccatccagatgcagctgaagcagagcacctgcgaggctgtgatgatcctgcgctcccgtttcctggatgccaggtgggcccagggaccccaggctggcccccagcactgggctccttcccattcctctccaagaccctgagctgccatgctgcacaacatggtactccatgacaatggtgactctggggtcatgccatgtgacagccctgccaggacatcaacatcctcctcactgctcttctccctcctctgtagacgaaagcgccgtaacttcagcaaacaggccactgaggtcctaaatgagtatttctactcccacctgagtaacccatatcctagtgaggaggccaaggaggagcttgccaagaagtgtggcatcaccgtgtctcaggtattatggaggttgcgggaggagttgtcaggcaaagtgcacgcatctcagctaggtgcagtggtgtgttcctgtaatcccagctactagggaggctgaagtgggaggatcacttgaattggagaccagcctgggcaacagcatagtgagaccaggaagcaaaaaaaaaaaaaatgctgtcactcacatcttattcagtgaaggacttcagaggcaaatgtttctacctgaccctcctttctgccccacaggtctccaactggtttggcaacaagaggattcgctataagaaaaacatcggaaagttccaagaggaggcaaacatctatgctgtcaagaccgccgtgtcagtcacccaggggggccacagccgcaccagctccccgacacccccttcctctgcaggtggatcccactgtcaccccggctgactgttttgcacacttcctgcttttgttcccacttcctatctaggcaggatcatagcagagagggggccttttggggtgagagggaccgagctgagataggctggagatgtcaggggacagaggccattccagtgatcttagttctgcctttcttcccacgggtggccaaggaacagcctgctctttctgtgtgttggaatgttattttgtggataattggagtatagtagcatgtccccacaagagttgagagttgtggttcatcctctaccatcacgggctctattacactcttccctctctgcccccacaaggctctggcggctctttcaatctctcaggatct

SEQ ID NO: 120285 - DNA, 1039 bp, Homo sapiens
gcaccattgcactccagcctggacaacaagagcgaaactctgtctcaaaaataataataataataatataatagcattctattaactgtttagtcttctaggacttgcactgtaatgccacagtccatcaggttgttgcacacagctgtgcttcatccattttcaacagaatgtaatatgtcattgtgtgaaattaccacaggacatggtttcaacatccacaaaatgattaacttgatgctctctgaggcgccttttagatatgagaatctaggaccctctgcaccgtcttaacccaagagtttgcttgatggagagcgggaagaataatgcaagttgcatctccaatatctcccctcccctccacagggttttgaaggccccacctgcagccacagggccccttcctgcggcttccatcactgccaccacggaggcctgtgtctgccctcccctaagccaggcttcccaccacgctgtgcctgcctcagtggctatgggggtcctgactgcctgaccccaccagctcctaaaggctgtggccctccctccccatgcctatacaatggcagctgctcagagaccacgggcttggggggcccaggctttcgatgctcctgccctcacagctctccagggccccggtgtcagaaacccggagccaaggggtgtgagggcagaagtggagatggggcctgcgatgctggctgcagtggcccgggaggaaactgggatggaggggactgctctctgggagtcccagacccctggaagggctgcccctcccactctcggtgctggcttctcttccgggacgggcagtgccacccacagtgtgactctgaagagtgtctgtttgatggctacgactgtgagacccctccagcctgcacgtgagcctgaaatccactggagccagggaaggagaggggtgggtgagaggaggaggaaggacgtagatggctctgagttacagtgtggccacagccttgggctccagggagtttccaccctaataaccatcactaaacaggggtcg

SEQ ID NO: 120286 - DNA, 1014 bp, Homo sapiens
cctagaagggagaaaacccctcagccttcccacccctcctctcatctccccctgggttccaggctgcctcccaccccacacctcgttccgccttccctcctggcttgccacctccctgtggttgcctcccgacaatatcacacactaccttccccttgttgcccgaacttcttcctatcatgccctgtctctgtcttgttcagcccctgtaggaatagggcaacctgccaggacagccctcagggtccccgctgcctctgccccactggctacaccggaggcagctgccaggtgagggccattgaagtcaggcgtgctgaggagggaagtggctgggagggaaaccagggagggtcacctggtcccaggccattcaggagaaggtttttgaagtaagggatttcgaggagctggagtgggcagaggaccatctctgggctgagaatctgatgctatgtcctgcctcacgctccctcccacccctcagactctgatggacttatgtgcccagaagccctgcccacgcaattcccactgcctccagactgggccctccttccactgcttgtgcctccagggatggaccgggcctctctgcaaccttccactgtcctcctgccagaaggctgcactgagccaaggtaaccaacgccggcactgactggagagcaaatgaagaaaatatgggtgttctcacctgccccgttcctgtgggcttccacacagcttttggccaaaacaaccatctgagaatcaaaaccacacagacaaatcagttcttgattgcagaggtgttgaattgtgcaatcagagaagcctaacacaattcctgttacctcatttaacgcaattcaagcaacaccaaccagcccattccacaggattccagtttaacccaaccatgagggacatgactcaacgtggagcaactcaactctgtcctgatcatcataacccaggcagagtggaccacacttaatccagctacactcaacgcatttcaccccaccccac

SEQ ID NO: 120287 - DNA, 1815 bp, Homo sapiens
ctttgggatctctgttctccctagcatggaggcccacccagggagaacaagaagcgggactcattctccaagccaatttgttcctatttgtaccttgaggtcctccaggctgatcagcctgccctggtgagccccgccctctgtatacacaggaatggccaccagaaagccttgtagtcctcccgcaggtccccagcaagcaccctgttccctggcctttcacacctcaaggagcagggccacacactgcgaagcagcagggcctcagggttcatcttattcaaccccatgcagacagcacctcgggggaggaccgcctgagtggggcaagtcaggagcagggccgattctagaacacaggtctcccaggcagacctggctgagccacagccctcatggtccccatgtccccaggcttagaagggcagctctgtgaggtggagaccaacgagtgtgcctcagctccctgcctgaaccacgcggattgccatgacctgctcaacggcttccagtgcatctgcctgcctggtgagtacagatgcctctctggccaccctcagaccccaggcctctgaacctgcagagttcaggctcagcaatcacccaaggccacttgaagctctctctagccaagccaaggagtcctccaaatctgtctttgctccccaaaatctctactcttacatccccaaatcttcccttgcttacttgcccattctcatctctgtcctaccaaatcacccaaagatccctcctttccagtcctcctgcacagcctctgtgtatgcatgttgaggtcccaggctggtcttggcactctcatcataaacccagcaaaagctgccccaagcctttcttctccagcctcaccggacactcctctgtcccctgctattataataactacacttattcaccacttactccaggctagccatttggctgagtacttttcaggcgttatgtcatttaatctttttaacagtaccatgaggtaggttccattattattccccttttacacagaacaggaaactggggcctagagggttgaccagcttgcccaaagtcacacagctggcaggtggctgagcttcaccttttctgcatcatctcctgtcaccccacgctcacctgccccaggtgtcttctctgggaagctctgcaagttcacctttcctggcaagggaaggcgccatgctgtgcctccctcgatgaccttggcctcctctccccacccacttccgccccaccaggattctccggcacccgatgtgaggaggatatcgatgagtgcagaagctctccctgtgccaatggtgggcagtgccaggaccagcctggagccttccactgcaagtgtctcccaggtaaactggggcacacactgtgggggacagcgggagcaggaggcagacatccgtgcaggtccctgaccttcctgctgtgccacaggctttgaagggccacgctgtcaaacagaggtggatgagtgcctgagtgacccatgtcccgttggagccagctgccttgatcttccaggagccttcttttgcctctgcccctctggtttcacaggttcacaggggaggcactggaaagaactggcagaatattttattccatttgggttggggcagagttcattggtgggtgtttgatggttgggatgtgagaatagaatgagaatggtatcctttaaagttatttagtgtaaaacctgcacaattgtacaaccatggggacaagggcaggggttaccgtagggcccacatgggcccagtgtaaatggtgtgattgcggcttgggagcaga

SEQ ID NO: 120288 - DNA, 1050 bp, Homo sapiens
attcgtacaatgctagaaacggctccctctgtcctctgcctcaggtgagcagtgccagcttcgggacttctgttcagccaacccatgtgttaatggaggggtgtgtctggccacatacccccagatccagtgccactgcccaccgggcttcgagggccatgcctgtgaacgtgatgtcaacgagtgcttccaggacccaggaccctgccccaaaggcacctcctgccataacaccctgggctccttccagtgcctctgccctgtggggcaggagggtccacgttgtgagctgcgggcaggaccctgccctcctaggggctgttcgaatgggggcacctgccagctgatgccagagaaagactccacctttcacctctgcctctgtcccccaggtgtgtcctcacaggggctctccggccgcccctctctctgggcagggcaggatgtctccgttggagcctcctcccacagctgatccatgaccctgtcaggtttcataggcccagactgtgaggtgaatccagacaactgtgtcagccaccagtgtcagaatgggggcacttgccaggatgggctggacacctacacctgcctctgcccagaaacctggacaggtgagttgtttaagccacatccatgacacccatggcccagagagttggcccctggcctcccctactcatagggctcccagccttagccctcgtcccctccccaaccccctgcaggctgggactgctccgaagatgtggatgagtgtgagacccagggtccccctcactgcagaaacgggggcacctgccagaactctgctggtagctttcactgcgtgtgtgtgagtggctggggcggcacaagctgtgaggagaacctggatgactgtattgctgccacctgtgccccgggatccacctgcattgaccgggtgggctctttctcctgcctctgcccacctggacgcacaggtatgggggtagagggtatcaggaggtgggaggtagagaaggagggtgagagaagcaccaggaggactgctaggagcttcaagtg

SEQ ID NO: 120289 - DNA, 1086 bp, Homo sapiens
gatgatgcccactttgtgccacatgatggtggctactgcctgtaagcattttccagtgactgaaagaggctgctagtggtcgggaagagatatcatccaatttcctaaaaagactgaacccttcatattccccagaagaataacagctgttccccacctcccacacatctgcatcaagctgaagttctgtgtcctcatgagctgatttcacctttgcacagatcttgggggaggtgatgacaatacaccctggacctcaactttctctgtctgaagctgcagggggcccctgaagggtgggggagatggcaggcccaccaggataccctgtgctgatcaatgctcttctctcttctccagggcttctgcactgactcctgagactattttaactaggattggttatcactcttctgtgatgcctgcttatgcctgcccagaattcccagctgcctgtgtcagcttgtccccctgagatcaaagtcctacagtggctgtcacgcagccaccaggtcatctcctttcatccccaccccaaggcgctggctgtgactctgcttcctgcactgacccagagcctctgcctgtgcatggccagctgcgtctactcaggtcccaaggggtttctgtttctattctttcctcagactgctcaagagaagcacatgaaaaacattacctgactttagagcttttttacataattaaacatgatcctgagttatctgtattctgaactttcttaattgagaagaggcaggaaatcactgcagaatgaaggaacatcccttgaggtgacccagcaaacctgtggccagaaggaggattgtaccttgaaaagacactgaaagcattttggggtgtgaagtaagggtgggcagaggaggtagaaaataattcaattgtcgcatcattcatggttctttaatactgatgctcagtgcattggccttagaatatcccagcctctcttctggtttggtgagtgctgtgtaaataagcatggtagaattgtttggagacatatatagtgatccttggtcactggtgtttcaaacattctggaaagtcacatcgatcaagaat

SEQ ID NO: 120290 - DNA, 1014 bp, Homo sapiens
acattcaccctacgccctggcgaggtgacggcgctggtgggacccaatgggtctgggaagagcacagtggctgccctgctgcagaatctgtaccagcccaccgggggacagctgctgttggatgggaagccccttccccaatatgagcaccgctacctgcacaggcaggtatggaagcaggtggcttgaaggagggcagggagcatcaaatacgaagagcattcttactgagcactctgaaagaggggttagggaatgataagagaccttgggtggagatggtggtgtagtcaggagggaggtagtatgattttgtgacatgttctcaataaagattttgagtcttcgatctctagataaccatactcccatgtgccttgttctatgactcttcatcatatttcatctcaggtggctgcagtgggacaagagccacaggtatttggaagaagtcttcaagaaaatattgcctatggcctgacccagaagccaactatggaggaaatcacagctgctgcagtaaagtctggggcccatagtttcatctctggactccctcagggctatgacacaggtactctctccactcatctcaccacccagccatctttacctttgctgaaaccccagtagtcttgcctttatccttcagttcctccttactcatggacatcaatttgaagttgtaagatcatgctcctatggcttcttcatcctgacatcctcaggattctgttcatcttcccagaatctcccctatccagctacaaccgtcagatcttggtgtgtgtgagtgcgtgaatgcatgagtgtgtctgtgtgcatgtacatgcgtgcacacatgtggctataccgttctcatcttggccctttgctctgcagaggtagacgaggctgggagccagctgtcagggggtcagcgacaggcagtggcgttggcccgagcattgatccggaaaccgtgtgtacttatcctggatgatgccaccagtgccctggatgcaaacagccagt

SEQ ID NO: 120291 - DNA, 1205 bp, Homo sapiens
actcatcttccctgcactgagatttgcagacctctggagaaccctaaccttgtttcctgcagcctccttagaaccccatgttgacacccctgaccctggcatcctggctcattgttagttcgtctcatcacttggaacctgtctgattcacctcactctcttctccccaaccctgcaggtaacatcatgtctcgggtaacagaggacacgtccaccctgagtgattctctgagtgagaatctgagcttatttctgtggtacctggtgcgaggcctatgtctcttggggatcatgctctggggatcagtgtccctcaccatggtcaccctgatcaccctgcctctgcttttccttctgcccaagaaggtgggaaaatggtaccaggtatgttcatggagttggcccgctctacacagaccctcatctcccagacttggcagactcagttcctctcacattgctttcagtccagctttcctggcacccttactgattctccatcttcatggaacaccctgtccctgtggtccatgttcccaggttgctcaacattaacctccatactctctgggtcttcttttctagcttctccccacaatctgtctttaagaatttgatccccaacccgttctgagtcattttcctcttcctcgtatttctttagcatccaaggggcatagctgtgtctctttctcttttctccttttcctctgtctcttctcacctttaatttccaaataggtaactcaggtattagtgtccctgatggtttgccaacccgtgtgacatctcttgtccatgtatccacagttgctggaagtgcaggtgcgggaatctctggcaaagtccagccaggtggccattgaggctctgtcggccatgcctacagttcgaagctttgccaacgaggagggcgaagcccagaagtttagggaaaagctgcaagaaataaagacactcaaccagaaggaggctgtggcctatgcagtcaactcctggaccactagtgtgagcacctgaagatgaatacccattcccttgtccttaagatgccgtgactccattcccattcctatgaccctgctcccactcctcctttactgggaaatggttggttcagtattttcgtcctagcaacctgaggctcaatgactctactcagtgtccctagccccctccctctctttaaagatgctaggtggctt

SEQ ID NO: 120292 - DNA, 2457 bp, Homo sapiens
ttgggctgtgcatggaagcttgggaagactttgttggaaggggaggcggggagagagtgctggaggctctggggcgatggcttccgcacctcttccaaccaccctctttccctggagtcggcggaccacagctcagccaattggcttggagatgtggcgggttgccacttccctgtgggtctctgcggcactcttctgcctggtgactgacaccttggaaatgaagtttatgacgtcatcgttgcggctggccaatagaaaaagctcccgcggagaggtgttccttccccttcgactcagcttcttcacccgcgtgagcgagcgcgcgcgcgcggagggggtggggaaaagctcaagcagggtggcgcgcatgagcggcgaagctcctcctccccgcctatatataaagggctggcgcggggctcggcggcgccatttcgtgctggagtggagcagcctctagaacgagctggaggattctgcctaccgatacagagccttcgagtcgtccggggccgccattacaatccacctccatccgcttggaaatggccttcgtcccggcctatgactggtcccagcgggcagtacagaccccctagaagcccctggagctcccctttttcgggccccgcccaatcctcggagtctgtccaccccctctactccgccctcaagaggatttcaaagatggaggcggcggctccctaaaccacttttcgtgttcatccgcctccatccgagatcgaaacgggacctcgtcggccccgtaggggcccgacaagaagagggaatccctgcagaccaacagcgggctatattgacgacggtgtctgagatcggggaccgtcttttgaagagtcagtccctccttagttgcccgcctcagctgaggccgccgccattttcttgctgtccgccgtctgcagagcgcgccaagctgcccggagctctccgagaggccccaaagagactgctttcgtgccggccaggcagggggtttgtcgcctggaggcccaagaggaacggcctccccccaacttagcgggttatgctggaccgggcggtgaggggaaccgaggccacccggactttccgcggctgagggcagcgccggttccttgcggtcaagatgctgcaaaacgtgactccccacaataagtacgtttccgcgagccgcgtgtgggaaggggatgttgcagggcggcggcacaggggtgtggggcgccgtgttgggagtactgagcggccccggcgcgctgctgttgcggcgcagctgtcgactcggtcgcgcggagggaattgagcgacggttttggaacggtggtggcggctcggctactgctcgtggaggggaatacaggttgtcaatttatacgctattaatgccgccgtggcccagtcttaaccgagtcaggcagagctagtttgacggtggagtggagtgaggttgaacagcaggtttggcgtttggtgggtctggtatctagcggcggtctgttagccttttaggggggattcacggacacctctagcgccctgtagggttgccatggtgacggagcgcttaagggactggcaacggggattcccagagaagggtaaagggatcactctcccgtgtgtgcaggttcctaatgcccagggtatgtcattaaatcttttgctttctttgggtgggtgggttgtgtgtggtgtttgttggtgcagggattgttttttcctaacattaaaagtttgattcagggcaggagggtagagctaaggttcctagttcagctctgcgatgtaaacaatgagattcccatatgatgttttaattcttaggtggtaggaaagactgatcggaggagcaccagagggactgtaaatgaaccactgttagcgtttggtgtccggagttggtgctacagggggaactggtagtggaatcgtgttgtgtagtgggtgggtggaagggggctatcacttggtgaccttgactgttttgtacggctttttgacttccttggagtgaggagactctgatttggtgcgaataattttgagggcctggaagttacgggctgtgaagtctgacaaattcttccttgtctgaatttgtttttaagttgatatggttcttcctctgggtttctagtctatgttctgttgtggcgtgaactacccagaccttgtggaagatggtgctctctcttctatctaggtggattattctgtgtcttatcagcattttatggaattttttatagccataatttgttcttttcctccttaccggcgctcaaccaccatggcaaccaccaaacccctagtgaggaggaagcttggggtttgagtttcttaactccacccattttgcttaagccccatccccatagggctgtagttctgagatgtcgtgccttgtcagaaacaatttgggagttttttaaaatatgaaaaagaacagataga

SEQ ID NO: 120293 - DNA, 4156 bp, Homo sapiens
tattaataaaaggaaggcggggccagcaataaaagctccacagattgtttggatattgtttctgcttaagaagcacttggcataagcttaaccacctcactagggccagcacctggattcatcagactattgtgcagatgcactttttcctcatttggacgatattgccctaattttgttcccatctttacaggctccctggggaagggaatgcagggttgctggggctgggcccagaagcagcagcaccagggaagaggattcgaaaaccctctctcttgtatgagggctttgagagccccacaatggcttcggtgcctgctttgcaacttacccctgccaacccaccacccccggaggtgtccaatcccaaaaagccaggacgagttaccaaccagctgcaatacctacacaaggtagtgatgaaggctctgtggaaacatcagttcgcatggccattccggcagcctgtggatgctgtcaaactgggtctaccggtgagtagagacattggagccggggaggtgtgggatgagcaagaatgcgtgtgaatgggggtggtctgcctagtgtagatgctgcggcccctagggagttcccatttctcccctgtagggcagttagctaccagatttctgggtatcttggtcctttgtgattgatccgaccgcttgctgtaactatcttggcatctttccttgtgccctccatgtgtccttccttaacttttgtgccctggctccattttacagattcccacctcgggttgggagaggaccacggtggccaaaattcttagcttcttcctttccctcatgcagcccatggatagccagccccagaggtaatgtcacaggatgggaagtttccagagtgggtgggaggtgggtggttagagaaaggcagcaggggcctccctgtggatgtcaagaatcttttttatttatttatttattttgtcccacagtttaattggggccgcagtttaagtaactgttcctttgatgcatagggggggtgtgtgtgtgtgtgtgtgtgtgtgagagtcggggatcggtagtctccctataagcatttatttttctgtggttctgacctaacatttttttatttaggattatcacaaaattataaaacagcctatggacatgggtactattaagaggagacttgaaaacaattattattgggctgcttcagagtgtatgcaagattttaataccatgttcaccaactgttacatttacaacaaggtgagtttttctgtgtgttcatttagtaggtggggagaaacagtaacttctattattgctggatatgttgtctacataaagtttaaatcctttgctactgaaggtgttatccaggtagggtagtcggagtcttaaaaacctgactctagatggtactattgaacacagtgatgtgacttcagagctctagttgaaggttatttagaacacttcatacttgggggtggtggtcctgtttcttagaaatcaccagagacctgagtagaccagggatctgttttcttgtcagctctcaagttttttcttctttcgaattttgggagacagttaggagaaagtggaaattagtagtggcctggagtaggaaattttctttaagatttgatgacaagatgactggtgggggtatggtaatggcctagggcctgaatgcctctgagaaagatggtgtgtatctatcttctgttggcattttttaactttctttattgctgtctgtgttctcatagcccactgatgatattgtcctaatggcacaaacgctggaaaagatattcctacagaaggttgcatcaatgccacaagaagaacaagagctggtagtgaccatccctaagaacagccacaagaagggggccaagttggcaggtaggaagagtgggagttttgcaaatggacaactaaagatggggaagagaatcaaactacacttttttccttttttctagcgctccagggcagtgttaccagtgcccatcaggtgcctgccgtctcttctgtgtcacacacagccctgtatactcctccacctgagatacctaccactgtcctcaacattccccacccatcagtcatttcctctccacttctcaagtccttgcactctgctggacccccgctccttgctgttactgcagctcctccagcccagccccttgccaaggtatgatctgtggatttcctctgggcagcagggaggcaagggtcttaagtaaagtgggcttggagtgacaggttccctatcttgtttctttctgcagaaaaaaggcgtaaagcggaaagcagatactaccacccctacacctacagccatcttggctcctggttctccagctagccctcctgggagtcttgagcctaaggcagcacggcttccccctatgcgtagagagagtggtcgccccatcaagcccccacgcaaagacttgcctgactctcagcaacaacaccagagctctaagaaaggaaagctttcagaacagttaaaacattgcaatggcattttgaaggagttactctctaagaagcatgctgcctatgcttggcctttctataaaccagtggatgcttctgcacttggcctgcatgactaccatgacatcattaagcaccccatggacctcagcactgtcaaggtacccactgcatggggcagatgggatgctcaggcagtgatgggagcctaggtgcaaaacaataagtctccttatgtgggcacacagcagtctttggttcttggcattttacttttataaaataatagtggaacagaaggtctggtgttttgagaatttgtatttcttggagtttgaaacagtagggtggggtttctttgtcttgagaaaaatactgtctataattaagtactaatgtggcagtgttgggttaaggaagttatagggtggaaaaacaggcataggccacctctctgtcacttagaaatgatttctttttctagacataaatatttcttcaacccacccaaattcctttgacttcaaacttgaaccccagggcacagatccttaaggtcatccccactgtgctctcaagagagggctcttcttgtggtgtctggggttggcagggaaaggtgagtcttcctgcctgtgcagcttctgatgctgcctccttctgcagcggaagatggagaaccgtgattaccgggatgcacaggagtttgctgctgatgtacggcttatgttctccaactgctataagtacaatcccccagatcacgatgttgtggcaatggcacgaaagctacaggtgagtggaaaggttggagtttgaaaaataaatggtatggggagttattttgtcatgtgtgctgcatagcctcaacgtgagggtctcactgttctgtacagttgtaaattggagctatatcacttggtggctgggtatgtagggcactgtttatcagcatagttttgagtttgtgcctctttgtaggatgtatttgagttccgttatgccaagatgccagatgaaccactagaaccagggcctttaccagtctctactgccatgccccctggcttggccaaatcgtcttcagagtcctccagtgaggaaagtagcagtgagagctcctctgaggaagaggaggaggaagatgaggaggacgaggaggaagaagagagtgaaagctcagactcagaggaagaaagggctcatcgcttagcagaactacaggaacaggtattttgtcactcttgaaagtttttattgggtaagaggttcatgccctttgtcctcattttttcttcttgttattttatctttatttactttttccacttcatgttttttttcctttagcttcgggcagtacatgaacaactggctgctctgtcccagggtccaatatccaagcccaagaggaaaagagagaaaaaagagaaaaagaagaaacggaaggcagagaagcatcgaggccgagctggggccgatgaagatgacaaggggcctagggcaccccgcccacctcaacctaagaagtccaagaaagcaagtggcagtgggggtggcagtgctgctttaggcccttctggctttggaccttctggaggaagtggcaccaagtgagttagagtaggaagcagagactagtttggcta

SEQ ID NO: 120294 - DNA, 1839 bp, Homo sapiens
ggccattgaatggaaaaacagaagctccactctgggcaggaaataggatcactgaattataacagtgggaacatactggaagaggttaatgaagcttcttttgctgacaactctttttgcccttaggctccccaaaaaggccacaaagacagccccacctgccctgcctacaggttatgattcagaggaggaggaagagagcaggcccatgagttacgatgagaagcggcagctgagcctggacatcaacaaattacctggggagaagctgggccgagttgtgcatataatccaagccagggagccctctttacgtgattcaaacccagaagagattgagattgattttgaaacactcaagccatccacacttagagagcttgagcgctatgtcctttcctgcctacgtaagaaaccccggaagccctacagtacgtatgaaatgaggttcatctcatggttctgaggacagttgaggaaagatggtggggtctgtttgcattcaggattgtcagctcccaggataatgggatgtgttggttggcagctgacgttcaagaagggaacttgggaaccttaggggcccataataagatgcttggggcaatcttaatgtatcctgataaatttctttcattagccattaagaagcctgtgggaaagacaaaggaggaactggctttggagaaaaagcgggaattagaaaagcggttacaagatgtcagcggacagctcaattctactaaaaagccccccaagaaaggtgagtatatactttcatgccactacagattgactccatcctgccttcttgactgtcttttattgacaaatgaagattcagacttgaacgtctttaactttcgaatttgttctgcagcgaatgagaaaacagagtcatcctctgcacagcaagtagcagtgtcacgccttagcgcttccagctccagctcagattccagctcctcctcttcctcgtcgtcgtcttcagacaccagtgattcagactcaggctaaggggtcaggccagatggggcaggaaggctccgcaggaccggacccctagaccaccctgccccacctgccccttccccctttgctgtgacacttcttcatctcacccccccccgcccccctctaggagagctggctctgcagtgggggagggatgcagggacatttactgaaggagggacatggacaaaacaacattgaattcccagccccattggggagtgatctcttggacacagagcccccattcaaaatggggcagggcaagggtgggagtgtgcaaagccctgatctggagttacctgaggccacagctgccctattcacttctaagggccctgttttgagattgtttgttctaatttattttaagctaggtaaggctggggggagggtggggccgtggtcccctcagcctccatggggagggaagaagggggagctctttttttacgttgatttttttttttctactctgttttccctttttccttccgctccatttggggccctgggggtttcagtcatctccccatttggtcccctggactgtctttgttgattctaacttgtaaataaagaaaatattattcaagttttgagttaccttaatatttgcttttgtagtgtttcaaaaggaacatcataagaattgtcttgataattttgagggaaatattactgcagtgagaaaaggcaatagctaacctataattggattgtcttaatttttaaaccagtaggcttttgctgtgtttttaataaagtaaatatgacttttgtaaattgagtccttagaagtaatctttaggtctacaatttgct

SEQ ID NO: 120295 - DNA, 1006 bp, Homo sapiens
aggttgacatgtgggaagcagctagatcacagtgaccctgaaggacctgatacctctgtaggcgcaggggaggtgggatcccagcactagaattggggaaaatccactcacgggaaggagagacaacaaaagtcaggcagctgtggggcaagcaatgaggggctagaggctggggtgtgtggggtgtgttgctgggtgggggctggctgttatatgtgagggttgaggtctccaggggtggagtggcatctgggcctcctctcactcctaactgcttcctgtccctccacagggcaagctgggtgttcctggtctgcctggctatcctggacgtcagggacccaaggtgatgccatgccccatacgtgcccctcctcctcttccctcctcctcttcgcttccctgatccctgattccagaaagcacagatgcagggcagtgggggaccccagagggaatttagctgacccccattttacagatgaccgaaagaggcccagagagcagcaggggtttgtccaaggccacttagttcttggcagagctcgggtctccctggccactgcctttgtggcctctcctgaccccctttgccccttcctgaaccctacctttcataacttctcaatttccccccttctccgttctcaccaggggtccctaggatttcctggctttcctggtgccagtggagagaagggagcccgggtaagctggggggtgggagggcgtgagaagggaagggctggagaggtgtagagggggtctgtggggagtctcaccctgggtaatgttctctctgcttcattcccaccagggcctgtcggggaagtcagggcctcggggagaacggggccccacggtgagtgcaggggagagaaacaggtggctcaaggtccagaggggggcatttgggtttctctgacaactcctcttccctctgtagggtccacggggtcagcggggaccccgaggtgccactgggaagtctggagctaaggtgaat

SEQ ID NO: 120296 - DNA, 1097 bp, Homo sapiens
tgggtaggttgtccatatgatcgaattgtactcccttgggatttggtggagggtggggacctccgaggtctccttggcctggggtctctgtgagtctctgtgtctctgtctcactcacccttcgtctctcaaagcggcccttgtgtgttggtgtttgcggagctgccacacgcgcaggggccaggcttaggtgggggttgggggggaaggccgtggtttcccggctcctggactcaaagggccttttctctgcctgcccgccccacctcacccaccccacccagctccactctcctgattgctctggcctctgccctgccccacacttctatgaaagttttgctggaactctctttgggatttttccaatctggagctgatggtgtgaagagtatgtgtataggggagcaagtgagggcaaggtgatcttttgttttccagggagtttgagccctaggaagctgagttctagttagacagggctggtgggctggatcttgaatctttgggtcccaggtggtggggttggtgggggtggtgagacaggattgaggttccaggtgtggggagcttgcctgggttctgggcaagcactctgatgggatccacagatgtgtggctcagggccctggacctgttccggctcctcgtggcagcttcagcccctgccccccattcctccacccctccccaactcatctcctaaaccaggaggcacagactcctgggagagctttcttgtatctttttcctcagcatgctcagggttgttcccaccccatcccccaaacctgggatctgtagctgcttgaagcccctctcatagagctgcttctctgatctcttcctcgtggcccccctgcacctcctgtgtccaggatgatcgattgcccagatgttgtttgtgctggagacgggacagatgccagagacccagagagtgagagatatggaaagagagtgagagcgagggagagaaaaagatggacagaatgtgagagaaatggaggaagacagaagagacagagacagaaagaccaacataaagagacagagagagtaagagagtgagagagacaggagacagatgaagagtt

SEQ ID NO: 120297 - DNA, 1048 bp, Homo sapiens
ctggagacctactgcaaacagaagtaccctgagcagcagggacggtgagatggggctggggggcactgaggctcccttgggggtggggagtgctatgaggatgtgttcagggcccgtgtgcttccagctctcaatccccttctcccacctccaccccaggtttgccaagctgctgctacgtcttcctgccctccggtccattggccttaagtgtctagagcatctgtttttcttcaagctcattggtgacacccccatcgacaccttcctcatggagatgcttgaggctccccatcaactggcctgagctcagacccagacgtggtgcttctcacactggaggagcacacatccaagagggactccaagccctggggcagggtggggggccatgttcccagaaccttgatggggtgagaagtacagggcagaaccaagaacataaaccctccaagggatctgcttgatatcccaagttggaagggaccccagatacctgtgaggactggttgtctctcttcggtggccttgagtctctgaatttgtcgggttctcccatgatttggggtgatttctcaccctctgtccttcccccagcacaaagcactggccttgcctccaggaccttgcttccttctcatcttgcctcattttgcttcccatctgaagagtggaaatggggaactcccccagaggtggatactggggggcaggcctcccaagctgatggacatgagagtagggccctgacaggccttcctcctctcaaacctggcagatgggggcctctctggaagagggaggggccctgtcactgtccagagtctctttttacacttcacctccttctgcagtcagactgaaatataaaaaaggtggtggtggtggtgaaggggctggtggagatgtaggaaccgatctgctatttttaatttcctgtgaggatagagacttgcagttagactcaaagaagtactgtactttcccaggttgactaagaaatgccagtggtggaggtgggtgtttgggaaaggcagggccctgaaat

SEQ ID NO: 120298 - DNA, 1687 bp, Homo sapiens
tcagttgtatgacctgccatgtattatatgaatttaagcaaactaatctctttgaaccccgagttcttcatcttaaaaatgagaataaatgcttccagcatcattatgataattgagtgaatggtaaaatgtgcttagcatgtttcttggcatattttatttaaaaaaattttttttttcaatcagctttctcaggttgaatcttggcatgttttttttaaccatgtagtaggctctccatttaaattcctccctaattcttttacctacctcacccttcccgactgacttacctgcccttttataacccttccttcagggctgcccccagtccaccctttctagtgacttccccaattcctataaatatctcccaagggccatgagatcctgatgaggccgtaaggatatttgtggaaccccttcatggctggctgctgactttccattttttctctcccccttccccctgcagcggtacaggaggagcgtcagcggggaaaggacaaggatggggatggggagggggctgggggagcccccgaggagatgcctgtggacaggatcctggaggcagagcttgctgtggaacagaagagtgaccagggcgttgagggtcctgggggaaccgggggtagcggcagcagcgtgagtgttggggtcaatccactctccttcgtgatgggggttgggggaggcagtctaggtctgttctacatcccctccccctcctttcccctcataaccttcctaacactacttgggactggaggtgctgccaaacaaggtctttcaaacatctgaggtggatgtgatagctccttctgtctccactccccaaacaacccactggcagaaccataggcatgtcccaaataaataattgtttgcactaatgccagaagagaagactcacttacagggattggtttggatggggctcacaggaagactatatgtaaggagggggtgtcaaaagcctcttacaagggggctcccagcatatctcaaaatcttccataactcttacccccgtcccctgcagccaaatgaccctgtgactaacatctgtcaggcagctgacaaacagctattcacgcttgttgagtgggcgaagaggatcccacacttttcctccttgcctctggatgatcaggtcatattgctgcgggcaggtcagtgaccttggatccctttgacttcttgacatttgacccctctttgacttcccgatctttagtgaccccagtggccttaccttgcgtacccagggagccaaacttgctgacctcgccacctcttttctccttctcttccactgatgtgctttgaatcccttggcctgatttctggctcctgacccttgctgccccacccaggctggaatgaactcctcattgcctccttctcacaccgatccattgatgttcgagatggcatcctccttgccacaggtcttcacgtgcaccgcaactcagcccattcagcaggagtaggagccatctttgatcggtcagtggccctcggctaggctggcatgtagatagagggggtggggctataggctggtccgtgtccaaggctggctgagctgtgacctttgagtgacctgcaggtccctctccagggtgctgacagagctagtgtccaaaatgcgtgacatgaggatggacaagacagagcttgg

SEQ ID NO: 120299 - DNA, 1038 bp, Homo sapiens
cctgggacctcttcggtatccctactctcagccagggatcatgtcttgggccgctcgcccgcccttcctccctcagcggcatgccgcagggcagtgtgggccggtgggggtgcgaaaagaaatgcattgtggggtcgcgtcccggtggcggcggcgacggccctggctggatcccgcagcggcggcggcggcggcggtggcaggcggagaacaacaaaccccggagccggagccaggggaggctggacgggacgggatgggcgacagcgggcggggtgagtgccccagcagaagggcaggcgagccagtgaccgctttatctgcgacccctcccccacaccctcccccggtgctcttttccttgcgctcccgcccccttgtttgtaaacacgcgtcccctccctcccgagggccttagcaccctcccccccggggcggggcggggaaggggagcttccgccctcctagctgtgaccgcttgaggccttgggcaccggaggtcgcgggcctgggaagggcacgattcctcttaaacctcaggactttgggcgtttacaggcagatcctgcgtcttaggaggggtctctcctgcctgtctctttcccttgcacgctctggctacctggctttacgctgggaatagaggggctcgatggtctaccccacgtgctgccccacccacgagacaggtgtggctttgggatgacctggtattcattcaaatggattggttggaaaattttcctcacctgaactatcctcctctccttgtcaactccctcctctcaccacaatgaggagttacgctgtttttgggtttttttagccagtcaaatatagcagtgggaggttgtataccaattttagtgacacaaatgttaataagttctgataacccactaccatcggaccagccggagttacactgttgtttgacagcagggtgtctctgaacttggggatgggtggagtgggctgggtccggcacggtggggtattagagaattaaagtctctagttggatgtttgaagactcat

SEQ ID NO: 120300 - DNA, 2232 bp, Homo sapiens
agcccgtcgctctgctcagtaccaaaatgacagcgccaatgtggcagccatctttgtacagacgggaagtctcggcgcgagttcccgccccctcgtctagttggaaaccgaggaggcggtctcctccggcctgttagcccgcctcgcccaccctcccctcaaatcacctccacactcgcgcatgcgtgtcagtgcaggatggattcgtcgctaccggagtgccgccatattggtaaaggcattagggcgaaggtggaacggaacttcctgttctcgcgggatctaaaggcgggactgccacgtccaagcaaaccgggaaaggagaggatcccggagccggtgagaattctctgttttttctctaccatcctttccaggccttttcctcacctaatgagtcgtagagacgagggcccagagagtctgtaaagtggctggtgaaagattagtgtcccagggccctacatccgggaggtggttcgggataaagagaactagtcttgggaacaatgtaggtgggaacttaagggaatgggagagcggcccatagaggtggacggagggcgcgattggagtaaagcggaccctgtgtaggtatagagttgagtcaagtggagtcactgcctctgtccctctggtcagcgtgatggccagaggcctgggggccccccactgggtggccgtgggactgctgacctgggcgaccttggggcttctggtggctggactcgggggtcatgacgacctgcacgacgatctgcaagaggacttccatggccacagccacaggcactcacatgaagatttccaccatggccacagccatgcccatggccatggccacactcacgagagcatctggcatggacatacccacgatcacgaccatggacattcacatgaggatttacaccatggccatagccatggctactcccatgagagcctctaccacagaggacatggacatgaccatgagcatagccatggaggctatggggagtctggggctccaggcatcaagcaggacctggatgctgtcactctctgggcttatgtgagtctccaggggatgggagagagaagggctggttctggattgttgggaaactccacagtacttgaccttgactctccctcaccaggcactgggggccacagtgctgatctcagcagctccattttttgtcctcttccttatccccgtggagtcgaactctccccggcatcgctctctacttcagatcttgctcagttttgcttccggtgggctcctgggagatgctttcctgcacctcattcctcatgctcttggtaagtaacctctgacttctacctcaaatctaacctatttcgttctttggaggaaaagggttctttctcctttatgatccctgacctttcgatattcccccaaatacacactcattgtgtcagatattccctcatctggttttccccccttcttccagaacctcattctcaccacactctggagcaacccggacatggacactcccacagtggtgaggaagagacagatggggatgggagttggggtgctggggaaggtccgtctctccctattcctcacctcccgcacttgaggaggaggagtctggaatgcacatctcccttaatgtctcaatgcctccattcccaggccagggccccattctgtctgtgggactgtgggttctcagtggaattgttgcctttcttgtcgtggagaaatttgtgagacatgtgaaaggaggacatggtcacagtcatggacatggacacgctcacagtcatacacgtggaagtcatggacatggaagacaaggtgagcccaggaacaactttcctgaaagctgacttgcctgcctcagaatctcctcatcttatggccctcaggagggagaggacatgttggaagatctgttctccactctgaccaactcttttcttccctcagagcgttctaccaaggagaagcagagctcagaggaagaagaaaaggaaacaagaggggttcagaagaggcgaggagggagcacagtacccaaagatgggccagtgagacctcagaacgctgaagaagaaaaaagaggcttaggtaagggccagagttggtgataaatttgggcaagggacatcatcacaaatcacatggaatatgtgctgtgggtaatggcaggtatctgagaaacactaaaggactgggtgtaaagtggtctctgaggggag

SEQ ID NO: 120301 - DNA, 1906 bp, Homo sapiens
tactttgtcctttagctcagtatttcttaaactggtctataaaccatctgaatggtttagtggagtcttacacacacacgcctactcaatcagaaagtctgtggaaaggacctctgatctcttaagatttttcagaaattgtctattctagactgctccctcttctctttttattttgatgtttagtttccaaatccatgtcccctatacctataccccaccagccacttctaaaccactgataatctttagctattggtgagtgcctttttctcttttctgcccatcaggcgatgcgtctgcaactactgacagcagtaggggcactggcaggcacagcctgtgcccttctcactgaaggaggagcagtgggcagtgaaattgcaggtggtgcaggtcctggctgggtcctgccatttactgcaggtggctttatctacgtagcaacagtgtctgtgttgcccgagctgctgagggaggcatcaccattgcaatcacttctggaggtgctggggctgctggggggagttatcatgatggtgctgattgcccaccttgagtgaggggtggataaactacccctgccccaaacctctacccctaactccaggtcaggggtgcgtagaggttgggggccctggccagggacatctgccaaaggaaggaactgtagcctgggagaatggttactttggcattagggccttcaagggctggcagtcttacagaggctggagcggtgagaatgagaggccagagggaccatagtgttgggcactgtctgaccatgttgcatttggaaggctaaatggggccatgaagaaggctggaagggacagggggtgatggcagcctacctggtgtcccctaccccacctgttctcggagaaccaagttgctacacaggaagttctccaaggtccagtttcctttctcccaccagttggtggaggcttcagggaagaccagagtcctggacagagagggtaacaggaggagtcggggataaacatcaaacatcaatcgtgtgtcctgatttgggagtgattggggggatggggtgggagagggttagttggtattctcatggcctgattttttttgtttctattccttttatatcactgtgtttgaatcgagggggaggggtggtaaccggaaataaagacctccgatcttccgccccacatgcagtctttgtctttttggggggaatggggccccttgtcttctccacacccggggcccctaagcagcagtgtcgggccacgccccctcggtgggaggtcggcctgcgctggtggccgcagatggcctaaggctggcgggcctttgattggccccggctttgcccttgccacgcccctctgcgctgggattggcttagtgctgggattcccacccacccacagcccgccatggcgtctcagctccagaaccgactccgctccgcactggccttggtcacaggttgagggggttctttccccgggcggtttggggtattggagtgaggtcaggggcgtgcccttggagtgcgcggccgctgtgacctctggccccttacccacattttactttctgccctgtgacctctgatccctgccctctcctccccgtgcccggtccggcgtgttctgtcctacctcaggtgcggggagcggcatcggccgagcggtcagtgtacgcctggccggagagggggccaccgtagctgcctgcgacctggaccgggcagcggcacaggagacggtgcggctgctgggcgggccagggagcaaggaggggccgccccgagggaaccatgctgccttccaggctgacgtgtctgaggccagggccgccaggtgcctgctggaacaagtgcaggtgaacgctaggccactttccccctctaaagctctga

SEQ ID NO: 120302 - DNA, 1061 bp, Homo sapiens
gtcaggagttcgagaccagcttgaccaacatgatgaaaccccatctctactaaaatacaaaaattagtcgggcgtggtggcaggcgcctataattccagctactcaggaggctgaggcaggagaattgcttgaacctgggaggcaggcggaggttgcagtgagccgagattgtgccactgcattccagcttgggtggcaagagtgaaactctatctcaaaaaacaaaaaaaaagccaaaaacatagatcctggacaggaaagcagggggcagttccattttacgtctctcccttctgtcctgtccagtgcatcatccccaaagaaacaaatgcgtttgttcatagtcactgaggacaacaaactgacattctcttttaatcctctgtttgttccccaatcacacagaaacacctggattcttatctagctgactgctacgatgccattgctgtttttctctgtatccacattgttctccggttccgtaacattgcagcaaagagggatgttcctgccctggacaggtcactgaattctggtccttgatgcccaacaggccacgaactctcttggtcttgcatgactctgccctgaccttagactcctactgacctggtatcatcaacctttattcccattcatttgctccggaggcagtagtgctgctttttgactcacctttctccaaccactgccccccaacccccacaactagctattgaccattaaactgaatgatgccccactccctcccatccccctccaacattccttgctggctgacctctgattctgattaagcccacaggtactgggaacaggtgcttgccttgctatggccacggtttgaactgatcctggagatgaatgttcagagcgtccgaagcactgacccccagcgcctaggggggttggatactcggccccactatgtgagggagggcaagggtaacaaagggttcttgaaaggcagggctctaagcatcattgtgggggttggccaaggtcacagttgtgtcatgggccacgctatgagcaggtgttctgggagggtggtgaa

SEQ ID NO: 120303 - DNA, 1470 bp, Homo sapiens
ctggaagctatataatgatatcgcgtcacttccgctctctcttccacaggaggcctacacgccgccgcttgtgctgcagccatggtaagactggaatccgtgccgtgatccagcggcatcgcagctcgggcaaggaaagccggctgtcagggttctggaaacgtcctgccctgagggcctgcgactttctgtatggagccttggatcgcgtccctggaaagggacaccaaagatttccaattccggagagcgggcccgaggaagggtcactgctcgggcgcacgaaagctgtctaaggcttgggcgtatatggggaactctggcttttgccacgcacttttgggaatgggcaggagacctgcttcctctctccagaggttgcattttcccaagcttgaacgcttcatgtgcctactctgcaggactgaggagtttgctctgtggtgtgaaaacctaaggaatggggggcgggtgtcttgccacttgtgtgacaggcttaacctttttgtatgaagttcgtttgccttatcggccttactgtttgatagtttactgtgtctgatttcttcccccgtactttttcaactagtctctagtgatccctgaaaagttccagcatattttgcgagtactcaacaccaacatcgatgggcggcggaaaatagcctttgccatcactgccattaaggtaagtgaagtagggtaaggaatagggaatgtaaatgagaattgggttgtgaagacataagcaaaaatgaagcaaggctggggagacttgagtctcatccagatcaccttgactgctggattaagaaaagaaagtggtttagggagagactgacccctttagcatttaccacagaaaataagtgattaaagccaagatagtggtctaaggtcaagccaaaacatttcacctggggaagtggggaggaggtatggttgctcacccgaattcgctaagattttcctgaaccacgagcttgtgagatttcttctagattcggtttctttacccatcccaccatcataacagcaacccttcctgcgaaatttatattccctgagaattggaggattattgggcatcttgagggataagtagaaataccaacagataaaaagtgtgaagaagcctgtagatggagggtggaagaagtctgagtgggacatttactcagatgagccataattgacactcctttcctgtcgaagtgtgaaggagtacatccatctttctttggcttttaagaatcgaatcaatgaatgcaagaatattatttcacttgagtatttctctccacaaacctaatgaattcttggctttctagatacataacgttctttttttttcccttaagtcagaatgtgtagttagttgtggaaatagcctaccagtatgtgtccatgcgtgcagggctaggcctgtcttcttggcttctgttgcatggtaggtacttaggcgacgtt

SEQ ID NO: 120304 - DNA, 1744 bp, Homo sapiens
actgtcgcccaggttagagtgtggttgcgtgatcttggcttgctgcaacctccacctcctaggttcaagctattctgctgcagcctcccaagtagctgggattacaggcacctgccaccatgctcagcaacttttcttgtatttttagtagagacagggtttcaccatgttggccaggctggttttgaactcctgccctcaatgtcatctgcccacttgggcctcccaaagtgctgggattacaggcgtgagccactgcgaccggcccaaagttaaccttctgtcgaacggtttatatctggaaaggtgggtgaggaaagggtgacctaggggattgcaaaatagattattgcagatcctacctttgtgagctttttgaatgaggctataaaggaatttaaaaatcagattcaacactaattccgaaacccctcacttcattcagggtgtgggccgaagatatgctcatgtggtgttgaggaaagcagacattgacctcaccaagagggcgggagaactcactgaggatgaggtgaggacaaggaagggggctgggggtggggtcagcctcagaaaggggtccatctagatctgaccttggtctgcctgccaggtggaacgtgtgatcaccattatgcagaatccacgccagtacaagatcccagactggttcttgaacagacagaaggatgtaaaggatggaaaatacagccaggtgtgtactgaaatgagggcaggattagaggaagggtggagggtcctaacagaattgggcataggaggtcaggggataaaacatcccttgccccctcctctgaatccaggtcctagccaatggtctggacaacaagctccgtgaagacctggagcgactgaagaagattcgggcccatagagggctgcgtcacttctgggggtgagtggggggtctcatctccctgcctacctcgactcagcattcctcctactcgctcttctttttccccaaccttttgtttctgctgtgcatgacctgtgactcttctctttttacctgcagccttcgtgtccgaggccagcacaccaagaccactggccgccgtggccgcaccgtgggtgtgtccaagaagaaataagtctgtaggccttgtctgttaataaatagtttatatacctatggcttcctgtcctttctgtccattctaatagggaatgttaaagtgctgggtcctttttccatttagagctgccctactcagttgcccacacagtgctattagttttagcagtggtgatgctgcagaccccccagtctccctatatgtagctagtgatgtccctctctgtaaagagaaatgtgagggtaaaacagttcagccttgaggggctgacccagaccagtttagagaccaacaccctggggttggtgtgcagcatcattgtggagtgggttagctgagcctagccagttgcagttaaggtgagtttgcaggtcttggtcactctgggtttttttgtttttgtttttgttttcttttaaggggtcatctagtcataagggaaaatccttcgggctgtgaccgaagcaacaaaggcaaaaacgcggacgttggttatgaagggtgtggtctccctggtggagtacgtcggtgggttgggatggggagcggctggacagaccggtctcactccgtttggtgccactccacccgcccgggtttccgcgccctgccgcgctgctccgacgccgcttccggcggggatg

SEQ ID NO: 120305 - DNA, 1685 bp, Homo sapiens
acctctggcctagaccaccagctgaagatctttgacttgcgagggacgtaccagcctctgagcactcggaccctgccccatggagcagggcacctggccttctcccagaggggactgctggtggcgggaatgggtgacgttgtcaacatctgggcagggcagggcaaggccagcccaccctcccttgaacagccctacctcacccaccggctctcaggccctgtgcatggccttcagttctgcccctttgaagatgtgctgggggtggggcacactgggggcatcaccagcatgctggtccctggtgagtgggccaggggatggggcttgaagtgaatgaactctgggtggaagtttgggccagagacatccaggaactgggggcttagttgggctggagctgttggactgaggttcttccttatggctccatgcttctccctccctcccttcaggggccggtgagcccaacttcgatggcctggagagtaatccatacagaagccggaagcagcgccaggagtgggaggtgaaggccctgctagagaaggtgaggctcccctgctggagagggtgagatcccccccattgctggagagggtcaggttcccccgtcctggagagggtgaggttcctccttcctggagaaggtcaggttcccccctgctggagaaggtcaggttccccactgctggagaaggtcaggttcccccctgctggagaaggtaaggtttcctcttcctggagagggtgagattcccctctcctggacggggtcaggtttccctctgctggagagggtgagattccccctgctggagagggtcaggtttccctctgctggagagggtgaaattccctctcctggagagggtcaggttcccccctgctggagagggtgagattgcccctgttggaggtgaggttcccctgctgcagagagtgaggcccctgctgctggggaaggtgtggtttggggttggaggtagagaaagctctcctgatgtctcatgctgggggtcttgggtagaggggttcagcagcctccctggcttctctttttggtgctaccctcctgtggctccttgctgagtcctgtccctctgtgacacccccaggtacctgcagagcttatttgtctggacccacgagccctggccgaggtggatgtcatctccctggagcagggaaagaaggagcagatagagaggctggtatggagcaggcccctgaatgcccaggcccgtcttctcccccacatcctctccccaccatggcttgtccccagaagtgcggccagcaggtgggtgctgccagttccctgactccgaggctgtaacagatatcactcctgtcccctccctcagggctatgacccgcaggctaaggctcccttccagccaaagccaaagcagaagggccgcagctccacggcaagcctggtgaagaggaagaggaaggtcatggatgaggaacacagggtaaatgagcattggcatgggccgggccttccacaggctgcaccctcctgcttgtgcctctgcccttgtcagcctgccacttctcactctgtgcctgtgtcctccccgtctccggtccccaggacaaggtccggcagagccttcagcagcagcatcataaggaggcgaaggccaagcccacgggggcccggccatctgccctgg

SEQ ID NO: 120306 - DNA, 1147 bp, Homo sapiens
cgtggggcagacctcaagttgtctgagtcggtggtcccctgccttaacaccctgcctgcccctcacctccaacagacacctggcttttggagggcgccgaggtcatgtggctgcccttgattgggtaacaaagaagcttatgtgcgagatcaacgtcatggaggcggtgcgggacatccggtcagtggcctcactgtcagcggtcagttggggtgagatagtccattcctgattgaatgatagcctgtgacctcatttcccaattgaaccactcttcctctcccccaggtttctccattctgaggcactgcttgctgttgctcagaaccgctggctccacatctatgacaatcagggcattgagctccactgtatccgccgctgtgaccgagtaacacggcttgagttcctgcccttccacttcctcctggctacagctgtgagtggccatggagctcaggaactggttggaagcccttgggatgaccacctctcctttaggaccccagcagagggaatacagagggcaatcaggactgggtcattctctctgtctttctctctcagtcagaaacagggtttctaacctacctggatgtgtcagtggggaagattgtggcagctctgaatgctcgagctgggcggctcgatgttatgagtcagaacccttacaatgccgtcatccatctcggacacagcaatggtcagtacctggcttagttttgactctgaccatcctgacttgcttttcttctatatttgtacttcatgagtcccttaaagttacccttttatttcccttttttgttatctcttggtcttgagttcccatctttcccatgtttagtaacctcaggcttaggtgtgtattagcaactttggttcttcttctcttccaggtactgtgtctttatggagtccagctatgaaggagccactggcaaagattctctgtcatcgtggtggggtccgggctgtggcagtagattctacaggcacgtaagtcactggtggggtgaggtgttaggagtcataggtgggcagaaaggtgtggaaggcagtgtgctttaggagcacagagtctaaagccaggatgcccaggtttaaatcgcagtgttaccacggatgggccttgcaagtataggca

SEQ ID NO: 120307 - DNA, 1038 bp, Homo sapiens
ctgaagtttgtctttcttgggcgggacatccttgcccggcttgggggctgtctccatctcgcccacccgaacggcgatccacgtgcaaaactcctctcagctgccacacagtcggcttgaaaactcccggaagccctctgtccttcatccaatcagcagcgtaccaggtatgaagctctctaggtgccatcttgagtgagggcacgctctccttagaggggcggaacagtttttggcaccttatcgcgagcggcagcttatgcaagagtgatttaaaaaagaaaggcaggtccggagccaggggctaagtagcggtgcggtttctttttctggattagtttccccatcttgcctaaaaatgtcctagtctagtctttttagcagaactccactccctaaacatgtcagaactacacttcccatcaagggtcagaaagaaacttccggcacagtcttttcccagcattccttgtttacttccgggtttattactactgaaggaagaacgtgagtaggttaggatttcggttgagaggcttggggtcttgcgtttcgcccaccatctcctggggacagggtggagtcgatatccgggacgggggggaggttgcggtgcccctcagggctacctctcaagagtgctatcatttccgcaggccagatcagaaaagggagctcaggtaccttccagagagtgagacccagcgcccttgtctcgcacccagtaggctttcatccccgccatggcggagctgatccagaagaagctacagggagaagtggagaaatatcaacagctacagaagggtaagggaacagggtcggtatggtctcgcccaatgcacttacaacccaaagccattaccgagataaggtttgttgccccatctgggccctcgcgtgcagagacttccccgcctcagtctcagtactcttccctgttcactcacccgctgcccccatccttttctgcttcctcagatccatatccacctgactaggattgtggggataggtggcacatttgatgtttctaaa

SEQ ID NO: 120308 - DNA, 1333 bp, Homo sapiens
gaactgtgtattctttttcaattaaaccgacattcctagcaatatggtatgttgcaaatgcccttccaaaagaatcatgccaaccaagatgagggagagttaagggttgtatatacaggcaagaagtaggtttgaagacatttaggatttcactttcaagaaagaacactgtgccacaaagagattccaagtgcaagagtttgaacctgagggggtaatacaggtggtgtgtgttaaggtggaaggggctgtggggatatgacagaagtgcctggtcaggaaacagagccaggtgtttttacattttattagctacagtatagatcctagagctgcctcattccctcccctcccctcccctccccccaccatggggtcaggccttgccaggagcccctgcctttgctgcctgggcccgctggaactcctgctgcagctgagcaagggtctccctctgttgctctgactgccgctcaagatcccgaagctgggattcgtatcgcttactaaggagagacaagggagacaagcagaaagggagaaattagtaggactcactatggagagtgctaaacgcaagaaagagataggtggaaaacttgagatccaggggagggagaagaaggggggttaaaagggaaggaaagggttggaggaactggaggactaggggccactatggagagctgttctgcaatggttcaacacctctactccaatggttcacttgcatcacagggtgcagcacacggtggtggaataaaaactcacatttcagctgtgatatagtccagcctcttccctactgtggcccgagcctcccccagctcctgtttgactagcaccggacccagaagtttaaagaccacgttggacccatccagcagggccagttcctgatggagggatgggacatatgtgatcagaaccatggctagtacaggtccctcctcgccccacaaatcccagtccctcacctctttcacgatattattttctgttagttgtgcttcaagtttctgcctccccgacatggatttacttaagtctggggatgagaggaaaggcaatttagaaacatcaaatgtgccacctatccccacaatcctagtcaggtggatatggatctgaggaagcagaaaaggatgggggcagcgggtgagtgaacagggaagagtactgagactgaggcggggaagtctctgcacgcgagggcccagatggggcaacaaaccttatctcggtaatggctttgggttgtaagtgcattgggcgagaccataccgaccctgttcccttacccttctgtagctgttgatatttctccacttct

SEQ ID NO: 120309 - DNA, 1520 bp, Homo sapiens
cagacacctactggatacccggacatcagggactgatgtgagcttcatgtcagccttcctggctacccaccgggccttcacctccacgcctgccttgctagggcttatggctgacaggtcagagtcataagggacgcagggtagtggagtatctgcccggatttcctaaagccgcaacatcccaccaaaatagtcaaagccactgagggtttgggaaaaatggacagatagatcctcttctccccctcaggctggaagcccttgaatctcatcctaccgacgaactagagaggacaacagagtgagtgacccctggttcttaatctcacagtcccctctgcccaggctgcagctttacctctcacccttggctgattcccttctcccagggtagccatctctgtactgtcaacctggctggcctctcaccctgaggattttggctctgaggccaagggtcagcttgaccggcttgagagcttcttacttcagacagggtatgcagcagggaagggtgttggggggggcagcgctgacctcatccgcaatctccggtcccgggtggacccccaggcccccgaccttcctaagcccctggccctccccggcgatccccctgctgaccccacggatgtcctggtgttcctcgctgaccacttggccgaacagctgaccctgctagatgcggtgagaccctgacctctggcccctatgccccctgaccccttactaacctctccttgactccagatcctttccttgcttccaccccttcctgatccagctcctagcctcctccacctaccattttgattctccccttttccctttggtcgttacccttcaaaccctgtgcccctctggttccttggccacctgagatcctcagatccctgatattggaaggctgacctcacttgactatgaactttaacctctgacctctaccctgcaggaactttttctcaatttgatcccctctcagtgcctgggaggcctgtggggtcacagagaccggccaggacattctcacctctgcccatctgtccgagctactgtcacacagtttaacaaggtggcaggggcagtggttagttctgtcctgggggctacttccactggagagggacctggggaggtgaccatacggccactccgtcccccacagagggcccggctcctggagaagtggatccgcgtggcagaggtgagagagaagattgccctacggtttgtggccatggaatggagaggcctcccatagccttagctctcttctttgacccccacaggagtgccggctgctccgaaacttctcttcagtttatgccgtggtgtcagccctgcagtccagccccatccacaggcttcgggcagcctggggggaagcaaccaggtgcggaggctgaggcattggactggggtgggggttcctcagaaggcggggaagagggggtgacagagccaggcctgtcctcagggccacttttctcccttccccagggacagcctcagagtct

SEQ ID NO: 120310 - DNA, 1538 bp, Homo sapiens
atttctgaagtctccacttttctcttgtctctgggtccctacatctcctcctccttgcctcagttattctcgcgcctccctgggtgtcggcccgtttctctgctgcggggagtcctggcgtctccgtggttctctgtcagtgtgactcaggacctgcccgcaggaacctgccctgttcctgcctggaacttctggctggctgtcctgtccctgcgggtctttggccctccacctctgcctgcctgagtgtgcctacctctctgagcagtcgtgtcttggtccctgtctccctccttgtttttgtttggcggggaggggtttgtttccacagtaaccagctcctctgactctgggattggggagggaaccctcagatttcgtgacccctccttccctctctcccccttccccccgcccccccgccccgccccggtcctgggtagaggccgggaagccacggttctgggacctggaggaaagatcctagggtgggtagagagtggtcatctgttttcattagggattaatggtggtggccaggagcaggatttcgggcctcaggaggggccagaatttggatttggggccccgaggccctaaactcctaggtccagatcctaggtgagggcaggttgactggcagggctggtttttcgggatcggtcgggggaggggctggggccacgtgactctctgagtctaccgcccccaaccccctatcatcccacttccccttttccttcctgtactgggattggagctgctaccttcgggggtcccttagggctgagatagtggaggcgctacccgagggaccagggtgaaaggggtcctgaaaaagactaattctctgggctggtatagtccttggccgggaggggcggggcatgcggcagtgcctggactgaggtttcagctacccctagtcgctgcctctggcttgctgcctctcgcttccctctcctgccctttgtaccctgcttctctgtcgtgtgtgggttcagctctggggagaaggggctttgggggtctccaggatcagaattcctgtactccatccacgcctccactgcagccccttcgactccaccggggccctgaggcggctggggtggggctgtctgggccccagtgggggagacctggggtcaccagctcccccaacccttcctcgcactcgctggtactatgccctgccaccacaggtgaggggtacagagggaggagcagggcctggggtgaaggctgagggcaatggggggtggtgtggaactgtctgacttccccttccttgctcctccaggcccctgtgtccgtctgggatgaggaggaggatggtgccgtgtttaccgtcacaagccgccaatatcgacctcttgatcccttggtgagatcatgactttagcttctcacctctgactcttcattcccagttttccttcctctggctgactttctggccagagtgctaggttggagttctggagtcctggactctgctgtgtgacataggccaagactcttgccctctctgaata

SEQ ID NO: 120311 - DNA, 1046 bp, Homo sapiens
tggggagctgtggcagaaggatcgcttgaatctgggagggtgaggctgcaatgagctaaggttgtcccactgtactccagcctgggtgacaaagtgagaccctgtctcaaaaaaaaaaaaaaaaaaagaaagaaaagaaaataaattgcagcccttttctcaccttaagtattcaaacacaggtgtttattttaaatagtcagcacatctcaattcggactagccacatatcaaatgctcaatagcctaatgtgggtggtggctgtcatattggacagcggagcctgagaggacttttaggaggattaaggaagacagtgtatctccttaagaagatgcaggagatacagcactcagcagtgtctggagggcagaaaatattagcctcatccttctcccatcatctgtgcccatgatagtttatatgtctctaaactgaccatgtacacctcaactgccttttaatatcctgaattcctcaccaccttcctctcttccagaaagcagagtgagggcactcactgccatcctgtggaagccaccatcatctctggcccaagcttctgtagtagctccctaaaataataccctatcatctgctcctaatccctccaatctctctccactgagtggctggaatgcttttttttttttctttcacttatataagggataatttttcttttttttttttttttgagacggagtctcactcttccgcccaggctgcagtgcagtggcatgatcttggcttactgcaacctccgcctcctgggttcaagcaattctgtggcttcagcctccggagtagctgggattacaggcacatgccaccacacccagtgaatttttgtatttttagtagagacggggtttcaccatgttggccaggctggtcttgaattcctgacctcaggtgatctgcccacctcagcctcccaaagtgctgggattacaggcgtgagccaccacaccaggcccgagaaatgcttttttaaaaaacacacatcttatggcattcaccttcttggagctctaggacagtg

SEQ ID NO: 120312 - DNA, 1486 bp, Homo sapiens
gattgtggggaccgtaatagggggagggatgatggataagagggtgcctgggcaagtaagtagagatagaaagaggttcctgggagttagaggggtaatgggaggctagaagtttcctggaaatttgaggggctttgacatgggtatttctgtgacgcaccaatggagagacagtgggttccctatttcaggagaagaaacctaaccttctttagttctgaggaagccagcaggcaaactgagggtctcttagggaggacagtatggactgatttccctatgctcatttcgtcctctttccccagaaccccccaaagtgtccctgatgccagcaacccttgcacgggccgccccaggggaggcacccccggaattgctctgccttgtgtcccacttctacccttctgggggcctggaggtggagtgggaactccggggtggcccagggggccgctctcagaaggccgaggggcagaggtggctctcggccctgcgccaccattccgatggctctgtcagcctctctgggcacttgcagccgcccccagtcaccactgagcagcatggggcacgctatgcctgtcgaattcaccatcccagcctgcctgcctcggggcgcagcgctgaggtcaccctggaggtagcaggtaagagctgggagctctgcggaatctgagccagcacccaggaagacaggagctcactctcaccccttctgcctgccaggtctttcagggccctcccttgaggacagcgtaggccttttcctgtctgcctttcttctgcttgggctcttcaaggcactgggctgggctggtaagtgtcagccctaccctgaccatgacctgaggttggtggactttccccacctactcccaagagcctgacacccatccctctgccctccacctctaccactccagcatcccatcccttctcaatctttccccacagctgtctacctgtccacctgcaaggattcaaagaaggtacagtgctccacctctctgtatctttcccttgtcactttatctcctcatcctatctcaaaacccatggagggaggctgctggtgtggtaggcagaacctaggcttggaattcacactgatctgggttaaaacctggcactatatcctaactgtaggactctttgagcatgctacttaatctatatgtttccttgggtgtagggattttaaaaagttacttaggcagtgctgtccaatagaaagataatgcaagccacatatgtaaatttaaatactctagtactcacattaaaaaaataagcagaaacaggtaaaattaacttaataatataccttatttaatctaataattctggtcccttatctgaaatgcttgggtcagaagtgtttttggatgttggattttttcagactttggaatatttgcatatatttaatatctttgggatcagacccaaatctaaacacagaaatcatttatgtttcctatacacc

SEQ ID NO: 120313 - DNA, 1020 bp, Homo sapiens
gggggcactgtggcccctgctaccatgggctctgcgcgctcccatgcctccagccgggccagtgagaatcaatctcccagcagcagcaactacttcagccccagggagtccactgatttctcatcttcctcccaagaggcatttgcagcttctgcagtgggcagtggggagcgtcgaggaggtggccctgtattcccagcccctgtcgttggcagtggaggggccacatctggaaagctgctgctggaggcagatgagctgtgcgatgatggtggggatgggaggggggcagtggttcctggggctgggctccggagacccacctacacaccccctagcatcatgccacagaaacactgggtatacgtgaagcgaggtggtaattgcccagcgccaacacccctggttccccaagacccagatctggaggaggaagaggaggaggaagatctggtgttgacctgtgaggatgatgaagatgaagaactagggggtagctccagggttccagtggggggagggcctgaggctaccctcagcataagtgatgtccgtaccctgagtgagcccccagacaagggggaggagcaggtcaacttctgtgagtcctccaatgactttggcccatatgagggtgggggtcctgtggcaggtcttgatgactcaggggggccaactccctcttcctatgccccctcccaccctcctcgaccgctccttcccttggacatgcagggcaaccagatcctggtcttcccgtcgtcgtcttcatcctcatcctcacaggctcctggccaaccaccagggaaccaagcagaacacggggcagtgaccgtggggggcacgtcggtggggagcctgggtgtgccgggtagcgttggtggggtccctggagggactggcagtggggacgggaataagatctttctgtgccattgtgggaaggccttctcccacaagagcatgcgggaccggcacgtgaacatgcacctcaatctgcggccgtttgactgccccgtg

SEQ ID NO: 120314 - DNA, 1043 bp, Homo sapiens
ccaccttcccccttggcttccttggccccagttgctgattcctccacgagggtggactctcccagccatggcctggtgaccagctccctctgcatcccttctccagcccggctgtcccaaaccccccattcacagcctcctcggcctggtacttgcaaggtaagaaggggagggcgtgtttcctctgacaatttgttctctttcattggctgtttcagctgctctgtctgaatattccacgtgccacatcctgtctcttcctttttcccacccattttatcctctaaatcctcctgtttcttttctcctgtactccagatctctttgactctttgtctctcacttccctgcagacaagtgtggccacacaatgcgatccagaagagatcatcgtgctctcagactctgattagctgcctccccttctccctgcctccagaatgttctgggataacatttggaggaaggtgggaagcagatgactgaggaagggatggactaagctaatccccttttggtggtgtttctttaaaaaaaaaaaaaagcttaagttttacacagaaacattaataaacaataaagttcttttcttactgtatcactgtctttttcttgtccttctactgttacagattggcattagctgtccccttgctcagggttagcccagtatccccggggtagtcccgctctgtcctttctagcctggcctttttttttttttttttttttttgtctcgctgtgtcgcccaggccagggtgcagtggtgagatcacagctcactgcagcctggacctcccagtctcaagcgataatgcctcagcctcccgagtagccgggactacaggcgcgtgccaccatgcctggctaatttttgtttttgttgtttgtattttttgtagagacggggtttcgccacgttgttcaggcagtacttttttttttttttaagtgcttcagccgccttaacgcactttactttttcacttcgtgcagtaggagtgagaaagccaatgaggggccgactcaaggttatttagcc

SEQ ID NO: 120315 - DNA, 1988 bp, Homo sapiens
cactgtcaggcttcaatggagcgcaaaaattcctaaatttggtgagaaatggcaacattaccagggaatgaacagaccaggccactcacatccacgtgagggctccaggagccacttccgggcccagtcaaccacgaccaggagaggcagcgctggagcctcaatcacgtcgacggaaaacaagtgcgctccctactgcagtcaccaggaggcgctagtcccgcctgtctcccggcacgggtcctcgtttgcgcacgcgtcatttctttcctccagcgtccccgccccttctcctccggccgccaccagtttcgcttggccagttgcgttcgtgcggcgacgtccacgcattttctgacgtagcgagcgacggcggggagccgagcggaagtccagcactattgccgctagaggaggggaggggtgagaagcataagtggcaccggaagtggaattaatccgcctacctctcctgcgcctgcgaaacagaaaagacaaggcgcctgtcgggcggggtgtggcttcgggtggcggagaacgctgcgattggccctcggctgtggcgacagcgacgattggtccctgcgtgcagagcgcggtgagagtgggtggtggccgttggaattcaaaagtggcgggtgtggcgcggggctggtagcggccggagccgtgcgagttctctaccctgcttcgcgagcgggcgagagaacgcgagtcccaggatccccggcacccagttctcttccactgcattcccccggcgcgtgtgggaccgaggtggacatggatccgcaggtgagtaggggcggcgcaggtgtcctgccctggggatggggacgaaggctgaccgctccgatgctgtcgcgcccccggctcccggtcggcctttgtcatgtctaccgggagagcgaaggtccgtgcgcccccgcacaagtggaaaggggcggaggcaggagtggagacggcttagagcacccggggaggtcggaaggcacgtctgtctgccctcccctagcttcaagtttctggagcccctcccttaactttcatgtctccgagatttctcatttcgaattctcaggctcgtctgacacatttccacttctttattcctactcagggtgtgattgcagtgtgtaagaagggagagttctgatatgacttcttccttttggggacatggtgtctgaggccacatccttgctgaggtccttttgtgttaatcgcctctccttatcactgctgcttcggagtgtaggaaagggagaaggagagtagggtaatctgggccaaaagacttctcattctctctctcctttcccaaattgtgcagattcctgcccaatgaaactgattgatttagttctttctcttaaatggtgccctgctgcaccccacaaccatatgcagcttcctgtctccagtgaagagagatgaatgtgtgtgacagctggagtgtacttatctctggtgccaggaaaggtctgcctgaatcctttgtttactagtatttcacgttcaggtttccctgaagttaggattcagccttaagagagattctttctctcgtgacaaccagagagcagagtagtattatgtgacagtaagaagtagtaaaagccttctcagatctattaatcaagtatttattgagcacctactacatgctaggcgtggttgtaggtacttaggatgcagcagtgaacaagggacaaatcgttgccatcgtggagctgccattctatggggatacagacaataaatgtaataaatgaattatataactgccagaaggccgtaagtgctgtggagaaaaggagaaattcaaggttgaggacataggggaggccaactggcgggttagagtattaaatagggtggtctcagtaacccccatggaaaagatgagttgaataaagacttgaaggaagtgagggagacagacaagcagatagtgagggaagaacatttcaggcagagggaatctg

SEQ ID NO: 120316 - DNA, 1576 bp, Homo sapiens
aggccagcctaatcaacatggtgaaaccccgtctttactaaaaatacaaaattagttgggcgtggtggcgcatacctataatcccagctactcgggaggctgaggcgggagaatcgcttgaaccctggaggtagagtttgctgtgagctgagatcatgccattgcacttcagcctggacaacaagtgaaactctgtctcagtcaatcaataaataaagtatatgggagcgtgtgcatagactatatttaatactatatacctatttatgtaagggacttgggcatccttggattttggtattcttggggggtgctggaatcaaccccttttggatactgagggatgactgtaatttctggttctaggggaggtatcattaggagctggccagacttagggataagggaaggaagttatcctatttctaattctgagaaaagcacttcttctgcccctgtcctagcaagtgtacatgccatcttaagaatgatcattctacctttgctctctcccatctcctgggcagctcaaaaagtttccaagaagacaggaccccggtgttccacagctattgccacaggtaactgtgctcaagagctgggtctgagaagggatttggggtatgtgtaaagggagaatgatggaggtggagggacactggtcctgtaattcctaagtcacctcctcaattctgtagggttgaagaaccagaagccagttcctgctgttcctgtccagaagtctggcagtaagtgacaaacataaccactgggtgagaggctgggatagggaagagaagatggtgagtgaccagaaaaatccatttggtctctaaggggaaggagatgtagcatcaggtgtggatcccataaaggctagaagggaggagggatagagagcctagacttcactgacctttgtcctttctgtgttcatcttagcatcaggtgttcctcccatggcaggagggaagaaacccagcaaacgtccagcctgggacttaaagggtcagttatgtgacctaaatgcagaactaaaacggtgccgtgagaggactcaaacgttggaccaagagaaccagcagcttcaggaccagctcagagatgcccagcagcaggtcaaggccctggggacagagcgcacaacactggaggggcatttagccaaggtacaggcccaggctgagcagggccaacaggagctgaagaacttgcgtgcttgtgtcctggagctggaagagcggctgagcacgcaggagggcttggtgcaagagcttcagaaaaaacaggtggaattgcaggaagaacggaggggactgatgtcccaactagaggagaaggaggtaagggccagattttcaccagatgtcagccccgctttcctggcagaggtcatgcctcccctcccttccaggtacccctcaagtctgggctgagaactcctgagcacctatctttagcagtataggtgctgctgaagatacctctctcttgacctgtctgcaccccagcccactcctgactgtcttgctttctgccacgcttcttcctacccttgactgtttgcaaagctctc

SEQ ID NO: 120317 - DNA, 1942 bp, Homo sapiens
ccagctgcaggaactcaagggcaacatccgtgtattctgccgggtccgccctgtcctgccgggggagcccactccaccccctggcctcctcctgtttccctctggccctggtgggccctctgatcctccaacccgccttagcctctcccggtctgacgagcggcgtgggaccctgagtggggcaccagctcccccaactcgccatgatttttcctttgaccgggtattcccaccaggaagtggacaggatgaagtgtttgaagagattgccatgcttgtccagtcagccctggatggctatccagtatgcatctttgcctatggccagacaggcagtggcaagaccttcacaatggagggtgggcctgggggagacccccagttggaggggctgatccctcgggccctgcggcacctcttctctgtggctcaggagctgagtggtcagggctggacctacagctttgtagcaagctacgtagagatctacaatgagactgtccgggacctgctggccactggaacccggaagggtcaagggggcgagtgtgagattcgccgtgcagggccagggagtgaggagctcactgtcaccaatgctcgatatgtccctgtctcctgtgagaaagaagtgaggacccatgggcactggaactgggaaatggggaggagtgggcagggtgccacgagatggaggtagagggagaaaggagcaagagagaattgaaggatgaagtgcaagttatcaggctgggttaccacatccggttttggcctgtgggctgtcggtagatctgccttaacctgggagtggcgagggagtgatgcatctgccaaaacgaggagggtcactacatctcatgtctcatcttcttgctcagctcatcctagccatgctggcctcctggctgttcctcaaccagctagtcgtgctccccatctcagggcctttgcctggatgctctttcctggagatcttggctatcctgtcaaaacttgtgttccccaccccgcctttatacactccctattctatgtattccttaccattttcagacatactgtgcatcttattttgtttcttgacaggctagaaagcttcaagagggtgggggtgggctcttattcatttccatacatattactatgtactgacttctgcctgcctttttgccccttctgctcccatccccaggtggacgccctgcttcatctggcccgccagaatcgggctgtggcccgcacagcccagaatgaacggtcatcacgcagccacagtgtattccagctacagatttctggggagcactccagccgaggcctgcagtgtggggcccccctcagtcttgtggacctggccgggagtgagcgacttgaccccggcttagccctcggccccggggagcgggaacgccttcgggaaacacaggccattaacagcagcctgtccacgctggggctggttatcatggccctgagcaacaaggtgggaatgggagtggggtgagatacgggacctgggggacagttggggttggctgtgcagaaccctgcctattcctaaacatctgtccccacctcaatcatctaggagtcccacgtgccttaccggaacagcaaactgacctacctgctgcagaactctctgggtggtagtgctaagatgtgagtgaaagggacagatggaaggggtcaggtaggaactgtgttggggtgaggggtagaaaggggaacagtggagacctgtccaggctctgctggcccctaatgctggggttgggcacattgtcttttcataggctcatgtttgtgaacatttctccactggaagagaacgtctccgagtccctcaactctctacgctttgcctccaaggtgcgattaccacccgtcagccttgtcaggacccgtgggtggttgtaggcttctccattccaatccc

SEQ ID NO: 120318 - DNA, 1079 bp, Homo sapiens
tctcaaaaaaccaacacacaaaaaatccctaagattcctccctatcagcatacagagatcattatttttaggtctgcctagactccactatgtagctgcaccaaaatttatccaccagttccctctactggacacttggattgtttccacacttttttagtcacaaacaaggccacgttgactaactttgtacatacatcattttgtatttttcagttacatctaactagggaaatagtccttgaaatgggattactggatcaaagacttagaggtttttcagactattccaaatagtgtgaattcagactccaaacctcatgagggtcagccagtggctatatgaattctcactaatgagaattccttccactagaatctccttccactagtgttaagcaagtcagaaagtttccttactgtctgcctccacagtaatttttttctctggtacaccctcctcctgcgcgtatagccctttgatgggctctggctttatttgaggtctgatcaggtctgtcctgctgtgcgcttgggcctcctcccagtcagcactgattgttgctgtggagtagccagcacctgcaccctgatctggtattctactttgatgagggtttccctcactatcttgcaagttcaattttagagggtggtgatgttttttctaactttttattaatgttataccaatgtaacatccaacaacatgaactttaatatcctctaatacccagtttatgttaaatttcacccaactgtctcagaagtgtcttttatacataataggtttgttcaaatcaggatccaggcaagggccacccacttggttgaaatgtctcaagttccacaaccctatcccacactgccactattatgtcgtttgttgaaggtcatttgtcctatagaatatactattctggattttggctggttgcttcctctttcccccatactttcacttatttatcatatttgggtgttgtcaacctgacccatccatttacaagctccttattgactttttcacctagtgattttatccagcagtgaccatacctggatctttatttcattaa

SEQ ID NO: 120319 - DNA, 1349 bp, Homo sapiens
ataggaacctcctggccgggcgcggtggctcatgcctgtaaccccagcactttgggaggctgaggtgggtggatcacgaggtcaggagatcgagaccatcctaacacggtgaaaccccgtctctactaaaaatacaaaaaattcaccgggcgtggtggcgggcgcctgtagtctcagctactttgggagtctgaggcagaatggcttgaacccgggaggtggagcttgcagtgagccgagatcgcgccactgcactccagcctgggcgacagagcaagactccgtctcaacaacaacaacaaaaaaaagagcctccttcagattggtgccagtgtcctttagacagaactctagtagtcttttcagattcaacttgtacatttccttccccagacttcaactgatccattttctaaggagtcctagttcctaaatgggtgttattactattttatctcggtttaagtgttttacagtgggagaggttggaggtctctagtacagggtattgctggaaatgaaagcctcctttctctgctcctgtattttcttctggggcttccatctcttctcaagccttttcacctcctccaaacctagtgtgcagaggagaacaaaccataactggcaccagcctgaaccagcctttggaggccttatttcggtatttctgagggcagccctagcattggaggatgggagatcttgggaaaaatgttgtattggttacgctgcaaacttttatcctgtctaaccccctgcccccaggtgaaccagtgtgttattggtactgctcaggccaacaggaagtgaagacggatccagatctgtgtgtgtgtgtgtgtgtgtgtgtgtgtgtgtgtgtgtgtgtgtgtgtccctatgtctatgtatcgggtgaggggtgggagggttgctggagggtgctttattgggtggagggcaccatgtcccagggctatcaaataaagaatagtttggttttttttttaaataaaggttttattagcatttgcccaagaaggcagatactttcatatctgtaaaagtgggagctgtgatctgtaccctctgccaaacgtttacgtgggaggcgggagcgggggctgagggcttcgtcttttctcccctctgctatcaccggttctggaccttggcctggatcatcttcccctctgctaataccccctaccccgtccgtcacatcagggaggtgtgccctctagctatccacgccccctccttggtcactagttataggtaactttcacccttccgccggccaccccagccccagggaagaacgttcctttggtgggtgtcggcaaatggggaccggaccccagagtc

SEQ ID NO: 120320 - DNA, 1050 bp, Homo sapiens
gaggcgcaggtggtccttcttctactgtcacatggtgcgcgctgttttctaatcacgtggctgccacccaggtaagaagaggccgctcttcctggggttgtttctccgtgtgacgtgtggcctttgagatcaactctcctgtaccagcgtaggccgcatgagtggggggcgggctcccgcggtcctgctcggcggagtggtgagtgaccggccccgccccgccccttccggtcctcgaagcctcgaccgctacccgcaccctaaatcccagaggttggccccctgaggtgtgagtgaaatgagcttttgctttattttccaagtttctctctcaccttcaggggcattcttcgggggtgcatcagagggagggcagagcctgaggatctaagcgaaggcttccccgggtgtaatttcctgggctgtttgtgaggagagatcgaattcgcctcctgctctcaggcctctctgctcctgtcttttgtttggatgccggcgctgctgcctgtggcctcccgccttttgttgctaccccgagtcttgctgaccatggcctctggaagccctccgacccagccctcgccggcctcggattccggctctggctacgttccgggctcggtctctgcagcctttgttacttgccccaacgagaaggtcgccaaggagatcgccaggtagggacctcgatgtgcagcgagaaaggatgatcatgaagggacagttgggggtggggcagaagagtgctgctttctcctttctccagctctggaagcctgtctctgggctgccagtacaaaaactggggttatggggtactctgaatgggactgtctcttcactccagggccgtggtggagaagcgcctagcagcctgcgtcaacctcatccctcagattacatccatgtgagtcataggagttggggggttaacctaactgtaggagctgactgggaacctctttcctgggggaaattctttgctccccacaactctccccctctgacctttcagctatgagtggaaagggaagatcgaggaagacagtg

SEQ ID NO: 120321 - DNA, 1154 bp, Homo sapiens
ccagactctgaccctcttaaaggctcttgaccagtaaaatgtaacctctggggtcttaatgctgtcttcacttcatcacttttacccccttcccccacccctccaatccttatttccattccccctccctcctctgctgtccatcacctatatctttccccccatatggtgtccgttccttatatgagtcccccttctgtccttcccctatatcagtcccctctctggtgttcattgcctctctcttatctcttttctatgtggtcgctcccttatatctctatcacttctttactagtccgtcttgaccccttctcatagcctccgcattaggtctgcctcctttgctctgacacatgtccagtcgagcccttcaggtgtattcccttgcccctgggcatttaccatcatttctgcctccttttctatctactcctattatttgtctcccagaccattccttgtcaccacaagtctgtgcctacccactttcccttaatacctcaactcttattatcatttctcttttcttgtctcctctacttattggggtgttggagatttggggtacaaagacacaggttttgatgattagaacaagggatccccatctcagcccttgagggatttctcatcctagtaaaaatttcccgtttctcagccatgttgctctgcctcttgcatctgcctcccagaatcattcttcaccaagtccagacagtatgtgtgtgtgtgtttctagagttgttcctaagttccctgctgccaggagaaagatgccctctgaagtctaacccgcctcccttggctgcagcctgaaccagccctttccccaaatgcttatgtgtatcaacagatttctcctctgggtataccaagtgtctaagtgcggtgggcatgttgcctgcaatgtctgtagtttcagaggctaggtattggtgatctctgtatctagagaacattagttagtctctgagatgggttgagatagagtttcaaagtatgtggtttctaaatggtggacattctgagggttcatcgctcactgtgatctggaggttgggtaaatttgagagacatatttatagacagaaaagggctgaatttgcaaaactctgctactcagtgcattctgttggaatgaagctcaaaga

SEQ ID NO: 120322 - DNA, 2275 bp, Homo sapiens
aggttcaagtgattctcctgcctcagcctcctgagtagctgggattacaggcacgtgccactatgcccagctaatttgtttttgtatttttattagagacggggtttcactatgttggccaggctggctcgaactcctgacctcaggcaatccacccacctcggcctcccaaagtgctgggattacaggaatgagataccatggctggcctcttcttagtttgattacatttgcagggatcctgtttccaaataagatcacattcacaggttcagggtagacatgagttttggtgggatactattcaacccagtacaccgtctcaccttatgattgctgtctgtatcccactttcttactgtctctcctcttttggtgtctctctgtcccttccccctttaacatcatgcccaccccaccatgccaggacaacagccgccgggtagacaatgtgctaaagctgtggatcatagaggcccgggagctgccccccaagaagcggtactactgtgagctctgcctggatgacatgctgtatgcacgcaccacctccaagccccgctctgcctctggggacaccgtcttctggggcgagcacttcgagtttaacaacctgccggctgtccgtgccctgcggctgcatctgtaccgtgactcagacaaaaagcgcaagaaggacaaggcaggctatgtcggcctggtgactgtgccagtggccaccctggctgggcgccacttcacagagcagtggtaccctgtaaccctgccaacaggcagtgggggatctgggggcatgggttcgggagggggagggggctcggggggtggctcagggggcaagggcaaaggaggttgcccggctgtgcggctgaaagcacgttaccagacaatgagcatcttgcccatggagctatataaagagtttgcagagtatgtcaccaaccattatcggatgctgtgtgcagtcttggagcccgccctgaatgtcaaaggcaaggaggaggttgccagtgcactagttcacatcctgcagagtacaggcaaggccaaggtgagtgttgtgccctcagggaaaggtgacttgggaatgggcacttgcttgggggttagtgaggacagggcaaattcacgagattgggttgtgcagaggctgacacttggattttcctgggcctcaggacttcctttcagacatggccatgtctgaggtagaccggttcatggaacgggagcacctcatattccgcgagaacacgcttgccactaaagccatagaagagtatatgagactgattggtcagaaatacctcaaggatgccattggtatggcccacactcaggccctcttcttcccaaacctgccagatgtccaccccagaccccaagtccacccttccacagcttgatacttcctaacccagagtcctaggactccagcctccaacacctgattctgaaatttccccaaccctggccacccccttccctgcccttggaaagtgtgaccacaccctcttgtgcccccaccccccaggagaattcatccgtgctctgtatgaatctgaggaaaactgcgaggtagaccctatcaagtgcacagcatccagtttggcagagcaccaggccaacctgcgaatgtgctgtgagttggccctgtgcaaggtggtcaactcccactggtgagactgggaacgctgggctggggggccagggtcgggggaattatgtgttcatctgttcatctatctgtccatcctcaaagaggactgagcaccatttatgggcaaagcattgttctaggcgctatagagcaaacaggtgaaagaggcctggtccctgccctcagagggcctccaccagaatggggacaaattagaagaaaaaaaaaaaaagccacagagccataatggtgtgtaagtgctgagtaagggtccccccaacctctgtgtgacataaggtcagagagaaggcagagctttgagataagtggggaagaggtgcccccttgggtaggctttgaagactggtttaggttctgatatatggacatagttggcaagaaagacatttcagaagaaggctgtgagaaaggcacatgtgtgatggtgaaaaggcccaggagttttcaggggacattaaagtaggttagtagcaattacatcaggtttagtggagcatgtgcctcataatggggagtggcgggagagatgtctgggcaggaagattagctttagaaactggaaggcctcaaggagtctgaggtcattggtaggcc

SEQ ID NO: 120323 - DNA, 1698 bp, Homo sapiens
acatgcctgtaatcccagctattcgggaggctaaggcaggagaatcacttgaatctgggaggtggaggttgtagtgagccgagatcacacgattgcactctagcctgggcaacaagagtgaaactccatctcaaaaaaaaaaaattaatccataagtagagtgtatgtagtagagtagagggatgtatgttgggggatgactggaatagagccagctgggggctcggaggcatgaaagtcagatcctgaatcagaacagtgacagaagttaggaaggagctactggaaggaccctctcgggaaaggatcagtaggaattgtcagcttattggaaaggagggagcatgtctgtggggagtcacggatgactcaagaggccatgaggctggtggttgggagaccggtggcctcattgacaaccaggaaagtcaggaggaggagccagttggaggtgtgggggcgatggtgagctctgctttacaccagccgagtttaaggtgtcagtgggacattgaagtggaactgggaggtgcggggagtgagctctgagccattccagggactggggatcatgcctggggcacctccatccccatttccctggaatccagaagagttggggggtccgagctccctgtacctcaagtgaccctccatctctctcccatctctgtctctccctggtgtctgtttttcttctcctcctctccttgtctctctcccacacccctccatctctctcccacgtgtctctcccctcaccttctctccccctccatttctctctccctaatctgtctgttccctctgccatggcccccttcttcaagcagcctcccatcttgctcctgcggtccctccttccctgtctctctcacccctgtttccacaccctcacctcctaccacccccctcagcatgttccctggaagctgagggtctctggggctcagtcccggtctctctctttctctctctctctctctgtctccccgacccttccccccagcgtgttcccgagggagctgaaggaggtgtttgcttcgtggcggctgcgctgcgcagagcgaggccgggaggacatcgcagacaggcttatcagcgcctcactcttcctgcgcttcctctgcccagcgattatgtcgcccagtctctttgggcttatgcaggagtacccagatgagcagacctcacgaaccctcaccctcattgccaaggtcatccagaacctggccaacttttccaagtgagggaagcttcaggagtgggcagggcagggagtggcagggcagggagtggcagggctgggggtcggcaagaagggtctcctgagtccccagagatcctgagatggggaggctatgataccttgtgtgtgtgtgtatgtgtgtgtatgtgtgtgtgtgtgtgtgtgtgtgtgtatgtgacctttatcttctgcattcttggctaggtttacctcaaaggaggactttctgggcttcatgaatgagtttctggagctggaatggggttccatgcagcagtttttgtatgagatctccaatctggacacgctaaccaacagcagtagctttgagggttacatcgacttgggccgagagctctccacactgcatgccctactctgggaggtgctgccccagctcagcaaggtcagcagatcccctctttgccctatccccagatggctccaga

SEQ ID NO: 120324 - DNA, 1086 bp, Homo sapiens
aggaaggcgggctgggtcacaacagggagggaagaaggagatggggggtggggttgaaacagagtctgtggcctgaagttacaatcttcttgcctccttttggccattaaacaaatgtgtatagagggcctgctatgtgccatgtgctatgccaggcactaaggatacggcactgaaccctcttagcactctcattccagaggggattaatccataagtagaatgggggtgactggaatagggccagctgggggcttggaggcatgaagatcagatcctgaatcagaacaacaggagaaattctctggcattcaactcacatctctggcattcagaggtgataaaggctacagcagggcaataggactgggactgtcgtctcctttggctgtgctgttgccctctaaatgtaccctgctttttcccaccttttctttctctgttcgccctcactgtgccttgtcccagcattctcagacaccatccacattgaaccccacaatgccagcctctgagcggacagtggcctgggtctccaacatgcctcacctgtcggctgacatcgagagtgcccacatcgagcgggaagagtacaagctcaaggagtactcaaaatcgatggatgagagccggctggatagggtacgatgggctctaccagctccaagccccagtgtttccttttacccacaggggagatctctagtcacttccaagggaaacctccagggtcagttatggtggtaagaaaaggcaaagacctgatcacctcttgagaagccttccgtccatctggggagaccagatacacacagttgttaaaagtcactttcaactctattttgtaggttatatatatcatagactatctggggatcatctattttaggcttacctccatgttcttccccaggaggaacataagccctggctcctgtgactgcttaggaaaggaaatgttactttactggcagtaggagctaataaattggatggggatggagggggttgcagctatattacaagtgatgtctggcctacccagtcactgtcccatgggcataagtgacagtcagtgggcaggga

SEQ ID NO: 120325 - DNA, 1524 bp, Homo sapiens
caatagggcagataaaatgactcttctgagctcttccagctctggaattcctagattctcagcctagaattcacttgtagacctcctatccttggcaccttgacagagccaaggagagggtcacatggaggacagcacctgcctttcccccgtcaattgccttttcttcctatgtctccagcatgtgttctggggcctggcttagggctgaagagtcaccctatttttaatttctgagcacagttactcaaggtgtgtttgtgagtgtaggtttctgtgtgggtcttcatgaggggccatacatagacctcagggtgtgggagtctgtgaccttgctccattttgagggaacctcagcaccatggcagggtcttctcaaaagcaggtgtgtggatatgatccacaggcagggaaggggttggggaaggcagctggatgtccctcaacatgcagtggctgtgcttggcagacagggatggaggctgggtggtgggcttggggtggggcgcccctcatagtgcggggtcgtgtgcccggcgggcaggtgaaggagtacgaggaggagattcactcactgaaagagcggctgcacatgtccaaccggaagctggaagagtatgagcggaggctgctgtcccaggaagaacaaaccagcaaaatcctgatgcagtatcaggcccgactggagcagagtgagaagaggctaaggcagcagcaggcagagaaggattcccagatcaagagcatcattggcaggtgaggggcggcctggggagggggttgtgagggagagcctgaggctggagagagcaagtgggtgagctactccgctgactcccatccccaaactcaggagcccaccaggagagcccaccactctcctccccaggaagccacccactcactcatcaccagatggagagaaaccccaacctgcttagtgcattaaatatctctttaccaaaccctgacctctcttctgatagagtagcttcggaagcccttggaaaatgtacctgttcctgtccaaccatcactgcatttgcatttaccctaggccagagctccccactagttattctcaacttaacctgtgatgttcactccaaacctaagcagggctccctagccagagtaggccctgcccttcctgggtggaccctccctctctagccttggaaaggtgttctgttagaaagggtcttttagcctgtgtatgttttcagctgctccagcaagtcctgggctccaaagagggtatcctcagcaaagaggtcaattatcttcagagtggtggggtcggggtgggggggaccctgggcgcactccaaccagagccacctccattttgatccattctaaatgtattttatgtaagatttaattagaagaaaagggcttcttgaaatattttttgaaaaccactgctctaattgatatcctttatgataaatcacctcgaggatcttcacagtgaggtgacatgggggatgcagaagccaggtcctcagccatggaaggtct

SEQ ID NO: 120326 - DNA, 1043 bp, Homo sapiens
caaggctcctgaccccatgaccccactctctcccactgcagctcctcatcaggtaattctcctggttccgctttggccacgggcggaggacacagggggaggtgactccggaccactgcaggttggtcgtgaagcccactccctccaacacctccggagcctctcccctctcactgctgccctccacacccagagaacctccacagactccagccctccgacacctgcacagatccatctcccaagacaccacccaaagagagcatttgctgctgcttcccagaactgtccaacaataccttagcaacaccaagagttgggccctagatgggcccagcacattcacaggtcacacccacttccctgcaaaacccaccccctcccagcctcctcctgactctaagccctcctcttcctctacctctccagtgtatgtctgtcaccccccatttcaccagagcgtccttaggggctgggggtgggtttgttaatggggtggaggcaatgatgggttggaggatcttggctataggggctgtgctgactgcagcaggtaggttgggtttccctcttccttccctaatcttggttctctaccctcctttccactcctcacctgattctctctcttcctcctccttatatctgtgaggcagaaggcatctgaagctcatattagcccccattgggtgggaattaggagtgggtagttaactcagggagacttgagataccctggaaaaaatgctattgagatgtcctgacattaggcagggtggatggaacaagaaggagcaagaaaggaacctcaggcagatgttaggacatggacttgatcatgtggcctgggagtttagaaatggggagagacatcctcctagatcagatcgtgggctcagtaggcatgttgattcccagggagaggtgccaggaacagcatggtaaagaatgtactcttcacagctcacatccccaggttgctgatgccactcactccccctctcctgccatcgagtggccttgccggacacatcaccctacct

SEQ ID NO: 120327 - DNA, 1048 bp, Homo sapiens
atgggagtggaaaagaataaagccagtttctgcttcccagggatgcagagattggggcatgctgtgtctgcagaagctcctagtcatttccgccataattgtgagagagaggggcagccctcccacaagatttttcccttcccatatcacttccctgaatccccttcctttccccccagtacagttaaacctctctctaatttggaatgttatatttgagaagatggccactgtgaataagtgacaaacggaatgacagtgtctatttaatgaaatgcatgtcttcaaaatatatacagaactcgatgaacaaggctttttccactcctcagggagcatgcattaatgaatagataggattcaaaagtctgttttctggtatgggttaaatatcccctcctacagacatatttccaccactaatttgcttagtacaccttttcttcacagataaaggaaaatgcaagctcagtttttcttcagattatgaagaaattccaaatccacaggggtttggattaatgaggttttgctgtactgcctccccttattcctcaacatgaagttcccacctcggattggggatgggtgggagggggtttcaagaggaggagggtgggatgggcaaggaatatacacaggtgaagccagagaagggttaggttgggggtgcggtgggaacttgctgttttgatctggtttcctggtgtgacactctgggttaaaggcttgaaggcccctgttaggagtctaggggtgagattctcttctctctgatcccagaggacgttaacttctactgcaggtgagaaacaaaataggaggatggtggggactgtcctgggaggagggggtggtccatggcttgtggtgtgggctggctataggggaggccactgctaggggactggcatccaggcccccttgaagcgtctcaataagtccgcgctctcctttttggtgtcttgcaggagaggcagcttccccccttgggtccaacaaacccgcgtgtgacgctggccccaccgtggaatggcctggccccccc

SEQ ID NO: 120328 - DNA, 1101 bp, Homo sapiens
agacccatgctggagccctgcatgcctgtccccactgtggccgtcggttccgagtccatgcctgttttctccgccaccgggacctatgcaagggccagggctgggccactgcccactggacttacaagtgactgctgaggctatacactagcttctagaacaagataaccactgctgctgatggatacttttccctcactgccatggcacaccagtcatggatcttgtaatcatgccaagagaatagatacattatggacctcttgttcttagatatgggcctctcagcctggcagatgtggaaactcaaatttctcgtcccactccaggttttggctagccaaccctgcaggaaagtggtttataggccattcatacttaagttgatcacttgcccatggtggacatttttgtggtggtgatgtccattaaggaaaccagattttcaattatttagtgagagaagagttagagcaaaagacagtggtaaatgttttattccgtctccatgaggaattgaaggagttggtctccacctagagatacatttgatttacagcttaagtaattcagaggctaagctctaagcttttttctctcattgctggaatgatttaagcagaagtccttttgtgtacttttaaaattgtatctttccaggagcccctcagattgtaccttgctttctcaccaatagacaccttcccgacacttttttaatgttgtagctgagcactttaacaagttgagcattccatgtttcattcttagaaccttctttaatagagggtcttccctcaacagcctgtgcctctggtctacctttgaccaccactgataactaatatattggtcacaatgactggaatgtgactagtgatctcaggagatggcactgtcctaaagtgctgtcagggtggcaccactgctctctgaacaacttaccttggtcagagggactcaggtttgggacagcacaagctgaaggctggagagtaacttgcatagtaggaccatacctcttcctttcccatcccacccacatatgatagacagcccctctgttgagatatggaggggacagatactggaatcgggggt

SEQ ID NO: 120329 - DNA, 1291 bp, Homo sapiens
aggatctttcaacccactagacatggtgtcagtggaggaacacgtggtggactctggagagaatagggtggagggatgcagacagcaagcctgtctagagccagaggatgaggctgtgctacacctgcctggtagaagccaggatccaatcctacccaactcaagcggcctcctagacatgcccctcgctgcacacacacacctttgctcagaaggcagcaggtggagggggggggggacttgtattgcagtactcctgttacacagcttttgtaacagcctttctggaattagcaattgcagtatgtgccttgcttctgggtctctaggtgcttaaaggacacatgagcttggttgggactaggatggggctagcatcacgaaggctgcaggacaggaggtagaaaagaacaaacttgcaatggcctgagctgccctctggggctgctggctgctgcacactcaaacctatggcacagctgcctgttccttaaggctgcactggggacttgcagaaactgggttgcctgcagtgctgaggtggctctccataaaacaaactgtgtgacctccctacagccacccccactttttccacaggaaacttgtcctcctgtagctaaacccaacctctgtcccaagcttccagggtaaaggagaggctgtcttccagctaaatgtggggcacccacatcaggcttggcatcaaagccactgcccagatgcccccatggcaaaagcccaccctagctgttttgcataggatttcttaaacaggcacacaaatagttggtgtgctttgggaacagtgagctgtaaactcagccttgaacaaaagagaactaaaaggaaggtcttaggaaggaggccttggccagaatgccaagtttccaagtgatgccaggatgaagttacttattggaaagggatagtaccttgggggagatgttggtcagggaagggggatgtatttgaaacttagtttacatttggcttgcaaaaaggctttccttgaaacagacctccctaaataagttgggtcccctgttcttccatttcacttgttcagtgtccatcatcgccctaggagggcagctctgccatgacagggactggcccagcctgtctgcctaatgcatggctgacactgggtgaattggaggagaagggtggggagaaatagtcaatgttatctgtatctcaggcctgggtccctgggagagggctttcctctgagtggttgctgtctgacatccctctctgcccgtgccctagaaggatggctgatgct

SEQ ID NO: 120330 - DNA, 1043 bp, Homo sapiens
ggctggcggcgcattcggcgtccgggaggccgggccccggacgcgcgaggagcgcggggcgcgggaaggcaggcgggtgcacatgggtgccggcgggcgagctgcggggggagggggggcggggtgtggcctccccgcctcccgggcgggatttgcatgtgtgtggtggccccagacttcctgctccttctacgctgcaggtacgcgcgggccgggcggggcgggcgggcggcgggcgcgccaagacgtgggcacctcctcacccggaccccgggccccgccgagccgcctcctggctcccgtggccgccagcccgccccggccgcaccgagcgtcgggatccgaggtgggagcgtacccctccccgctccccggacgcctcagtcctccgcactgagcttggccacgcgcccctaggcgccccccacgccctgggccccggagggccgcagccatgagtgaaatgtccagctttcttcacatcggggacatcgtctccctgtacgccgagggctccgtcaatggcttcatcagcactttggggtgagtgagccgagctcgagaggggcgcgggtaaagagggggcgccgtgggccctggtgccagctgcgtgcgtccagccgccgccccccgatagaggcctggacgtccccctagtctcaaggagcgggaacggctcgcctccttcttttacagaaaggaagtgaagtgtttgctcaggtaggactcgggctccctactggagttggcaggaggagcctccctcggcggcgcagcctctaccctcccgcgcacgcctttggagggggcggagggacggaggcttcctttgcaggtggtcccgggggcgggcaggtgggtggctggaggctgagttggggaagggcagccgggccgagacgtgcccggctctgagggtagggcggagctgtcgggagtgggcaggctcagcttggagcccgtaatcctctattaccgatcccgtggtgcctttgaggggtcgcaccttctcctcacagctctctccctgttcttcccagctt

SEQ ID NO: 120331 - DNA, 1382 bp, Homo sapiens
ctcctgtgcttctctcatctgtctgtctttggtctctctctgcttctgtttcttatgctttttgtctttctgactctctgtctccctcccttccactcctctatgcttttgtttttctcctcctctcctgcccccttcacccactgcccatcccatcagggcagcagggtctcagggctgggacaggagatacacctgcagcatgtgacaggcccgactggtggcagagtccccccaggacagctgcagctccagtcagggggctggggtgggctgggtgtgcttctgtgttcttcctggggttctccccgcccccaagagacaccttgcctttcaacggtggtgccaggaaagaatgacttgatggtggggagcttgttagagatggaggaattatcttaggggctcactggtaccctggcatcccctgctctaagggaagggatactgtgggagataggtctcttctctcctgctgaccgagctgctttgttccccaggctggtggatgaccgctgtgtggtggagcccgcggccggggacctggacaacccccctaagaagttccgtggtaagacctccgcttcctctgcccccgcccctcccaggctgcagggttctggacctgcgactgaatttattcaactgcattcagccccagtggctggattagatgtggcgctgccctgcagacctcactctgctgtcggcggaatcccccttggcttgcactgctgccatcttggcacagacgtgccattcccttcattttctggggccacaccccacttctcaggggcacacccacttctggccaggggcccattctccccccaaaatccccacagccacagggctttctttgtctgtgtgactggatgttttctgagggaacgggtggaaaagagaattgtcttagactttaggaggccctggtgacagcccttccctgtgcctcagttcctcatctgcatggtaagagatttggaccccatggtttccagaactcttctgaccctggctgtgtcctcagccccctcctgtgtgtgagtcctgccctgcaggaggctctaataacaaagccccttggtgggaagttggtgagaattcaccttgggcaagtgacttcgttcacgggaccttgtcctgagtggtcagtgggctcctcgggccgcccagcaggctgagggcctttgtggggattaaacaatatcctggctgtcattatgccaagccagggtgaggtgctattgttgtgcttacctgtgagggctgagaccgactgacagtcagacagacaggtcctgggcgtgttgggcagggtgggagcaggcagcaacacgctgggcctgctgccaccaagtctgcccgcgtggctgctc

SEQ ID NO: 120332 - DNA, 2079 bp, Homo sapiens
gactgtcccctccagaggctgggctgttctatgcctgtgtcagtcactggataggggctgcccctgggaagaggggtatgtcatttcccaggcatctgtgtgcaagatggtttccatcagccaaggcaattagctaaagaggatgcagatgtgagctgttagctgccaatactcacaaaagctgggcacagacatggcataagggtgaggccccagcagcctctggtaaatctcctaggggaagagggcacgtgtccaccccaccaagtgagatgcactgctctcaaacctgcctctgagcctccccattctactcagcatattccaggatgctccaaattctgtgaggttcttccaaccgcttcctctctacctgcagcggggaacgggggtggggaagggttgggagagaagagctgcaggctggggttttctccagggagggccctgagccccagatgaatcattcccctcacccccaacctgccccaccacagactgcctcttcaaggtgtgccccatgaaccgctactcggcccagaagcagtactggaaggccaagcagactaagcaggacaaggagaagatcgctgatgtggtgttgctgcagaagctgcaggtatgtgtgtgtgtgcaggcgtgcatctgtgcacatgtaccaggaacctgggtacacaagcagcggtgctgcttgtcggagccagtaggggctctgtggctgagctgagtggtttctaaaactcgtatgggcgtgacagttcacacctgtaattccagcactttgggaggccaaggcaggaggattgcttgaggccaggagtttgagagcagcttgggcaacatagcaagaccctatctctacaaaaaattaataaaaaataaaaataaaaaaataaattccaatacgcaagagattggtgtgaattgctgtgaaggaggggatgtggggggagtaggatcccttcccagtgacccaccagtctgtgtaactctgttgtgtcaatgagaagaaagtgccccttcctccaggctggcacagccctgtgccagggtgcatggctcagagagtggaatgtcgacaccatagagcagtgaacaacctgtacagctgtccatggagttcccagtggctcctggagacagtggctctggggaacccaatttgggagccctggatctagtcttaacctctccccttgttttatagagttggagcctggggcccttagatgggactggtctgtccatggtctgaccatcctgtaagtctgcagtagagcctagatggcccccaggtctctgactcaccctggcttcctcagacatgtggatcgtgccatgatgctggaatgtggtggtcgctcatgagccccttgtgggcagtggctcagttcacatcctgggcagatctcggggtcccaaccccgttccccaaaccacaaagagagtgggaggctttggctgtggtcaagaactttgtagcctgggccctgggccctgttgccccaccccttgtcatacaaaccttgcttctctctgtccccttcctctaagccccacgcctagaggaggtgggtctagaatggggacattgggctgcgccttatagctgtggactgggctggagagagggagctgcaggtgggctgcctgagctctagtattaatacctcagctctcttcctggaatgggggctgcaacaggcttccttcctgctgccagcaggtagaggctgagctggggatctggcctggggggagggcattcacctatgcagagccacataatcagaaccgcaagcggtcacacagccacatgctgttgctttgtggaaagtcacatggtccatggcaaggctctcctgctgccaccttcgcctcggtctcagtaaaggactgaggaggaggaaaggacagagaccactgctctcagagagtgccagtctgatggaggggacagggctcctgccctccaggaacccctaatctggtaaggaggcagggcacctatccttaggcagcttccagtctaacagaggacagaagagcctaaaaagctgtctctaatgggatgcaaac

SEQ ID NO: 120333 - DNA, 1797 bp, Homo sapiens
aggagtgggggtggtggtgggagccaggaaatggcaccaagcagcccctgccagcgtttggactgggacaagggtcccgtgtctggggcattgggagtctggtgaggtgggggtgggtggtgagacacacacagctttaggttcctgggggggtaaggggattgcgggggatgctcaaggtcctgctggcatgccctctccaggggaggtggctggggagggttagggatttggctccctgggctgtgtgtgctgtgagacctcaggctgccttctgcactcagagtgcagcactctgggtgcagcaccaagagctggggcaggggtccaaggggtcctggagtccagggtgactgtgtgtgtgtgtgtgtgtttgtgtgcatgtgtgcgtgcatgtgtggggctggggtatgtcttcctctaggagcagcttctgagcccacccttcacttctgtgtgtgtctgtgcagcatgcggcgcagatggagcagaagcaaaatgacacggagaacaagaaggtgcatggggatgtcgtgaagtatggcagtgtgatccaggtgaggctggcctgcctctctcccgcctgcccctctccctgcctaagaggctgggctggtgctgggtgagggctgccagcaggcattgccctctgtgcatgtgtgtccccgggtgaatgagtggccctggggccacctgtgtggctgtgcgtctgactgtgtgtgtgtctgttgctgtgtggcctgagtagctgtgccatgggtgtgtttacagcatggtggccatcagcatggagtctggagccacgttgtctggattcaaatcttggctctgccactcctaatggtgtaacttgggcaagttacctaacgtcccctggcgccttggtttccccatctgtgaaatcaggcagtaatagtacttccctcttggatcgttgtaggttacttgagctaatctatgtaaagtatttagaacagcctctttcttgtgatcaccagggtgtccatgggggtgtgcctgttgtgtgcacgtttgtgtgtgattgtggttgtgaatgtgggtgtcagcctgtatgtttgtgacaggtgtctgacactatgtgtgcagccagaatgtgaccaagggtctaggggatccccccatatcccctccctaatgggccgactcctgtggcgcggtgaccttcccgcaccccacctgacccccagctcctgcacatgaagagcaacaagtacctgacagtgaacaagcggcttccggccttgctggagaagaacgccatgcgggtgactctggatgccacaggcaacgagggttcctggctcttcatccagcccttctggaagctgcggagcaacggggacaacgtgagggcagggccagggttggaggggcctggtggaactcccgaggggcttctgtagggtcttcggtgtggggactggataagggcatgcccatttcttagaagggcagactgagaccaaagggaggcctggaggcgtggtgacaagagggccctgcccttcccacctaacctgtcccacctgtctgctcaggtggtcgtgggggacaaggtgatcctgaatcctgtcaatgccgggcagcctctgcatgccagcaattacgagctcagcgacaacgccggctgcaaggaggtgagggggtggggggtcagccatgcagtgcagggacgtccacacacccctggtggtgtagacaccccgctccctgccatggtctctgcctccagccccatctgacctgccggacaagctgggcctcacggcttctgca

SEQ ID NO: 120334 - DNA, 1013 bp, Homo sapiens
tttcggggctgtcctccccgcagtgtcctctcagcccccaggctgtgtagctgctctcatggtttcctacagaaaattctcagtcatctccccacacagctcacctttgccctgacacctccttcttttcccagatttgcttaaagctcatgtcctccaggaagccttcctgggttagccctgtcccttccttagcaaggctttgccctgcagctgacataaacagattatgcatcctctgcctccctcatcagaccagggacccctgtgtacagcctctacaacctccttggcaacctcctctgcttccccctccacaggcaagaatgtgcggcggtccatccagggcgtggggcacatgatgtccaccatggtgctgagccgcaagcagtccgtcttcagtgcccccagcctgtctgctggggccagtgctgctgagccgctggacagaagcaagtttgaggagaatgaggacattgtggtgatggagaccaagctgaagatcctggaaatccttcaggtgcctgggccaggaccgtgtgggaggtgttgggtatagggggagggtaatggggcgggtacagggaggctgggcagggcgaaccccttcagatctcagtatttagtactggaagtctccatcgtgactggctgtcaggcccagcggttcccacagtgtggttcttgggccagcctcacctgggagcttgttagaagtgcacattctcggttgtgcgcagtgactcacgcctgtaatcccagtgctttgggaggccaaggtgggaggactgcttgagctcagagttcaagacctgcctgggtgagaccccgtctctattaaaaaaaatagtaataacgataaataaataaaaagaaaaacagaaatgcacattctccggccccaccctagacctactgagtcaggaacactggagaggggccctgtgggctgtgttgtgacaaaccctccaggtgattctgaggtgcactgaagtctagttcaattctcccat

SEQ ID NO: 120335 - DNA, 1018 bp, Homo sapiens
tgactcacccatgtctgcaagccctgcatcctcacgtctgccccacagtagcctctcctcctccctcacaggcctcagtttcccctcccatgagtatccagggtctgtttggctgagcaggataggaggacaagagtcagtttttggacctgggggcttcattccccttcctgtcagtgtctagcttgggaaagagggactgagtgggccgggcgcaggggtgctcgctgcctcatgctgagaggaggccctcatactccatcactggggcaggagctggggagagggcaccctgggcctggggagaggggtcttgttttcttgctgtgacatcctggagcatcccaaatgactgtgctgaggaccctgctgccccaagtgctagagcctatttgggggctccctgccccctgccccccataaagtaggaagggccttctgacctcagatcagtcctcaccccatcctcacctgacctttcctctcttctccagttcatcctcaatgtccgcctggattaccgcatatcctacctgctgtctgtcttcaagaaggagtttgtggaggtgtttcccatgcaggacagtggggctgatggcacagcccctgccttcgactctaccagtaagcccctgccctgccttcaggctgaggctgtgcgactctcccagggatacacagcagtggggtggagccagctcctcagccctgctcctttttctagtctgcaaaggccttttctttccactgtctcatttaattgcctcagtgagggggaagggcagggatccttcccttcgttttccaaatggggaaactgaggctcacagaacagcagggacttgctcgaggtgacagccagtcagaggctgagccagaccgggatctggtctcctgactcccagcctggatctctgccccctttgtactgccctgcaggggagtagggggctgtggctcctcccctacttggttccttcccagaaaggggcaggcagagcagctgctgtgcagccag

SEQ ID NO: 120336 - DNA, 1047 bp, Homo sapiens
cagggccccttacccaccacggacagcagggagtgtgccagtctcacccatgcgccctgcacccttgtgcccgcaggaagacaagcagcatgctggaggtggatgacgagggcggccgcatgttcctgcgcgtgctcatccacctcaccatgcacgactatgcgccgctggtctcgggtgccctgcagctgctcttcaagcacttcagccagcgccaggaggccatgcacaccttcaagcaggtgacgggactacctggccctggccctgagcatgaggcctgcaccaggcacggggggacagtaaacgatgattgaggagctcacagctcaaggggtaacttgggatgcccatttggggttttcagccttgctgagttcctaggtgaagactgagtctcctggcctggctcagtgcctgccatttcttatgatgtggacagcactttacagcttgcaaactattatatgcacctatgctaaatgctttgaatcatgcctagcatgcagacaaccctcactgacgtgactggcatttgctattgtgatgtcacgcagtcccgacagctccctgtgaaatatcaataccagtcggcgttggcctttaaaaaaataagtgcctgccatgtaccaggcactgagtactggacttgcattatcgcatggcattctcacagcagccctgacagtgaggttactactctccctcccattccagagcggggagaaatccaggcccagggagctttcctccattgcccacagacccagagcgaggatggtggcagtcagacgcaggcctgggtctttcagggttcagggctgccaatatgttttgccctgcctgtttggggtctcagtggataagtgacagaccacagccacatgtgacactagtcagtgagtaactgaagccaggttatgtggcagctcagggcaggcagtgcagggaggcctgtggccagcagggaaggcttcctggaggtggtgggcttatggcagagccagaaacattgagtgggaatcggctcggtggagagggacaggt

SEQ ID NO: 120337 - DNA, 1183 bp, Homo sapiens
tgtacagtgttagttttattaatttctattattatattactgcgaataatgcagtcgctggcacgagaggtgtgtgctcagtgaggagggtttaagtaactgctgcgggagcacaggggagggagggggtgagcaaggcgggattagcgaggcttcctggaggaagctgcctctgagatgacccctatgggacttctttccagtggggagaagcggggactttctgggtcatggggtcaatatctctgctggcagagggcctgagacatcagctggggaacccccaaatcccagccaggggagggttttcctgatttcaggtaagggctgtggtcagagtcccagtttctccctggtaagcaacggagaggagagcccagggcttgctggaccgagagagtgtgacacgtgccccctcccacccgcagctgaccaatgcaggtgacgatgtggtcgtgttctacaatgataaggcatcgctggcccacctgctggacatgatgaaggccgcccgcgacggcgtggaggaccacagccccctcatgtaccacatttccctggtggacctgctggccgcctgtgccgagggcaaaaacgtctacactgagatcaagtgcacctccctgctgccgctggaggacgtggtgtctgtggtgacgcatgaggactgcatcactgaggtggggatcgggagactgggcaagacggctggagatggggcgaaggggtgggtaaagccacgggacaggaagagtgggtgaagcaaagccagggaagtgggcaggaaccggaggccaggggacaggagcattgtggcagggagagcctggccaggcggccctgcttgcgcccctgacctcccgcccactgcccaggtgaaaatggcctatgtgaacttcgtgaaccactgctacgtggacacggaggtggagatgaaggagatctacaccagcaaccacatctggacgctctttgagaacttcaccctggacatggcccgggtctgtccctgtgaggggtgtgggtgaagccccccaggaggtgtgggagtggaggggccccatgtgaggagcccccagccatccctctctcctgcctcaggtctgcagcaagcgtgagaagcgcgtggctgaccccaccttggagaagtacgtgctgagcgttgtgctggacaccatcaacg

SEQ ID NO: 120338 - DNA, 2027 bp, Homo sapiens
ccctaagctcgcccatctcctgctcccaggtggttgtcagtaagttcttcttggcgtctgcctcatcctggcaattgagagaagctgttttctcctctgggtcagttccccagagaaggatgctcgccgacattctccagctagttttttatgggtatttgcagatgggctcaggcaggagcaggcctgtggattgttagggacagttggggaagaagagaggacaggtgagagagaggaaggggaagtcagggtagagccggggggaatcaaagaggcagaaactccttttacccaacaaggggaagaaagcctctcagtccctcaagcataggccggggtggggggggtctctgtctcccagacccttggtctagttcactctgtctcctggtgtggcagccctgagcctggcctctggctggctgaactgcccccgcaccagcactccagcactccctcccttcccacccagccaagggccgggccatcttgctgcccatggacctggatgcccacatcagctcgatgctcagcagtggagccagctgtgcagctgccgcccagcggaacgcctccagctacaaggcaaccacgcgggccttcccccgcgtcacccccaccgccaaccagtgggactacaagaacatcattgagaagctgcaggtgggtgtggggctgcctggcatctgcctcgggagctgcttggttgagtcagcagctcccctactttggaggggcaagttctcggggagtgtttcttcctgtcctgcccacacttccaggaaggggctggttggcttctctacactctggggctgctaagggccgacccagcagcaagggactggggaacctccttccagaggaagcctggagaacccagaggcctgctagtggggttggagctcatgagggggtcgggaccacccctcactcctgcagcgccctcctgtctatgcagcacatttctgtgcgctgtctcgttggcctgtagagggggtgtggtggattattttccccacgtggcaggagactgaggctcagagaggctaaggggtttgcccaaggtcacacagagctgggagagaagccaggcttggcagctcccagccagggctctgagcagacagacatcacgctgtgttcagggtgtctctgtgggtgtgggcccctcagacagaggcagggcaatctgtggggctgtttggcgtttgggtcggaggaatggcagtcacacccgggtcatttcttgggcctggcaatgactctgccctgcccaccccaggacatcatcacagccctggaggagcggctgaagcccctggtacaggctgagctgtccgtgctggtggatgtcctgcactggcctgagctgctcttcctggagggcagtgaggcctaccagcgctgcgagagtgggggcttcctgtccaagtgagcgagacactggggcatgggggcagcaggggtgcagcggcaggggacagagaagggcccggtggggactagacaggctcactgggtcagagggcctgggggtgttcctgcctgggatggggtggggaagtagctggagggaggcagtgtggggctgccctgagctgcctccttggccggctcaggctgatccagcacaccaaggacctcatggagtcggaggagaagctgtgcatcaaggtgctgcggaccctgcagcagatgctgctcaagaagaccaagtacggggaccgggtgagtgccctggtggggcaagtgctgggtgggccagtcaggagtacccaggggctcagggtcaagcccgtcaggccagtggtcagtggtgggctgtacccacaatggggcctcactcccatcctcccccagggcaaccagctgcgcaagatgctgctgcaaaactacctccagaaccggaagtccacctcgcggggggaccttcccgaccccataggcactggtcagtatcaccttcccctgcccccgggccctcccttccactctcctgtcacaccagctctccctcaacc

SEQ ID NO: 120339 - DNA, 1050 bp, Homo sapiens
tctgctgtctgggtagctgagtgtttgccacagcgggggtgaaggcaagcctatgggtgggctggctgtgcaggatgcttctcattaagccggggggagggaggatgggaaggtcatggcacctgaccttttgttggatgggagagctgttatggagaggaatgagggagaagttgtcaggggcatggtgtcctgagactgtggcctgcctccctctgcccctccacccaggacaatgcctccaagctgctcctggctctgatggagagccggcatgacagtgaaaatgctgagcgaatcctcatcagcctgcggccccaggagctggtgaggctgggcaggtgggcaggcgggcggaaccaggtggagtgtgttgggatggggatgagggcccggctggccctaccgccctaggaagagagcattggaacaggcactgcccctccaggtggacgtcatcaagaaggcctacctgcaggaggaagagcgtgagaactcggaggtgagcccacgtgaagtgggccataacatctatatcctggcgctgcaggtaccagttccacccgtggcaacggccatcacccccctggccaccataccccgccccagctgccatcatcccccagtcgccattgtcgccccccagccaccatgtcccccagccaccacaccctggtgactgtgctgccatttccctcagctctccaggcacaataaacagctgcagcacctgctgaagccggtgaagcgcattcaagaggaggaggccgagggtatctcttccatggtgggtgctggccccgagactggggtgggggtggggcctggaacccagggaggacacttgacccaagggcgtggcctggaacagagtgaggccctagaatatgagccaggctagaatttgggggtacagctcagggggctgattgggactggcagccgtgggtgaaacccagacagaaatggaagcaaggctcaggtgggtctagggtgggtctggaagcttcaagcaggacccgggctacacttgggcaggactgaggaggc

SEQ ID NO: 120340 - DNA, 1695 bp, Homo sapiens
ggcgtgaccatgtgctgtgtgtgctcagattgtgcggcaggaccgcagcatggagcagatcgtgttcccagtgcccggcatctgccagttcctgacggaggaaaccaagcaccggctcttcaccactactgagcaggacgagcagggcagcaaagtgagcgacttcttcgaccagtcctccttcctgcacaacgagatggagtggcagcgcaagctccgcagtgaggacccacgggcgggagggtggggcggtctggagctgttcactgatgccctgttataacggcctcctttgcctgcctgtgggtgccctgcgcccaaccccgcctcaccccaaggaagggctcttccatgtgtggcttcctcctgagcggggccccacatgcaaggggcagggggtgctcaccagggccctccagcagctcaccgttgccctcctcttcaggcatgccgctgatctactggttctcccgccgcatgaccctgtggggcagcatctccttcaacctggccgtgtttatcaacatcatcattgccttcttctacccttacatggagggcgcgtccacaggtgagaacacagggctggccggcaggttccccgggccctgccatgcttcctccctgggttggggcagagccttgaggccagctggcctctgagggcaccagatgcagagtgtgcagaagcaccccctgcgccatcctgtgggctctcgccccatcatggagacacaggtgcggtcaaaggggatggtcagggtctttgacctcatgggagatggcgcatgcaggcacgtgcacacgcatagatgtgtcagccagaaacaaaacctggtagccgcagccggacagggcctcccgcttaggcctgagaggcaggtgtaatggaggaggctaaaaccaggcaccaggaacttaaccgggaaggcggccaggagaaggtggcttttcggcacctgttggacctgctctggggccgtggtgggcttgagggagccctgctcaccctgcccctggcccccaggcgtgctggactcccctctcatctcattgctcttctggatcctcatctgcttctccatcgcggccctgttcaccaagcgctacagcatccgccccctcatcgtggcgctcatcctgcgctccatctactatctgggcatcgggcccacactcaacatcctgggtgccctcaatgtgagtgccagagggagcccccattcccaaacaagctcatgctcactgtgcattcagacggcaagctggcctgctgcttccaggagccactgctctgtcccatcccctcctctctgttgggctcccaagttccttatagaccggtggcagggactgttctgtaccttcttcctttccctcaacacctgagggcagctggcactcagagacagaaattcaagagtccctttggagcaacagggtcagggtggctgtgcacactgtgcgggctgtgcactgcccagaggcactgctacgcggcagacgtgaagattcatacataatgacaatctcctgacagatggaaataaagtgctttgagcgaggaatacctttccctgatagagccagtcagtggtcttctctgtccccatcctccgttgcctgtacctcactgtcttcctggaactgaggacccaaggggctgcctctgtattctgagtcccaggcgcctag

SEQ ID NO: 120341 - DNA, 1048 bp, Homo sapiens
ctggagtcccttgaactgtcattcatgttaaacccagtatttgcagaaactgcccgtgtgccaggcctaggggtacagagacccctccctgcccttagtgtgcaacccagtcgggggcagaagcgtgatgacccttcactgtggctggacagtggagggctggcgatccaggaccagggaaggtttcctggaggatgtgacactggggacagagccaggggataaggccaggcactggacctcctgatgatctcatccatatcccctccagccagccccctggggatgccacatggagctgctgcatttgtggacacctgcagtggggacaagatggactgtgtctcagggctctcggtgcctgaggtcctggaaggtgagggtggtgtgtgtgcaggagtctgtgtggggtaggaggagcaggcagcccgggcctcagcacactctccgcttgcagaggacagggagctggacagcacagagcgggcctgtgacactctgttgatgtgcatcgtcactgtcatgaaccatgggctacgcaacggtggtggcgtgggcgacattctccgcaagccctccaaagatgtgagcactcctgcccactcccaaacctgtggggcccaagccactgtccagatcagcaactgtggagagtcctgtccttggcctcgcgtcagatattcagggttgaaccccctcccccgaacttgtatccacttttccctgctttccacacctggccaattccatgatattactgcttagctgccccctcaccctcccattccataaggaaagactttggcaaccaaactttgccccagggctagggatggtgaccactggctttcctagcccacagcaggtgggcagagggcggagctgagtcagctttatcaggaggcctcatgatttggcttgggcagccacattcccgaatgtcaggccttcccctgttgcttgggagtgagaggccgcctccctggccagacagagggtttctggaatgtgtgaggccaggcgtcctgagggtgggcagaggtgttca

SEQ ID NO: 120342 - DNA, 1071 bp, Homo sapiens
agtcagtgtctggagcttctggtctcagtccagtgcttttcctacccctgaaatgaagtgctagtcccctcaccagccacctcgggctcaggcaggtgtcacctgtatggcctgtaggacctcgctcattcagccattcgggcttcccctgagttcgagaaattctcgcgtttactcctggagtcctcggttgctgctgcgggagggctgcagctgcggcagggcaggatctccactaagtggctgctgctttaaatagaagtgacccaaatagcccagagcgagctgttggaagcgctcatcccgagaacaaatgcctccaacccccggaagctgggtcccctccagcaggtgaccctgcagtggctcttgaaggctgatggtttcattcccgccctctgcaccctcaggtctggagagggacaagtttgataacaagacagtgtcatttgaggaacacatcaagctggagcacaacatgtggaactacttgtacttcattgtgctggtccgcgtgaagaacaagaccgactacacgggccctgagagctacgtggcccagatgatcaaggtgtgagcaggggctgtgccaggcctgtgggcccaaaccagccattctagagtcatcactgtgcaccagaggcctcatggttttagcttctgagtaccctgggccctggagaggagtggccctatctgactgttggccctaggaggccaggcagaggggctcggacagctgcagacacttgttgaaaggtcagcagggcgaggagcagcagctggaagcagctctgggctgcacggaagccgctgctgcagaggggcctcctcacacttctgggtgtcaggaaaaatcccacagcaaacccatgcgccccgaagaacacgtgtggtatccctgggcctgtcgtgcagtgatgctgaggaggggtggagttggggagaccctgcccgtggccagtgatctgtgggccgctctcagggagtgttttctagctcggtgggaaggcaggctgcttcctaaaaagtctgaattagatgatcctgggctgaaggggagcctggaaa

SEQ ID NO: 120343 - DNA, 1047 bp, Homo sapiens
gtcctgggaaacgtggctttgcctcccagacacgtgtcagatgccagctctcctcagcggagcctcctgatccctcaatttgccatctgtctgactcgcgtcttcccggggcgtggggcgtgcttgtcaggcaggcgggcgggaggaaggaaggaaggagatccagggtctgtctgggtgcagaggccttcctccacctctcagggggtgttatgagagtaaacagatggtgctgataccagcaaaggactcaaactcagctgccgacgctgcctaacggaagtcagcctgtctcggtggcagagggttgacaagagggttgactgccagctcactctggccccggggaggaccaggtcaattcagattttcccatgacacatccctgacgagtagttttgttaagggtgtggcagaagcctccccccacattactgtttttctaaatgaggcctttctaggccgggcccacgcctgcttaacccactggtgatgtttttcagaacaagaacctggactggttcccccggatgcgggccatgtcccttgtcagcaatgagggcgagggggagcagaatgagattcggattctccaggacaagctcaactccaccatgaagctggtgtcccacctcactgcccagctcaacgagctcaaggagcaggtgtgcaccccgcctgatcccaggcccaccctgggttctatccctgggcagtccctgcctgccttcatccttcctgacccaccctcttccccactggcctctggccctgggcctggatgagaaggcaggtgccaaacccactctcccctgcatggcaagtcagactggggttgacaacccctgccttgggccgctaaagacaaggccaagtggaaactttagtacagggtggtggggccctctgtctctcatccccttcctctgacagctgccaggtaggtcctttgaggggatccccatcactggagatgggggagtttaaggccctcttgcctagacatcctcttctgcatctggcagtgcctgcatgaagatgaggcag

SEQ ID NO: 120344 - DNA, 1050 bp, Homo sapiens
ccttctgcttgctgaccttctgcttgctgaccttctgctgtgcttccttcagaacctagcattgtctcacttccatcatgcactgaccacttgagcatgcggggactcccccactgagtccctgtagcccactctgcccagcaccccctttgttaggcacgcctttccaaccttacatttctattgtggcatctcccactgcagctggtgtcgtggctcacaagtcacagatgctcaacaaatgcttgtttgctgattaattgatctgatttttctgtaggttggggagttgatgaggcagagctatgcctccaaaaagtagtttctaatagcagagctgtagtccaggtttgcttcccgcagagtggagaagccagtgctagctgcaggcctgcttcatgtgaacgctttattaagtatggtctttcctcaaggtacagacactgtgggaggcaggactcctttgctcacctcctttgggattctttgcttttcaggttgcagagcctgaggcctgtgatcagatgtacgagagcttagcgcgactccattcaaactactacaaacacaaggtgagtgggccacagtcttttatatacccagctttctgacgggacaactaataagaatgagtgaaaatctgattaggtaatgttttgtaaagacttggctttgctgcgttcaaatgaaaccagtaatttcaaccaagccaacagaggtgcctggtagaggcttttaggccacctaaataaaagctatttaaaattgtgaatatagggaagaaacaaaaccaattatgaatagaagccatgtatttgatatgccagtgtgtgctcctgggaatgtctgacagccattggatttatacctattttcccatccactctgacggaactgacacctccccacattctggtgataaagatgggatgattgggaaagtgccctccttttacggagctgggcccaacatgattactgtcaaattccatttagagtggtttttcccatacttgaaaaatatgctcattaactccacaaacatttgtg

SEQ ID NO: 120345 - DNA, 1041 bp, Homo sapiens
ttgggcccagctccgtaaaaggagggcactttcccaatcatcccatctttatcaccagaatgtggggaggtgtcagttccgtcagagtggatgggaaaataggtataaatccaatggctgtcagacattcccaggagcacacactggcatatcaaatacatggcttctattcataattggttttgtttcttccctatattcacaattttaaatagcttttatttaggtggcctaaaagcctctaccaggcacctctgttggcttggttgaaattactggtttcatttgaacgcagcaaagccaagtctttacaaaacattacctaatcagattttcactcattcttattagttgtcccgtcagaaagctgggtatataaaagactgtggcccactcaccttgtgtttgtagtagtttgaatggagtcgcgctaagctctcgtacatctgatcacaggcctcaggctctgcaacctgaaaagcaaagaatcccaaaggaggtgagcaaaggagtcctgcctcccacagtgtctgtaccttgaggaaagaccatacttaataaagcgttcacatgaagcaggcctgcagctagcactggcttctccactctgcgggaagcaaacctggactacagctctgctattagaaactactttttggaggcatagctctgcctcatcaactccccaacctacagaaaaatcagatcaattaatcagcaaacaagcatttgttgagcatctgtgacttgtgagccacgacaccagctgcagtgggagatgccacaatagaaatgtaaggttggaaaggcgtgcctaacaaagggggtgctgggcagagtgggctacagggactcagtgggggagtccccgcatgctcaagtggtcagtgcatgatggaagtgagacaatgctaggttctgaaggaagcacagcagaaggtcagcaagcagaaggtcagcaagcagaagggagaagggcaggccttcctgggggaggagatgccgtcagcaaggaagaggaggcaggaatcctgtgggatg

SEQ ID NO: 120346 - DNA, 1004 bp, Homo sapiens
aggagaatcacttgaacccaggaggggagtttgcagtgagccgagatcacgccattgcactccagcgttagctcttggctgtgcgtgccctgctgaagaaatgttccagatgtgttcgcccagatgtgtgcagaattccattctaatgggactttccctggacaagctgaccagcagcagggagaccacagcctcatattttccattcattctgtccactcagataatgactttattattcagcaaacgctggccacctcctcaggccataatccttcctcttctgatgtatctgggtgtacattctcatgatgagtagcctgaacgcaggaatgggtcaggtagaactaaatgatggattgtcttttttgtttgctgtaaagtagggacctcatttgacatgcacagagaggcagcagtggagctgcctattaaaccactttactactgatttatttatgctctgccttctccaaggaaggatttaagttaggaaaaaatccatcatttgaattctgggggaaaaaatataaaagagaaagttttgttctggggagcttttcaaaattcttggcagaaaaatataaagaactatacataaataataggaaggacagagtaaagggaaagttagaagaggtgcaagagaaaagaccacacctcctctgtatgctgcctgtctccctgagaaggtccagcaggggcactgctgtctctggcaccagagaattgacttacatcaccctttctatggcaaggcctcagtgttctgggccatctcctttctagcaggacctaactgtggtcctggcttggttctcctcagtttacacattttatcttaaatgttgccttcttcatgtttctttccttcttgtagagtttcagcagctccccacttatcatagattgagaactcagatgattttttttttttttgcctttgctaaaagaatctgttggtctgaggccgggcatggtggctcatgcctgtaaccccaaca

SEQ ID NO: 120347 - DNA, 1069 bp, Homo sapiens
ggtctcgtgcagcggcccgtgctccgcagatctggctctcacttacacattgccccgggcagggttggtttctaattcatgtgtatcttgtctctgtagtgtgcctgccagcttctccacagctggcctgggtcgtcgtctttgtggcccctcaccgtcccctagtggagcactctttctatagtaggtgctcaagaaatacattttcaactcaattgaagggaataggctcccataacagaatgaactcatttcagaagttcattaccaagtcttgaaaacctttttttatagatcctcctggaccgaatccagctctaccttaattagcaaagcaatttgcaacaccctttcccaaaagtgcttatgcgtccctttgtgtgactagaataggggccgctgtaccaattgctgtcaccacccaaaattcaatttgcaaaatcgaaatcagtgcctgcagcactgatgtagatttgtatgtataaaagtttaatatggtaaagagaaatttactgacgactgaacaggggaaatgcaaaaggagcaaaaatagagctataaaggacactcgtcagatgaacatctattttattcacatttggggagcagtgctgaatttttcataatgtccccactgctgccttttcaaacccagcactgctattagtcctaaaacgtctgtgatctcattaggtgtgaatgcaaaatcaggtaatttaaagcatgtattaagaatatttctaaaaatgcaccgtccatttcatcagaaaaactgcatttcagagctcaggaatgttagtgctggagtctgtgaataaagtgtaagctataggaacgtggtgaggcttctggaattcgacagatgtctccactgacatccttttaagtagtaagcatgacttttttaattgctgagcttgagttatctgtggctaggaacccagcattgaccaaggcttcatcactcctcaagcagtaagaacttggctagaaatgggcatgtctcaaactcctgtcacctccactgagctgcttttacagcctcagttagacaccttctgacctcaga

SEQ ID NO: 120348 - DNA, 1043 bp, Homo sapiens
cagctccagcttcttggcctcccccgtctgatgcttagctcatcccatcccctggagtgctgtggagcttagatgaaacagcccagtgctcactcttcaatgagcccacccagagcagcatcaagatgcagttggcggggtactggaactggcttggcaagggctgcgcaggcaacaggtcccagcaagagtcagctagcctagcacagccctgcacacctggagacctgggggtgctccagacacctcggccctttagctccctttaattgaatgtgtttggatcagtgaaggttgaggaatcatttctctatggcccaagacgtttttctcctctgcagttgtcatgttagtacctgccagcttttcctctcttacataaattccatgccagagcctggaaatgtgtgccctttgtaggaggggcatccacaggctggctcacctcggcagtgccaggcagagccccgtccctctcattgcaggaggcgcatgaagcgtgtctgggaccgagctgtggagttcctggcctccaacgaatcccggatccagacggagtcccaccgcgttgcaggagaggacatgctggtgtggagatggactaagccctcttccttctctgactcagagcgataagccccgggcggggacttgttcccggtcagcctgtcccaggacagcccactccagaggcacaggagggtcaccaggcctgcggtgctgaattcacacttgccttgactttcagtctcgtcctgacacgattccaaaggtctgccatactcttcagaggagttcggctcgcaggaaaatgtgggcttcctttaaagggagggggagaagccagggtgatagcccagactctgccctgttgtgctggcagaaacggggagaagggttgagttttcatgaatagaaaacaagagcagcagctgtcaggcccagctgacaagcgtggggctggtgggctggggcatggccacgccagggagtctgtcacctgggaggtggggcagggatggtgtttcgggtggcgggatggg

SEQ ID NO: 120349 - DNA, 1689 bp, Homo sapiens
tcatggatgccccatgatctttacacttaaacagcttatgtgcctccttgtcaccgaggaaaagtgcaacctcccagattctgtctttcagttcttgccatgcaattgcaaagctagtgattcagtaaacatttccatttctctatgctgggaggtgggaatccaatttacagtttaatctcctgcatgctgagagaggctgtcaaagacctgacagggggacgttgctttagcggtaggggttcaagcctgctgccgtctttaaagctttattcattctaagtagccaatgtgggaaatttctggaaagaatgcagccaggataccaagcctattctataagcaagtagaggccttgcgtccccactttccttcgcttcctcctgtttgaagtggggcttgcactgcctctccttggagctttccaacatgttcagagccctgtgtcctgtttcaggttgaaaggagaagaccagtctgaattggtgacgactgtggacaaggtggtctgcctggaatctgcccacccccgcatgggtgttggctgccgcctgagccgggccttgctcactgctgtcaccaacgtgctcatcttcttctggtgtaagtcctcggccgccttccctccccttctgtgcagtcaagcatactcctaggcatgaatgatgagctatagaaattccaggcccggagggttcatttctgtctagtgaacctgaggtctgtctcataaaacagaggagatgaacaagtcagcctctgccctgggttgtatttacctttggagattggtggcaggaatccgtgaggataactagaaaatgtccttgattcagggcaggggactgtcagatttcctgagcgggagcctggcctgagcaggagctgggccccaccccttctgggctctgcagggatcccagtgtggaccagcttcgagcaggaggcacagcaggggcttggcctacttttactccctgaaaaatataaacatctcctggagagctacagatacctgatgaaagcaagaaggactcagggtgctgcactgaaaggagggcaccagtcttatcccctgacatcgggggccgcctttgagcagagacctcagggcgtctctgaaggcgaaaggccaagtcacagaaaccacggctttccagagatagttggagctacaaatcacagaccgcctcagtgtgcacacagctccctcccctgtgccatcaggcacagaaatcattatcggcagcagcatctcggaatacaaagggccccggcatgtatatatgtatgaaacactgtgttctggttcacaagggaggagatgaaagccccagaatgaggttgggaggagccgagatctggacggctggggatgccgctgtggtgacagccggtgggaggaagatgatcacttaataatctgtcgtccctctgcatttctgtatcttttgtttctcgcatgctggccctgagcctgacacatagtaggtacccaaacccatgtggtggatcccccacagcatccatcacagcatcttgtccatggtgagacccactgccaaatgaagtgtgagggattaacagtgttttgttccctcacaggcttggcttttttgtgggggctcctaattctcctaaaatatcggtggcgaaagttagaagaggaggaacaagccatgtatgaga

SEQ ID NO: 120350 - DNA, 1997 bp, Homo sapiens
gccccactgcccagcacacagacatcctcttcctccaaggggcccctcaagacaatagacctggcattccaggtcgcctgcctgtgtcatgagtcagaatccccgtggtgcccatggcctccctgcctttcttttttctcaggctgtgtttatttatagtgccattccggtaccttccgaagctatctgtctgattcttttagggatcaattgcaaagagaccttgctattgggcagctttttagtcatttaatgcaaaatgccacactgctttgcaggtcaggttttaatgatctggaatcgatccaagctaagtggcttttgatcttgctgcagagtgaagatgccccacagaagccaggagccgctgggcaacatgctccttattagagctgatggcttgattcttgctgcattttttagtctgtttcagagtgatttttcctttgtgtttgagcatgtgtggttttttttctcctaggtaattttgagtgtggaaatccagagaatctaaaaagcaaatgcattcctgttatggaagcccaagaatatatagccgtaagtaggcttcagtgcttatacattcctgggagggcctggtgctttcctattggtctttcaagccctgttggggtttttgttttttgtttgctttgtggcttttgtactaggctaccttaagttaaggtttggtttatggctttttgtgctagactaccttcagttaaggcagccatggtagtgactgccccagagccaggccgccatgtgcagtggggcggctcactcctgactgctgcactgtaggtgtgcctgttacctgcttctcccttggttcactttgctcgtcttgccttcggctttcaggagaaacatgctgtcccttctcccccgtatgattaccattcagactgcccaggggccgtctgatttcctgtgtggcctcaggatggtagattatagaactatggagctggtattccaggtcgcctgcctgtccagtaacttaggggtcatctggttccatttgcatttcacagatgaagaaactgaggcctggagagggtcagggacttgcctgaggccagaccacttgcaccggccactgggctcacccacccccagccacaacgctgttattcgctttaccctaagatgagctgccagctctctggcctgatgcttccatcctcgagagaatcatattcttttggccgcctcagacccgcactgttttcctgcttgtgcttccgcatcacctcctctggttatagcctcttccttggctttcatcaacccccgatttccttcctgccactttgctgtgcttttagcagaacagggttttggggctgtggaggacacgggagagggcttccttaatccagcagcagaataatgttccagctgctccgcccagacgccgaactaaccttctcccgcgccctcccacagaatgtgaccagcagctcctccgccaagtttgaagccgcactgacctggatactgagcagtaacaaggacgtgggcatctggtgagtgtgggcagggtggcgacgcagcatgggtgcctgcaaccactgtcctcgctcgtcagctaacacccgtgctccaacagagctgtctcaggtctgaagctggaggctgggtctcccagcagaatcatgtgggttaggatggaagtggggcaacaaaagcaagaagcatttggaatgcagtgtaaggagcagcttcaagatgagacacaaaatccaggtgttaggatgttagcctggtgttccagctaaatcctgtctcaggtaactcagtctgtgcctttctcattcatcaacaacaccacatggtttgttggggaaggcatttttctgcacttcccctcctcgggagctagtttttatttgtagatgaaattattctttctgtatgttggttttacttactatggaaatcgcataaggaaatactggattttattctgaccaggcagtttctgcctc

SEQ ID NO: 120351 - DNA, 1734 bp, Homo sapiens
tggtaatgctttactccctccaaatgttgtgagtagtctctttttgtattcctttctcaacccacacttaatttcctctgtgtttcttttcttggtctcagtgaagttattgccagtggactgtgagagaaaaacagatgaggtgagtttgagtttctctggtttttattattcttcctgaggatattagcctccatcaggaggtaaacttccccagaaaaagaataggatcattttcagggagtgcttcctgtaatgtaccagagtcacattgtgttctgtgatgttcttgtcaggctcaattgtggcagtgaaggaatacttgaaatagaattgacctcccaaaatccaaccctgggcttgttatggacactttcccatcaaatgtagcatcggggactttgatctgcctgagtcaatctagggggatgcagtaggttgttgttgaaggaccctcaagctccctggcactgggaggaagggccggcgtttctaagcatcaggaggccaagttctcaattccacattctctgtctccagtggtgcagctgtggctctgaaaatgctgttctgatttgaaacatagggagtttgtttggaacacatcttaagtggaattagccctcttagtctacatttagatttgttttatgaagctctaatatggcgagcagccccatccatttatgaatcatgaaagcagcattatcaaggagctgggatgctgcttctggtgacagtctggagaagatatggggcagtaaattttcaggtcttaaattgtaccaggaggagtcttgtgctgccagagggcatgacttagtagtctaattaagtgtgcaatgcctggcctcccaagtccttagttaacatctctagtagcccaggggctgggaaagaaaatgacgcatggtcctctggccagccctgcattgactgtcttactcatgtaaatgagggggcatcctggtgcagataacggcttttatttctctttggcttcgggtgtgtcatagttgggggtgttttattacatccatttattggattcatccaccaaatatctttgcttcccaattgttttgtaaaaacagattcatagtaagtttaatctgccttctatcataaaaactgtagttgatgatgagaggaagtggcccagaaacacaggcagccagaggggaaactggaatttgaagacttaaaacaaaaacaggaaaaaataactttctgtaagacttctcagtgctgttagttttgtcttttaattagaaaaaagttccatggtttctatttcttggtccttcacatctctaaatgaatcagacccacaagtgaatggcacatttgttccctggccttctctgatctggacacactcaggctccacttgagtgagcccagacaggtaccctccaggtcctagctacagatgcgctccgtgggcagacggcattcagcacctgccagcgagggcttcagacgcagatatccctatttgtaaccattcagaccttcatcagagcatcagaaagcaggggctgggccatctcaatgcaggctttgtggagctaagatttcatggggcacccttggcctttctggagggtggacacaggaacaagcaggtggggacgtgtttcttggctttggtgaggctcttgctgaaagtcttattctttgcatggctccaggcttaccgagatcacagacgggcatttgaatttcagattc

SEQ ID NO: 120352 - DNA, 1044 bp, Homo sapiens
cttggctggagccccttttcatgtagatcatggggtcaaggtctgccttgctggggtggggtgagcattaaatagacaatggatgccaagaggctggtgtgtctggtaggtgctcaatccatgctgaggcgtttccccatcttgactcggttacctcaactgtaatattaatgtaaggaagggggtaggccatgctggggactttggaggcccctcccaactctcttagtaccagatacagggaggagggagttttctgggtgatgacaaagggcttgggggtgggaccagaccaagcactgtgcacgtggggtctcctggaggctggcttcgtggaccctgaaatgtgttgaagctggattcaggtccaggcactctccctccctgctgtgctgtgtgcttcttgggcaaagcacaacctctctgtgtttcactttcatctactgatgactgggcatatttgtctcttccaatccttcacttcctggttgacctgagaattgaatgagacatggatgtgaaaatctttcttcaacttaaatgtcatctccaccaaggacgggaccagctgtctgatttaggtttgagttgccaacacctgaaggtgaaggagagccaggcctggggttgtgtgaacccaggggttgcaggatctaacccatgtgtggagggtttggagaagccacctgcatccatacatacctacacatgcgtgacgctgttcgtgtcattgcacccctgctggcctcgctgttagtagagtgactgcctagccctgcacctgagacacaatggtgcttactaagagcttgcaaaataaatggatttgtgtgtgagaagctctggcttaaaaagggagaaaatgatcaaaggggtagagaaaatcaataaggatggaaatatctcagcaaggaaggcacatctccaggtagaaatatggtctgctgtttgttcagctgttagcagttgctgagagctttccatgggggatatggagatggacaaggcactgtccctgcccttcaggggctcacagctacatcg

SEQ ID NO: 120353 - DNA, 1109 bp, Homo sapiens
cttggaccattgcccctcccggccccaaaccacaggggctcaggtcgtgtgggccccagtgctagatctctccctcccttcgtctctgtctgtgctgttggcgacccctctgtctgtctccagccctgtctttctgttctcttatctctttgtttcaccttttccctctctggcgtccccggctgcttgtactcttggccttttctgtgtctcctttctggctcttgcctccgcctctctctctcatcctctttgtcctcagctcctcctgctttcttgggtcccaccagtgtcacttttctgccgttttctttcctgttctcctctgcttcattctcgtccagccattgctcccctctccctgccacccttccccagttcaccaaaccttacatgttgcaaaagagaaaaaaggaaaaaaaatcaaaacacaaaaaagccaaaacgaaaacaaatctcgagtgtgttgccaagtgctgcgtcctcctggtggcctctgtgtgtgtccctgtggcccgcagcctgcccgcctgccccgcccatctgccgtgtgtcttgcccgcctgccccgcccgtctgccgtctgtcttgcccgcctgcccgcctgcccctcctgccgaccacacggagttcagtgcctgggtgtttggtgatggttattgacgacaatgtgtagcgcatgattgtttttataccaagaacatttctaataaaaataaacacatggttttgcacccgggctccacatccactgagggtcctgccatgggaccacaggctcagcctgcagctggagggcttagacctagagggaagcgggaactgggctctggagacccagggcttgggggctgtggagactgctccctaggctgggatctagtgtggtgtggtgaggccttgggcatggaggggccagattcccaggtaaggggcagggacattgcaggaaattccaggaatcagcacctagtagtcccctaattagggggtatgctctgtcccctgccctgcagccctgggagggtaacatttctgccttgcctgtcctctgtctcacacccctcacacctgggactgcccttccacccctgcccccataacctgtg

SEQ ID NO: 120354 - DNA, 1103 bp, Homo sapiens
taagagtcaggactcttgagttctctttgctctgcactgttgtttcctgtgactctaggttgtcactactgctttctgggctcagtttcttcatatgagtcttgagagtttcgggttcagtcaggattccctgtaggtcaattatgtctgagttatgccggagaccttttttaactccagctgttagattcagtaagtccctgtggggtccgggcagctggacttttagccaactagctgggtgatttgagtgtggggctacaaggtgccaccacccagtaggatggtccggggcaccgggtggcatgttctgaggcctgctttacggtgctgtcattgccagatagagcggatgcactggccggggagcgggcagcagctgccccgctccatctgcagcctgccctgccaaccgggtgagcggaagaagacagtgaagggcatgccttgctgctggcactgcgagccttgcacagggtaccagtaccaggtggaccgctacacctgtaagacgtgtccctatgacatgcggcccacagagaaccgcacgggctgccggcccatccccatcatcaagcttgagtggggctcgccctgggccgtgctgcccctcttcctggccgtggtgggcatcgctgccacgttgttcgtggtgatcacctttgtgcgctacaacgacacgcccatcgtcaaggcctcgggccgtgaactgagctacgtgctgctggcaggcatcttcctgtgctatgccaccaccttcctcatgatcgctgagcccgaccttggcacctgctcgctgcgccgaatcttcctgggactagggatgagcatcagctatgcagccctgctcaccaagaccaaccgcatctaccgcatcttcgagcagggcaagcgctcggtcagtgccccacgcttcatcagccccgcctcacagctggccatcaccttcagcctcatctcgctgcagctgctgggcatctgtgtgtggtttgtggtggacccctcccactcggtggtggacttccaggaccagcggacactcgacccccgcttcgccaggggtgtgctcaagtgtgacatctcggacctgtcgctcatctgcc

SEQ ID NO: 120355 - DNA, 1039 bp, Homo sapiens
acacgacccaagtcaaatgcagcctgggatggagcaggggtggggtctagaagctggaagtgcccatcctgtcgcccttggctatgtgacctgggctttcccaccagcctcagttttcttgtctttaaaatggcagcgggggcagatgacccccgtggtcctggtgtccctagtgttgtggttctatggtttctactgtccactcagcaatatctgagtacctaccctgaggaaggctgaaaatgggatgtggttctggctggcagggttaatgagcgaccaggccagctatcccccatccccacatccttgtgtgggtgtggccactggtgtggccaggattagagggtgtgaggggattagagggtactgcctcagggagaggcagtgagatcccctgcaccctgggtctgccttcagggtgtccaaggcagggggctggacacagtgacctctggagtccccggggaatcactgcctcatgtggacccagcttaaccctggcctatgggggcaggacacaggtgcaggtgtgcaccctgctgccctctggggaattgcctctgtgcagtgtggcatgtgccctctagctgagaggcacgggctaggagtagaatgataggaggagtaatttcctcgtcctgtccttgaggaagaaggccatgctgtatgcaagggctgtggtcttaggaggggaatccaggcttccctatctctgcccatcctcccccttcctcctcccagccatcctcctgccatgtcctcacttcagatccctggtcccctccccacattcctgcccacctgcatccctgtgtggcagagtgtggtgctcagggttggagttggagtacctgggttcacatcagcttttcatagtcgtggaatgttactgagcttttctgtgctcagggcttcagtttctttttgagatggagtctcactctgtcgctcaggctggagtgcaatggtgcaatctcagctcactgcaagctccgcctcccgggttcatgtgatccttgtgcctcagcctcctgag

SEQ ID NO: 120356 - DNA, 1024 bp, Homo sapiens
tcaccatccctgtgtgcaccaatggggctcatgcccctgagagcagccctcagcctaggactggcggagctggagcatttatccctgtggatgggacaatgctgaggtgtagtttgcagggtctcctggaggtccccagcaggacggaaccccacaggctggcattagttgactttcctcccccacctcacctccctgtcccctcctcatgcttccgggcatcacccaccaataaaacccttgctctcaactcctcctcagcatctgcttggggacttctcagcctaagccagtgggtgaatctgaatgcccatgtgtttgtattagtgtcgtgttaaatgtgtagctgtagctatattagaagcatttatatgtacatctgtgttagagcatgcatgtgtgtgtagacatgtgtaaatgcatgaaggtttgtgtatttgctactctatgcatgcagatgtgaatacctgtgagtgtctgtgtggtggattttgtctaccctggcgtgagggagctgcttcagcaatgtgtgtgcacgcacgtgtgtaccagtgctagaactggaggattgtggctgggctggtgagttgtggagaagtgaggggggagacgagaaggactctgattatttcaaccttgaaaactcatttcaattacaatttacaacctgcagacaaaggctgcagtcgccgtagtaaccacgcttcggggttttgacagagaaaatcctccctggatggttccccagctgactgtcacccatggcagagccaaatgcatctctgcctcactgtgccccgggacacaattaggacatcttcaaactgttgctactgtcactgccatgtgtctggaatttgtctcctacaacagctctcagaaatgcatgtcttgcttcctcccagaactgcggtgcccctgcctggtcctggggttcctgcccacccatgagaggggattttcctacccctttctcttcactgccaccttcctgttctagacctgcagacagggagtccttaat

SEQ ID NO: 120357 - DNA, 1048 bp, Homo sapiens
tccagcccaaccaagggctcctttctgggcaagtcttatggatgctgagtggggcctcatctgtgaagtgcagtctcttccccttggttttgttaccagtttcttttttagctatatacatgtttatttctgggcactgctgcaaattctttttgggacaaggcaggtctgaatgcaacgatgaagctgggacgagaggtttgaagcagttgtctccaaaaatctcttgtgtctctggctaaactgttgttgcagggatgggaaggccaggcaggagtcggggaagggaggctgccttgaggagcagtgatgggagagacctccaggggaggtggtcctatctcagggtggtgggagggtgtcctggctgcatgcctgccttctgagagtaaggaggggcagccttcctgaaagagcagcaggtgacgtgaggcgggtgggctggccctggcagagagcgctttccccggcctgctggacttgccttgtgtccatggatgagccactgttcctcactggctcttggtttctccacctgtagtatggggacaactgtattccgactttgctggttattgtaagaattacagagataggaattagccaacagaaaggcctagtgagagctggagggagtgaggggctgcctctgaggcctcagacctgggggtgcgcctgggcctctctcagcctcccgttgtgaccgtcctttcctctctccctcacttacatgctgccccattatatctgtgccccattttgcggtagacagaatgatcatatggatattctatgcaaattctgctttttaatgagccagaaggaaagctaacgactcttgcagacggcttggggccccagggaggccttgggatatggggaggagaggaagcaggacaaagtgacaagtaagaggagaggagggagggagggcggagagtgaacagagggccacgcagtaggggctgcggaggggtgcgggacaggggacagtggaggccctgtgaccatctccctgagcctccatgcccaccccatttcacaggta

SEQ ID NO: 120358 - DNA, 1087 bp, Homo sapiens
gtgcagccttgggtgctgggtggtgaggagcaggaggtgggaggcccttcctaattggagcggttatcatgggaaagacaggtgctcaggtgagctccccatgggggcaggtgaggaggtggatgtggcaggtggagtgtaggaggcagccaggtgtcccaggtgatactcagggccctggagagacgtgccggatgaactgcaggcatgggagccagggactatggcttcacttcatgcttgctcaggatgaaagccccctaaaccccggaaattcaactcagggatttaaatccagtgtggcagctgaggtagtgggtgggcagggagccaggctggcagggagggatgacctcacaagtatacttcaccatggacaggtggggtttgtggcaggggggcctgggagaaggaggcagatacccctgaggctctcaggttggcatggccttggaagcccttttgggctggcccagcctgtctcgcccacctcatctttgttccctccctccggccctgccattttcagttccatttcccccgaggccagtctctaaatccccccagcttcccatctgccaggcctctgcttctgatggtccacctgccccgaagaatgctctgtctgccttttcattcctttacatttttctttaaaatggaggtacaacttatacactgtaagatacacaaatttcaggtgtatgacttgttgaacttttataaatgcatttgccggtatccgatagagaacattctcagtgccctggaaagctcccttgagcccctcctagttaatatcctttcctccccaaggataatcaatagcctgatttctaactgtgtagactggtgttgcctggttttgagcctcacgtaacagaatcgtgcagcaaggtttttatgtccagcttcttttgctcacattgtctgtgagaaccccctggggttgggtctgttggtggtttgctcacttctattgctctgtactctttcattgtatcattgtttgggtaattcatcatttatttaccctttctgctgccactggacatttgggctgaatccagtgtttggctattatgaa

SEQ ID NO: 120359 - DNA, 1095 bp, Homo sapiens
gtgccacccctagcctggcggtgtgagttccctcccctcgtcccatgttgggctgcatgtgccccctgggctcttggctgcttctggagccggggctatgggtgtggccctgggggaacactgtcttagatcccacaagatgttctgtcgaggacgtggctttgtgtctttatgtgttttcactacacagccaggaggaactctagagagagcccacccaccctactgcacccatcttgaccaggccaaggaatctggaggcatttttgaccaccgtctttctgttcgtcagctcaccctgcaggctccactttcagaacttgtcctgggcatgacaactcctcacggcctccatccccatagtctcttacccagcccattacagaagcctggtctttcctctccctgcctccaaatggcctctccacagccaaaccttcactcagcagccggagagatctttctaaaacccagatggaatccactcaaccctctgcttaaaccttttattggcttcccgttgctcttagattaaaatgtgaactcctttcctgtctgagaggccctgtgctacctggtgcccctgatgtccctttgtctctctgggcactgcccacaccagtcatactgttttctttatgctccttgaagacaccatgctattttccaactgcagggcctttgcacctgcttgccttgctgtctggagtcttctcttcccactctttgaagctggatctttctcattcagccttgagcttaaatggcctctcttcggagaagctccctggcccctggctattctgtctctttccctgttcttttccttgatggcgctcatcacagttgcagtcatgtacacatttgttttcctttttgctattgagttcccctctagcccaggggttagcaaacgatagactaggagccaaatctggcctggttttgtacagttcatgagctaaaaaaggcctttatgttttaaagggttgaaaaacaaaatacaaagaaaaataatgtcatgatactggaaaatcatatgaaactcaaatttctgtgtccataaataaaggtttatgggaacacagtcatgcc

SEQ ID NO: 120360 - DNA, 1057 bp, Homo sapiens
gttgtgggcccagcccaggttgtggagaaagtcaggcctgggtttgaatccctgatccactagttacctcacctccacttaccatgtcagttatttacaccatactgtgaatgagcccataagacctttctgtggctggcgcagtggctcacacctgtaatcccagcacattgggaggccaacgcgggtggatcacctgaggtcaggagttcgagaccagcctggacaacatggtgaaaccccgtctctactaaaaatacaaaaattagccaggtgtggtggcatgtgcctgtaatcccagccactcggcaggctgaggcaggagaatcacttgagcccgggaggcagaggttgcagtgagccgagatcgcaccactgcactccagcctgggtgacagagtgagactccatctcaaaaaaaaaaaataccttttcctgaaaagtcattgttcgggggaggaagagcagactggagacacccccagagggaagcagtttccaaattctgtacctgtaagagctcagggggatccagaaataatttctttgagtcttttattcattttgcagtggaagaagctaaggcttggagaagggggcgctgcacagcatgggggtaagcatttggactctggagccaggcagcctgaggtctgaccaccctggcaaactgcttaacccttctctgcctcagtttcctcatttgtaaaatagagatgataatggtgccagcctcataggacagcacggggattaaaaattaaggtccagctaggtgtggtggctcacgcctgtaatcccagcactttgggaggctgaggtgggcagatcacttgaggtcaggagttcgagaccagcctggccaacatggtaaaaccccgtctctactaaaaatacaataattagctgggcgtggtggcagttacctgtaatcccagctacttgggaggctgaggcagatgaatcgcttgaacccgggaggcagaggttgtagtcagcgagatcctaccattgcatcccagcctgggcgacaagagcgaaactcagtctcaaaaaa

SEQ ID NO: 120361 - DNA, 1012 bp, Homo sapiens
cacgaaggagcttctggcggggggtggtgacgggtggcggtatccttcctccctggtacaggggtcccagggagagtcacctctaggggcttccagggcgtgtgggcccggccccccccccagggcgtgtgggggtggacgggggtccacgcgggcccagggggtgaagagaaacgcgctcgttagagaattccgcggcctacacgccgccccctaactaaaatagagagatggtagatttcccctgggcggacaggtgtcagcatgtgcctttcagtgtcaacccgcgtgtggctgattggtgagatacaagtcttgtgaaattcaaacgtgaaacttgtgaaatccaaagtgttttattaatggccaccagcgagccatgatcaaggtggagccttccagcgaaaccaacgattggctcgttggcaggtacacccaagggaggcttcataccttgaggtgacttagatggtgttctggagatacgcaggcccacttggggacctgggcccttccgttgggactgtaaataaaaataaaaggtgggccagaggtcgcctggaagcgctttgagggcaggggccgagcacgcaggccatctccgccacgcctggcccgcccggcgcccggcttaacaaagacttgttgcaccgagcgagaaggaagccaaaggggaagatggcggggagggcggtgggggaggaaagggcgcaggcggagcggcgcgccctgcaggccggcccggggccttctcgggcgcacctcccgcgcccggtccccgaggcggccttccacacctcctgtgatgcagggaattgaaatgcgctccagtgacacacggctgtgactcatgtttttctctgctccccttcttcctccccggtcagccgaggccctggcccagccccctcctcagggggcgagccggcggtggaggggacgcaggaaagccctgggcccggcgcggaggcggggtggggagcggcgggctgggccttgcagttgcaggaat

SEQ ID NO: 120362 - DNA, 3331 bp, Homo sapiens
taggccgcggaattctctaacgagcgcgtttctcttcaccccctgggcccgcgtggacccccgtccacccccacacgccctggggggggggccgggcccacacgccctggaagcccctagaggtgactctccctgggacccctgtaccagggaggaaggataccgccacccgtcaccaccccccgccagaagctccttcgtgactcctctgcgcgtgccttcccacacctcctccgtccgggactgcgaggagtgggcggtcgactcgagttcgcagcccaggcctcccacacgcccctccctgccgtcagcacccacccgcgcggcagcggcggcggcggctggcgggcggccgcccttttaaatccccgggctcatttgcatggccccgccccctgagtgacacggctggcgcgggcgggcccgtcccccctgcccctgggtcgctctttttaagctcccctgagccggtgctgcgctcctctaattgggactccgagccggggctatttctggcgctggcgcggctccaagaaggcgtgagttcgcggccgctccggtggcttcttttttttatatctataatttaattaaattatttatttattgaggccgcgcacgggccgtgcccagcttcctgcccctcgccatccttcgggggagggggaatatttttgtccccccgcctggctgtgacacataaataccccgcgggggcctgggcggcgagcacgcggcggcggcggtctctgagcgcctctgctctctcccggtttcagatccgcatttgctaccagcggcggccgcggcggagccaggccggtcctcagcgcccagcaccgccgctcccggcaacccggagcgcgcaccgcaggccggcggccgagctcgcggtgagtcgtccccggggcccgcggcggcggcggcggaggggggcgcccgcgcccccgcccgcacgtcgcccctcctgcgagccgcccggggctgcagcgcgcgccgccggctttattcccaggccggggcggcgcgagccggcggcgggggagggccgcgcggcgcgggggcgggcggcggggcccggcggcgcggggaggacgcccgcaccccttcccccgcgccgcgggcgccctgcggggggcggggacccgggaaaggcgcgcggtgggggagggggcgcgcagctgcggcgagcgcgagttgtgcacccggcggagcccggaggagcccggcgcacctcgcgcggcggccgctcccgctggagccggagcccgagcccgagcccgggcccgggtgaggggcggggagagacacgggctgcggcgcggcaggagagtggggggtcgggcgccccccgcagctcagggaagttctggaagtgagggagatggggaggaacccccaaattcggccctacgccctctcggcctttctctcgcgccccctccgcagatgaggccggagcgcgggcctgggtttggggcttcaccccgaccccacctctggcctggcccgcgcctcttcagccccaggggccgggcctgccctccgcccccacaaactggtttcgctgctttgctgggctctgttggaactagtccctttgactccccgtttctattttattttcttctggggctttattttgcggggaggggacggagggagggggctttcttcctctcccccgcgcccgcgcgcgccaggtttcctgccccaaggcgggcttgggtgccccctctggcaggaagtggggccgggtgcacccgcgtggcggtgcatgcggtcggggtgcgctgctttcccgcgcctgcaggagcggcctgcgcccctccccccgcgcgccctggccccgggtcccgccggccggcctgcaacggccgggcgcagacacttgcagagtcaccctcgggccgggtctggagcctgatgcctcgggggtttagccctagccgctaggcgggtaggcaaagtgtcgggttgaaagggtctccgggaacctacttcttcctgctcgccaacttgctgtgtgaccttaggcaactcaaggcttctctgggctacttttttacgggggacggggaagaaaacaagggaacccccaagataatttcctagggcctttcctgcagagtccttaagtatttgaggagcacagtttgcatgcacagtgtatggaggagacaggcttgaggcccaagcgggcttattacaaagtgagggattggggttaggccctaaatgtagttcctccaagacaggcctctgatgttcagaaacaggtggaaaagacgaacgtttcttggcctcactggaaagggcctcgggccttcatttagttcgtggggggttggctgaggggattaaagggtccccagcagcaagaggtggggggaggcaccagatggtatgagagcttccagggagacccgccaagatctccaggcaggccgggccaggctctctgggattccggactggcttcgcccaactggaaccccctcgatgagggggccccaggcagaccttatatgaggtcagcactcgtttagttgattaattttgatgtttagtttgaagggggacctgtggtgtaatataagattctaatcactgcctgtaattgcagagcaggccaagccactaatgacggagcaggataaatcaccaaccaccttgtttaaaagggtctccaagtctgaaacattataagatagaataattaccaaagtcctgctgtctggagggtctcttgatgcttgaaaatggaggtcctgggccctctagaaatcacaagtttgcaaaaatgtttttttcctctcattggggtaaaaactctttttcttcttttttttttttcttttaaattagacatgggagtcccaccgtattgtccaggctggtctcgaactcctgacctcaagcagtcctcctgctttggcatcccaaagtgctgggattacaggcatgagtcacctcacctggcccataaatcattttcaaatggtctagttcttattttggttagagtgaagatttctttctattattttaagtttttctaaactattacctagtttgatccttgaagcagtcaggaggtagttcaggcaggtaccttataattaccttgatcttacagattgagaggggttcagaagtggagccgcttgtcccaccccttaccatggcaggcagggattggttactggaaaaatgtgtagcctaggcctccggcgtctcatccatctgtagcctggggataaggactaggatgaagatgtggaggactgtcctttttaagcctgtaatacagggtattcccaaatacagg

SEQ ID NO: 120363 - DNA, 1107 bp, Homo sapiens
attctttccattttcccactgaactgcgtaggctggattttctcttaaagagaaagggcagcagttgactacagaaggaggggatgctggcaatacgtcagatctcacctccccacacctttgtcccagggtggcctcacccatgtagctaggtctgggctggctgtacctcctgggaccccccccaccacgctgcactggggcggtgttaaggcaggacaacaaagagcccttctgaacaggagatagataagaagctgattagggccaacggcccttccccgcccttggcagcatctgggggtgggcagacccctccatcctgggcagagtaggaggcctgggggcccatgggagcacagttttctgcagtgtgccttgaaggtgtgggtgatgagggggtagaaagtggctgaagcgagatgtttgtctaaaagcacttttctgtctcccagcatcccagccatcactcttccacctgctccttagagaagggaagatgagtgagtcgagctcgaagtccagccagcccttggcctccaagcaggaaaaggacggcactgagaagcggggccggggcaggccgcgcaagcagcctccggtgagtcccgggacagcgctggtagggagtcaggtgggtgtccaaacctttgcttcacttggtttaccctttggggctagggaggtgcctggagtttcattcagcaggcgagaccatgcatggagggtgcagaatgattctgcgcagtaagcgtgtgggtgtgtcctcccacctgtgtgtactcctgccccacttgcaaccctggtcagatctctatagagaccccaggagagaaccgggggccgaggaattcaagataaattctgaagccaatggcaaacagtccaaacctaaagcaccccagaggtcacatggccagtgcttaaaacactcgcctttttcttaatttccaatccactgtggaccagtaattttaaaatgcagtaaagacgaatgaacaaaaatgaacatagaagcccagggtttttaatcattagattcagtgcacgtaaaatgatttttgtcaatttgctgtaaagttgctgaatacttatggtcgattcttg

SEQ ID NO: 120364 - DNA, 1022 bp, Homo sapiens
ggtggatgactagcagaggatcctcttgttggcaccatggccacggctgtggggaggtctgggaaggggctcagtcatctcagttgtgtacccccttccctggtacagggatggcagtgagtctttgctaactggggagagtggggcgatgactaaggtcttacttctggggggttggtcctgcccaggacactgcggagatcaggtcagaagtcccacagctttcctgatctagagaagggcagagtggggagaatggagggtccctgccagtccctgggctgagaatgttaccttctcttggggttccctggagcctgaaggggtggggacaggcagcaaaggccagattcacagtgacattagcctttcagaaaagttgttttgttttttattttattttttctaagacacgactcatatcctctgagtcatgggcggaggtgggagtagggggcgtgtgtgtatgtcgagggggcaaatgtggctggccagtcattgccagctggacttgggtgggcctgttgggtgagagtgttgggtcaccctgaacaggcaggtaggtctgccccccatcactattgggcatcgggtgagcactgatgagcattttggacttaggagatattttctctaaccctctagaaaaccaccacaactccaggaaggaaaccaaggggcagacccaaaaaactggtaggtgaagaagcagactgctgcttgcctcctgggctcttttgagttgagggtgttgagtacacagtacctgatgctatgcaccccctatggaaaggctctccttgacctgctgggacatcagattttacagaagtccagagaggggaaggtacctggcctgggctgtgcccatgagaagtgaggggtcccaggtataaatcagaccacatccccctgccctgccctgccctagttgtgtgtgggggtccctccctctcctgctcctagaatactcagaacttctaggggagatcttggaagtcatctagcctgtgtccccctca

SEQ ID NO: 120365 - DNA, 2208 bp, Homo sapiens
atcaccaccgcctctggccgccacccccatcttccacctgtgccctcaccaccacactacacagcacaccagccgctgcagggctcccatgggctgagtggggagcagttttcccctggcctcagttcccagctccccccgcccacccacgcatacacacatgccctcctggacaaggctaacatcccacttagccgcaccctgcacctgctgcgtccccactcccttggtggtggggacattgctctctgggcttttggtttgggggcgccctctctgctccttcactgttccctctggcttcccatagtggggcctgggagggttcccctggccttaaaaggggcccaagccccatctcatcctggcacgccctactccactgccctggcagcagcaggtgtggccaatggaggggggtgctggcccccaggattcccccagccaaactgtctttgtcaccacgtggggctcacttttcatccttccccaacttccctagtccccgtactaggttggacagcccccttcggttacaggaaggcaggaggggtgagtcccctactccctcttcactgtggccacagcccccttgccctccgcctgggatctgagtacatattgtggtgatggagatgcagtcacttattgtccaggtgaggcccaagagccctgtggccgccacctgaggtgggctggggctgctcccctaaccctactttgcttccgccactcagccatttccccctcctcagatggggcaccaataacaaggagctcaccctgcccgctcccaacccccctcctgctcctccctgccccccaaggttctggttccatttttcctctgttcacaaactacctctggacagttgtgttgttttttgttcaatgttccattcttcgacatccgtcattgctgctgctaccagcgccaaatgttcatcctcattgcctcctgttctgcccacgatcccctcccccaagatactctttgtggggaagaggggctggggcatggcaggctgggtgaccgactaccccagtcccagggaaggtggggccctgcccctaggatgctgcagcagagtgagcaagggggcccaaatcgaccataaagggtgtaggggccacctcctccccctgttctgttggggaggggtagccatgatttgtcccagcctggggctccctctctggtttcctatttgcagttacttgaataaaaaaaatatccttttctggactggagtctcctgtggtgtgtgcccctaaagcctggggcaggtaggatgggtgacacttgtgttctggcccccatccttcaggctgcaggaagggaggggaaatagcactggaatcacctccggggaaggtcattttaagcctcttgatgaaatcaaaacccctagccacaaaacattttatttacaaaatatatactgaatactatacatctggccccatcaccatggaaacaactccaaagcctgcctggggatttgtgcccaagcccagcccaggagggctagagaaagcaaaggtgtctaccagccgcccccatcccagaaggaaagcctcttcccatgagtgcctgtgggtgggcggtgagctcaacacccacaaagggcagaaggcctgggggcagtgaggtgatggtgagggcatgggaagcagatgctgctgagggtgggtggagggagaaatggagacccagcacccagcagggggagccaggtgacagcaggggaagcagatggcagggccccaggcagtccaggaccccaggctctgaagggtggggcaagggggtcaggtcacgtcttgacatccagcagtggcatccgcttgtgctggtagccactctgccagccatgtaccacctgtcggggaggagaccacaccacaaggctgggctgtgttccctgggagtctgcagcacccagttacagcccaagtaagcagaaccaggctctggtttcagtgtggacgagtatggctgggaacagggctgactcccaccttgcctcattctccccctggcccccaagtgctcaccttggggtctcccatgtcagagagcagctcctgctcagcctcatgcagttcctcagctgggtcatagctgtacatggggagcaggtgatggcgcagccggtccaccctggggagcaggggaggggactcagctaggaggtccccccaacc

SEQ ID NO: 120366 - DNA, 1050 bp, Homo sapiens
tttgatttcatcaagaggcttaaaatgaccttccccggaggtgattccagtgctatttcccctcccttcctgcagcctgaaggatgggggccagaacacaagtgtcacccatcctacctgccccaggctttaggggcacacaccacaggagactccagtccagaaaaggatattttttttattcaagtaactgcaaataggaaaccagagagggagccccaggctgggacaaatcatggctacccctccccaacagaacagggggaggaggtggcccctacaccctttatggtcgatttgggcccccttgctcactctgctgcagcatcctaggggcagggccccaccttccctgggactggggtagtcggtcacccagcctgccatgccccagcccctcttccccacaaagagtatcttgggggaggggatcgtgggcagaacaggaggcaatgaggatgaacatttggcgctggtagcagcagcaatgacggatgtcgaagaatggaacattgaacaaaaaacaacacaactgtccagaggtagtttgtgaacagaggaaaaatggaaccagaaccttggggggcagggaggagcaggaggggggttgggagcgggcagggtgagctccttgttattggtgccccatctgaggagggggaaatggctgagtggcggaagcaaagtagggttaggggagcagccccagcccacctcaggtggcggccacagggctcttgggcctcacctggacaataagtgactgcatctccatcaccacaatatgtactcagatcccaggcggagggcaagggggctgtggccacagtgaagagggagtaggggactcacccctcctgccttcctgtaaccgaagggggctgtccaacctagtacggggactagggaagttggggaaggatgaaaagtgagccccacgtggtgacaaagacagtttggctgggggaatcctgggggccagcacccccctccattggccacacctgctgctgccagggcagtggagtagggcgtgccaggatgagatgg

SEQ ID NO: 120367 - DNA, 1460 bp, Homo sapiens
cactttgtaccccttaaagatgtaaaattataatttgtcaaaaattaaaaattttaaatagtaactaaataaaataatgctgctacaggccaggcgccatggtgcacgcctgtaatcccagcactttgggagtccaaggtgggaggatcacttgaatccaagagttctagactggcttaggcaatatagtgagacttcacctctacaattttttttttttaattagccaagcatggtggcacacacctgtaatcccacctactcaaggaagtgaagatgggaggatcacatgagcccaggccgcgaaggctgcagtgagccaagacagcgccactgcattccagcctgagtgacagagtgagaccctgtctcaaaaaataataatctgctataaatatttttgtacacatttgttgaagacatatattttcatttttttctgggcatgtacttgccgtatcattaggtaagtttatatttgaatctacgctctttccctcggagcgggcggcgcggcggcgtcggcggcctgtgcagcaatggccaagatcaaggctcgagatcttcgcgggaagaaggaggagctgctgaaacagctggacgacctgaaggtggagctgtcccagctgcgcgtcgccaaagtgacaggcggtgcggcctccaagctctctaagatccgagtcgtccgcaaatccattgcctgtgttctcactgttattaactagactcagaaagaaaacctcaggaaattctacaagggcaggaactacaagcccctggacctgcggcctaagaagacacgcgccatgcgccgccggctcaacaagcatgaggagaacccgaagaccaagaagcagcagcggaaggagcggctgtacccgctggggaagtacgcggtcaaggcctgaggagcgcattgtccataaagcacgcctggctgagaaaaaaaaaaaaaatctataagaaaattctaaacagttttccaaagtggttgtaccatgccacaccactaccagtgatgcatgagaatttcagttgtgccatattctcttaaaaattaaatatctttcttttttaaaaactatttctgcccccaactctgccaatacttgcttcatatattatgggactctgttgttcaacatgtatgttattatacttgccgtatcttcttgatgaattgactcctttatcattataaaatgtcttcctttatcttgtgtaacacttttttacttaaaatcgattttgtctaatattagtatagccatttttgctctctttacactcttcatgggatacctttcccatccttccactttcaatttatttgtgtctttgagtctaaagtaagtttcttttttttttttttttttgaggcagagtcttgctctgtcacccaggctggagtgcagtggcgctatctcggctcactgcaagctccacctcccgggttcacg

SEQ ID NO: 120368 - DNA, 1045 bp, Homo sapiens
agatacggcaagtataataacatacatgttgaacaacagagtcccataatatatgaagcaagtattggcagagttgggggcagaaatagtttttaaaaaagaaagatatttaatttttaagagaatatggcacaactgaaattctcatgcatcactggtagtggtgtggcatggtacaaccactttggaaaactgtttagaattttcttatagattttttttttttttctcagccaggcgtgctttatggacaatgcgctcctcaggccttgaccgcgtacttccccagcgggtacagccgctccttccgctgctgcttcttggtcttcgggttctcctcatgcttgttgagccggcggcgcatggcgcgtgtcttcttaggccgcaggtccaggggcttgtagttcctgcccttgtagaatttcctgaggttttctttctgagtctagttaataacagtgagaacacaggcaatggatttgcggacgactcggatcttagagagcttggaggccgcaccgcctgtcactttggcgacgcgcagctgggacagctccaccttcaggtcgtccagctgtttcagcagctcctccttcttcccgcgaagatctcgagccttgatcttggccattgctgcacaggccgccgacgccgccgcgccgcccgctccgagggaaagagcgtagattcaaatataaacttacctaatgatacggcaagtacatgcccagaaaaaaatgaaaatatatgtcttcaacaaatgtgtacaaaaatatttatagcagattattattttttgagacagggtctcactctgtcactcaggctggaatgcagtggcgctgtcttggctcactgcagccttcgcggcctgggctcatgtgatcctcccatcttcacttccttgagtaggtgggattacaggtgtgtgccaccatgcttggctaattaaaaaaaaaaaattgtagaggtgaagtctcactatattgcctaagccagtctagaactcttggattcaagtgatcctcccaccttggactcccaa

SEQ ID NO: 120369 - DNA, 1058 bp, Homo sapiens
taatcccagctacttggtaggctgaagcatgagaattgcttaaacctgggaggcagaggttgcagtaagccaagatcatgccactgcactccagcctgggcaacagagtaagactctgtcttaataaataaataagaaaataaaacggaactgcagtgctaacagtaatttatacatttttaaatgttctgagtatgttttgactgggctagtgtaacaatatactaccctgaaagtgcagttttgattgttgttggtgtctttgggtcaggaaagtgaactgtgccaagaagtatttttcagtgacatgaatggattcctgttaatgcaattgactgagagattgtgcttacgctttcttaactgacaaaaagaggctttgtccaacatcagaattgttgaaactggtgctgttttctgttgcactgggattctgatgatctgggattttccctccttggcacagtaaacaccatgactgtctttattgagaatgtcgtcacagtcctttagtgatagattagttagacccatggttgcaatacctttatctccccaaagaaaataatcaaaagaaagcacaaaagctaccctgtttgcagaatatttcactgacattgatttgtcattaattctaccagagctgacctcattcaggcttgatagaaacaggttcctatgtttagggcagatccctagcctctcgctcacagtgagtctgcatgtcctagattctggttattgctggagcatccattaaagtctaccaaactcaggacagaagaagatagcagtggatttgtaaaaatttttagtttataaattacagtcattggggaaacactagtaaggtcatgtgatcttttggaccaggattttctctctgtcttctctctgggtgtgtgtgtgtgtatgtacagaagggctaccaggaagtgtcaaccatgttagattttctgtagtcttccagaaacagtgcagcccatacaacaggaatcttaattttcctcacagcaaatataacaggatggaacagttagtgttttgttttcacaagt

SEQ ID NO: 120370 - DNA, 1058 bp, Homo sapiens; identical to SEQ ID NO: 120369

SEQ ID NO: 120371 - DNA, 1832 bp, Homo sapiens
cctgtttgtcttatcctggccctggccagacgttttctttgatttttaattttttttttttattaaaagataccagtatgagatgaaaacttccaataatttgtcctataatgtgctgtacagttcagtagagtggtcactttcactgcagtatacatttatctacacattatatatcggacatataatatgtaaataaatgacttctagaaagagaaatttgtttaatttttcaaggtttttttctcttttaatttgggcatttctagaattgagagcctcacaattaacatacctttttgttttcgatgctagtggctgggcaggttgccctgtcctttctctatttcccagtcattgactgtagatatgggaagagtttagctaccttcatagtgctcccaggactcatggcctttccttctttaagctgtatttccctgcccagaaagaaacaggaagaaacctttttttatttttttatttttttttaaccaagcaaggagcaaatggcctcagcccagatctgtaaaaacaatgatagaaattgaattctgccccacatgttgacagtagagttggaactggattcttgggattacttatctaaaaaactggagcatcaggtccatttctgttctgctggtttggaatcttttccgtaatgctatttattgccaacaatggcctctctttgtgtccatatatgccttacaccgtgctgacctgggtatcatccatgtgctctgaagcatccaactttactttgcaggtgcatcaatgtagtcctgtccctgaactgagtaaccgtgttcctgaaaagtacactagggaaattcacctgcttgcttgtctttgtattggcatggcacttgtgattgcaccatggagcatgctcagagctattaaattggtctcccatctcccaccaggatatgaaaggtccatatgggaggccacgtaatcacttattacagtggttacataatacactggctcactgcagactctcttgttttttgatacagtttcgtgctggcttcatttgccaattgtgttgtttagttcggaagtaagagggtcttgagattgaggggtagggagggctacactgactgatccgtggcttaagacaggagattatctctgtactccagtggcatctccttagccaagatgtgaaattaaaatcatagttcgcctcatttaaaaattctaataaagcactcaaactttgaaaagcttttacttttccctcctactaaaagaaatgtatgtacctcatagccctgtgtcatttagtgttcagcacttttgggaacatcagttggtgaactttaaattttgctgtctactcactgggcacggtggctcacacctgtaatcccagcactttgggaggctgaggcaggtggatcacctgaggtcaggagtttgagaccagcctgaccaacatggtgaaaccccgtctctactaaaaatgcagaaattaggtgggcgcctgtaatcccagctacttgggaggctgaggcgagataatcgcttgaacctgggaggcagaggttgcagtgagccgagattgcaccactgtcgtccagcctgggtgataagagtgaaactccatctcaaaaaaaaaaaaaaaaaatttttttttttttttttgctatatactcttagtttacatcctctcccccaatcttcacacacagagccaaagagcagttatattcttgggataccatgatacctctgggaaaggaattatattcccaaggagaggtcccattggataagaacaataccatgggacttgagtctgaatgccaacttac

SEQ ID NO: 120372 - DNA, 1026 bp, Homo sapiens
cgtaggtgacaaagtaaggctctctctcaaaaaataaggtaagtggggttagtgggaaaaggggtgtgggtgggaagaggggtgtgggtgggtgtgtgtgtgtgtcacactcagcttgtttgccttgctggggtcactgaagtttgagacctctgtggtagcccacccatccacagtcctctccctggtggtctagctagttaaatttacatgatgcctttttcttctcatagtattcctgttaagttgtatttaggggaaggggaggaaaaaccaatataattacttggttttagaagtccagccaaagagcacaccctcaaattcaagtgtggcctgctttaaatcatgtagctataactgtaggaccataaaaagtaaaagtttagaatctttgtgtctgagctctctggacatatgcataagagtgtgtttcatttaagtaattccagctttctaaggaaaaactctctctatccttctctctttgcccttcagaaccaggagaggaagcacaggacgtatgtctatgtgctcattgtcactgaagtgctggaagactgggaagattcagttaacattggtaagccatctccagacagcctggaaagggttcctcacaaccagcccttgccatgccacaggtcatgaccagaaccagaaacaagagcgtaccaggctcagtggctcacacctataaccccagtactttggaaggccaacacaggaggatcacctgagcccagagttctagaccagtcttggcaacctagtaagacctcatctctacaaaaatcagaagacttagctcggcgtggtggcacatgcctgtggtcgcagcttctcaggaggctgaagcaggaagatcatttgtgcttgggagtttgaggtcacattgagccataatcatgccactgcactccagcctaggcaacagagtgagactctgtctcaaaaacaaacaaaaaaacagaacaacaagagctggataaagaatagaaataattgaaggatgtgtataataaa

SEQ ID NO: 120373 - DNA, 1060 bp, Homo sapiens
atgtggccaagagaattagggtcccttagagtctagggtggtgtattgtattggcctgtggccatctgatggagcaggaactgggatacagctcccagttcatgggtgagaaacttggagggaaagtgttggaccatgatggcaatcatggccaagggccttttgtcttctggccagctttttcagtgctgacaggctcatcagtgacaatcctctttttttttttttttttttttttttgaagtcttctattcaccttgtcaggtctgtgttcaaagggctctagcaaaaggaacaaggaggggataaatagagcaggtgattgagcatctgaggggagtgtagagataatggccttcagatgcccttctgcttttactagctgatgcctactttttcaaatagaaacgaaagctactttgcaagaagtgatttgggaaggcataaacaaagaatgggtcttggttactttgatgtttgtggtgtttaaactctgaatttgtgtggatgtgtctttgaatttttaacccccccatgcaacctttgtgacttaacaggtgctactcgtgagcagtagtcgccatccagacagatggattgtccctggaggaggcatggagcccgaggaggagccaagtgtggcagcagttcgtgaagtctgtgaggaggtatgcatggagaagagagggcacagctgtgcctcgtcatcatgaacctgtcctatctgtgtagttctttaatatgtcagcactcactgaataaatatacagtcacagaaaaagggcaatgaatggttatccggtccctcctttattaccgggtgatggagttgtgacatggtaatgttaaccggcactctgtgccagacttcccatgactttttatgccagacttttgttacttcccatggatttcttccaacactgcctgttacctgtggcacaaaatcaagaagcaaatagttcctgacctctaaggagtaagaggaacaggcagcattagtataaatgactcattgtcattaagctttggaggaggcccttgttttcctgtgcttact

SEQ ID NO: 120374 - DNA, 1047 bp, Homo sapiens
ttttttatttgtaaaatgggaataaataatacctaattcttgaagttgttatgagacttgaatgaggaaagtaaagtgcctcccagataacatagttggtgctgtaacgaaggcaggaaccacagaaggaatcacactagccaagaaatgatgatgatacagtgaaatgagtgctgtaaaagaaccctctccgaatgctttagaaatggaggagtagacaaatgctggattgagaagtcagacacagtgcgaaaggactagatctgagtgttgaaggatgagtataaatttgctgctactccaatacagattgtgcaggcattaaaaaaaaaatcagatgctgatcataacagcgtcacaaagacagactgatatgtgatctaaaaaatacaagaactgggaaagaaaggaaagattcactgcagtaaatggtgctctgtgaatttactgtgaaagagcttttatggaaagagaggaagacctgaagttatagaatctttacatttgtgaacctggaagtaaacatagacatgatctatccagccacgtcagtgaaataagggaactggaaccaaaagagtgttgaaatctgtctactgtgataattctggtaaaataatatgtacaaagataacacagttttcttctgacagatccacaaaaggagttaaacaagtagaatgcattttttttttttttttttttttttttgagagggagccttgttctgtcgcccaggctggagtacagtggcatgatccgggcttgctgcaacctctgcctcccaggttcaagtgattctcctgcctcagcctcccaagtagctgggactacaggtgcatgccaccacacctggctaattttttgtattttttaagtagagacagggtttcaccatgttggccaggctggtctcaaactcctgacctcagatgatccgcccgccttggcctcccaaagtgctgggattacaggcatgagccactgcgcccagccgaataaaaatatatttctaaaacagactcccagtaccagtatttaaaagaa

SEQ ID NO: 120375 - DNA, 1007 bp, Homo sapiens
actgtaacttcttgagtaagattttataatccaaaattgggtaatatgatattcatctgtcatattattcaactttggccctgctaaagtacttccagtgagattatccctcttcccccagcctttccttttttagagcctctgtgaggagaagtgagagacagggatgggcttgtttgtactcttagaaaggccaaatgatacagaacatacaacaaatgacatcacagtgcctaggaaagttaaagctgctcctaacgggtctgtttttacccagggagaaaaatgactactaataggattgtgtgagttagatttccctgtgccttaaagctgttttaataaagaaaggatgaagctgttcctaagttgttaggttcgtttgttgtacttttccactagaagccctatatctcttggcaaaggggagctgcttcacattttctcagatccttcagctcaccaggttggaacggagagatgattgacattggagctcttcagtgggcagagactggtggcctgtttgtctgtaaaatgccccagaggagcaggtggactgacgtctctgcagactgcaccttccagcaggctctagagaagagagtaagacacaggtagcaatcccagaggcaataatcatgacaaagggcttccagcagatcccaaggtggtttgggagtccttttgtaacacatcttggtcaccgttcaatattacattgctctaagatcatgatgggttcattgatcccgtcatgactggacatttctgcttctcatttctcaaaatctttcctggaagcttttttcccctgctttcccttctgtttgcctaataccagttagtcatgtcttccattacgttattttttgcctccttcccaaggtgtgaattctggtctgaattcatactgcagtctccattctttttatgtctttgccccaatcctacttctttgtttctgctttaattctcatttctcaataaaaatagtgctgcacatc

SEQ ID NO: 120376 - DNA, 1064 bp, Homo sapiens
cagcaggctgctgggtctggtgtaccccaaccaggtggcctcccagctgccaaattgtgtgattacaattagttacctctattcctttatctgtttatgttcattgtacttgttattgtaattgtgcaacttaaccagtgaactttgagttcagaaaagaacaaggctcagcatggtggctcacgcctataatcccagcactttgggagaccaaggtgggcggatcacatgagcccaggaatttgagaccaacctaggcaacatggtgaaaccccctctttactgaaaatacaaaactagccaggcacggtggtgtgcagcctgtagtcccagctacatgggaggctgaggcacaagaattgcttgaacccaggagacggaggttgcagtgagccaacagcacgccactgcactccagcctaggtgacagagtaagagtctgtctcaaaaaaaaaaaaaaagaaattactgctcacttatatggacaaacaaactgagaagactggagaggggatcttaaaagtctagaaggactctgcacatagattacttcatgaatgtttttaggtttttgttctttataaaaactaggactggaaaacataggtcattgattatggatgtggcatatgaaagaaagacaacttaacaattcaaacaaacaaaacaaaacaagatcttggccctacaaagattaccaaataactacatgtttatatacatataaaagatttatttgctaataatatgtaatatggtctcgaactcccgacctcaggtgatccgcccgcctcggcctcccaaagtgctgggattataggcatgagccactgtgcctggccatattttttattttttgtagagatgaggtctcatgtttcccagactggtctggaactcctggctcaagtgatcctcccttcttggcctcccaaagtgttgagattataggcatgagccatcacatctggcctgattatttaatattttcatttgcttcctctttgcacataatatataattagtaatatataaagtatgtatatataaatgtatatttatct

SEQ ID NO: 120377 - DNA, 1451 bp, Homo sapiens
ttagggcgttgtgcataagccatagccagctgtttattttacagtgcgctgggtagcctttatggtgtagtctgagaagaaaagacatttgatataataatctttgtgtgctgaaaatgtttcatgttaattgggaagaccaaaagcggtatttaacatttttgccctgacgttcctccactgccttgtgggaagactcttaggattaaattagctaggaaaataatgttttagaatcagtttctttttataataggtagggtactttaaaaaaaaatctcggcttcccaaagccgtttctgtggtgatgaagggaattcagagaagcacatgttttgtaaatccacaaaagagtagctgctttggaaattcataagatgcctgtgggaatgcatttctcgtgtgcatggtggtaaaatggcagttaaactggaaacaatgaaggacagtgaaatccaatatgttatattggattcagcagtgggctatggtggcagggccgcagtacagtgcagtgtcgaaatggggaaaggaacttgacccgttagttatgaaaagaagctgtggcgaaagagacagatggattgccaggagttgctgtccagaggtatttaggaggaagtgggaatttgaattactgcctgaagaaaattagttagtgaattgtgttgttaagggatcccatgtgtgctccctttcagcaaaacagaacgaaaggagatttggaaacgtatgctttgtatcctaccatatattgtaaaagtccccaaaacagatgcattgtaatagctaaccagggccatgctgtaaattatatactgttttggaatgcatatttgagtaaagtaaaattattggtggtgcttattgctccagagcctttattctcctcattatcatatcatgttatgggaaatcagatgggatcacaggctcttaactgaagggaaaactaattagcataatagcatgtcttactacactagtatgcataaatctgtgagcaccccaattataagtataatttagttgtacgaatgatgcaagactgtttgttttaaaaaaatcacaccaggccgggcgtggtggctcacgcctgtaatcctagcacttcaggagaccaaggtggtgaggccaagagttcgagaccaacctggccaacacagatccccatctctaaatataaaaaaaaataataataataaatcatactagaaatagaaaatgtatttttgataaattgaaaactatagatcataagcaaactagcaacggcttaattttccattttctgttaaatgttttgttatgcactgacattagcaacattaatgttgaaagcttacttgtctgtttaggctacctcacggcatctcacaagtcagaccaggcataggacttgccttctaggagcttactttttttcttttttttttttgagaccgactctt

SEQ ID NO: 120378 - DNA, 1418 bp, Homo sapiens
aattccaaattttacattgagttgtagcatgcaaacttttgtaaatacataaattactgaaatgagtctcagaaatcagtacatgtggcctactagtattttctgtttcattaatgcttgacattgaactaaacactggaaggtgggtgggcttaagaaccaagatggtatgaaatcaaatcctccatcttttttcagttgatgtaatgttaggtaggttcccctctgcctcagtttctccatctataaaataaggtgataattacagctactaaggtagttgtgagattagttaatccaggcatagtactggcatatcatttttgtcctatggcaggtcctcatagcacacgattgctctcagataatgtcatttgtaaaaaggaagcatgtacagtagaaacggtccaatcctggtgctggatgctttcataggagtatgtatgaacacactctgggtgggtggccatactcccactttaccaatgaagaaatgggcctagatgttagatatggccccacatccagtaaggggcagtgctgggatttatagcctgtactcagctctctcccagctgtttacatttgggggcctctggagttataatgaggcctgaaagttagcaaaacctccaaagatcaaaccagagtgccgctcatgctgatgtgatgtgctttctcttacagagaggcggatttggtcgtggacgtggtcagccacctcagtaaaattggagaggattcttttgcattgaataaacttacagccaaaaaaccttaatcttttgtccattttgtttgcattgtgcagcctgaacaggaacagtttaagtgtcagaatgtaaatggggcagtacaggcttggtttggggagttgtcattgtcctgggtgacaccggctgctgctgtacttggctttggcgtgtgccctgctttctctaggcagtgcctccctgcagagtggtgtcccatatggtgctgcagttggaaaactgggtcccttctttagaccagccatgctgcctcagctcagcatggtgggaaaattgctggttggcctggagtcgtgatttgtgcctgctgtcaggaactataagaagtactggggagggaggatgaaaggtaacgaccaaggaaatggtgcacttggaatccttcaatttatggagaagaagcacaggaatggtgtttaggccaacgttactaatctaagtcttcaaggctcagcgtttgttgacaagaatcaagggagaaaacaatgcacaaaaaccactgttcaaagtggctaacgcctactcaggagcctgaggcaggattgcttgaggctaggagtttgagaccagcctgtgcaacatagcaagaccctgtctcagaaaaggaccaaaacatttgaaagtcatctgaaattcttttttttt

SEQ ID NO: 120379 - DNA, 1048 bp, Homo sapiens
tggtggcacgtgcatgtaatcccacctactggggaggctggggtgagagaactgcttgaacccaggaggcagaggttgcagtgagccaagatcgcgccactgcactccaacctgggtgacagagtgagactccgtctcacaaaaagataataaataataaagtttctgccttaatatatatcccacagcctaacaggtatgtgaagaagcccaagaggaactcaacgattcttggtaacccctagattatgtacttaatattggagttgggactttcagcttaggatgcttccttttctgtttgcatatactaagttttccacttaacgtgggtcaggttcaaaagtttagctattcagatgttcatagaaatagctagatacctagattggtccaataattggaaaatagttttatgttgaaacaaaatggaagccttttttttttttttcagatttgcagccaagattgtcaataagtttctatggagaaataattatttctagctgacattgtaggtttaaggagttcctgtccccattaacccatcttaaccaagtggttgctgagagtgacaacaggagagcaatgccagttttcttggctttaagggacagagttctcacattgccctgtgttcacagtgtggtttgatttacataggtctggagggtgagcgacctgcgagactcacaagaggggaagctgacagagatacctacagacggagtgctgtgccacgtgagtaaatgcatcacctatattaggggtgttggggtgaaatgtctggattctcacagctggctctggctgggtggggctcagcccttgatgatgacaaaatgaccaggaaagattcttggtttcactctgcagagcatcagaacagctggagtcctttgtgcttctttcttcatgcagtgatttcatagatgagaattaggaggaggctgggattttttaaaaaacaaaactcaggccgggctcagtggctcatgtctgtaatcccagcactttggttggagggggggggtcgaagtgggcagat

SEQ ID NO: 120380 - DNA, 1058 bp, Homo sapiens
gtagcgataggggctggaggcttattttatggggtagggggccgctggtaggcgaagattgtccgagggagagggggaggatgaagccagtgagtggcggagacttgccaggtgagactagcgagacggtgtcccaccgacacgcttttttcttgggaacaggactcccccgactgcctccttgcctggcactggagctctagtttgggggagaagtggtaggtaggagacgagggtgcgaaggccttagccctttggtttggggtctgccgccttcaagaagccggggctttacccctccgggccttccctgcgtaccttatggtacagccgcgagattccgcgctgggtacggtcgctgatggcctccaactgctcccgataatacagggtttgctcctctcccccccattgacctttgtaattgatgagaacttaaggaagtttggcgcgaatgtgcaccactatcctggttttaacatactgtcaacttttccacctgaattgtgtttgggggtggggactgacggagctggcctctgccgaatctgttttgtggagttgagtcttcccaccagcatgttgtctacggttttgtgtgggtcactttaggatcaagaacttgattaccgggccccggcctcgttactcagaagtgctcttgacaatcgtctccttcttgcagatgttgatgcctaagaagaaccggattgccatttatgaactcctttttaaggagggagtcatggtggccaagaaggatgtccacatgcctaagcacccggagctggcagacaagaatgtgcccaaccttcatgtcatgaaggccatgcaggtaggagggtgaggaggaagatgggatggatcttcctccccgggatcccatcccgggatgggatggaatgggatggagggatcttcccctaaggttcaaggcaagttcaaaaagggaggtcaggactgcgggggctgcttgctaacttgaagggctggctgggactggagacttgcctaggatgatccaagcttctacttaacgccttaacagtagttttctg

SEQ ID NO: 120381 - DNA, 1011 bp, Homo sapiens
gcaggcagtgccaagcagagacgcagccacaaatggaggagcgctgctcccgaacacctggagccagggcctgcatcccttctggctcttaagagtgtgggctcacaggtcccagggagtgggcaggggaggagttaatgggtgaccatgtttgctgctggtcacaaatgaaaaccctactccctattcccccctccccacagctggaggcagccaagaaggcctaccatttggcttgcaaagaggaaaagctggccatgacacgggagatgaacagcaagacggagcaatcggtcacacctgagcagcaaaagaagctgcaggacaaagtggacaagtgcaagcaggatgtgcagaaggtgctggcgggcagggatggcagtagggggtctgggggccccttgcagagggtggtggctgggagctgcaggcctggctaggtgtcaccctctctccactctggtgcccacagacacaggagaagtatgagaaagtgctggaagatgtgggcaagaccacaccccagtacatggagaacatggagcaggtgtttgagcaatgccagcaatttgaggaaaagcggctggtcttcctcaaggaggtgctgctggacatcaaacggcacctcaacctggctgagaacagcaggtacctgggcatggcaggcaccgagggcacaggcacagccagcagatggtgtgactggcatgcagggcatcccagccctccatcacagtgacgggaaggggaggcagagctgcaggggtcaagaaggatgaggcttcaaacacaggggctgttgagtgcaagctgacgcacactgggtactctagaaacacatgctggatgatgggtgaatggctaaggtgggagggaaaaggagtccaccgagcatgcccggagcttattcttgcaaagcccacatgattcctggctgggcagcatgcccagcaccctgcttccctgagtggactctggcctctcaccaaggttgaggaggggccatgttga

SEQ ID NO: 120382 - DNA, 1048 bp, Homo sapiens
caagagggacccacactctggggcagctgagttttgcttcagaagacaagaaatggtctagatcatagcaactatgtctcctctctaaaagatagtggtagttcatcactctaaagcagccgtccccaatctttttgggaccagggaccagttttgtggaagacaatttttccacggatgggagcggggtggttttcggatgaaactgttccacctcagatcatcaggcgttagattctcctaaggaacgtgcaacctggatccctcgcatgcgcagttcacaataggggggttgcgctcctatgagaatctaacgccgcggctgatctaacaggaggtgcagctcaggcgataatgctccctcgcctgtcactcacctcctgctgtgctgcctggttcctaacaggccacggactgtctgcagccccagggttggggaccccggtccagatcacaggaaccaagcctcctctctaaaagatagtggtagcatatccttctagagcacctactgtgtgtggcacggttctatgcactttccatatgttaactcattcatgctcaagtgcgtaaatattaccattttacagatggagaaactgaaacccagacaggttaagtgacttgcccaagatcacattgctagttagtaaacctcagagccagatatgttgcccaggaggtctgactccaggatccttgctcttaaacattaggtggtactcctcctcccggatgaaggctcagatgtgccctggggtccccttcaatgccctctccctcgagggctgaataataacgcaaatggtcctgcatttaaacatcggtttaaagagctcatgagggtcacccctcctatgtggccaatccttgctctagccttggtagaattcgggatcagggctctgattaggaggagcggttagccctcgggatgcggtacggggagacattgaagctggctccttcctccgcgtctcagtgttagcagctacgacagaggccagccctacgccaccgagtggtcagacgacgagagtgggaaccc

SEQ ID NO: 120383 - DNA, 1008 bp, Homo sapiens
ctgcggtgaactgagattgagatggcgccactgtagtccagcctgggcaacagagcaagactctgtctcaaaaaacaaaacaaaacaaatgccacccccacgctccacccaacacacttaaaattgccctcaacactttccatgctcctttcctgcttcattctggccccactgcagcagctcccacctcccgacatactatatccacttatttgtgtttatttaccctgtttccagcactagcacgtcagctccaagggacagcgagattggtctgtcctgttcactgccgtgcccccccgcctggagtgtagtaggtgctcaataaacatttgctgaaggtgtgacgggggttggggggtgccaggatcaggcctgagtttctgagcaagctggacagggtcatgaggagtgggaggaagctgtgctcaccgcttggctaagagaaggatgagagttgggggtgctgcaggcttagggtgagtgtgcactgttcagggcaaggagggaaggagtgcccaggaagtgcccaggcagtgatggggctgccgaggtccatgtgtgtgactgcaggggcccccttaggggttggagggccaggcccttcacccctacaagtccctaccccttccaccccactaccctccctaccctcagacgtagtcttctctgggcagaggcagaaggcagcggctggacacaaaggcataacagctctccctccaaaagctggaaagctcgaacctctgataagatgggtaaatttcaaaggggctaatgggtggggggagaaggctactgataacagggccagagtgctgccagcagcctccccccgaacttcccaccaaccggagggcccagctcctgagctggcctgtgagcaaaacaggttccgattgtgctcttatctgggcctgcggttttgtaaggcccggctggctctgcattaatcggggaaaggcagcggtcagctctagggtgtgagcagtgatgtggggcccctcc

SEQ ID NO: 120384 - DNA, 2486 bp, Homo sapiens
tgtttctcttcagttgtcctctgatattttcacagcctgttagtggcggctgatctgtagaggtatgaaaatacagccccaaagggggaatttgtcatggggaagggccagccactgactacttgatcttggagaccacatttagatggaaatgagaggacctccacagccccgcctccctgccaggatgctagattattggctgggaggtgggcaagtggcagcccagctgaagcaagaggctgattgactggctgctcactcaggcaggtggcctgccctggcatcctgtagattctgagcaggttgagatgtggatatctccatgggaagcttgaaccaggctagaacagctgtctgccaaagatacaagaatatgcaaagtccctcttacccccctccttccctcaagtcttagttggtttgagagccagggatatggatccagggtgctgttgcagggtcacctgcctgttaccacacccccatccagctgggtggtgggtgagggtgtgagacaggcagggagaccaggtaatgagtggctgcaaggagtcatatagcctgggtgtgggtgagggtctgcctgcctgtttctgtctgggtgtctgagttccaaaaaatgtgtgttgtttgttcctcctcatcctcttctgagactgttgtttttttagagcttgattgtgggagaaaagcttgtgtgaaattccctcttcacctccccaccccccaaaaaataaaagggggcataaactttattccactggagaagccctgggggtggctggagccagcctgctgagaagcgtggtgcagctgggtctgggacttcactagagcttactctggagcacctattttctgtgcacatgggagtgctccactccctagcagagcagagggaagtctctgccaggtacccacgccacaggcctcaggatggctttttgtctgagggcctcattaggcccagactgctgctgctggtaccagtctcctgagacactgcctccctggagcccatgcatgcccagctgttcttactgcttagtagccttgaagcagcacatctccactgtccctggcaggattgtgggaggcttcacaacccctgctttcctgacttcctcttctgcccaacactgggtgccccttcccagtttcccagcaggggcttcatgggccaccgtcagtgggtctgggcctgccagagtcgtcttgctcttcctcttgcttctaggcaaccacacttggcaagttaaatgtcccaagcaccttgtctcccttcccaagaacaaaccatttctgtgcacatccttggaggcgagatgagctccttgcagagggccagagtaagtgcaagtcatggagtgcaggcagaggggtccatggcttccccagcccagggagggtatcagtatcattcattctctctcccctcactggtatgggttcagagcaatgcctagggcccctctctgctcccctgcctagtggggtggtagtggctacctctcagccccaatagtccctgctcctcttagaatcttcaccaagtggcaggccacctctgggcaggaccacctgcgtctggcacccaggaggtgaggcagacaccatggttaggtgatagggtctgaacccagttggggagacagaggggttcagacttgggaagaatctgtcagtgtgcatggagtgaggtgtgtgtgtgtggatggatgtgcacgtgtgcatgctttttttctttttgccgtgaggacagttgaatttggggcatttttctacaagaagcagtcagccttctctcccccataaggactggctgtaaccttaagcccatcaaagttacttccagcctggagagaacctcaccaaacagctggtgtggcctgagggtggccatggtgggaaatgggcatgagaataaatacctccccaaattcaatctgagcccagcaggagaggatggtagggttgccagggctcagaagtgcaagctgattactcaccccaccctgcctcgccgcacctttcctttgtttccttgggtgaatgcaggagcagcagtggctgcccttcccacctggacagtggtgtgtgtagaaagccagctggatgtttgtggtggggcctcatggtgcctaggaggagataaagatgaggaggtttttccttattgtataaatgaatatttgtatgattaaattaacacacacaccaaaaaaagctgttttcatgtgtgttggtgagttttattgcaccctcaagcctcctgtaaacttgtgtggccccataatggctctgtgatgtgtactgtttggtctctgggcctttcccttttgcagatgggaaaactgagaccctgaggttcattatatgtttgggaaattagtcctgggtttataatggggtctcctgccctttctggtgcccagtgaccaggaaggtaaggaaactgcctccaaatgacctgtatctccagc

SEQ ID NO: 120385 - DNA, 1111 bp, Homo sapiens
atttttgtcaagaaggaaataggaaagctttgtgacctgggtggaggaaggttggcattgactgatctaccatctgaaagatgggggagttatctctaccctcccctctctttggatgatgtgagaaatctttggattcagtgagaaacttagcaacttgaaatgtactgatctttggcctgccgaggttttgtatggcaaagaccctcaggccttgtctgtggattggggcttccttgtgactcactgggaaccatagatcttgcacttggtttggttgtcaagttgcactgctatgtgtaccatcactgactatcttcactctcttccaggggctccatgggccttaccccttcggccagtcttaaacgggtgtcagcaagaagaaaaattaacaaaagacagaaggcctgactttggggggttagggcaaggggttcctctggattgcagaccacatcgcacagacccctggctctgaccccctctcatcccggaagaagaggaagaagcagaacagactagttttgagtaaactcagtatgcatgtgtgaatgctgaatcacaggaatggtgttgaggctaccaagaagaaatccatgcagccactttgggttttgttataggcatcagtctaacaagtcattaggtcactcgggaagggggaaaaagtttaaaatgggggaaaaaaagccatctttttaaacaaaaattattttgcctacagaaaggttgtagttttgagcacatgttaatttttttccctctttccccacttttatttttttaaataagggataacatattctttatagaatagtgcttgttctggaagagattcaggtgaaaagttggcgtggcatgtttgaggactctgcggatcagtgctacaggagtacatctgccctgccacatgactccagaagtctctgaccccatttgtttttaatggcatcagccaatgagttatcacccttttcctcctcttttctctttaatcttctgttgatttacacctttgacatttgtattcgtcaaccctgtggcttgttagcatcagaacctctctgaagaccaaacttccctgtgtggccagcagaggaagccttga

SEQ ID NO: 120386 - DNA, 1154 bp, Homo sapiens
aagccagtggttgctttataaaggcccacatgaagtgtgtagagctttggactggaaagcagttaaatttagggtaaaggggtaaatatttcataggaagcaaatgctgtttgttttttgagttttcttttttctttattaaatttattattttttccctaaccctcagaacctgtgactttgttttaagagagaaggtcttactctgtctcgcaggctgaagtacagtggcacaatcatagctcactgcagcctcgacctcctgggctcaagtgatcctctggcctcagcctcctgagtatctgggactacagccatgcgtcgccatgtccaactaattaaaaaaaaatttgcgcgtggagatggagtcacactgtgttacccatactgatctcctaactcctcacctcaagcagttctcccgcctgggcctcccaaagtgctgggattatagacataagcgaccgtacctagcaaggttttctttttgctgtgcatttttttttcctgcacagagacctttgagcattgtattggttctaaaccttaagggaattaaagtttttgttgctttccttgggtagttctagatgaatgattgttgttgggaactgctgagtcagggcagcttgttttaagctgctttacgttctattaggttggtgtaaaagttaactgcattttttgccattaaaagtaatggcaaaggccaggcgcagtggctcatgcctgtaatcccagcacttgactctgtcttgaaaaaaataaaaataaaaaataaaaataaaaataatggcaaaaactgcaattacttttgcgtgaacttgatacctctgatgtatgggaccccccctaccaggacttgcaaaatggaatctgagagccctttgctgccccagtgcacacttgcttgagtgggtggatgctgtggctgctgagatggttcatagctcgtctgctagaggcgtggttggctcgggctgacagccatgtggcattttggcaaatgccagttgcttccctcaccagtgctgctcccttaatcaggttgcctcacctgtctgagcttggagaccatgcttgtctccttggatctttgtgagggctaaagagaacatgttaggtgctactgcagcacctggcacgtagtggat

SEQ ID NO: 120387 - DNA, 2624 bp, Homo sapiens
ctggcccctgccagccaggccaggcctgtgagcagggcctcaccacacaatgtttgcagtataaatcaggacaggacttagtactaaaccctgtattcttctgtgtttgcattcagtgtacataagtgatacaaaaggagcactaggcggaagaagcactgaccaggactgacccaggaaatgaggaagaggagggtcctcatggtgttatccgataatgccatcagtatacaccaagagagcatattatttctcagccatacaacaaacttgcttgtctttttattaacctgtgtgaaccttcttatttatttaaatcaaatcacaaataaaagcaaaataaagacaggtatgtgaaagtcctgtgttgtggtaatttatctaaacaacaagctttcgtatacagaaagagtaatgcaaaaatctctcaatgagacatccttttttcattaggaatttcagccttcttttttttcctggaatgttaaaaaacgtctgactcaccagtcagtgtatttcataattcattcattcattttactgatacctgagtctactatgtgcaaggcagaactaagtatcaggaacagcttctgtcgtcatagaagggcagcctactcttctgatagcactgccctgcctactgatgaaaataggtgaatacaactgaaatggaatgattgcctgttttttagtactttggcatacagttgatgttttctatcagtgacagttttttagtactcctttttggaaaggttattttgacttctgtataattttagaaaggactctaagatattgcaggtttaccctcacataagataagtgataaccacatcactggctaggaatgattcttgctatttgacagacacaactataaatgattctgtaaaacaaatcagagagacagttatttttaggtttgctttgaggacaggattataagtactagatcttaaattttccttttaggagattgataaggatgagactgagctcatctttatgtctgtaaatgttctctaacaatattttagggctgagcacagtggctcatgcctgtaattacagcacttagccaaagtgggaagatgacttgaggccaggagttcaagaccagcctgggcaacatagtgaggaccacccctcccttaccacacccaacaacaaaatttttttttaattttaggaaattagccagataatggcttgcttgcagtagttattattgcattgtggaaatgcagttcaggacttggcccaactactgtaatcaatcagctggcctaaggcaaaagtctcttccccaacactggtgagcaggaggcgttgctgccttagctaatgactgtggagcctctgcgctttaagaaggcttgcctgctctctagccaggttgaacttaggtccccacgctcatacctatgatagctggtcagtgaaagcttagggaaagctgaggcaaaacaagcaacacctcagcccctatggacctgaacagtttcatatcccctagcagatgtggggctgttcaatgtagcctttggaaacccatttctgtgtaagtggtgtatgccctgggcaactggcctttagacctggagtcagataccagagtttttttctgggtttgagtatttataccctccgttagcatggataaatcagtcttgctgctagtccctatgtgataggacatgattattcctagagaggagtggctttctgcatcaagctcactgggttttataatcaggatgatggcttcaatttttgcttgggtccgagttgaattcagggttctgtggtaccatctaatgcatatgcccctttatctgttttccttattagtagtggtacaagtgtaagagaagatatttcattgattccaggttagctaaaatatttggcatctgtttttactacagataaaagttgaagagttgctaggccccagaagagagtgaatgttatctgtattgccaaatcctacttttaggctgggattgtcgttggctaccagaacctgttacaccaggtcttagaactccagtggaatctgaaatgtggatgggcctcccggtttgaaagtacctccatccagaaggtaccgcgatggtcttcctgcttggcctactgccataggactccccagacaagctgttcttggaatctctgccaggcttttcctctacaactggtgttatgttgcctgtgttctgtgatccacatgagacacctatgatactgtgtgtgggggagtctagatcgtaaaatagcttccaaatagagttggtgccctctctcttccttgaagtgatggtaattaatttgggggtaagaaaaatagagcttgttcatcaaactatttttctgttccaattaaacaacaacaactctaatatatagttcactgggtgaaagagaattaggtagctatttttcttcataaaaggcatggaacatcagtaaatagaggatcaacaataaccataatctaaactagttaaatgccacactgaatggtctgaaggccagggcactcaaaggaaatctgaaaatgcacacgtctttattcctgtttcttccaattgaatagaacctgctttatttatccg

SEQ ID NO: 120388 - DNA, 1044 bp, Homo sapiens
agggctgagtttaacactatctgtctaacatgtaaaccatttcatactatccacagtacctttactgcttttattcttattcttcattcacaacacacttgtgatttcgtagttataatcctcatttgaaaaaataatagggaagtattataagtaacttactcacattcacacagcaaattgaaggtgggctgcaggctggaacccagggatccagtttgagtctaatgttctagaccacactacagtgaggttgctggcaagtgaagtttgttggctattctctgaaggtagtttatgcacttagtgtcaggtcgtagagacctcttcattcatttgtgggaactgcaaaagaatgtgtggccggtaagaagcaacacagagcaaccaagggacctgtcccagttggctggcagattagcacactgtgtaccagaagggacttgccaggatactctgggcttaatattttgatgattctcttttgaaaacccagaagagccagtaaagtcctcgcagccttgctggtgtttacattggcatgaatgttgtgtgcattttttaaataaattaagcaaacataactatgggccttagaaaatgtcttttgttgtttgtaacattactatctgactgagaataaaaagtatctccaggaactttcctttttgtacctcagtagcttcaaagctgtccagctccattttatttgctttgggctctgagcattgtttgaggttgttctgatgctgtgcactcttgtggctgaagcagagctaatgttcccaagattgccagcatgttttattttggttataagggcccattctcttccccatactctgaattcagcattttaatttctgatgaaagttctcaaagtaggactcgtgaaatttataggttcaaacagataaagtataattcaaaagtgtaagaatggctcctggtatagatgctcaggtttcaaatgacttgttctcagctaagtctgctttaattgtataccagcaggaccagaacaaaatgtaaggttaagaactg

SEQ ID NO: 120389 - DNA, 1066 bp, Homo sapiens
tcagaaggagtcagaaaagtaaatatatgctgactcgcctcaaagattcataaatctggctccctgcttttgttagaaattggcttgcctcattgtcagctcagttgtggctgaactgtctgtcccaggtgaacagtgagatcaagtactggtgaaggctagaaagtgttttaatgatccctttttatgtgattagctgaagagcatctgacgatcaagttagggtagcataggtgctcactccgttgactcaaggctaaccttgctgtgaattctagcactctgactcatctctggggggccagagtagcttctgtttggacagtgcgaaactgatgaaaaacaattcacagagatgtggaaagagaaaaaaaagtcctgttaaagttacgtatgcctttttcttatatgccagtaatttttaaaatttcactgttttctaagaaggcctttacagagcaataagaccccaagtggtctgattcaggacagctggggataagagtgtggctggcagaatcgaggggctgttctttaggacagctacctgctttgctttctttcactaaaggagtaatgatttacactgggagctgaagaggaccccaaattcacttattttgttacttgaaatatggctcttatattgtgtttgttctttctttaaaaaaaaaagtgttcgaggctggtatatgccatatattcccactttaaactggattacagtctgagccactgttattacttccatcaaatgctggttcagaaggagaaacttattattatctttgtggggaggttcatcccgctcctccagagccatccctgccaagtgccatctgctcgcgcactcgtgcttgctggcttgcttttgtgcttattctcttcccccacccccacccctttcctctcttgacagtcatcctgtagagcattttgtatctggagctagcaggagtcagtctgcttctgttacatcagaaatcagctctttttctcacctgctgctatctatgttgactaaggcatagaagagttcttttctctccatccaggtgagggttta

SEQ ID NO: 120390 - DNA, 1057 bp, Homo sapiens
cacccacctatgagctttctggcttggccatcgctgcagttttaggagagggctgctgttcttggccagggcactgtacttgtcttcctgaattgagagcccattaattgttttcctctcctttagggactgatgctttttaaccacctctgtgatggttgcacacagtcatcacagacggttgggaatggtgggctggtattttctgccagctttaattaaggtcctaccagggtttgcttcttttggaagggctggactatggtgaggttattgacttatttattggagttgatgaactagtattaatatgttatctaatttttttcctggactttgtaggatcatttagaagtagcatttgcaagaactgtagagaaaagcttcccattagagatagactgttgactataatgcgttgaaaatgtgaaacttagatgccaaagagaaattggggtctcctttttttcttaatctaagcagaatcttagaaagcaatttatatgaagcatcgagcaggttccctgaaggcatttctggctaaagttgagtcagctccactctagctcttagggctccttagaatagggtgtaggaagtagtcatcagtaaatattcatacatctgtgcactgttcagagcagtgtacatcgtacattaggagacttgaggaataaaaggatccctacccactaggagcccgcagtacagtaggggaaatgaaacatgcacaaagcaattagagagcagttcagtcaaaatgaagtatgaatttgctcaatagagagcaatacagtcctaatatataatttgtgttttgggttttgtgtttgtgtgtatgtattgtttttttgagatagagtctcactctgccacccagactggagtgcagtggcacaatcacagctcactgcagccttgacttcctgggctcaagcaatcctctatctcagcctcccgggtagctgggaccacaggcgcccgccactacgcccggccaattttctgcattttttagtagagacggggtttcaccgttttagccgggatggtctcg

SEQ ID NO: 120391 - DNA, 1958 bp, Homo sapiens
acatgctatagagatttgtagcctaagagcaataggctataccatatagcctaggtgtgtagtaggctctactatctaggttttgtacactctatgatgttcacacagtgataaattgcctaatgatacatttctcagaacatatcttcttcattaagcaatgcatgactgtatgacagaaaagcaaagcaggtgttaaattgggtattttagaaagtctgaggcatgccaaattcttggtgtcttttggtcaaatagattgagaagatagccagggtgatagtatcttccattttgtctagataaatgctggtcctggcgtaattattaataggtccctctttcactctcatttgtcctagtttggacaacatatggtcattctaaattgcccccaaagggaagagcattgataaagttgtaattctcataattgtaaaatacatgtaaaataaagtgaaaaaccacaaagagataccaattctaggaaacttttgatttctatctattgatcgttctctggaataatgatttccaaagatgacggtgcattggcatcaactggtaagctttttataaatagagtttcatggatctcaccacagacctctgctgaatttatactagaatttgaatttgacattaccaaaaatgtagctatgcatgcaatgcaaatgtaccaggcagctttgttagcaagcttttaaaactagcatatagaagaatgtttcattctgtggtttggataatgtttggggtttttggtggtggctatcttgggcctttaagggtaagcctggcattgaaatgagttacctttttgtttcagatgtcatctgggtgattctcagtgtggaggtgggtggacttttaggagtaacgcagcagctgtcatcttttgaaacggagttcaacacacagccgcatcgtaaggtagaaggaaacttcaacccttttgcctctccccaaaagaaccgacaatcagatgaaaacaacttaaaagaccctgggggctccgagttcgactcgatcagcaaaaacacatgggctcctgctcctgacacatgggctcctgctcctgaccaaactgagcaagaccagaatagactgtcacagaactctgtaaatctgtctcccagcagtcacgcaaacaacttatcagtagtgacttacagtaaggtaggtgcccttggagaagagaaggggtaggtggtgggccttgggacttgtgataccccttcatggcaaacctagaatcctagactgccgctccccagaggaggttctttaagactgctcagctctcctgccaatagcaacaatgcaaaagcttaccccttctcccgtttccccagccccatcttcatgtcctgtggatgttgcttcatccacatttataatttactcctgtctctctgctatggtttgggtgttgaaagagtgaagttctttacctttagtattttaaaaaaagaaacaatgttgctcaattatttattctaaatattgttgttgggctttgctttatttaccctgtttgcatgtcttgttgatgtcttttcagtccttatggcccatcgacttccttatccatgacccagagaggccccagtgatattttgacttttcaaatgtggtgaataagtgagagttgtttgttgagttaactgtgattttaaatattctgattgttgtgaggcacttttctaggtgtttgatttcttgatctgttttcttctatgccaattgattaaacagtgtcttccacagtttgctaaggtgatgatggtgcctggttgttggttttggttggttgaataaagccctgatgctgggagttcattgttgtaggtggttcaagtggtggagtcctgtaagcattcctgtgtattcttctctgaataataatgctgcatattaagcctagcatcctacccatattaccacataaactgtta

SEQ ID NO: 120392 - DNA, 1021 bp, Homo sapiens
ttattattattattttttgagacagggtctcactgttgcccaggctgaagcacagtggtacaacctcgacctcctaggctcaggctatcctcccacctcagcctcccaagtagctgggtctacaagcgtgtgccaccatgcctggctaatttttgtattttttgtggaaacagtgtttcaccgttgttgcctaggctggtgttgccataggctggtcgcaaactcctgagttcaagcagtctgctcacattggcttcccaaagtgctgggattacagatgtgagtggctgtgactggcctcaggtgctttaaaagaaaatctccttaaggccagacattttagaatcagggtctccatttgcttactaagtcctcattgtgttctcatggcacatgattctacctccttggctacttctctgggacatttgtggtccattcttcctgttggtgccaaagatcacaggtgccaaagacctgtgggtaaagatactatggcttgggaaatgggactgacttaaccatagctttagttccctgggtatttgggttcctatgttcctgttaggtgtgagtttttaaagctatactaaaagctgggtgttctcagtctgctttaacttaaattatgaccttgagctcatcacttttacctctagacttcagattttttaaatctagaaaacgaagcagtttcattggatgatctcttccacttgtggttttattataacagatggtaaagtatctggctagcagctagttcttatctcagtgatcaaggcattctggtaagaattgggaatggtcattgtctatgaaacaagcttattaggccatctttaccttttctttactttttcatttgtttgattaaagtaatacagtaggcagggggtgaacgcattctggaatataaggtctagaagtggtacaagatgattgagattgtaccacgtagaagttgtattttgctgttcatgatgacccattgcagcagtaacttaggagggtcagaact

SEQ ID NO: 120393 - DNA, 1019 bp, Homo sapiens
ttgttcttttatgttgaactcaaaaaggcttcatctgcttctagaagatcctccataagatgctcactgtttcagttctggtctctagaattctctaataccagaaatatgagtagcccttgaaaataagattccatttttgttttttttttcttttttgagagagggtcttgctttgtcacccaggctggaatgcagtggtgtgatcacggctcactacagcctcaacctcctaggctcaagcaatcctcccaactcagcctcccaagtagctgggaccacaggcatgggtttttgtttttggttttgttttgtagagacggggttttgccaagttgcccaggctggtcttgaactcctaggctcaagcgatcctcccacttcagcctcccaaagtgctgggattacaggcatgagccacagcaacctgccaaatttcatttttgataagagaaattctagcctaagctgtgacttgtatggaaaatattttagaaggaatgtttcaaaatgtaaatgagatctgaaattctaaaatattatgttatgagatgataggctatttcatctttgaagaaggaaacctgccgtcagttgcactgccaccaggtggtggtgattgtttgttttggtggtcatttccagatagttctgtgtgagtcaaagtcggtatgaaggcccggcatggtggctcatgcctgtagtcccagcactttgggaggccgaggcaggtggattgcctgagcccaggagcccaagaccagcctgggcaacatggtgaaactccatctctaccaaaaatacaaaaaattagccgggcatggtggcacacacctgtaatcccagctacttgggaggctgaggtgggaggactgcttgagcctgggaggcggaggttgcagtgagccgagatcactccactgcactccaacctgggtgacagagtgagacccagtttcaacaacaacaacaacaacaacaacaacaacaacaacaacagcagcagcagcagcagcagc

SEQ ID NO: 120394 - DNA, 1048 bp, Homo sapiens
gccccattcatggttggtgacctcattcacccatgcggcttcagctgtcgccagtataccatacacggtgatgctcaaattaatatctatagctgtggcctcttttctgaaccccacacccatgttttaactcgttatgggcagaacttttaacatctcccagacacaatttatatctgctgggcatggtggcacacgcctataatcccagcactttgggaggctgaagtgggagaattgcatgaacccagaggctcgagatcagcctgggcaaaacagagagaccctgtctctacaaaaaataaaattagcctggcgtggtggggtgagcctgttgtcccagctacttgggaggctgaggtgggagaattgcttgagcctaggaggtcgaggttgcagtgacccatgatcacaccactgcactccagtctgaattacagagtgagcgcctgtctcaaaaaaacaaaacaaaacaaaaaaaccaaccttatatccttctcattggcacccccctgagataatcgggtcagaaacctgggagccatcatttgttctgtcattcctaatcagaaactgattcctattggttccactatatcctgtgtcctggagatcaaaaacaaataaatagtaaatagtacttgccttcacagagctcttaactggactcatggcctgtgggccagtgggaactttggagttgtttctagacatcctagaattagtgatctcatatatgtttttggagccagtggcaactttagaaatgttaatattagaaagagtctcatagtgcttatgtgacatcattctttgcctaaagcctttgtacctactgtaatgaagctaaactccttggcacaggatataaggctcacgatctggcctggactcattttcactcccatcttcagtcatcccctaactcccccacagtcagtccccaaagatgccatatgctttcacttctccatgcccttgctcatttgtctcattgcctgaaatatccttttatttcaccaaactgctgctcatcctcaaggccctg

SEQ ID NO: 120395 - DNA, 1034 bp, Homo sapiens
gtttctgtggaaaaactggcaacaatcagatatactgtgaaaatggacatgtgttaccttttagtagagagagctgtcccctaaacgtgggcctgtgcttcatctccatggctcttcatggacatcattcttaggttctacagattcagtgtgacgtgtggccttccctggagtcacctgaaatacttgtcttgaggaactgccttgcttttgccttttgtgcttcttcatagggttagactattggtcagaggttgttggttctgataattccttttgatcagttgtgtgagacaatatatggcttaggtatatgtggttaggtttatgtatgtatgtgagaaaaagaaagaggcctcttctacagtttcataataaactgcacccagcataggaccattgattgcctaacatttttttcttttgcttgaactcaggggcagaggcctggcctccaggggtttgtcttaaatatgtcgggggagaccaatttggacatgtgaacatggtgatggtgagatcgctagagccccaagagattgcagatgtcagcgtccagatgtgcagccccagcagagcaggaatgtatcagggacagtggcggatgtgcactgctacaggactctactatggaggtgagtatgtccttgtgcagcccagggtaaaggaactaaggtaacatcttataacatccccagtgttgctcacagagcctgtcaaattgcataacagggcatggcctctttttaacagtcacctcatgcaggtaaatgatttgcattttatgactaattgattagtctagtgctctttcttttatcctaggaatataatttagtgacctgtacgaggtattatattttgtgttctaaataaatatttagtagtgctgttgtttttattatataagctggtagatactgtaagaatactaaaggcagtccttgttctcaaagtctctagacacaagtcatataaaacagataatgcacaaaatgtgcatacttcttccaacctacttgtcaaactgctaa

SEQ ID NO: 120396 - DNA, 1586 bp, Homo sapiens
acggctctccttgagggtggggacggggcggagtaatggtctggccagaagcctcccccgccccccacggctggaccatctctttcctccttcctacttttcgctccatcgccccgcagcggtgaggtcacgcggggacgtcacgagtttgtgacgacactaagaggcgggcgtccgggagaggaaggggcggggcctgggcgggcgacgcttgcgcagtgggcgcggcgcgggaggaggcggaggcggcggagtggcgagaggcgagaggcggcggaggcggcggagctggggggggtgggaggggggggagagtgagtgagtggcagagtgagtttacccctatgagactgtgagaggcccggggcctacctcaaaggagcggggtcgcgaagctagctagcagcggcccccctccaggtccccgggcccggcggcgcggcggcggcttggttgtgaagaggcggggaagcgggtgtccggtccccgccatggagggcatggacgtagacctggacccggagctgatgcagaagttcagctgcctgggcaccaccgacaaggacgtgctcatctccgagttccagaggctgctcggcttccagctcaatcctgccggttgcgccttcttcctggacatgaccaactggtgagccggccccgcagtgccagcgctggcagcggcctcgggggccccgaggggaagggaagggacacttgagcttggcggcagggcgagccaggcgggtactgagggccaccccttcccgggacggggaggacgagtcggggagccccgtgggcatagggagtatttgggggctgagcagggctaaaggagagttagggaccacggaggcaggaggggcggaagggagatggtgggggcgagctcctaaggtttttcgaggattaggggccaagggacgtgggatgaggggaaaagacttgggcatccaggcatagtgggtagacttgggaggaaaagggttatggtgttggctgagagtaaaaagcacaggagatctggatttggggagtggggaaaaaggttggggtttggagtgaggggctgaggatgccaggattgggcggaaactatagggaaggattaggtgctgtggaacaacctgagcactggagagcttgggagttaggagctgagaacagattaatttatgtgtctgtctctttccatctgaggatagatagggaaaagggggtgatattatgggggaagacaagggggtatggtgagggagatgactttcttgagagttatgccagggaggagtaggatctactagtaaatcgacacatggaggacccggagtgttagacttgggacagggcctgggaaccaccttaggaaaagtgggggaaatgagatgatcttgggggaaggaactttctgaagggacaggactcctggcagagggttcatctggggtcaccagaatgctgggaatggagaggggcttatctgaaagaaagctaagttgacagatgtttgggaaaatggagaacttaggctgggagccaagtatttttggcttcaccttgtagaaggctgaattgggacagaa

SEQ ID NO: 120397 - DNA, 1169 bp, Homo sapiens
gagttcaaggttacagtgaaccatgatcatgccactacaccccagcctgggcaagagaatgagaccctgcctctaaatcagtacatgaataaaaataaaaagtcaggtttagcttttccagccccggccccggcccctgcagccgcagagatgttgatgcctaagaagaaccggattgccatttatgaactcctttttaagaagggagtcatggtggccaagaaggatgtccacatgcctaagcacccggagctggcagacaagaatgtgcccaaccttcatgtcatgaaagccatgcagtctctctagtcccgaggctacgtgaaggaacagtttgcctggagacatttctactggtaccttaccaatgagggtatccagtatctccatgattaccttcatctgcccccggagattgtgcctgccaccctacgccgtaggcatccagagactggcaggcctcggcctaaaggtctggagggtgagcaacctgcgagactcacaagatgggaagctgacagagatacctacagacagagtgctgtgccacctggtgccgacaagaaagccgagtctggggctgggtcagcaactgaattccagtttagaggcggatttggttgtggacatagtcagctacctcagtaaaattggagaggattcttttgcgttgaataaacttacaaccaaaaagaaaaaaaaaagtcaggtttaatgagggtataatttacatacaataagatacacctgccaggtgtggtggctcactcctataatcctagcactttgggaggctgaggcaggaggatcacttgaggctaggagttcaagatcagcctgggcaacataaaaatcccatcttaaaaaaaaaaagttaaaaaaaaagacataaaatatataccttttaggggagctatcccttttatgtggaaggcgttccagctgggggctacatgttggtgatttgaagtctctatgtgaaaaaaatgagcttcagccattgcagcaaaggagttacttggggcaggttgcactcgggtctggactgtggcggtctcaggtgtacaggcagtgtattcaatggaaagtgggtaagcgctggactctatttgggctcaaattctctttttcccacatattaactatgcaatcttgttcagattatatca

SEQ ID NO: 120398 - DNA, 1378 bp, Homo sapiens
ctcctcctcctgcaggggcgatgataccacctccccccagccttcgtaagtttaaacttttaatcttaaggggtgtgacggggcaggctatcctttgattaggttagattatctcaccgttggctttcaaatgctgttgcatttgtatgtagatagtaatataaatgtataaatatataaatgttgaatatagatgcaggtagtaatagaaaacaactttagtggtataatttctaaaataactttagagttaacttttgattgcattgtcactaagatactgtatttgtggaatcccaagtgtggatctaagacagatttaaatggaaagaaagctcagaatgaacctgtgattagatgagctaatacatgaataggagttgctaggtacattaaattatttactgctatgagcccagcactggaggattaaaatagctgataaactccttagtcttttgccctattttctaacccacctaacaccaaaatctataccttagaaagataagaattaggctgggcgtggtggttcacacctgtaatcccagcactttgggaggctgaggtgggtggatcacctgaggtcaggagttcgagaccagcctggctaacatcgtgaaaccccatccctactaaaaatacaaaagttagccaggcatggtggtgcacgtctgtagtcccagctactcaggaggctgaggcaggagagttgcttgaacccgggtggtgggggttgcagtgagctgagatcacctcactgtgtactccagcctgggcaatacagcaagactttgtctcaaaaaaaaaaaaaaaaagaaaagaaaagaaggaaaggtaagaattagatcattgaaagtggagtggatcatgggcccagctttctgggaaagtttgttgtttctgtgtgacagacaagaggagactgagtgctgtactgggtcgtactgtactgtagctctcctgggaggggtcagactgaaatcacattcaggacctagactcaatcttgcacacaatcacgggtataaacccagggaagtagactgtttgtaatagttgcacactaatgtaggtggaccactaatgccctggcaaaccttttctgggcacctgccatcctaggacctggtcaggcctcagcccatagcaactccaaggttacttctctctccttctctaccttgactggctggcactcaactccattatttttgatagcggaatagtctatggtatgaatttaccataatttacctcactattttctttctttcttttttttttttttttttgagacagagtctcactctgttgcccaggctggagtgcagtggcacgatctcagctcactgcaacctccgcctcctgggttccc

SEQ ID NO: 120399 - DNA, 1054 bp, Homo sapiens
tgaccaacacctacaactcttctggaaaaacaagctgcaaagttactagagtagcttcctaggcagaagtatcagtatgtgtgctgcaggtatcacttagaggagggggagagtgtagataaagagaattcctgccttactgacttgtgagcccaaaacacaatcaaatgacttcaatggctttagcatccttaaaccaggctcacaaattcaaattcttagaggttttagggatgtggtgaactggggaatgcatgattcatctaaagaagtcttctagaactcagcttcagcctatggttgacatttgagaatacaggcttggtgttgccttttctcctgagtttgctttttgttttctgttttttcaaaccaggataaaatgataagattgtgggatttgtgttaaaataattgagtaattagagggtggacggggataggaatgggtggggagtatagataaagttgtccatgagtggataattgttgaagctggatgatggatacatggatgttcattatactcttctttactattcttgtgtatgtttgaacatttccataataaaaagtttaaaagaaaaaaggaatctagacttttgtatgaaatcccaatgttgtcaactgattcaaagtaaattcactatggagactaaagaaaacgagtttccagtttttagtctttggtctatgtccatccatttcctctaagaaattcttcaatataggttaagcatgggcttttatgtcgtatttagaagttagtagtattctctgttcctgtttaaattggtcttaaattctgtacctgttggattttgtgtctttgcatattcttgtgtttcaccatttgtgataaggctatattcaagtttgaatatggttttctcttgaaccctttgctgcaaacctttaatcaaaattatttagttaaaaataaattggtaagatttgatatttaaaaagaatatagataacgtgaaattatgtggcgtaatagtaaaattaatatccatgaacccaccacccagctgagaagtagaacattatc

SEQ ID NO: 120400 - DNA, 1051 bp, Homo sapiens
gcacgatctcggctcactgcaacctctgcctcctgggttcaagcgattctcctgtcttgccctcccaagtagctgggactacaggcgcgtgccaccacacccggctgattttttttttttttttttagtagagacagggtttcaccatgttagccaggatggtctcgatctcctgacctcgtgatccgcctgcctcagcctcccaaagtgctgggattacaggcgtgagccaccgtgcctggcctgaacatataatttttaaagaaaaattttagcagtatatgcttacacattccttggcgaacacagtgccttttttattaatagatgaagtaggaataagtatcacagacattggggaaaatttctgattttctcagcattgggcaggggactgaggaagaggtcacattatagttgcaatttcaggactccaggaagaggtggtaaattatgagtcttgttaggggaaaggccaaactcctggggcttttgtgtttgtttagcttggaaaagctgcctaatcacatgtgacatttgtgtctctgtgtagtctttaccacatacaggctagcctgcctggggaggaactatgactctgtggcttcccaaacctgatggggaaagagagagacgggaaggcatatcaagttaaataaagatatagtgtattaaataaatactgtaggtgtttgataattacttgttgctgatgatgccatttgacctacaggagaatggcccacagcagagaggatacaccagtgagtcatattatgcttatttggacatgaagtttttcagatgataaagtatcttgttggaatgcaccctccttagtagtagagtattttggtaaacgagatttgaagagaatggtattcaatatgattttcttaaatgcctaccctaggccaggcactaatctgggcactggagatgcagtgaggaagaaatataaatgccttttaaagggtttaactcttggttttcatgactgctgctcaatgcaaatagctttaatgcccagtattcatttaaatagaccttg

SEQ ID NO: 120401 - DNA, 1007 bp, Homo sapiens
tagagattgcaggtggccgagatcgcgccactgcactccagcctggtgacagagtgagactccgtctcaaaaaaaaaaaaaaaaaaaaaaaaaaattactgcagccaagcacagtggctcatacctgtgatcccagctatttcagaggctgagacgagaggatcacttgaggccaggagttcaaggctgcagtgagctgtgatcatgccgctgtactccagcttgggtaacagagcaagaacctgtctcaaaaaaataaaaagactactgtattatcattataaaataatttaaacatctaatatgaagactgtgcagaaagtctcccataattctgattgttggtctacctcatttgttgtagtgaatatggctttgccgaaaaggtggtggaagggatgttcatcattgtcaattctatcaccatcaagattcactccaaggccttccacgcttcttttgaattgtggcagctccagggctatagtgtcaaccccaactggcagcagagtgaccttcgccttacccgcatcactgacccctgccgaggagaggtgacagccccatcattgtgaagggagagaatgggggaatattcaaagtcagactgattcttaaaggatattattcccattttgtggatttcctcaaatgttccccattcctgggaacccagaggcctttctgtccagtgttactgctacatcctttcctcaattatggatccccaattcactgctttttcttggtgggatcccaactgagagtgctgggagtctctgccttgccagtcttttttccttggacttcttgcttcttggttaatttcattcacaggattaagggattgtactttctctccttccaggttttaacatttaaggaaataacttggcaaacactccgaattgaggcagatgctacagacaatggtgatcaggacccagtcaccactccattgaggcttattacgaaccaaggcaggatccaaatagccctcaaaagaa

SEQ ID NO: 120402 - DNA, 1048 bp, Homo sapiens
gtgaggccatggagacccgaggccagtgggcccagaagctggtgatggaatttcagagcaaaatggagaagtggcatgaagagacgggtctgaaaccaccctggcaccttggagtagactctctctttcggagaaaagcaggtgggttatgaggaactggaagactccagttgcttagcctcttgccatttatctttgaataacagtggagataaagcaagaactagctaattatcccagctgtatgtaatggagagacatcagtgacttttttctttacagagacctctttgactccagggatagccacagtgttgatgtcatgtcatcatttctattcagtagactgttgccttggtcttaagaataatatcatttttgagttcatccaggagctagacagtgttaagctctctttcctacatataacattaatgatcttaggatttttactttccttattctattagtaatgagagttgaatgtatctgattctttttcccaccttatttttatttagattctctttccagtcctcgaaagaaccctcttgagagaagcccctctcagggcagacagcctgcctttcagcctccagcatggaaccgcttacgctctagctgcatggtggtacgggtggatgacctggacatccaccaggtgaggacatgaggaaacatggttggaaagaggtggagcagtttacttggaaggcagctggaacagtataaacaaagttttggaatttggggactatttacctcacttctgggaagattaatagtttggtctgtttctttctgagcatggctggtgagatcaggacttgggaattcccccagttttactgtgaatgctctgctttgaacctcccgctgaaaaaactaactcgcgtatagtgcgaggcaggtgtgagaacacctggaatatatgtgaaagacactgtgttccctgtgacagacttcagagggatggtagaggctttatgcttcctaagcagaaatggagggctgctctaagtttgattgttgatactaacaaaaagtt

SEQ ID NO: 120403 - DNA, 1010 bp, Homo sapiens
gcttatgcatcctgcacccggtgctgtcgatgctgactctgcaggctcagatagcactagcctcgtagattcagagctatctccttcagaggatcgggaactgaagtctgatgcctcatcagaccagggcccagcaagccctgagaaggtcttggaggaaagtagcattgaaaatcaggatgtatcccaggagaggccacatagcaatggagaactgcaggactcaggtccacttgcccagcagctggcagggaagggccatgaggcagtagagtccctacaggccaagaaactgagcagaacccaagcctccagctcaccagctgcattgaagcccccagctggcagggagactgctgtgaatggacagggtgagctcatccccttgaagaacattgagggagaattgtcaagtgctattcacatgaccaaggatgccaccaaggaggctctacatgccaccatggacctcaccaaggaagctgtgtccctgactaaggatgccttcagtttgggcagagatcgaatgacctccaccatgcacaagatgttgtccctgcccccagccaagtaagtggctctgtacctccttcactcatcccatctccttctcctagttctgatcattgggtttaaggcctcttactatgtgcatttctagattgggaagtaccatatagtccaggagaatgcatagaatggcctatttaatgggcagttttcaagccaatatttattgcttcttagaatcagattatctcctttttcactgattcactattttttcccctcaagacaggccttaccgtgttagccaggctggtcttgaactgctgggctctgcaatcctcctgccttggcttcctgagtagctgggattatagacacctgccactgtacccagcttgcttcacaattattgatacaaatatgctatatcagaataataataatggcatatatataatattattttcagtgggctttcatctaatttttttgtttgattt

SEQ ID NO: 120404 - DNA, 1022 bp, Homo sapiens
aatcattgacataacttgtggatttttctccttgaactcttcctccctgttccctttactggcggttgttgcaagatggtattaccgtatttaactgttaactacttattgttcctcaggtgaaagaactgcctatcctacaaaaagaacttatagaaactaaacaagccttggccaatgccaaccaggataaagaaaaacttcttcaggagattaggaaatataaccccttctttgagctctgaaaccagtggctcagccatctgtgccaaggagagaggctatcaccagcaatagcaccacctaggacagagggcactgtccagtgctgaataagtcactacggatgccagagggactggggagcactcacttcacttgtgtgggtgtgctttccactagctgttcttacttggactgaggacaagggcaaagcatgattgtatcccaggaaactggggcttgccctgtgtgtggcacaagcatcatgtcttgcctgtataaagccttttggtcctctgtgtactaggtggaatcttctcaacactgtagggccatttcacctcatggtttcatggcagggacatttgcttccttcacaggcctgtgtgaacaagcaaaagtacccacctcctcggtcacccacagagccaccaaagattccatgtcccagagcttcccatagcagacctgaaaagtccatgacctgagctttggccatggtagtggagtggaacaggaaatagtccagcagaggagtgtgggggaagggggcaggagaggcacaagaataagggagacctggactctgcctttttgggaaaaggaaccaagctcatagcaatttggctgataacacaatcagatttttccaggttaagcttcctttctgttatactttcatcattgtgatgctgtggtagaaagtaaataacagtagtggctcagtcatttaatctttcccctctataatacaacttacttgaaatttaaatcaagaaaaaatttctgacgctgagcta

SEQ ID NO: 120405 - DNA, 1001 bp, Homo sapiens
aaatttttataaatgacctgaaagtaggattttacagtgaaatcaaatgtcactacttccaggcagtgaaaggtaatctagaagaggtttaaaaaacacaaaaccggtcgggcacagcggctcacgcctgtaatcccagcactttgggaggccgaggcggggagatcacgagttcaggagatcgagaccatcctggccaacatggtgaaactttgtttccactaaaaatacaaaaattagctgggtgtggtggtgggtgcctgtagttccagccactcgggaggctgaagcaggagaatcgcttgaacccgggaggcagaggttgcagtgagccgagatagcgccattgcactccagcctgtcaacagagtgagactccgtctcacaacaaacaaacaaacacaaaaccacagaagggttactaataagcagggctgagaatactcagaaaactgacaggtgaggttcaacataatataaggaaatgtatttatggaagaattatcaactgatatgcctgaacactgttagaactcaggaaagaaacaagcattgctgagggggaggagagatcaatgtgctgctgtggccaaaagcctaattgccctgtgggcatcatcaggaagggcttttggagataacagagaacagcactttatacaaaaccatggatatgtcttgatcggattatctgtgtttctagtgaccttatttacaagatatatgataaagggaggaaaggtccagagaacagccaaaattatcaggggatggaggtatatccatatgaggacacatttttaaaatatagactctatcctgcaaagatgaaagcagaggggagttagatcaaatatccaatcaagagcaaggacccggtcctgtactactagctctagggctctatctcatagccttagtaaagaaagcacttctcatagcaaatcagaaatgtaaggagctcattgtctaagaagggatgccaccagaaactatacatg

SEQ ID NO: 120406 - DNA, 1041 bp, Homo sapiens
cctctgggtaggtataggtagtagctattgaacggggattattttccccatggcacaaggggaaacactcttggataaccttcaacaatgaggctttgctaagtggccagacttgggatttgatcttcctcacttgttatttattaagtttaagccttattcagtatctctaattgcaatagatatagttcctgtgacttctaaaaaaaattcctgttaatgctgagacagtatcttttttgtcagtttattaatttttggtcaagatttagcctgagtcttaaagcatttatttgtggaatgccccactgaagtgtcttctccattggctaagtacatgtttaaagccatgggttttaatgtaagatactttcagtatctaattctgtttcccccactgagggtgctaaagagaattagaatctttactaagacatgctcaggaaagcttcacgagagaacagcttcaaaatcctccctatgacactgaatggtagtgaggaaagaattcttggggatgccagttacatacaatagccttattactgctaatcactgtcaataaaaggtcacttcattcacctctatttgaggaaaacaatgagaatgtatctgatgaactagaatccttgtcagtattgggaaattttaatgttgcaatatctagtcaaactttgagtgtactggttctgtgaaccacctgaaaaaacaaattaaatgtattaaaccataatgattgttgtatatccgttgataagaatctgaaatatatgggcttttatattgtttattttcatctcagtcttggggggggaattattacactgtttttaacagtgcttgaagtactcttttatgagataaaattttaatggttctactagaaaaagtgctcaaattttcacaaaatagccaaaaccagttgtattggaacaccaaaaaagaatgatcaacttcccattccaaccagctagacagaaaatgaatacacctagggcaagttggaaaacagtttaatgatcactcaccaaaatccacagg

SEQ ID NO: 120407 - DNA, 1159 bp, Homo sapiens
ctcaaaggatcctcttgcctcagcctcccaagtagctgggactgtaggcgtgcactaccatacctggctaatttttaattttatttttatgtagttatttgagacagggtctcactctgtcacccaggctggagtgccttgatcatgcgatcacagctcactgtaacagttagctcctgggctcgggtgattctcctgcctcagtctgagtagttgagaccacaggtgcgcaccaccacccctggctaactttttaattttttgtagagacaaggtttggccatgttgcccaggttggtctcgaactcctaggctcaagcaatcctcccaccttggcctccctaactgctgggattataggcatgagccacagcatatggcctataggaaatatattttaaactgttgtctatgataaagcctgttatgagacgttatactaatattctcttaaaaaggaaaaatgtctgtttatttccttagcaagcttaagaaaagttaacaagaattacaggactcaaaaggattatgtgattagtaaattattgtgtgataatcagactttctccttaccctctgtttagcactggatgtgtgtgagaagtggggagaaatgccaccactacaacccaaacatatgagggaagccgttagaaggttaaagtcaaaaggacagatccctaactcgaagcacaaaaaaatcatcttcttctagaccaaagtctagaaaggcctatgttactgacggaagaagtattggttccagacttcctataagactgtctgcattggtgctttagtatctcaggcctccaaggattccatgatgattttaatgtctttctcaaaactctgatatttgtcacacctagaaagtatgtagcctgattgatacttgccttgactaaattttgggacctcttggggcattttgaagtatttaactgtcttgaccagttggaagaagatacgtgggccataagcatcttctggacaggggaactgctttcagagagaaaacctttccaagagagttttgttttgttttggtttcgttttgtttgagatagggtcttgctctatcacctaggctggagtgcagcggcatgactgcagccttgaactcctgggcttaagtgaccctcccacctcagtctcc

SEQ ID NO: 120408 - DNA, 1128 bp, Homo sapiens
taatattctttccatgtggaatcatcagcagtaaagagatctatagatctggaagcagaagagctggctggatggaggggactttgctgacatcccctctgaaaaataaggtcagaagagtgggcccgggggagggtgattttcatgatccatggcatttcattacccttgtaaacagatactggagctgtgctcatagccaaactggaaaactagattatttagcaggttttctttccatagctgagccataatcttcccttaggagagatactgtatcttatccttgatggtacagtcagtgcctagaactgaaaaactactcaataaatggatttgttgttttgtgataaggatgatgtcttcttactttgcccaagcctggaaagtaggccaaatatataatagagtttctttcatcttcccagctcgagagtcaggatgtctcagatttaacaacagttgaaagggaagactcatcattacttaatcctgcagccaaaaaactgaaaatagataccaaagaaaagaaagagaaaaagcagaaagtagatgaagatgagattcagaagatgcagtaagtcactttcttatcattccccatttcgaggctctcacttgaccacacaaatttaataaatttttcttggtgtttaaattttcttttataaactcaaaagaaaataaaacgattaatacattatggctgggcatggtggctcacgcctgtaatcccaacactttagaaggccaaggtgggaggatttcttgaggcctaagtttgagaccagcctgggcaacatagtgaaaccctttctctaatgttatgttatgttatgtttttttttttattttttatttttttgagatagagtctcactgtgtcgcccaggctggagtgcaatggtgtgatctcggctcactgcagcctccacatcctgagttcaaacgattctcatgcctcagcctcccgagtagctgggactacaggcatgcaccgccatgcccagctaatttttgtatttttagtagagacagggtttcactatgttggccaggctggtcttgaactcatgacctcacgtgatctgcccgcctcggcctcccaaagtgctaggattacaggca

SEQ ID NO: 120409 - DNA, 1021 bp, Homo sapiens
atcaaagtatatgggatttggccaaagctttatttaaagaaaaatatatagccttacatatttttattaacagccagaagatattgcaaataagcacctaactcaagaaaccagaaaaagggcctagtggagtgggtcacgcctgcagatctagctacctggcaggctgacacaagaggatcacttgaggcttcagtgagctatgatccagcctgggcaacagagcgagtctgggggagaaaaaaaagataaagaacaaaataaatcagaagaatgtaggaacaaggagttaataaggatagaagtagacactaatgaattagcacattaaaaaacataaatgataaaattaaaacattatttaaaatgtaaatgtataacattacaaaatatgaaaggctataggcactaatatggagatctttaaagttataaagacatttaatgttcaagtttaggccaaataaatgtgaaaatctgagaaaaataggtgattttttaaaggaaaatacaaaccaccaaacttgaagcacagttagaaaacttgtataaatcagtaactaaaaagaaattgaaaagattgtcaaagatagactaccttcatcccacctattcccatattcctgtatgagtttaaatttgaattcctctttagggacaagttaaatctcattaatgagttttgtagtatacttaagattctacattaagtcagagggggtgaagtttggatttgatttttattattaaacagccagttttttaagttcaggggtacatgtgcaggatgtgcaggttttgttacataagtaaatgtgtgtcataggggtttgttgtatagattatttcatcacccaggtattaagcctagtgtcccttagttatttttcctgatcctttccctcctgccacccttcatccttccatatacccttcacccttccatataccccagtgtgtgttcccctctatgtgtccgtgtgctgtcatcatttagttcccacttattagtgagaacatg

SEQ ID NO: 120410 - DNA, 1053 bp, Homo sapiens
gccgagacacgcctctcggggcatggggacagcgccttgtgggcccccattatgcaggtggaaagggacaaacaggcccacctgtacgcgcctcccgaagtgcgctccttccccaaaggttttgggagctcctgggacaggaaatacggtaattcgtccaggcagcgtagaaacaaagagataaatgtaacgcgcacctacatttccaagtccattctttcagcacgcataaattaaatatgtaataggtgcggggacctagtcatacccaggtgaataaaacgccctccccctcgtatctcaatgagggaagagaagaaaattttaaaacagaaatatcctcaccacttcatcctcccagtacgtgaactagttcattaaagtgaaacgttcaaaggagacaccttcctctctttaggctttcctcttagttttaatgagattaaccaaactgatagaaaagtgtcagacttgtaaaaacaaacctcaatcttcagtactggcgaactgaaaaaaatcatttaattgggtagaaactatgtgtgttttgttccctggtactagcactgtttctaaatcgaagtaggcagtcaatagttgtggatgaataaatgaattggataaattctgctcgagctatatgactttttgttgttaaggtgcttgcggaatggaggggaaatgctagcaattctatgtacacacaggcccgcggtttcgggccagttgaaatatacaaggttgagtccttgcctgaaagtttaccagtcccggggagcctcattccacgacaccgccatacaacggaactgagttttctcccagtcccccaactttactctgaggggttaacgaagggattaactgacattgcatttttagacaggcgaaaaggaaaaagttatttagtaaacaaaactgcgctccttcacaagtgctggtttcctagcgaggaggatccatagtctgagctctttacgtccaattttcccgcttcccactgtcgccaaaccaaagttaaaatgagtcctctagtcctctacgcgcgcctca

SEQ ID NO: 120411 - DNA, 1050 bp, Homo sapiens
acacattatttatttttatttttgtagagatcgtgtcccactatgttgcccaggctagtctcaaactcctgggctcaaacgatcttcctgcctcagcctcccaaagtgctgggattataggtgtgagccacagtgccctgcctgacacattttaaatggtgttttttcatgcttggggatctgttttccaagcatggcagactagaaagagtaaataagggagaggaatcattcatatacccaatgtttacccatgatatactttgtgccaggccaagtgattgctagatgcactgcaaaatatgtctgagacctgggacattgtacgtggtctgtcagaattagcccctctcttcatacatgttctgttcccttacagagtttatagtagtatgatacgtctgtgtaacaggccaacaaaaaggagacagagaaagcacacaaatttagcataatttatcctacctcccggctgtttgaagctattaacataggtgtatatagccctatatacctatgtaagccccaagcatcagtttactgtatctttgtgctatgatttatgtttattatgactgttagccatcaaataaagattaaattatgttcaatatagcttgttagtgaaagaagaaaaaaaatatagttttctatccaaaatggtttaaatataatttttttacttaaaaggataagcaatagattatctagaaagcacagttatccagaatgtctaggcttacagaggctctggattgcatggattatactttatataatactaactcattttctgattgtttaatggatgcatgccttcggtctataccttgggagcttgggataggcattctatcaaacttcttaacttacagtattttttagttctgggcacgtagcgggcactcagattctcatgtaacaagacagtttgctatgtttagagttatagtgaaatactgatttccaagaaagaaactcctgtataagaatattgtaagatttggttaaaagtaaattctatcaactaaaaggccaaaaagatctgag

SEQ ID NO: 120412 - DNA, 1034 bp, Homo sapiens
ctcccgagtagctgggattacaggcgcacgtattttagtagggacgggatttcactgtgttgcccaggctggtctcgaactcctgagctcaggcagtctaccctcagcctccggaagtgctaggattacaggcgttagccaccgtgcctggccttttttttttttcttttttttttcagagacagtgtctcactccttcatccagactggagtacagtggtgcaatctcagctcactgcaacctctgcctctcaggttcaagtaattcttgtgcctcagcctcctgagtagctgtgattacaggcatgcaccactgcacctggcgaatatttgtattttagtagagacaggggtttcactatgttggccaggctagtctcgaactcctgacttcaagtgatctgcctgcctcggcctcccaaagtgctggaattactacaggtgtgagcccccacgcccagccaagaatgtcttaaaatactccctttaagtgtgattttgttgggagggcagccctgttcctgcattttggaattgctgtacttacatttttgctttctctaaagcagagtgtggttcccatgttaaaaaacaaaaggaaacaaaaaaaggtaacatgcttggaaatgacttttgtggtagttactttatatgtaaaaatctagaaggtgcctaatcttaaactgagtaaggcatttacttagaattaaagataatttacccagcctgggcaacatggcaagacctcgtttctacaaaaaataaaaaaactaggccaggcgcagtggctcacgcctgtaatcccggcactttgggaggctgaggcgggtggatcacctgaggtcaggagttagagaccagcctggccaatatggtaaaaccccatctctattaaaaatacaaaatcagctgggtgtggtggcctgcatctgtaatcccagctacttgggaggctgaggtaggagaattgcttgaacctgggaggcagaggttgtagtgagccaagatcgtgccattgcactccagcctgggca

SEQ ID NO: 120413 - DNA, 1105 bp, Homo sapiens
agtaaattactgggtttttagcccagaaacactaaggaaaccccagaagtagacagtggagagtttgttcttagaaaaatcaggctctcctgtgggtaggaacttggtctcttttttggagagctctcagaaaatatttcccacactgatttccaaaggattattgggagattttctgtggtagagaaaattatatcgtataatatgttacattcatagaacatcttcacataactttggtgtggttagagttaatggtagtaatactggaaattatatggtatgtcttcatatttatcctttctcagtaatttgtagatcaagtttgtttagtttacaaatcaaaaaagagtttttaaaacaagtcagttgtctctgctttgaaacaagatagttgtatctgtttgtgatattattaccactgatccaggaagcagaactgcctcctggcctacttaagtggtgaggacatactatggtggctaaggatcaggttctgacccaactctgccttgtgacttaggcaaattaagtcacttttctgcgcctctgtgtcttcatatatataatgggcctgggatggtgcctatcttctaaagcagcattaaatgagctaaaggatgtaaggcatataatgcctggcacatggcaagggtttggtaaccctcagctgctagaatcatctaatgggagccaggtgcttgccacccttgatgaatcagagtgaggaccctgttaaggacatatcttttattgatgttgccattttaacatttataataattcacagcagaagctcccaaccttttaaactatgaagagtcccatagttttaaaaagcctgaaaattggcaatggtggcaaagttacaaagcaatccaggtccacaatcctttgtttgaaaccttggggccagatatgttttcagggtgctgactcaatattgtatattgagtccctagtgggactgtggcagcaccctggaaacattgtatttctacagcaaaacctgtaaatattgactaaatgggataaatatgaagccgcttcatatcagcgtaggtcaggttttgcagctaaatgactgctgctaacttatgaaaat

SEQ ID NO: 120414 - DNA, 1065 bp, Homo sapiens
gtgtgtagggcagagaatccttgttcaaatgaatagcagagcaatggcagtataccccttgggtcatatataataaaactacaggataggtttcttgcccttgaaatctcattgtaatagtgctgtgagccaccaagagtttccgccattctagttttcaggttgtgttcaggaaccattaatactttcgcaataacacaagttcttgttcatccagggatgtttatttcagcgttaaattgtaagtaaacaagcatgctacaatttatgaaagctgagtatgtgacctctgttcagtgtcaggatgaaatcaaacgctcataatctgacaccttgaatgatttgcgtgatcattgttgtactgcatgattattaggtaaacagtttatgtaagtaactataattagttataatttttacatggccaaatcaaatgttcacagtttcttgtttatttatttgttggttctccagcatctgtaattagcatcactgtcagcatttttcattgatacctgtgtagactgtgtcctcatcacttgctggttaccttatgttaaaaaaccaagtctaggttttctccctagcagtcctttagaagggacgggtggtcctcggctctattctctctcactatccaacctcaacctcagtagggtcttcagggagtaggagctccagaccctgggaccgtgtggcctgcccagaggttcaacagcacactgttgggatgagagagaggccccttcacctctgagaaggaatgaacaacagattttattttagagtactgtatagattgaaataactgaacatttctcacctaacagatagtaaggatttcaatagacatttatttgcagaattagttttctaccacaaagtcgattggggttagaaaaaggggtgcactagtagggattctttgatactgtggttagatggtcattgaaaagaaaatgatacattttggatggattgaaaagcgaaattgattttggatgacatttttgactggcttttgtgtatttgtgtggcatgcagcagtgaatggctgtgtttggt

SEQ ID NO: 120415 - DNA, 2067 bp, Homo sapiens
ggacatggagatttatggaggatgagaccaagtctcaaccacagtatacttttcaacaaatattgctaattggagttaaagtgttcgttaatgtgaaaataaaattactttggattgagactgctgctggagactgctgtagaagaaaaattagacaaaatgctctctataaagcctctattttaagaagaatgattcagagaggaacataggtccaagaaattttcatcaacaaatgaaaactgaactgccaggtttgccagatgtcttattttaaggaaatttttcctcatttggtctcttgtaaaagtcttccttttgcctctgaaatataccctgtccctatgtaacttaaaaataaaattttcagagtgttcaaagttccttctgtgtaggatttgtaattctgtgtaattcagctgggaattgtattgcataaaaataaaggcaaaaaataaccacattgttggattacagagttttgggaaatttccttaatttatttagtatagtccatcgtggtctgtcactcagcatttgttgagtgcctgctgtgaacagacaccgctacttgttctttaaggcggcagcaatgtgccttaatgtggttgtcctcattaatgttctaccctatggtcgtcctaccttacatggtataatagagtagaatggctgatatttaagggagggcctctcccctttatttagacacacaagtcctgggcatctctcttttggggacaacataaaacacccctgcctagtcctttatttggtccaccactaatcctatcccagcatcctgtgtaggcctccatggggcctacatactctgtcaggggaagagccaggagagaaggaagaaggctttgaagagccagccccagcagcctgctgacagttttccttctctccccactgtggaaggactgactaccagtggagaggtggcagcaggcttttggctaagtggagaggctctctcttcctgtgtagtttgtggagaggcagcgttgactcaaggtacagttagaagtcagcgatgctttcttttgggactttccatgttgatgacctcttctctttaagtcaaaccaagctccgctgccccacagtgttccaaattacttatcaaaattcctatgaccactgtgtagctagattcaacttgatgttataaaaccagtttttgtaagataatctgtattaaagtgcaagtgaaatggcactctgttaaactaacctgaaatctgatgatgtgctgtgggaaaagagctgtttgaatagaggttctttgcttccttccagctgggtggacaggaaagacatcctgtccctacagaactgactgccactgctccatatgtcctccatgctcactggcctcttctccggacctaagacccgaaggcctatggcccagatgggtctcacctctccaagcatggctgcccagcttagggaattatagatgtttctgttctggccaaggaggagctgagagtgggggctgataagcagcttccagaactctgggattgtacaatccctggagagaggaggagactgtctcttgttaccagctgccctcctttcacctggtagtatacagcctcttcctaaagagccttactcaacccccctcactttttctgtctcagactcactccagaaatgtgttttctgttccttgttctgccctctctgccgtgttctaccctctctgccgtgttcctaggaccagaccctgctagttccttctagaaactgattttacccatgattgaaaccaaagccttaagattctgtgggtgtggaacaccttctggttgaaaaccaaaggctgtagaattccatgcagatgtggattgttgattccattttgaaggtaggtgtgatgtgggagaagtcgtgtgtgtagtggttcggagtatggtttctggagccagttggcctaggttcaaatgccagctctccacttagtggtaagttaaacttcctgtgctacagttttctcacttccaaaatgggggtggtaatagtatctacatacacagtcaccatgag

SEQ ID NO: 120416 - DNA, 1032 bp, Homo sapiens
ctagggagctgcacaattaaacttcaaaaatgatcattaaagggattcattctttctgctggggaggtactgagttggctatggttttatattgtgcagttgcaatacttgaatagcacaaaacaatgagactatcatgcaggcagataaggattatggacaaacacaataagcattggaactttgaggagaagagagctgcatttttatagcttcatttcttcatttgtccaaaagttaaaaatagaattaattatgccccataggccacctggatttctgattgatacagaaaacttacacaacatatctaaaggatagcctatgtcaagactttctttatcaaaatatgcctttgggtcaaatcatagtctcttctgaacacattttcgtttgttttttatttttattaagcctcttccttagtggatgaacatggttttttaagcaacaaaatacacgggcttagaaagtagggtttattgtccctgtagaaagcctttagattagtaggataagctgatgagcaacttaatgtctactttctatgctaagaatcactagagttccagcctttttataacatcgctacattttaattttttatttgcatatttagaaaacaataacttggaaatgacacagtctcagatgattagcatccatctgctgagctatttctagtgcaatgggcctggtggacctacatggtaccaaaggaatcttcaccctatctggtttgtcgttagtctctcacccaagctgaggggcacaaggactgctgagaggagcttccaaatgtagcagctgatgaagactttgggtctcactttgtcatccaggctggagtgcaatggcacaatcgtagcttactgcagcctcgaactcctgggcttaagcgatcctcccactcagccttctgagtagctaggactgaggtgcacaccgccatgcccagctaactaaaaaatttttttgtagagacaggtctcgctatgttgcccaggctggtcttgaactcctggcctcaag

SEQ ID NO: 120417 - DNA, 1056 bp, Homo sapiens
cacagtgcccggcatgtctacacatgcaatcagtttttaaaggaatggagagaggcctttgaggggggattcaaaagccacagggcctcaccagtcatattcttccatgccctccacagtgctttagatgccatcccaaaacataggtgccgccgaggtgcatagggcaaggcttgctgcgcttcagcatcatgtgaaagcaggttagcttttttgacatgctaggcctctcaatactattatacttgctcaaacttctagaagtttccatgaatgatttaagtcctggggagcccatcatggtagactttacaaatgcagagacagtagtgtggaaaatcaagtgaattgtccaaggtcaaaaaatgacaagtggcggaggcgagttttgaagtcagtttggctaaccgcagagcccaagctcctaacttaggttccatagcttcatcacgcaggcttgctgtgactgctccaggacccattaagatcagtctgagcatttgtcttgcaagtcaagggcagctattgcatttctgcacaatctttacaggttaaactttgcttaggaatctcctaggctgtgtttaaggttgttttctctggttcttgatgcattatatgctgcttttgtttgtcggtgagcagccctttggtgcttacagttttagaaaacctaataggacagctgtgatagggaggaagacctagattgtaagtaactcttttcttgagctgccaaaaaggaagaaacttgggtggagggggatgttactaccatcctgtctgaagctgaaataccaaacaaggagattagagttctccagtttcgtttagattttgtttaatgtgttccccagtccccaaaacttctagatgggcttttggaggagaaggtagagaaaaagaaggaaaaaaggcctctggttggaaacgttgctgctttttgcagtgaagtcactatcttttttccttttcttttctaattgttttgagggagttttagtgctgacataggatgtccaaacttaatcacctttaaaccagtcatggaggcaa

SEQ ID NO: 120418 - DNA, 1090 bp, Homo sapiens
aatgcagaaacagaaataagaacaaaggctttgaggattaagtaaggtaacatttcagcttccctcctatggtatttttaagtcagataagacactccaattatagattgttatttttttaattaataagacatctttacaaaggaaaggcaaaatcgtctcttgcatcttaagacacgtctcctggtgcttttttgtccttgatccttgctcgttggctcgtcttgattatctgatctgtgttgaggtctctctcaaaccttcagtcaccagtacaggagtgagaggtcaatacctgtgactggcggagaggtttggttctgtctttgatgacctttcaatgagctgtttttgcaatcctgggagtactagaagaacagactcttaagcgatgacactgttgtcttgaaacttgactctgttcagcaaaccattgcagtgtaccctcagtgctatgcatctctgcagtgtatagctgctgtgtgttatcaggagtcatttggaagtaactggtctggttgaacaccacacagaaatctttactaattagctagctatctctaactttggtttgtgacttcggtctgtgaaatctatgtctctctcttttttttttccctgatagcatgtggagagggccaaatgtgaactgtgttgacagcactggctacacacccctgcaccatgctgctttgaatggccataagtaagtatcaatgtactacattcctgccttcacccttcagaacccaggccttcacgttgccttttcatttcctagaaaagtttgctggctgagcttagtggctcatgcctgtaatcccagcactttgggaggccgaggtgggaggatcacatgaagctgagtttgagagcagcctgggcaacaaagcaagcctccatctccacaaaaaaaaaaaaaaaaaaatttttttaattaatcaggcgtggtagcatgcctgaagtcctagctactcaggaggctaaggcaggaggattgcttaagcccaggagtttgaggctgcagagagctatgattgtgccattgcattccagcctggttgacagagtgaccctatctctaaaaaac

SEQ ID NO: 120419 - DNA, 1189 bp, Homo sapiens
atttatatctttggaaaaaattgtacttggattatgcaagttttaaacaagcctcttacaaatacaactccctgtcatttgggttggaagttgtgtgcaagtttgagaggagacgggcattccttatatgataagccattctcccctttcctctctctgctctgaactgaagcagatacttttctcagttcctagaaggagggagatattgatgtttctcagtaagcttaggactatttttctaatgactttgccgagaggggattgttaaattacctgtaggattagatcaaagttttccctcaaaaaataggaaattatcctggcaagtccatctgtcaggagactcatgcagctctcagttagctgttaaaagcatgactttgattctgaggggggcagcttcattctgagacatgagaaaattaaaatagtgctcccaaatctcttgatttggagattgtgtgtatatagctgttaatcagccttcctttccccttttgggctgtattttctgggtaggtgagcaacagacatttaaaatcatcagtgaggatgtttgtttataacatttgggaatgaaaagtatctgtttagaattacttctttagaatctaagtgcaattttactccttctagctaaagtggtcatttctcttctctggaggaaatgcataatgaagtttgcttgtaactaatattcttcaatgttggaaagactggtcatccattaaagtccttctcatttaagaaattttcagcaaccatttctaatcctctttgctcacgtttgccttgaaacacagctgcttggatttttgagctacttgagtgtgctagcttaacctgctcacagctgcctcctgcttggagtatcagttgataagtgggaccccagcccagtgctttgagtatctggtaggcaggtggtgggcagaagctgggcaagatgtctgcagtagcttgaagactttaatggatctagctagtggttacaagtactatattgattcattttaaaaccattaatatggttccagtaggatgcttagattaaaggggggtaagagtaaggtgctctggaggttgtctttcttattaacttccctttgaggcatccagagggcagattcaagttgttctagggttgggttccctcagggctgtgtattgctttgatatatttcat

SEQ ID NO: 120420 - DNA, 1102 bp, Homo sapiens
ttccccttccccttccattccccttccccttcccttcccctttcctttctttctttcattttaaaaagggtctccctctgttgcccaggctgaaatgcagtgattggcctgctctttaaattctgttttctagtcttcagaataggaagatactcttatcttagtttttttgttttttgttttggaagtagagtgatagagtgaaaaactcataagtcataggctttcatgtcagaccagagtttaagttctggggtgcgacttattagttttgttgacttaagcaagttacttaatttctctgagcctcagtttcctcttctgtaaaatacggcactataatctaccttgctggattgttttggagtttaaataagataatatatataaagtaaaaatatctggtaactagtaatatttgagatactaattttttaaagtgtatgtaatgtatttctgcaaaggcatttttggaatctgtttttgttactagtagatgacgcttaatgaaacattattcagttagtctattcagagttttcttttatggggaggaaacttgaagtgattgttttcccaacagtggttaatttagtgagcttataaagctttgataaagggtaagactttggttcttgaaagtacattttcctatcctttaattttgcacatataaaataaaattagtttaaatgtagtaagaacatacttctttctttggaaataattccctttgcctcttccctgaaaggccaattgatgcaaactacattaagagtaaagctgaggccaggtgctggaattacaggcataatcccagcactttgggaggctgaggctggtggattacctgaggtcagggattcgagaccagcctggccaacatggcaaaaccccatctccactaaaaatacaaaaattagctggatgtggtggcatgtgcctataatcccagctactcgggaggctgaggcaggagaatcgcttgaacccaggaggcagaggttgcagtgagctgagattgtgccactgcactccagcctgggcaacagagtgagactcaaaaaaaaaaaacaacaaaaaaaaggaaagctagccagtg

SEQ ID NO: 120421 - DNA, 2194 bp, Homo sapiens
ccaaagtgctaggattacaggcatgagccaccgtgcccggcccctactagttatttttaagctcccatgtaattccaaaatgaagccagtttgagaatcactgatagttcttgccctgatagttgtcaggctcaaaaagcctacagtaataagagcttatcgtgatggcttgtgtcagtgatggatgtggtcaccacagatataataaacttgggtattacagttaccagaccatgtctggcatgactgaaacctaagtaagatgctccctatactgtgtctatgagtgtaactttctgcagagatgtggttagaccatttttaacatgaggcaggaaatttgccagtagtgattatgaccttgcctttagcagggcagctttgtgagagctgctttcattctggcgaagaagaaatagagaaaagtttttttgtttttttggtttttttttttctttgctggatggtttagacttttacagttctttagccctaatggcatactttttataaaatcaaggacaatttattctggttgttgggagacaacttggatataaaagagacagtagtatttgcttcagagtaaatagtttttctggattggaattttaataagaataagctgactttcttggctctttctatcacactcatcttgagatgtacaacctggagaatccttttaaacttctttgggttactactctgccccagaattactccacagaaagatcctgtgagtttttgttaatgtaggtgttggttcatcaggagaaagtgataatcaaccagagaaatgttgggttaaaaaagagagaaattgaagggacagctctaagtttgcttaggaaactcatggcatagcttaatagggccttccaaatgggtatcctaaaaggtttgtttggcacagggaggacctcaaagacttgctttctgcccagcatttccccttcctccagactttcaggttacatggaatttgcccctcagggcccagtcatatcataggaggccatggctggcaggccggctgtatcctctggccagcgaaggctgttggcactttcctgacagctgctctccttgagttgtgtttgagctcagtgcagcttcctctgcatcctctgtttatttgtgtgcatttatctttgcatgtgtcctgctactactttttctgtccttatttcatttaaaaatttttctttgccatcgttctcaccttttggggagttgttcccagcagctgtggatctttctggtatacttggtatagttggaaaaaatgatgcagtcaaatgccagatcaaaagcagatggaattgcatatgcatgtttgggtaattcctaatccattacttttagtgttattaatagaattaaagcaattgcagaaacatttaattttgaccttttgaccactgaaaggtgcacaatattgacttaactgacaaaccccctcttaagctttctttcccaaaagtagcagaagcctcctggataaatttaggaatctcaaaatcttgtgggagaattattttcatcagtgcttctcaaaaaggagaggtcatgggacttactttatttctgctctaattagacattgtcagtagtaaaagagcataattggaatgactaacattttgcctctggtggttgataaagcacacaattctcccattttatcccaaattctgtctttagtttgaaacaaaattggcattagaggactgtgggttgtgagcttgaattgatagcaatattacatttgaatattttgcacctctcacacaaaacatgccagcgtttgcctctttcttacataagaaacatcttcccgtgctggctgccattttaatgaagtagatactgcatgcgttgcttggtgcaggctcctggggtaggcacagtgcagtgtcagggtcccttatttctctgtgactgagcccgagtgccccctttacctggaaatggcttttggctgataccttgagcgatttttagtctgctctgttacttttcactgttggctgattgatttgcatgcaagaagctgtgcagatgaaaaacttttattaaaaagcttatgtgtaaggcaatggatggttgacaaatccagaatcagaaccatagggttgaatgcctacaaattgtaaaaccatttgaagtttaaactgaaataatagcagtg

SEQ ID NO: 120422 - DNA, 1011 bp, Homo sapiens
agagaagtgatgaaattaccccccaatttttacatggtgttgagagtagtcattaaaaaagtttgatctgtcttctcgggaaattggtgtgattgtcctccaaaaagtgcaggtgctgtgggtaaagatgatggcttaaagagagcagaagagatgaggaaatcgatcttacatagttttcaagagatgaatgaaaagctcactgagcctggtaatcaagctggcatttgaattattgctctagcacttactggatggtgactattatttagggaatcatttaacttctttaagcctcagtttctacatgtagaagggatactaattcttacctcatggttgttgtgaatattaaaaagaaaatgcttggcatagtgtctggcacagaaggagtagtactcaataagtagtagctgttggaagccagctgagttaggtgaattggtagaggactcaagtcagttgtttcttgagtatttaaaagggctcaacattccagcaactggagaagagaaagcaaatggctatgaatacccactacaagaactggcagaagatcaaggggagcaaagacagcaaatatgctattaaattaggcatggttagaaatcgtggctggttggaagctgatccaggcaaagctggtatattgaaaactagggaagtttgggggccagaggtcagaggtccaatgacaggtagagaacagacgctttaggagttcaagaagaagggggagatgtaatgaggtaatcaagaccaagtcaatgtgaaacagtccgaagtcccaaagctgggctatacctatgggccccaaggtgagtacagatggctcctaatctgaagattctccactgtgctattacatgtaatcccaaaccaaacttataagaatactggccttccctggcatttgagttttattctgcctctttaaaagggctactcagaataaatcagtctcctttgcagagtcaggagaagggaaaccagcctctctgtgcagtgtta

SEQ ID NO: 120423 - DNA, 1086 bp, Homo sapiens
aggtgtgcaccaccacacccagctaatttttaaattgtttatagagatgaggtctcgccatgttgcccaagctgatcttgaactcctgagctcaagcaatcctcccaccacaggctcccaaagcgttgggattacaggcgtgagccaccacacccggcctctttatcctcatatccacctgggtgcctcctgaggacagacacttcatacatttgtccatgggatgagtggttacagtgacagttctggggcctgtctcagagtttctcacttcagccctctcaccatattaccttctgtcccttccttctgctgttcagagttataaggatggtgaaggtaatgaatgcttgtgaagtgctttatatcttacagagtactttcatgtaccttatctttgatgatccttgtgacagacctgtgaggaacggagaagtagttggtctcatctgtgagcaaagtgtgttgtaacggaccctgtgtggaggataataacaatttcaacatctattgagagcgtggcatgtgctagacacggttcttaatgcattacacgtataatttaattaccgcaacaatcccccaattaagatcccagaattgcacaaagaagtgatttgcttaaaaactgcttcttgatcagtatattctattgttagcaccttgtccctaagagaccttatattatccttactttgcagaaggaagaaaccattgagtaattcttttcccacccattgatctgccaaaaaaaactcatcttggccttggatgtagtttttaatgggaacaagaacaccagccttagggtcttggatctcggcaagcttttcagataccaaagtgtctttcttaggaattgcctggctaagtcatatgattataagaatttctttccatcatttcttatattccacaaaatattggtggattgtggtttctctaataggattatgaccctcagagattcttcctccacatatttccttcctccgtaagtttccattctttccttctacccacttccttccccttggcatgtgtctggtattgagcccttggcatctgtctctctttcatcattga

SEQ ID NO: 120424 - DNA, 1787 bp, Homo sapiens
agacagcaacaggagaggtacccaggcaggcatctcacatccctaagggggagaagtgtgccatcatgacatggtggagacctggattctcatcactatcatgacattaaagggatttttaagtatcatgcagcccagcccagtcactttagacgctgaggcccaataagatgaaatcactgccaaggccacacagctagagaacagctcagccaggaccagagccagatcttcaggcttctaggttgaagtcttctcctgcaccacctggggtaaccactaagactcctcatctgtaaacatagttgacccttttggttctaagattctctgagctcatgaatagttcttgagagttttgagcaaactagggaattgtttggtataggtgcaatagatcccacttatagagaaggttaagttgaatattatggaatgtgagctagtgctggacatagtgttatttactctgatgatgtgggttaaaatctttaatggggctgagttcatgcaaggaaagcccctgggtgtgccagtgtagtgctgatgttagattctgatttggccaattatttatgctacttcagggcgaggtatttgagtgtacagtagtagctggcctcatgagctagtagtgtcagatttctaggatgttagggaagtctcgagagaactgcaaatgtctcctggcattgacaaattagaccattttgttttcagtggatcaactaaggttaaacttaaacaaatatgagcagctgggagattttggaagaagcaagatgtgcacattctcaaaaaaaaaaaaaaaaaagagagagagaaagaaaagtctgtgctccctgaggaaggaaggatgaggcgtggaactcggaatggccccctccgaggaaggaagcagttatttctctgccgttttgtttctgttaaggaattccagaagttgcaggttgtggatcatgacctcttttttttttttttttttttttctgttgctgcttgccagaggaagggagggcgggtggcctttaaataacactttggcctttatggaaatgtatcagatgttccaggagtgggtctccctgctcgcgcttgctcactggtgctcttacttttgcttcatgttcactcactctgtcctgacttgtgtcctttctctaggttatacttaacactcttctcgccttatatagcaaggtctggtcgttaatgttaacagaaatctaacaacagggaaggctgccagatagcattaatcaggccagtgtttggaatttcataaatgctctgactttgggtacaaattgaacattaagaacaatatgaaaactgtcttccttcctctctcttcttctctcctctccccctccccagcctatccagtttctctctctgtttctctgtgaattcctctgctttgccatatgcttgctgcattggaactttgttgatttttgccacgtttaattttttatttctctgtctctccgtccactccaagaccacaggcggagcagcagcagccggagccaggactctgcggaggggcaggacgggcaggtcccagagcagttctcaggcctcctccacggctcctccccggtgtgcgaggtggggcaggaccctttccagctgctctgtaccgctggccagagccatccagacgggtccccccagcagggcgcctgccacaaggccagcatgcagctggaggagacgggtgtgcatgctcctggagcctcccagcccagtgccctggaccagagcaagagagtgggctacct

SEQ ID NO: 120425 - DNA, 1032 bp, Homo sapiens
tgtttggttttctgttcctgtgttaattcactcaggataatggcctccagctgcatccatgttgcctgaaaaggacacgagctcattcttttttatagctgcaagaggaaggcttttctattccctgcttctccatggttattcttactgtgctgtcctggaaggccaaatacttcttccagcagaagggtcctgcccatcccacattcccagattggtcaggcagaagagggataagtggttcaggaaatgaagattggggagtagaaaacattgggagtcagaggcccagttttctttcatagccattattagttggaaatatgtaccaatttctctgtgacctatggcatgtctcgctgagcagaagaatgtgtttctcaaagataggtaaacaccatgggaatgttaaagtaccacccttgcaagcttcttactgagtggaagctgcctttgaagtggactgggtctgtctctgaggaataatttcaagaactccatttagctctccaagaggaggggaacactacagctgacatgtccatttgaacaatctgtacacttaatgccctacccaactctatttgggtaggtgctggaaagttatgtaaaccaaagccaatccatttccagtgaaggaactgggttgggggtgggggctgtgcttccagcgctacctccagataaggtataagatgaagcttaagattctgattaggcagagacagaggaatcctgtgcaaaagattttcattgcttagtaaacaaagatttggtgagcctgtgctagatgcctggccacttgtggaaagtcactatgagtgagatagctctgggggaggggggtgccaggagattacacactggagtgtgtatatttgtaggaatgtatgctctacctttgttttttaaaacagagttttactaatttacagtcagctataggaaaacttcaagataaatttaagaggaaggtgaagataagtgcagtgtgctctgaaatggccatagaggtcaagagagaaaaacatc

SEQ ID NO: 120426 - DNA, 1153 bp, Homo sapiens
cagcatttctgggcagccttatgggctccactgtttcctcctggccaagaaatacaaaatcacctgggcaaagctgggcttaattgaggttggctgtgtgggctcgtaagccagtgtctctttgcatcgagaggagtttcatttgctgatatcacctgtgcagataaaggttgcaggtgcttacaatggcccagggatctacatctatccaagatctaggtgctgtgggccagttctctagtgtgactgaaatgcaaaagccctgctacattttaaatttgaaaaaacttaaaggcaattgaggtcttattggaaagaattcagaagatcaaggtttgcttacgtcctaaacattaacagggccctttatgtgtaacccttcaatgttgtttcttagtgatactgtacttggtttctgtggatatcactctgtaaagagaaactccaaaagtgtttcccccagtgattggccctaaacccagggccttggcaggctttcctggaatagggcattagttaatggctgctccccaccctatccctgaccagtgcctgtagccggctttgccatatcctgttcttgctgatttttttctttgttgtccttggacccccgggaggtggggaactctgctctgaaggctctgaaggtgcttgggcctagctcacctcttcactgtgagacctggggagggagaaggaaggctgtcgggtgggagcccctcaggctgctcctggaaagaagtgcaggaccacagatgggctcaggttcaggagtcagcagatccagcttcaagccccagctcctccatctccacctcggtgcatggactacctcagtaagctcactgttattattcttatttgtgaaactgaggcagttagatctgtgtttcagagtgttttaccaattagagatgtgtttaactgcctagcacagttcctagcatgcataaagtgttgactaaatggtagatattaatgttactatcttgcttggagctgcagagaatgggaactgaggactggagtgtgttcagaccttatgaaatgcagagctcaggccgggtgcggtggctcacacctgtaatcccagcactttgggaggccaaggcaggtggattacctgaggtcaggagttcgagaccagcct

SEQ ID NO: 120427 - DNA, 1051 bp, Homo sapiens
tgttctccagttggggaacatgtatggctaatagatttgggagtcattttctccaaatacagactgctccttattgtgggttaatgcagccctgttgaactaccctgagcaacatgacttctgaaagatggcctggttaaggtaaacctctgtgatcatatctgttaatgacactagcattctccctattttctattgtatttttggtgacaaagaagtcatagagtttgcctttaaaagagctcagcctaagaggagatctgaatccaaacttcagtagttattttctgtgttctccagtcaagtcaaagcactctttgttgtcttaatgatgcttgggacataatagagggcaaactgagaaggtgtacgtaaataaaattttaaaaatatacagataaggagtgggaaattcacccacatccctccatgcatacttaacctctgttaacattcaatacatatccaaattcggagtcttagtgtatttactgattataatttgcttttcttacctaataactgcacgttgtggatatcttaccatggcagcatcaataagacctggattcagatcgtcattctaaaaaggctgagtattctcttgtatggctatatcataaggttggttagtttgttgttgttgaaacttctccaaccattagatactgcacagggcattttccacctgcccttcaggtccagttcctacccttttctatctgcttatgtgtcgtgcattaataggccaaggggttgttggattggttttgtccctctactgaaagccaccactcctgggagggaccttctcccaatagctgttctctctgggttctagtaaacagtccttccctttgacccttctgacctaaggctcctcactgtgactagctcccctccctgcaccttacccaaacctgtgtaaataatcccattactaagttccttcaggtgcacaatttgtgccgtcttttcctgcagggaccctgagtgatacagcagtttttggcactgtttctatcaactctgagcaagcatagatggctgt

SEQ ID NO: 120428 - DNA, 1087 bp, Homo sapiens
attttatattattctaagcaattgtgtctaagaacaagtagaggtattttacataatcagtaatagtataaaattgaagtatatttgtattacagttacacgttcagctaatttgttgagcacctgctctgttccaggtaggctgtaagtgctggggatacagcaatgaacaaaacagacaaatcctcttgccctcatggagctggctttctagaaagctagaggggaatgagaatttaaaaagaatgaataggtaaaaatcgtagtatgtagttgatgatgggagtggttatgagaacaatacagccaagaacaggattagagggtgcggtgggaggattgctgccgttaggtgagtcagccaaggaaggcccctttgaggaggacgtgaaggagcaagctgtgcatgcttggggtggggagggagaagcatgagtggttattgggctactttctcttaattaatttctcctgtaagagaaatttaaaatcctaccctacacttaatattgtcttacaaatataccttataacttgacttttacttttaacttcctttttctttagtcatgattgctacctgttgcctttctcatcttggtttttttccttgatttctttattttaagctgttgggtgcatgcttttaaacatgcacatacccacatttttaaaaagctattgaactagaatgaaatcataatttctcaaacttgatcattgttcttgttgtcatcctaggcaaggatgttgggtgagttctggcagaggggctgggttataggtcattgtcttaggaaatgcctttccataagctcattgcatactcaaggcagaaataaaatctgaaaaccaggatcacgaagcaaagggaagagaattcaaaattactaagaccagaagatggccagaaatctcagaaatgggagatccagtgagggaggccaactgattgggtgttcatggaggcagggaaggtgagttgagggtatgccaccaccacttggaacacagaaatggtgctgatgtcctaaaagagcactcaccacaaataatttgccctgatgaatcttaaatacatcctctc

SEQ ID NO: 120429 - DNA, 1031 bp, Homo sapiens
tggttcactgcaacctccatctcctgggttcaagctgttctcctgcctcagcctcctgagtagctgggattacaggcacctgccaccacgcccagctaatctttgtatttttagtagagacgaggtttcaccatattaggccaggctggtctggaactcctgacctcaggtgatccacccacctgggcctcccaaattgctgggattacaggcgtgagccacggcgcccagtcgacttctgcattttgtatcccagttaagaagactttccttactctaagattacaaatatatgtatattatttgtatatatacattatatatattattacatatacatatataattacatatataatatatacttatatgtaatatacaaatatatattatttgattacaaatctattttttatatatatatagttacatattctatatatatacacacacacaaacacataatttcctcctgatattttatggtttcatttttcaggtataaatctttgtttcttcggaattcattttgctatgaggagtgctagacatcctgttgatttttagcaacaatttgatctagcccactatttgattcacttttcctggtgatgaaactaaagctttgagagctgaaatgacttgcctacggtcttagggttgataaatgtgggaaaccagttggaactacatcttctaaggattgtatttagaatataggtgagctaaacctttatttcagcattaattagcagttacttttcatttcctcttgtttcaacccaaattattgcagctttatcttactttttccctctaactgcagacaaaaatattggtctttgtgtatgaaggaaagcaacttacgaaaggagtctcctgggagaagcatgtgtttccttttttaccgtaatattaagactcaaagcatttcttccctttactgctctctaagatggggggctgttaggtttttcttttgtgacttgaaaagtgaggtgatgatttctggcaaattctaaaatttggaa

SEQ ID NO: 120430 - DNA, 1759 bp, Homo sapiens
acctggcttgtgggaagttctgtctgcatctggggagcaccatgtacccttgtcaaatttgtggctgtgccttttagtttagtttagacagtgcctctcacttacattaattaaaagatatttttaagcctttgtagtcttggtattactcaggccggtatcattgcatcatttgctaaattttatgtaataaggtaattgtgtctacatttcttcactgttgtgctagaaaaggaaataaaacatcataaatctgaagtgagcttggtcagaggcagtcagatctacaaaagtgaggccgaagagaggaagcctgagccgagtgatgattgatccctgtgacatcacagaaggacaaatgggctaaggacagacttgatcacgaatcctggcatcctgagccaaaacccagatgcaaaaacttaaaggggatattttacaaaaagtgagggaaacagctcacttgacactggtggcgatagcctgtgggactcattacccgcgagtaagtggcaaatgttggcttgggaacggcctcgccctgagtaacaggaagaaaggcgttggctggcctccctggagccctcttctcagctgcactgccagtggctgagcaggctggccggaccgtgcactttactttatcagcaggtatttactaggtgccaattatgtgtcaagcttggtgctaggtgctgggtgcagggggtagagttaaaggacacaattccttctcttaggaagtttccttgaaggaagttgagtggctcctgaattctatctaaagagggcttaagagcagccatctggttgaagtaggggctgggggctcatctgaatggtgtgcttcactgtttggctttgttttacctgttttatgtcttagatcaacaaaaagaattttctaaaatacacttctatttatatcttaaataagaataagaaaacattagttgtttatatgtaaaagcattttatttttattggtgttggcttggcaggaggctattgagcttataggtgggtaaatgtgccccaccccctgggtacccctcttgacatggccattgctggcctctgtttccaccctcatgtcacattgacacatgggtcttagggtagatgtttgttttgagttctacctcaaggctggctgcaaactgctcagaggttgccaacctgggcgagtcgggaatcagcctcacttctcagttccacagttgatttactagtcatccctggatatcagtttgtctttctgttaaacagaataaaacaagagcgtttcctgccggtttcctgtggagtgtggcaggccagtgcttgttggcttcattcagaaaccaggccttttggaaatacagagccatgtcctcagtgactgcccttcacaggtggctgccccacctctctccgcttgcctcctgctttacattcagagcaggaaagctgttagcacaaggttcatttaaaaccccagttgaggaggttatcatagcatccttaattctagtgaatggctctagttttcccttcagcagttggagtgattaaatgtcataatatatcaggggagtaccaattatgaacatggatttcatgctgggtgcttttacattctttgattggtgttgggcatagtactaacttaccttggcagcacctttaattgtggcattcatgaattgaattggactctgagcagctggaagggtctggggctgaggactgctgccagggcttcacctgccctgtcaca

SEQ ID NO: 120431 - DNA, 1129 bp, Homo sapiens
ttagtagagatgtggtttctccatgttggtcaggctggtcttgaactcccgacctcaggtgatccgcccacctcagcctcccaaagtgctgggattacaggcgtgagccatcacgcccagtccatcctgttaatttttaaagtcatttgccttgataaaaagttgacagctttataacatttctgttcctcccagttaggaaggaaaatggcccacacacttaccaaattaaggggctactgccacgtgcgtccctgttgaagtgggacagcacagtgctctgcacagaagccattctcctgaaagaggcaagtgtgtgtttctgcccagggctgtagagaaggaagggtgagaaaggtcatttttcccaggtctttttccttcagtgctcagccctcgagaggcctaagtcatgtattaggaagctcaggcttctgtaacaaaataccatagattgagtggcttaaacaacagatgtttatttctcatagttctagaggctgggaagtccaagatcatggtgccagccagcatggcccctgacaaggaccctcttcctggcttagaaacggctgccttctcactatattctcacatggcagaatatatgtatctccctcttctatataaaccctaccctcatgaattcctctaaccctaattacctctcaaaggccccatctccagataccttcatagtgggggtgagggcctcagcatatgaaatttgagggaacagaactcaggccatagaaggtatcttcatcaagggctgctccatattctgccacctcctcagttgcaaaatcagtggggtatcttggcagagaggcaacaagaaaggtttaggccctgtattgctagccttgttaccttggttaaactatttagcccctccgagcctgagttttctcacctgcaaaattgagagattcatgtggataatgtctgaggccctgcttgctgaatctgcagctgcctgcctcctgcggccctcgtcttcctttcctccatttccactgacttggtggtgagagcccaagggccaagtttgttgatccctgtaccagcttttctcacttattcccacttctgggggcaaaggaaaaaagaggagtttgagattttg

SEQ ID NO: 120432 - DNA, 1037 bp, Homo sapiens
attttcagctatgtagaagcatatttgagattctgatgcttgtgcctgcctacacacagacacacatggcctgagcacaaaagtatttgagaaaaacaaggctcttattgatcatttccttcagtctcagactctctctacaccagttcacttattactcaagcatctgattctacaagaggcagaattttcgaagatgagattcctatgccctggctgacagtggagctttgaagcccagcctgggaccctctggcctttagccagggactctttggggtcccagtaagcttccccttcacccctttcttctctcccgtagacctcagggattggcccacctgtccaggtgtctgcctccactgtgtcttccctcttccctcgtatcccagaactctggggaaggaataatgttttccagtgtctccccagttttgctgtgtttgaaataagcacacaatccccttttaagattttattgcatgttaaaacaaaaatgggaaactgagaggtttgcggaaaatagccaataaatagccaacaatggggatgttataaagttatgagaaatactaaaaataacagttgtcctgggtcttggtcaaacgttaataaactagctctttccttggctcctctgactgccttctctctagatattgtcttgaggttgtagcttccactccttttctgaagagccctacctcctagcacatacacaaagcccctagagaacagttgttggcagcaatcaatgcttacaaaacagctgagactggtgggctgtgatcgctctggaatcttcttgcaggctgagattggagatggcctttgaattgtgggcagctcgggggtctcccactgcaaaggtctcacaaagtgtagaggattgcatgaccatcttttctgcctttcctctcccttcatgccacttttcttgatgtctttcctgagaaaatttgtacactccataattgcaacttgcaagactcacttgctaacaaacccaagggtgtaagtccacagggcctttcctg

SEQ ID NO: 120433 - DNA, 1641 bp, Homo sapiens
tgttttcaggaaagatgaatgagccttcaatgtagttcacatagctttcacatactccagaattttgaaggtgtatttgattttctaattttatttgatttcaggagacagaggatacaaacatattctactagctaagtattctaatgtgctgcttatcatgctaaaggaactcacagatgtagggatccatttcttttgaccctgattaatatgagccagtttcccagggtgtactcatcctgggaacactgataattgagttttcagactgtcaagtctggggttagcctgggttccagaatagagaaagccacaccacaacacagaagctgtgctgagagcccttcacccagaaggctttgtgacagggaataatggtgccatcgactttcccacattcctttctctttgtttccttcgcctctcgggcatgtctttgcttattagcatgttgaacagagttcatcacaaatgaaactcagaccagtgttaatcttacaatttattatcctctaaaagatctgatcctgaaagatttttccagtatttcagtatgagacttttcaaactacagaaaacttgaaagacttgagtagtgaatccctgaatatccaccacgtagggcatggattctataattagcattttgctgtacgtgctttattgcatctatccatctgtctacccctcagtgcacttagcaatcatgttattttttgatgcatttcaaagtaagttgcagacatcagtactctcatccccaaacactttaacgtgtatatgattaactagagttcgatgtttgtttatagttatttgggggtaggggggtaaaatttatacaaagtgaaatccattaagtctgttattccatgagttttgataaatacgtacatttgtctaacccaaattcctatcaagatactgaacattactgtcactcccagaaagttccctagtgccttccttagccagccagtcctcacccagcctcttctggtagttttccactctaaattttgcctattctagaacttcatataaatggaatcactgcagcatgtgctcttttgtatgtcttatctgaaaggttttaactagtgctttaaactgaagtctagggactctgtcaacttcatttatacaccttcttcctgtttcgcaagttcagaggtaattaggagtggtaaactgcaggaaatctcaaggcagctgatggatcctgatagtgtatttgtattaagtatgtatgtatgtatttttaaaccttaagtatatataatttggtactcagaatcctacatttgaccaccctgatattataagacaggtgttcccctgtagaatctgaggagctaagacccctttccctggccacactgctaaggaaattgattctgagtagaagtttaggatgttttctttggcctggttttatccacagccagaccagcagtgtgctgtaatgacattcagattgtgaaagaaccagaccgagagacagttacttggaggctggtgggggtgcccgaaggaccaactggcagattaaccagtgtttttaggtaactgcaggctttctgaggtttgtgtacttcctcctcacccctccccaccatgcctgggtgaaaagtagat

SEQ ID NO: 120434 - DNA, 1022 bp, Homo sapiens
tctcctgcctcagcctcctgagtagctgggattacaggcatgtaacaccacgcctggctgatttttgtatttttagtagagatggggtttcaccatgttggtcaggctggtcttgaactcctgacctcgtgatccgcctgcgttggccttccaaagtgttgggattacaggtgtcagccaccacacccggccctgtgttccttttgtccatgaaatcattacttactcatatcgagaaacctagagaacagaggcttctgctcactggccgtggctccctccacagttttcagtcctggttcccagagccaccatcgctccagcagcaatgtttccctgggtgctagcagagagggctgagctgagcttggtccgttttcgtcagtcttggattatgctggagtctgcagaggtggctttcctggctaaatttgtggatctgttttcaggatctgttgcttacactcagtcaagccatctcacactctgttgtagcttgcaagcttttccaagggtcaagtgtttgcgggaaatggatgttcaggactgagacaaacactgttaccattttcaaagctgtgctttgaccacagggatgggagggatagcagtcagttccattgaggatggtttctgctttctgtgtccaaggagcaggagccaaaatcacttgcatatgcttgagagctgtgagtcagaaacagccattgcctcttggatttgataagtcgggagatgtggcagcacctcgggaagagccctccccttggaagggttaatgctgagctcttcccgtgacatctggtctcctgtctgatcccacctactagttttttgtttgtttgttttatttttgttgttgttgttgtttgagacggagtctcgctctttcgcccaggctggagtgcagcgcggtgatctccactcactgcaagctccgcctcccgggttcacaccattctcttgcctcagcctcccgagtagctgggactacaggcgcccgccaccacgcccggctaatt

SEQ ID NO: 120435 - DNA, 1047 bp, Homo sapiens
gttttgtcttctttacccaagaactgaatttgcctgcctgctttctacctgagcaggcaggtgagtcactggaacagctgttatcagaagaggaaaatgaatgcccagcccctgaaaaccagcctggcccaagaaggcaacacttcagacggcgtgctggcccaggagacgccctgcttgccagctgccagagtctagctgtggatcgggctcctggcccactggccgcgcagcccggcggaatgcgatgctgccgtcccagcagagccacacctgagcctgacccccgagccccggcccatgtgccccattcagccccttgctgccttgagcctctgagcacaaagggccggtggccatggtttgcttattccgggactgctgggggaaaacaagtaaaagtctcttttctccccctgccgtgttctgtgctgcttgtgttgcatgtgctgggtcccggtgaacagccgccgctgctgcttccctcccggagccctcgctgtgtgcctgtgtccctcagctgcatgaagatgtgtgctctctcctgactggtttatgctgcaaggtcgcagaacttgcccctcgccacggccccacaggggctccagaagttgcatggatgagaggagcggcggggcttgtgggcacttaggagctccctcagccccctctagtgcctgtggggacagactttctgaaatatcttcagcacgcacgctgatgaggagttgacctggagactgttgggatttggcttcccccacccccgacctgtgggcagagatcatgcatgtgcagccgtggccctggagcagctcagacctgggggtgtgagtgggcagcagccgcccgaggctgggcagtgtgtggacagcaccaggtggtcctgtccttggctgtacacagaagaggagctgcgtgtctgctgctctctggtctcttgtatatagtttggctgtttgatggtaatgactatgatgtggcaatgccatctatcttcctctgagtgccgctgctaccgccttaatggtttttcccttttcaagc

SEQ ID NO: 120436 - DNA, 1035 bp, Homo sapiens
tgctttccctgcagcttcacctcggcagcattctcttcctcctgctcagcaaaaccacagccagaccagattctgttcttcctgttctctgcctgcagccccgtggggggcaccgctggagacgcctcctccgctcccggtgcccgctccagccctggcggaggtgggcccgtctcacactcctggctcaccttctcagggcatcatttccaggggtcctggatttactcaggacctgcctgtcctgcctccctccttgtacggaccttggctttgtcctttgtcctcttcttggcctgtcagacacaggattagcaggtgtccctcaggcccctccgggtgaacttcagcttcacccctgcttgtttctctgactctcacttctcacttctggctctggggacttcctttccctttctacaagcacagccatgagttttaaaggatttttaaacacattgtccagcaattccggttgctgttgagaggctctgcgcactgctgggaagggagggcctccgtgtttcctgaatcttttccttcctctccattccttccaccagtgccctggacagggacccatgatctctcacctggaccgcagtggcctcccccaccccctagctgctgccagaaggatccatttggaatgcattcctaggcacgggcgggtgcttcactggcttccccgctgtgaagatccctcccaggccctgggctgggtcccaaggcgtcccagggtctcgtgggcgctgttctctcctttggtctttgtgcagaacagcctggcagcctgtgccccccacacagactctgccatctcctctctggtcatttcccatctcctttgagactcatctcggacaccacagagactgtccttcccaagccctgctctcaggcggtttgggtccctgctgtgcctctgctgtggctagcacctcccctctcccgcagtgtgtttgaattgctggtctgccccctgccatctccactcgacccttgaacttgctaaggtcactggcatcttcaccc

SEQ ID NO: 120437 - DNA, 2591 bp, Homo sapiens
ctggccaagatccccctctccctggccccagggattcaagggctcagggtggtcagcgtgaggagggtcttctggcacttccagaaagctggccctccagggaaatgaccctcttaattgtcccccaaccctgccaggtctcgcccctggaaaggcagcagctcctctggcctgggcgggcctctcatgctcctgtttccctccctcgctgggctcccccaagggcaaggccgtcaaggggctgcagagagcggcctgcaggcagcccccagtaactgcgccatccctgtgtctgtgtctgctttgctctgcaccccaggtgccgctgccccccgatagtcgctgttgttactgtcacacctgcaccacccaccgtccttcctacctaccgctgccatctgttagtcctggagtcaaggtctttacgcctcctgctgtcttgtgtgtcagtctccccgaagtgaccgtgagcgctcttagcctctggcggcctctccctctgcctgtgtgacattctttcccctcttcctgagatgccctctgcctgttctgtgtgtgcttcagccctctctgtttttctgttgtgtgtcctctctccagaggtctggggtgactgctgtggtcttgccttggggtgagctctctgggcctaccagagagacccgaggctggacatttgcaagccccatatccccttcctgcccagtgtgagtgggtctggggcttagagcaggaggcccgcctaggacaggggtcctttaactgagcaatcccaagaaatcccggagagaagctgtgcctggaggtggccctccccaagatgctccaggagggtgtccctcctccgcctgcccccaggggcctgctctttggccgaggagaataagggctgcccctcccagcacaggggccacagcctggcctgggggtgggaggggcctgctgcctccagccctggcacagagctccctctgactcttgactgcttccttgtttggcagctggaaccacctgatatggaccaagatgcccaatcccatgccagtgtctcctgggttgtggaccccaaaccagactctaagcggagcctcagcaccaagtatgagaccactatcttctaaaacaacccactccctgtctccactagtctcactgtgcctttgccatccgatctttctgctgtcctcaactctctccttccagctgctgatgccaaggccccacctgcactgggacctgctcctcttgggcgggcggcagcgtagacgctgtacacttgcagctctcgcacctaccaccaccgaacactgtgaattctcccccttgggctgaggacagcttgagggggtgagttgcctttgaggtgggcatcaagagggctcaggggttctgttgcaccctggaagcctccacgggcaggcactgtgaaccccgacgggcagggcagtctccagcaggatcccaacggcactgatagctccccagggttgggctgggctctgtgtggctccctcctcctgtctgctgtactgagccacagctgggcaccgttgccaagagctagctgactgttctcacctctcctgaaccaaccaaccactgtgaccacccagtgccagagtccccagcactctgctcacagccggcctgcagccccaccccactgtcctccgctactccgaggtgctggcctcactctcatggctaggcccttgtgagaccttgagctcagtgatgtggctggaccagggacagactgctttctgtgagggcccaagatatgcgccaggcccttgggtccgtgctgactgccccacttggggctctgggtatctgaacactcacaggctggctcacacagcaggtgtctcagtcctgatgggccttcccctccaaggaggtgggtggcatgtgtgtggacagcccctctatcttcgccatggagtctcaaggcctggcagccttgggcctggctctggagtctagctcactgaggaggaaggccttccgtagaaccaacgaggaggcggcctgtgccctgcacacacggcgcaccttcttccctcacagaacagagctgctggaggacagggacctggaccaagtggcctccattgtcctctgggagctttctgacactctccacggtgggggatcacagatagacagcgccgtccagcatgcccctgaccacctccctcagcctcctgactcctccgaaaggagaggccgtcccatcgcagcagctcagaagctgggatggtggagctgagtctttgaagaggcaccccattctccagtgtgggcaaatcagtttggatggcaggagacaggaaggaagcggcgcccataggcagccgtgcacacatagcagagtccactaggaaagccagtcggccagggcagtcaaaacccaagtcgataaactgggtgggtcctgcgtacccacccatccttgtgccttcctgagcagagtcactgagccagaggcagtgggggctgcaggctgtgggtgctcaaagcaggcatggagggtgccccggggaggctgtgagggatcgtctgtcctgctctgtgtttcctttccattt

SEQ ID NO: 120438 - DNA, 1015 bp, Homo sapiens
tggtagatgatttttatttgcttgtttcactgtccatactaggcaaaacaaaaagttggcaagttgttttcagttgcttaaaatattttcagaaattttattagtctgtgaattcctaaaatctgagaactaccgctttagaagaccaaatgactttggcactattcagtaacatctgagtattatctgtagggagagtttagctttcatcatgtatagcatcagagacaggaaaaggaacgtggaaccttaatacttagatgaatgtttatttttgcaaatttcaaattattgtttctttgctgctataaatacgattttactttttaagagaaaagtttttcatctgtttcacttcctgcttttttttataaactagctatttgtcctgccttcccccagtgttagactactattctgaaagtttctagcactgtcgtggggcatagagtgcagaaaacataaatcactagaatagttgggtgagtctgtgtaagaccagtttgattaatctaaatttggggcctactagattgagtgaatctctgaataaaatagaaattcagacttgcatgggctcattgttgtccaccatcagttctttctgtcacaggtctgacagaaaccgttaatgaagtttccaagctgagcaacaagattgggatgaattgtgattactacatggaagagaaggttttacctccaagcaggtatagactcttcttctttcttcatgttgctcatcctggcttaggtacttagcactgatggcttcagatcagacttgaagcatttttatttaatgatacaatgagtatttaaacttgagaggtctcaacaacttaaacagaagagtactaagttgtaattattagtaccaaagaaggccaagaagcaaatgttacttagtcaacaaataaaccaaagcaacacttgttggaataaatatggtggatttcagatctctgacaaacttggaggaagcagcctgtagtactatctgctgctgcataac

SEQ ID NO: 120439 - DNA, 1395 bp, Homo sapiens
tgatcccagacgggaattgggttttctcagcgctttgctaactcaagaaatagtagtgtcctgggcccagtctctagctcggttctgtagtgggtgttcttttgtgttcttgttggggcacaaggtcttctccgcgcttcgtggtaggtccagtctcactgggactcatgctgtatttctcttaatctccagagaacgtaactagtcatcaaactgaggagctgtccgtgtgcaacaactcaagataaaattcttgactattgaaatgcgaaaaattagattgaggctttgcggctgaattagattggtttttcttgtggccacatgaggtcgctgctggttaactgaatggcaccaaaaggcatattggggtcatttccaacagctatgaacctgaggtaggatgaaaaatccgtttttttgtacacacaatttaagtttttgaggtgtctatttaaatgagtccatatataaaacaactctcagtaaaatgaataatcaaattcctttttaaaaaaatttgaaattttgtgtattaggttgacttggttgttatattacttgaaaatgtctttgtccttgggatctggatttttaaaatctatttcggttaaattttatctctaatttctctttgagctctcctcattcctgaattttagagctgttttggaattgcttagtgctgtgtaacttttgagcaacagaagtcttatcaaggcaggctatgaactttgatttgttgtagttggaaagtgtttctgtgtatatttccctccgtccctcaataagctgctgtagttcaatccccttctgaagattttctcttagctctcatttagcattagtgaattagcagtgagtctgtttacatatttgattgtgttttgccattttggctgaaactaaagacttcagagaggctgcagaaataaagggaacctcaagcgtccacttaaggtccagttcaccttcatgtttacctaagcagagactcagtggatttttggtaaaggtctacaatctccttaactttttatttttaaatatcgtaagtctgctggaaagtaaaaaataatacagtgaatgcccacagtgttaatattctgccgtattgctttttctctctccctgtatttccccctcctgccttttaaaattgcaacgtcttgacttcttttaatttttgttgttgttgatgggtttttttttttttataaactagctgttttttgagacggagtctctgtcacccaggctagagtgcaatggtgcgatctcggctcactgcaacctccacctcctgggttcaagcgattctcctgccttagcctcctgagtagctgggattataagcatgtgccaccatgcccagctaatttttgtatttttagg

SEQ ID NO: 120440 - DNA, 1017 bp, Homo sapiens
tcccctccctctgattagggtgtgagtggcaaaagtgtatcaagtctctgtgaattcagaggaggcagtgtagacagctgaggaggtatacaagcttcagagtcaggcctggccccaagtcctggctttcttctttcttagtctgtcatcctgggtaagttaatctacctgagcctcagttttcccaccaataaaatggggataacaattcctgccttacaggctcgtgatggagtgcctggtatagtgcctggaacatagaaagcacttggtaaatggtagctatgagctctaatttgtgtctcggggtgtctatgtcttcttaaggtagagtaggaggtgcaagacagtagggatggagagactccagagctacctagtgggcaagtgaatattcttctaactgcataatgtataagtgctgatgacaagggcagtgtgctggaatgcatggaatttttggaaccttctcagtaggtatgtatgacagacaggaacctgttgggggtggtgagaatctagcccagttggctgtgctcacacccagtggcatcaaagcctaatctgggacaaggctgcttcttcccaccagccactactatacctttgttatcaaacccttgggcttttttatttttattttttttttgagctctgtcgcacaggtcagagcagtggcacaatctcggctcactgcaacctccaactcccaggttcaagtgattctcctgcctcagcctcccaagtgggtgggattacaggcgtgcaccaccacacctggctaatttttgtatttttagtagagacagggtttcaccatgttggtcaggctggtctcaaactcctgacctcaagtgatctgcccaccttggcctcccaaagtgcttggattacaggtgtgagccactgcagctggccccaaacacttgggcttttgttcttctgagaagtagtggaaagaacaacaatagcctctacctattaaatgcctacatgtgccagtgccaggtgttttct

SEQ ID NO: 120441 - DNA, 1002 bp, Homo sapiens
cagttccctctaagcccacccccatttttccagaaggtggagaagagggtggactgcttagaaattcctcaggaatccctttgacctctcttctctcatgacatgtctcagaggtggggaaagcctcggggtgggagagtacagagacttttccctgttttcaaccccttccttctcatctctttgagtctctgcagggtggaataagagaaaggggactagaagacactaaggccagaattactgcaggcagagaaagaagacagtcatcagcagccctcaaatgagattgttttttgaaaccttcaggaatctgagagcatgagaaccggtttgagatgtgagcagctgggacctgttgtaagaggagccggccctgggtgtgagtttgggaatgtgaagtgtgcattcacacacgtgtgaatgtgtgtgcatgactcagggtgtgtgtgtgtgtgaagtgctctggtgagaggaaaaaggaagtggggcaatatgcattttgttttagttggagaagtaaagaagtggaatggcttggtccagtgccttgaactgaggacaggggaagggaacgaagggcttcagaccttttgagaagatggagctggaagagcttgctgcctgaactcactcagtcctttcccccagctctggtccccaaatgtcagggtgtgggcctcctttgacatcccgtatccctagcacatgaccacttataagaaagagtccctgtcagggctggaaactgcagagctgctctgaggctggcagtgcctgcaagaggcccagacctggggacagcttcttcaggctcagaagactggagtctggaaacagaaggactgctgggccttgggtatagaagcgaaacaacggccaacccagggatgtctagggggtacaggagctagtcacctgggctaagaggggacagagactcccctcccccactggccacttaacattggactggctactctcctgttcctatgcccaccc

SEQ ID NO: 120442 - DNA, 1013 bp, Homo sapiens
ccctgtggttataaccatagccctagagagctgtggggtttggatttctgagcctacaccaggggctcttcaggtctggtcactggtggtaacaagctgaggaaagacctgggcaggggctgcagggctggagggaagatccaggataaggaaacacatctaaggaatccctctgaaagtggggagtatcaggatatgtgggcattggggggagggctggggaaggggagtgcttgaagggtagaccctggggagcaggtttacagagaggacgtttttacaagtttctaattatatttatttggagttttcctctggcggtttgaagctgttaacagcaggaacctgtatccctggtgtttgtttttgtttctaaccagctgcttggccccagcatagtgaatccaagggcaggcaacacctgcccactgttgcattgcccaccctttccttattgcaactgtgtctgtaccctccctgcccactactcagccttgctctcttctgctgctcccatgcccaaagcctcagagcatctgcattcccactgctgatttcctccctggatcatgtacatttcagctccttccgctccacggttatatactggatgcatgcttcatgctgaactaagtgctgaggtggagttgggggaggtacaataatgactaaggcatggattcctccctcaagtgcttagagaacacagtgggtagttagagagcactggactgggagtttgaagacctggatcctggctttacactagctacttgctctttcctgaggtatcctcactgggccccagatgagagaggacagtttgaagaccacgtgaaccaacctgcatgaaaaaactgtacacttagtgaaattatacgaatctgaaatgagtttatttttttcaattaaagagataatattactaatcacaaaaccagaacctacccatgcccactgcctgcctctctgcccctcactctacaatgttctgttcttcccccacttcacta

SEQ ID NO: 120443 - DNA, 1057 bp, Homo sapiens
tttgggggtgagagcctactgttctccctgccccccacccccaccatctagggtgtggcctggcagctctccccagatccctccccgccaagttgtcagactttgttttgttaagccaaaataggagaaaggctagggaatatggcagcaagcccaggcacaggggggaggggaggaaggacagggctgtggcctgtccacagaaatggtccctgctccacaaggaggtgaggctcagctgcctttccccaccctgcccctccaacctcagcaccatggccatagctctgcctgcacccagagccacttcccaggttcctacattccctggctgctcattgcaaccagctgcaacccccagttacctatccgaccaatgtgaccaatctccatccttaccttcatcactgttcctctttctctggcttctttcctggtgtcctctgtcttcatacccagtttacacaggtgagggaaagggaggcatggcttcacctaggtgacatttgaggttcaaaggtccccttttcccccacttgcttagcttcccagctctgccctcagggcagcctttttacacttagtgaaatattagctgacaagggtgtgaggacttcctggcttaaggctgggcttagggggtagtagttcttaagactgcctttggtgctgaagtcttgggatataccctggaccctgcctgtaccccatgaccccactgactacctatcctgcacagatgtggacgagtgtgccgagggcaacggcggctgtcagcagagctgtgtcaacatgatgggcagctatgagtgccactgccgggaaggcttcttcctcagcgacaaccagcatacctgtatccagcggccagaaggtcagcccatgacctgggatggccccatccctgccctccccaggcttctcttcccagctgtccctcagcagcccctaagtctcaccctccattctcaactcagctagctccttcttctcttgtccttcaactcaatcacaccctaaaggatctaggaacagacaccctgttagggcaaaatct

SEQ ID NO: 120444 - DNA, 1149 bp, Homo sapiens
gagtctgagaatggcttcacggtgagctgtgggacccccagccccagggctgctccagcccgagctggccacaatgggaacagcaccaactccaaccactgccatggtaagcaccagcccagaagccctgttcccaccctactctcttacattaatcccttatttttgttcttcatcaatcccctggccttcctttctcctggatcctcttttttgccctgtaattctccaaccctgctccctcactccctctgccctaacatctgatccccttgactttcataatctcactcccccagccaagcccctggcttattacccagcttctcaacaacccctacggcacccccgacctccatgggcatcccatactgtgctgagtttctaccatccctctagaggctgcagtgctgtccattaaacaacgggcctccttcaagatcaaggatgccaaatgccgtttgcacctgcgaaacaaaggcaaaacagaggaggctggcagaatcacagggccaggtttggactggggaccccattccagttggctgtctggccactaaatcctccttacccctcagctcctctgcttccaaaaacccaccagaaccctgaactctaggcagagcagaggaaaaagcagctgtaggcatagcacccaaggaagtcccagaatattcccctccaccaactaattaggaccctagactaaaacaggattgagagatagttacagttagagatctggggaggtctgtctgggctgggagtgagaactttccaggggatgtccctggggttgacaagccctctctcccaggtggtgccccctgctctgaatgccaggtcaccttcatccaccttaagtgtgactcctctcggaagggcaagggccgacgggcccggacccctccaggcaaagaggtcacaaggctcaccctggaactggaggcagaggtcagagccgaagaaaccacaggtgggactgggggcactgttgggaagaggactggaaggggagggcagaggtggggaaaccacaggtctcagcagcaaaaggaagggatggagcctgtactaggggcagaccctgcctggtgccaagcctaaaagctagtccctcttaccatgcccctcctagctcccagcttt

SEQ ID NO: 120445 - DNA, 1177 bp, Homo sapiens
acctcaggtgatccacccgcctcagtctcccaaagtgctgggattacaggcatgagccaccgcgcccagcctaggataactttctgattcctctctgccagccgttttgcgtctcttggaaagccaaacggtgaccatgcttcttaatttatgccttcagggtctggcttctcctttctcccttcctttcctgtcacaccatgcatacatacatacaaatacacatccttcaaccatttattccatggcttatgagacctgcaaatgagttccacagtacggaaggcatagaccactaggcttcttaattgatgtcaaggcagatcttggtgagcaggtaaaaacctgctattgtccaccaagtttaatttaggtcctccaagttggagggttaagaacccaggcaaagctgctgctgaatctatggaggaggctggccctgggacatcaaactaggggttaactggattgaatgaggagtcaacgctcagggacattctaggtctttacaggtcagacagaagagaggtttttaccattggagggaaatggaaagatggtataaataggatcccttcatgaagcaacccagaggcctctctgcagcgtgtagggtgtggggcgacagtattgtggggcttccattcatcttagtacaaaacctcacctgctctgagcctggaaatgggagggcttcacgcaccaagtaatgcacaccagaaaggcacttatatcctcagcaacatggcagttcctctttacttctctgcctccctctttctatattatcaggccatgcctattcctacaacctgagacaactcttggagtcagaagaaaactgaccagatcctggatctgagctgcctgctccaggcctagaaatccccaaaggctggcactgagctgtgactgctttaacagcccccaagatttggtcagtttgaggtggtggagactcagatttgttgctgaaagttcagtaacacagtcctggtctttggccctagagaaactttttatatgagaagtgttctctatatacatgtttgaggtgactctggaatggattatgaggtcatatctcaaaatgtcagaaaacgttatagagcactcgaacttttgtatttgctgcttaacctcaatattacagccacaaacaaggggtaccaagaca

SEQ ID NO: 120446 - DNA, 1104 bp, Homo sapiens
gtgattgcttgtcctcacaggtgcatgaacgagctcatacaggtgaccgtccatacagatgtgacttccccagctgtggaaaggcctttgccacaggtaacctgcctggtgggctgcttccagttgagggtggagggttctcgttctgtttgggacctctctgaagggaacccaacaccaggctgctttcctggagaaactaccgtcagagtactctgacttgcagggtgctctctctggaggaaaccttgttacgggagtgcaaggcagcatggttcaggccagcagaaggagcctggagggttggtggagagacccagcctcttgtgtcagctctgatgccaaccagctgtggattattgggtgggccattgcatctctctgggcttattttcccctctgtgaaactagtacctttagccatgagttctctaagtttcttttcatgctcatgttctggtatggctccaactgctcctggagagggaagcagggcagagtgggcttttccagcccctgcccagggcaggggtgggatagaggcagacatgggcttcttgagccaaaggaggtggagagcctgtgcatgaggtggacggtggaggatgagaccccactgggtgctcatctcaccccctgcctgccacatatggacaggctatggactgaagagccacgttcgtacccacactggtgagaaaccatacaagtgcccagaggagctgtgcagcaaggccttcaagacctcaggagacctgcagaagcatgtccgtacccacactggtatgctgggccctgcccactccaaccccattccctgggcaaaaggaattcagcttgcctttcagacttagacctggagcccagtgccatccccagcttgctccagcatggccctctttcccacacccctcctcacatcccaccatttgcataggtgaacgcccgttccagtgcccttttgagggctgtggccgctccttcaccacatctaacatccgcaaggtacatgtgcgcacccacacaggcgagaggccctacacctgcccggagccccactgtggccgcggcttcaccagcgccaccaactataagaatcacgtg

SEQ ID NO: 120447 - DNA, 1050 bp, Homo sapiens
actgtctagcattgtgggaagcacttgggctttggaatctgatggagatggatttgaactccaagctcttgttcagtgtgggtcttttggcaagttactgaatcccttgagcctcagtctccctgtctgtagaaagaggacaccaatacctaatgaagtggctaagagtataactgcatgggtttgaattccagttctgccagctgtgaccttgggtgagaaatatctcagggctgcaggagttttcatttgtaaaatgggtatatgagtagttgttatggtggttaagcaaatgatatgtaaagtactttagctcagtgcttggcacatagtatataagttttagttattactgaactgaacagtgtgtgtagagaactcagccaggatggggtgaggacaagcagagaggtggggagcagtcctctggcccagttttggttggggtgcagaaagacacactgccactctactctatcccaggtgctgtcccacaacctgtacacggtcctgcacatcccccatgaccccgtggccctggaggaacacttccgagatgatgatgacggccctgtgtccagccagggatacatgccctacctcaacaagtacatcctggacaaggtggggcccagcttgtagggagcatctgtaacctctccccacttttccagcctggccagcagcctaataccttgccactccaactcttcgcccctgccataaactcctacttctgcctgctctgtccgtgactgctgtcccatcacgtccctcacatcccagccacctgcccccttcctgtccccctcaattcaccttcaatgtccctcatctctaatgaggtgggccccaccctacccataaccttccaccgaatccctgcccggccctcctccagcttccagggttctccacccttcccagactgtccccctgaactccccctccaactcctccaatctgtcactgtgtttccaggttcttggctcttagcttcctgctgggtttctccttctttgtcctctgggctgaaagactagagttaat

SEQ ID NO: 120448 - DNA, 1456 bp, Homo sapiens
taatggaggcagagatttggtctgttaggcacaccttagtatcccaacccctggagcagtgagtggcactcagtaggcactccaaaaacatctgcggaatgaatgaatgaactcttaacaagcagggctatgtggaagtgagttgtcatggatagtgaggaccctgttactggcagtgttcaagcgtgatctgcataaacactgagtggcgattatgtactgggccccgtggaataatagcaagatggaaacgcacccacctagccttcaaagagcaaaggctacagagttgtggggacttaagtcccccataacttatgatgcaagccatgcaggctcctggcagagtggggtccccagggaagatagccaggagggctaggggcttgagctggagcacccttggggcaggtggggccctgacccagtgaggccagcctggctgcggccacctaccctgtgccaggtgctgccagaccgcgacggaaagcgctgcatgttctgtgtgaagacagccaaccgcacgtatgagatgagcgcctcagacacgcgccagcgccaggagtggacagctggtgagtgctcgctaggtggcttgggtctgggtggtccttaggcgcctcatctgtgaaaagggggtgataatactttgtccagcgggaggttggagagtggactcgggaaactcctaaggcccctttcgggccgtgtgcgaggatcctactgacccgctcccgctcttcggcagccatccagatggcgatccggctgcaggccgaggggaagacgtccctacacaaggacctgaagcagaaacggcgcgagcagcgggagcagcgggagcggcgccgggcggccaaggaagaggagctgctgcggctgcagcagctgcaggaggagaaggagcggaagctgcaggagctggagctgctgcaggaggcgcagcggcaggccgagcggctgctgcaggaggaggaggaacggcgccgcagccagcaccgcgagctgcagcaggcgctcgagggccaactgcgcgaggcggagcaggtggggttagctcccggcgccggggacgggaccggtgggctgggaggctggccaggggcggagcgccgggggcggggcctgggcagagggcggagctcctgggttgaggggcgtgcactggggtggagcttgaaatgagggattgttgggacagagtccgcgggtttgaaaaagagatttgggatggggcttccgccagggacagaacctggggctaggaaaggggtgtggggcgaggtccgagcccgtggatggatggggcctggttcggagaccttggctgtgggttggggcttgggcagaaggagccgttgaagaccgtgtgattggggattagactggaccaagtttggactagacttgaactaagtttacagtgaaaccagtttgagaggcaagcgggacgcgt

SEQ ID NO: 120449 - DNA, 1117 bp, Homo sapiens
cagaccaggtaggcctgaggaacctcttctggttctctcaccacccctcctggaacacaccccagttttcctgcttgctgtgcacctgcaaggtgccttggcactagaggctacacagtacacactcacccggcagactgctggaagaggaggaagagaagctgaagcagttgatgcagctgaaggaggagcaggagcgctacatcgaacgggcgcagcaggagaaggaagagctgcagcaggagatggcacagcagagccgctccctgcagcaggcccagcagcagctggaggaggtgcggcagaaccggcagagggctgacgaggatgtggaggtgaggcctggggtgggatggggtggaggctggcagggtgagctcattagggcacaggctctggagccaggctgccttccctcaaaccctggccctagcagctgctggctgtgtgactttggacaaatgcccaaacttcttggagttagtctctcacctgggaaactggtaatagcgttgttatgaagattaaatgagatgatacatgatacttagtacgtagtaagtgctgaagaaacatttgctgctatctttgttcacatcattattaatctggggaaaaatttttccttctacccttccaagcccctgtcttgctatccttgtactttggctctactccttggagctttaatctccataaattcaaacacagaaatatggaacatagaaagggaaaattcctccatgatcccccccacctcacaaccactgctaatggctccgtgaaatgttgaacagaggttcttggattaggtgctggaaaggtggtgtagtgcagtggcttagagctcaagtgtatccctgggcaagtcacttaacctcttttgaacttttttgttgttaacttctgctctggaagttaaataagataataaatatgcttagcacatcttagctgctcaataaacggaaactattattatggttacattttatcttttggaagtccatgagtcccatgaaattggaggcaaactctattcatgtatgtattaataactctatgagcatatatggtttttctctggggagatgatcagtagtcttggtcagatttt

SEQ ID NO: 120450 - DNA, 1030 bp, Homo sapiens
ccagtgtctgcttacttgggagtgagcagactccttccaggattggggaaatatttgctgactcaggctcagaatcacatctcagggtggtgtgtaagggaccgacgaggagccagattaccttaggaacactctttgagttacggtgggtataacttattagagttgctttgagggcccctggcacctgtcagctaaagctgttggggttttttctatcctgcagtgttgtacagtgttttgggcatgcacgtgatactcacacagtggcttctgctcaccaacagatgaagacagatgcaccaacgaggtaatcccattttctttactcaggggtctctgaccaccactgacacaggatccagatttaagatcctgaccttgaagatgaaataatttcactagggcttattcccagattccaggttcctgtcacagcatctggtaccagttgcttatgcatagtataggcatttattaagtaattattgaaagtctatggcttacatagttttttcaggagcatggagattcccacctttgcgcccattaaaagataaactccacagggcagggagttgttttgctgcctgttgtgtctaggatagtgcctggcacagaggagataatgaataaatttttgttgaatgagtaaatgaacgaactttcgtctttgcctatatgggtacctagggtgccaggccacaaagatggtgtccatcattctctcttattagggggcaaatatatatatatatatatattttgtttgtttgtttgtttttgagacgaagtcttgctcttgtcccccagactggagtgcaatggcgtgatcttggctcactgccacctccttctcctgggttcaagtgcttctcctgtctcagcctcccaagtagctgggattataggcacctgccaccacgcccggctaatttttgtatttttagtagagatggggtttcaccatgttggccaggctggtctggaactcctgacctcaggtgatccgcccgcctcagcctcccaa

SEQ ID NO: 120451 - DNA, 1059 bp, Homo sapiens
gaggatactgaggctcagactggttaggaaaattgcctaaagttgcacagctaatgaatggcagagctgggatttgaacccaagtgattaaagcccatgtctttgatcactacatagcagggccttctaggaaggatggctggctggatctagttgttccagtttggaaagtacctgcttgactggccagactgctgttggcttcagaaaatagcagtctcttgttggtcactgagaagaggcaaaattttggcaggccttggggcctcctgcagagtctcattccaggtcagtggacagaggaggccctgagaatagtcgtgcatactggctccctggatctgctccaagacagtgagcagcccctagaaccacaagagactggccagccaagctgtgggcccggcctgtagggtggaaggaactcttaagagaaaaaaaaaatctctgctgtgattaatcaacagcttcagtctggtgaagtgaaaagagaaaagttggcccagatgtgcacatagggagagaaataagggagggaaattgcctttattcatgttctcccttaggccagtcgttaccccacggatgagatcaccttccttttacaccagcctgcaagaggtgtgtagtggtagtctcattttacagacaaggtgtaggatcagagaggttaactcgcccaagtcaaacagctaacaagtggtggaattggaatttgagccctgttcttctcagttcagtagccctgctgttcttgctgatgtcacctcagcatgggctctccaggtatgtgcaaatagttatgcaagtgttgcatccacaggcttgtgagcagaggctgaaagggagccagggctcttggtacttgccctctcaacatgggccctgcctaagctagcaggactcactatacccaaaccagcagtggcattatatttttctcttttcttgcaccttgccatccccgatttatttttagagagccttttctatttctgttcccatttcttggcttggatgcaggggctggggtgcagggatggcgctagaaatcagaag

SEQ ID NO: 120452 - DNA, 1064 bp, Homo sapiens
caggttgggaactagacgccacctcttgatggaaagagtggcaaaaggtttgtagccatatttaatccacagacagccggtagtggatacctggatttgaacccagatctgtgtgactcagactcacagtctgtcatgccatactgcatccctttctgcttctggttccttgggagttgcaaagcttgctggctcttttgtgtggttggagagggctgatttttcttgtggtctcccacagtggaagttgtactagtcatcccccttttcacagatgagcatccaagatcactgtgtcttagggaaccttccaaaataggtttgctctagggatttgctagcttcccccaagcttcagcagtgatagccagacatgcatggaatttccctgtggagtttccctttctgcgcttagtggccttttgatgcacagtgctcactgggtgggattcctgctgcattgtagccagatgtggaggctagccctattttgagttatcccagatggtatccagcccagtgagtcccatacttgactcaactggcatattcaccagggagttttggggaaaatgtagattcctgggccttcctcatgcctattgaattagaattcccagggatggcgtccaggaacctgcctttaaagctccccattgatttgggagtacagcctggttgggaaaccaatgacttccagaggctggcaccctccctcagcccagtcatttcagaaagatgcctttgaagtcactgatcagaggaggccacatgggagagaatgatttgtccagagggcctcacacttcacaaccaggaagtgactcctgaaagtgtccaggaagtttctatttgaatctgctcaaatctttgatgttgttttgcatgctttgatagtatctgagctttatggtggcctctgggtgtttttctttgaaagtgtttgcagagagtagcaagctcttccagcagtcagcagacactccctaaccaggagctacttggtctgatttatttgaaatatgaaattcctttgcttggctgtctggttggtatctttggtg

SEQ ID NO: 120453 - DNA, 1060 bp, Homo sapiens
ctgacacccagtgtccttccatcttcacactggtttgccaggccaatgttgctgatggccccctgcactggccgctggacggcactctcccagcttggaagtaggcagggttccctccaggtgggcccccacctcactgaagaggagcaagtctcaagagaaggaggggggattggtggttggaggaagcagcacacccaattctgcccctaggactcggggtctgagtcctggggtcaggccagggagagctcggggcaggccttccgccagcactcccactgcccccctgcccagtagcagccgcccacattgtgtcagcatccagggccagggcctggcctcacatccccctgctcctttctctagctggctccacgggagttcaggccccactccccctgaagctgcccctccagcacacacacataagcactgaaatcactttacctgcaggctccatgcacctcccttccctccctgaggcaggtgagaacccagagagaggggcctgcaggtgagcaggcagggctgggccaggtctccggggaggcaggggtcctgcaggtcctggtgggtcagcccagcacctgctcccagtgggagcttcccgggataaactgagcctgttcattctgatgtccatttgtcccaatagctctactgccctccccttcccctttactcagcccagctggccacctagaagtctccctgcacagcctctagtgtccggggaccttgtgggaccagtcccacaccgctggtccctgccctcccctgctcccaggttgaggtgcgctcacctcagagcagggccaaagcacagctgggcatgccatgtctgagcggcgcagagccctccaggcctgcaggggcaaggggctggctggagtctcagagcacagaggtaggagaactggggttcaagcccaggcttcctgggtcctgcctggtcctccctcccaaggagccattctgtgtgtgactctgggtggaagtgcccagcccctgcccctacgggcgctgcagcctcccttccatgccccaggatcactct

SEQ ID NO: 120454 - DNA, 1114 bp, Homo sapiens
agggtccctctcttctcccccaggctggggtgaaggggcatgaatataactcactgcagcctcgacctcctgggctcaagtgatcctcctgcctcagcctcccaagtagctgggattacaggcatgcaccatcacgcctggctaattttttatatttatttttgtagagatggggtctcaactagttgtgcaggctatcttgaactcctgggctcaagtgattctccatcctcagcctcccaaagtgctggtgtgagccaccgcgcttggcctcttgactttcttgaatcatctttgccagctagctcccactgacctggggccttttcagtagggggagccagaaccgggcttggggtcatgctgcagggggagggacgtagcagtgactgggctctcctccacaggaccagcttcccaggctgcagcagctgctgaagaccttggaggaggtgactggccccacagtgctcaccatagcctttcttccatcttctacccagaccccaactatgcccaaggaaggcccaatgcagtgatatacaagctggctgggggagggggactggagtaaaggtctgaggacagtctctgaaggagcttttcttgaaccaagtgtagacttaccatctaaccccaggtaacttcctcttctctggtagtgccttccaggatctcaggccactccttctgccacctgaaggggtggcttcagtgacttgtcactgagggctctgccagccctaacatgagatttgtctccccaggggttagagggattggaggatgcccccccagttgagctacagcttcttcacgaatgtagtcccagccaggtgagtccagatgactgcctggctctgaggttacattctctgtcccttatctttttctatttaagtttatgttttcctacctcatgtgggaaatgtgggaggggattttgttgttttctctctcagcgataggggtcaccctgtgtagtatcttttagcccttggttccttcccctagggcagctctcccagactttctttgccctggagtatctttgccctgctctgtctgctgtccagttgcttgagacagcctagcagaggcagagtgcatgtcc

SEQ ID NO: 120455 - DNA, 1119 bp, Homo sapiens
cttttccggttagcgcggcgtgagaagccatgaggtgagttggtcctgaaagccctatccgcgttcatccgcgccttcaggtgccccgccgagggttcggatcctgtaggccgcgccgcggacccttgcgccacctgcgccgcggggcatttctcaaggcgggtcggcctgcgggtcgcccttcctaccaggtccgatcactgagagcctccctcttccaccggggcttgggtctgggtctgagctcccgtcgctctacttggtgtccggaatctacgggggagtccgccgtgggccgcccgcccgtctcgaagcctagacctcggaggcttccaggcagtccgagcgtgtggactccgcggccctgagcgccctgtcgcttctctcccgcagcagcaaagtctctcgcgacaccctgtacgaggcggtgcgggaagtcctgcacgggaaccagcgcaagcgccgcaagtgagtgccgaccctggggcacggcgcgggtggcgagggccggcgggtgcttaacccccctcctctctcgaaggttcctggagacggtggagttgcagatcagcttgaagaactatgatccccagaaggacaagcgcttctcgggcaccgtcaggttggcaccgttctgatcccacccagccctcagtgcccccgtgcttgcccctcccctgcaggctcccgctgagccggaggcgggcacgtcggtactgatgtgctagggtagttcagaccccctgctccgggcaggcgcggctggacggacccccaccctgggtcttaaaacatgaggggaggcgtgggtaggcctcggccgagcccgccggccagcctgagaagccaggctggctgctggtgaatgtgaacgctccgggtaaggctcggtggctgctgcggtcccagacccttcaccggcccttgggacccagggctaggcgtaacctgttggtgctgtcccccaaaacgcaggcttaagtccactccccgccctaagttctctgtgtgtgtcctgggggaccagcagcactgtgacgaggctaaggccgtggatatcccccacatggacatcgaggcgctgaaaaaactcaacaagaataaaaaactggtcaagaa

SEQ ID NO: 120456 - DNA, 1299 bp, Homo sapiens
taggaagcagacattcccagttgtcacgtgtccagggtccacagctaagaaataggcagaattcgagcccaggcagtcttgaccagagcatccgttgtacagcggttatgccatggatcatgggtcagcctggttttctgagagcatgttttgggaccagtgaaggtccagaggactttctggaaaccgtttgggctagggaaaagactgaggcggggtcttagagagggtgctgcttggaggtcacttacatgattgattcaagtgcgtttctggcctgccacatttgaggtgtgccttggtgaccaggttctaagcaatgccaatggcttcctctctctatcagccaagaagtatgatgcgtttttggcctcagagtctctgatcaagcagattccacgaatcctcggcccaggtttaaataaggcaggaaagttcccttccctgctcacacacaacgaaaacatggtggccaaagtggatgaggtgaagtccacaatcaagttccaaatgaagaaggtgagtgggtctggcgggttgctatgggtgaaggtgttggcagggtctaaatcttatccaagtctctaaatatgccagtaagagcacccaccaggattgaaacttttggagtaaccctggtcttggcccgggtccaagtacctgctcaccaggccactgggggaggaaggacaggccatctgctattcgtccaccaacctgacttgatcctctcttccctcctcccaggtgttatgtctggctgtagctgttggtcacgtgaagatgacagacgatgagcttgtgtataacattcacctggctgtcaacttcttggtgtcattgctcaagaaaaactggcagaatgtccgggccttatatatcaagagcaccatgggcaagccccagcgcctatattaaggcacatttgaataaattctattaccagttccctctgtctgcctgtgattgagggtggggggtggtttgtcagctgacaagtgagggccttggcactgctgatggctagttgtgtagtttgtcactttgatgatggatagttgggtactatagggaagaggatgtttttctgccatcaaaatcaggcagtcttgcatatgtgatagggttgctaacggcattgaagctttttgacaggattggtccatgtaaatttaaaataaggattttagtcagcatttctgtgttaagaagaccacatgtggagtatcctatgctttgggttagtaatgagtaaatgttaaggaaaacaaggcacagcaaaccagtacaaaagtataa

SEQ ID NO: 120457 - DNA, 1015 bp, Homo sapiens
tgttgagtgtgggtaggccttggggccccccaagagatgatggcattgcaggggttggcggtgatgacacaccaggacctaggaggagccctcacctgaagctgttccaatccaaaggtctggcacacaagtggttacatgactgacccacaaacaaataactttaatttttttttttttttttttttgagcaggagctgggcctttgagggcccctgctccaaccccaagctgcatttatgatataacccatcacagctggattttaaaaatacacaaaaaaatatataatatacattataaaacctaggtggggtttggaggtggcctgagcgatatgcaaacagtgaggaccttcaggaagctcgggcagggtcgggatgaggaagggaaggggcacagtacttcatatgaaactcataaatacccacaggtggctgctggacaggcccagctggctctgggggcctgggtgttaagaagggacagcaggtgaagggttaaccttcagtcccagaactgggtctgggagctgctactctaggcaggtagattgaggtggggaagaacctaagggagcagtgcccaccaagggtttgtcagattcaagcctcaggcaagagaaaaatcaaaagccttctgctactctctccctctgggcctctggtctgcccagaggctgggactccttcctctaccttgctctcaatctggagggtgctggggggtgccccatcttcctggggcccctggctggcttgtgggctaatgaggtgctaatggggtctagtagctgctgtgctcccttcttcatgcccagtctgaaacaggtgctcccctaacccagcgcccctcgatgaggctccactccacactgcagagcctctcccctaccctgcggccagcccccgccccagggaggtagtataaacctgggctctggggacaagcagccctggatgagaactccagctctgcccacctctcctgtgggtccctcaacttcctggagcct

SEQ ID NO: 120458 - DNA, 1148 bp, Homo sapiens
cctgcccatcatgctcccccaagggtgggtgggggtacagtggccacacatgctggaggctgaaggtgtcccctatccccacctctctgaggtcacgcgaggctgggcagagcagggtgatggtgggtcagcgccccggacaggctgccccaccgctgagccctcctctcctctcttctcccacaattaaagcgcagaacagtggcagggagtgtgtgtgctggggtaggtggggaggcctcctgggtcctgggcctgaggcctggcaggtagatgaatcctcaatcctggacccccccaggggtgccaggcaggtgtggagaggagatgctcaccctgcatccttaaggaggcgcagagggcaccctagtctttgacgagcttgtagacatggtgctgggccccgtgctcactggtggagacttcgaagacaaaagcaatgacaagcagggtctcctgggagtcccggctcgtgaccacctggggggtgagcaggtaagagattcaggaggtcagggagaaaagggccacggggcagggggctgaacagaccattctcctttccggatctatgcctctcagccaagcgatgtgtctggctacccaacttggaggccctggcctgtgggactccccacgacccctgctgcccccatacctgcaggatggtgaagttctccagcacgctgttcatcatgtacttctcgggcaggtgcttcagcttgtggatgaagttgatcatgtactcgcacatgggcgagcggtggatacggtacacaaagcgcccgttctccagcctggcatactcagtctgcagagaatatggagaaggcgtcactcggcctgcctgctcccagccccaccaagccacccagagcccccactcacctccaccttctctaccacctgtttgccaaaggagcacaccttggtggagacgctgatggtcatgctatcagcagagctgtactgagagctgaccccatagaaggctcccgggccctcctggatggtgctgttgaggtcggcctgggcatgggggtggggggtgttaggtgctggcagagaccagaagtattcccgccacaccacatcagagtcctgcccaaggatccatctctggcactctgcccacaagccatgaggat

SEQ ID NO: 120459 - DNA, 1053 bp, Homo sapiens
gcctggcgggggccttcagccctcctgggcccctcacccacggcgctatctctgcatagctcaggcctttccttggccagctctccagccccactgtgcctcttttctggctgaagctctgtttctgcctctccttccgctctttctgttctttttctctttctttctctctctacaggtctctagccacttgcaagttctagccaggcggaaatctcgggagattcagtctaagctgaaggtacggggcccctgccacctggcctggcctgcccagcaccctcctgggtgcaggcctgtcgctgctctgtggctccagcctgggacaggcaaggggctgagaagctgtgagggggtccagaaagaaacacaagtggcagcaggaagcccaagggccctgtcagtgagggagagggagaccatctgggggccactaaggcccacccctcctcttctctgtttttctttttctccttcttcctgactgctgcttactaactgcatggggacttccgtgggcagggaggaggccccggggctactggccggcagggctattgaggtgggcatggcagttccttgcagagctggctgtcctgcagctgcggatctcagagtctggggttcatgactgaggcccttctgagggcctcacgctggccgtgtgctcttctccctgcccacagcggtgcagcagagggggcctcttacccccaggcccccatgcccagagcctagttccagaacatatggacagacccagagggcaccagcttgttttccctcactctgccctttccagggcttgccccagctggcaggcactccctctgtggggacggggagggtctgctgagcttccttgggctcctcggaagctaaaacccatgggcactgggtggaggtaggcgcaaagacgtccctcagcccacagccctggtgctgcacatgtcctctaatctatcttccttctctccctcacaggccatgaacctggtaagtagcacagccctccccagtgggagtgggggaaagggtcttaacacctaatac

SEQ ID NO: 120460 - DNA, 3181 bp, Homo sapiens
ccaaagtgctgggattatagacatgagccaccatgcccagcccttttgtcatttttgaaaaattgtaaacccatcaggatttttttttcaagtaagacttacgattttcccaggaaatgggatgttataggagccccatcatcacacctgttatcttgagggtcggcagccagcctgaaaaatgtggcaggagaggtctgtctgcagagagggcggcctccctacagcatagttggcattctggtcctgtccccagtctccaggaatgcccagacttcattatcccacagctgtcccatgtgtcaaccaaagaaaggtgaagctcccactctaactattggtagcacagccctgacctacccagctagatatcctagagaaaatcattgcaatacctcgtgtttgggacctgatacacagtctggaggagccaggaattatttcacttctttattctctaaccttcttgattgcttatttcttccttaggaagaggccaataaagcaatgggcaagaagacttcagaaggggtcactaatgaaaaaggaacagacagtcaagcaatggaagaagagaaacctgagggccacgtatgacgccacgccaaggagggaagagtcccagtgaactcggcccctcctcaatgggctttcccccaactcaggacagaacagtgtttaatgtaaagtttgttatagtctatgtgattctggaagcaaatggcaaaaccagtagcttcccaaaaacagcccccctgctgctgcccggagggttcactgaggggtggcacgggaccactccaggtggaacaaacagaaatgactgtggtgtggagggagtgagccagcagcttaagtccagctcatttcagtttctatcaaccttcaagtatccaattcagggtccctggagatcatcctaacaatgtggggctgttaggttttacctttgaactttcatagcactgcagaaacctttaaaaaaaaaatgcttcatgaatttctcctttcctacagttgggtagggtaggggaaggaggataagcttttgttttttaaatgactgaagtgctataaatgtagtctgttgcatttttaaccaacagaacccacagtagaggggtctcatgtctccccagttccacagcagtgtcacagacgtgaaagccagaacctcagaggccacttgcttgctgacttagcctcctcccaaagtccccctcctcagccagcctccttgtgagagtggctttctaccacacacagcctgtccctgggggagtaattctgtcattcctaaaacacccttcagcaatgataatgagcagatgagagtttctggattagcttttcctattttcgatgaagttctgagatactgaaatgtgaaaagagcaatcagaattgtgctttttctcccctcctctattccttttagggaataatattcaatacacagtacttcctcccagcattgctactgctcagcttcttctttcattctaatccttgctattaagaatttaagacttgtgcttacaatatttttgacctggagtggatctatttacatagtcatttaggatccatgcagctttttttgtctttttaagattattggctcataagcatatgtatactggtttatggaactttatttacactcctctatcatgcaaaaaaattttgactttttagtactaagcttaatttttaaaaacaaaatctgtagggttgacaaataaatagttgctcttctacactaggggtttcacctgcaggtttgacacgcagttgctcgcttttcctgccctgtcaagcttctctgttctggcgtgagttgtgaaagagttgaagacagcttcccatgccggtacacagccagtagcctaaatctccagtacttgagctgaccattgaactagggcaagtcttaaatgtgtacatgtagttgaatttcagtccttacgggtaaacagattgagcatggctctctattccctcagcctaagaaacactcatgggaatgcatttggcaacccaaggaaccatttgcttaaacctggaacatctcacctttttaaatcctaaaaaacactggcagttatattttaaattagtttttatttttatgatggttttatcaaaagacttttattattagattgggacccccttcaaacctaaaaatcaagttatttccttttataatacttttcttccccatggaacaaatgggatcaatttgtgagttttttcctttaatgataactaaaatccctctaatttctcatttatgcttttgtcttttttatgaaatatttcttttaaaagccccagtctcacctacgaaatatgaagagcaaaagctgattttgcttacttgctaaactgttgggaaagctctgtagagcatggttccagtgaggccaagattgaaatttgatactaaaaaggccacctagctttttgcagataacaaacaagaaagctattccaagactcagatgatgccagctgtctcccacgtgtgtattatggttcaccagggggaactggcaaaagtgtgtgtggggaggggaagggtgtgtgagtggttctgagcaaataactacagggtgcccattaccactcaagaagacacttcacgtattcttgtatcaaattcaataatcttaaacaatttgtgtagaagtccacagacatctttcaaccaccttttaggctgcatatggattgccaagtcagcatatgaggaattaaagacattgtttttaaaaaaaaaaaatcatttagatgcacttttttgtgtgttctttaaataaatccaaaaaaaatgtgacttcccattgtttttggttttgcttaagtgattttcagggaaagctatattggttaaaaaaccatggtgggggccaacttgaagaaattagacatcagagaggtcaggcgtagtggctcatgcctgtaatcccagcactttgggaggccaaggcaggtgcatcacctgaggtcaggagtttgagaccagcctggccaatgtggtaaaaccctgtctctactaaaaatacaaaaattagccaggtgtggtggtgcacacctgtaatcccagctactcaggaggctgaggcaggagaatcacttgaacctgggaagtggaagttgcagtgagccaagattg

SEQ ID NO: 120461 - DNA, 1227 bp, Homo sapiens
aaaatccttaactatattttatatatttcctcaatacttccaaatagaatattaacagtttgggaagatttgaggcttttggcctttgactagaattatatcgattcagtgtagtaaaacagctcagctattcagaggctctaatcggtgctatgatacagaattttggagaacattattggtaatgaaataatgttatgaagccatctgtcatatagctgtgttctgaatatatacagagagatggccagaattagtgatcagtagcagaaagcaatgagtgtctgtacagttacttaactttgttgcttatcagcatcacaactgcaagagtgatactattatgaacctacttaaaattaccaatctttggataaaatctggatcagcagtcacacacatggaaaaaattatttttaacatggaatttgataggcaaaatttttcaaaacattagtccattggggaaaaattaatgaaaggttcaaaaccactgacctgagacttttctcccagaatgtctctgaacattttgtaccactaaaaacttccctggaggcacctttataattataggtaaaagatcccagcagtagtcctagcgttagctgtaaaacttcaaaatggttagtagatagtttcctgtacatattcccttcccaactcagggcaggtttcaatctgccatactgccctcccgggccttgtctttccagggtgtctgacttggcatgttatgcatttgcacagagtccagatgtgtaggtgagagcagagatgggctgaactaaagatctgtatttcatgccatctgcatattggaattctgtttccattgatctgttggtttggtttatacctaaatgggtaaagcctctctcctgagtaggattgaattgtactcagcttttaagtgggaatgattttgccattgaagatgtaaagtcctcatttcaacctctgaatactaaagagaagaaaaatagagaactctatttggctctgaaaataattattaagtacaggtaacagcataatattaagccaggcattgtgcaagcgagttaaacagacacgatttttgccctcatagctgacagtgttctgcaggacaggagcattaactcacacctggtcagtgtttttcttttttctgacttggcagcagagtggcaagaaggctaagaacactgaagtgatgtgggattcttgcgcccccttgtgctt

SEQ ID NO: 120462 - DNA, 1051 bp, Homo sapiens
catagcacagctgatatacaacgaaggagctccgtgttcttattttgttcctatgtgtcagcttttttttttttttttaacttttttgggtagaatccaagacttgttcccttatttgttcctagacttgttctttttgtactttttttttcctgggttgaggacagaaaggttcacgttctgccaagtggctccttgggggagtggggtgcagcttttcagagctgaacggattgtacccttcacaggagtcacgaagaggcctgcactgtggctccaagttgttatcccaactgcaagtcctcgagggccactaggctctgtgaccagagatacaagaaagaaagcagctaacccgaagccattttttttttatacttctccaagtagagaagagagagaatttgtcagttgccttggattccagaaacagcatgcctccttgaacatatttccatctcagtttcactctggaggctcccagcagcagccgacctggacacacacagcatatacctgagctaggtatgctgttgtcttcggccacgtgcccctggcatttccaaagccccaccctttgtggagctcaaggactgcatttgtgttccttttttattcctgcacagtgctacctccacgttctgtacattcaacttttttttttttgagatagggtctcactcttgtcacccaggctggaatacagtgagcgcgatcatagctcactccagcctcaacttcctgggctcaagcagtcctctcacctcagccttccaagtagctgggactacaggcacacgctaccacacccagctaattttgtttattttttgtagacatggggtctcactgtgttgccccagctggtctcaaactcctgggcttgagccatcctcctgccttggcctcccaaagtgctgggattgtaggggtgagccactgtgcctgaccacattaagcacattaatataaatggaaacatgaccatttatattttgttagattcagaaaagaaatcattgtcctgtgggcctgtacctttgggctaaga

SEQ ID NO: 120463 - DNA, 1070 bp, Homo sapiens
catttccagacaatccatttttctttctcctcattgggacaatatcttccctttgtattgttttaaatactgagactaataaatcttttttgttttaggtcaagtgtatatagttttaacttttttttccgtcctttccttatgtttctgtcacgcatgaaccccaaacaaaaacacaggctattggtcaggcaaggtggctcacacctgtaatcccagcactttgggaggccgaggcgggaggatcacttgaggtcaggagttcgcgaccagcctggccaacatggtgaaaccccgtctctactaaaaatataaaaattagctgggcgtggtggtgcatgcctgtaattccggctactcgggaggctgaggcaggagaatcgcttgaacccaggaggcggaggttgcagtgagctgagatcatgccactgcacgatgcctggggtgacagagtgaaactcttgtctcaaaaataaaaataaaaaaacagactaccaagagccataatgtctagttatgaggcagtatgagtccaaaaaacctgattttctggggacacacagggtctgaatttaaacctggctctaccactgcctgtgtgtgacttctcaggaagcactctgtgtctttatctgcaaaaagggagcaattggtaagagcttgtagtccaagtgcttcttatatgcacattaaggcttaatggtcattcatagtcattatttgtatctctattctctggaggaaactcttaattcaagggcattaacgctgaattccttctgttaccatagtctagattatcttttggttaggtcttgggattcctcttgtggtgttttgtttttcagtcagatgagttgggtgccctggttccttcttcacccaggctgacaactttctgtgtaatatggaagtcagggtaggtgctgccagaatatcttggcgtgggcttccacctctgcaggatcatgtgcgccacacgtatcttgactgaatcgcttcattttaacctgggagagattgtagaaataatatttttctttagtcttctttaatcccatcaataatag

SEQ ID NO: 120464 - DNA, 1034 bp, Homo sapiens
aactaaaatgccatatgcgagctctaccaagccactccaactctagcccttgtttggaggagctgactcaagagttaggccctttctagtttggcccaagtttcttagaccccattctgtgtctgcaaggggaacacatcaagatggtattaatactggtgagttaaaaaagagtagtgagtactcacttcggcagcacatatactaaaattggaacaatacagagaagatttagcaaatcgaaaaaagagaagaaaagggtagaacgctttagagcataaatgtccaggggacatttcggcccctagtgtctacaccatttctgttcattcttcagtttttctcatttctcaggcctgggctaggggtaattcaattaaattattaactgcaggaattagatttgaagctggtttctggactatattgatattgagagtgatattaccaggtcatagaatcatagaattttagagcttcattgagatcatgtagttcaaaagtagaataagttagatttgaatttttatttggaaggtaatagttgttttattgggcatggaatgagtataacagaacgagtgatttttagtctctctacaagttgttgatctaaagtaaagtagatcagccagtgttagaaaagaagcattttaggaaatctctagatttgaatataggctattatgttacagaagtaggaataaaggattttctttcttttttatttttatttatttatttttttatttattttgagatggagtctccctctgttgcccaggctggaggctggagtgcagtagcgcaatctcagttcactgcaacctccgcctcccaggctcaagtgattcttgtgcctcagcccaagtagctgggattacaggcacgtgccaccacacctggctattttttgtatttttagtaaagatggggttttgccatgttggccaggctagtctcaaactcctgacctcaggtgatccacccgcctcggcctcccaaagtgtgggattacaggcgtgagcaccgcg

SEQ ID NO: 120465 - DNA, 2092 bp, Homo sapiens
accagtaaatgttttcttacacagagctctaaaacatgtttaatctggtataatttaccactaggcacaggaaaataattatagctaacattcctttagtttgtctctgtatatccacacttaacaacagcattttcacatgatagacaccctgacatatgaatgaatgaatgaatgaatatcaggtgctagattaaaagctctaattcagtatctaatttaatcctctcaacaattatcatttagctagtgtattatccacattctatcagtgaagaaactgagcttcagatcactttaattaccttgcccaaagtcataattgaagtggcagaatgggactggaatccaggtctaactcaagtgctatagtggtgtgaagggaagactggtaagggttggtgttcatggagaatttgttgctgggtgtatacttcttgtttagatttcctgttttgaaaacattcaaacttgatcaaccaaaagaaatcatttgcataaatgttattcagttccaggagccaggttccacgcctgttagcatctgtccgtcagttctgtaagcaatcttacagtggtgtgtgttcatcctaagtagtacaaaacagtgcagaggaggaaggcggacagcttaggggaaatctgaccaccatgcgtgttggaagtatttctcttgttctcctgcttttagaaagccatctctgcttgctttttcagggggttattaagatcctactctcttggatactgtgctctattaggcaggagacacaggcagaaagaagctcacttggcatgaattaggcaacagagaaaactcttgctcagtgggagtaacctgtcacaacctggttttctctggccagataaccagtcttgtcgagtagtaatgccattacaacattcccattcagatcctcatgacccagtaattgttttgagaatgagtgcaaagctatcagacaccaactactataattagaaaagggaaaaatagacacttaccagagctaatgtctttaggctggagcatttacagctttttgttttttgttttttaagttatggagcctctttctcagttttgcttcctaaaatacaaattgcatggtttaggggttcttgcatttcatttttgttactgctgtgcactctctttccttttttcccccctattttaatcggagtacaaattgctgtcagcacatcgagttcatgtgccagccacattcagaacagggtgttctgtgctcttcaaaacaaaattgctctagggcagtaagagaacaataagtcagagctccagtttaagtgatgttttgcagctcgcttgatgtggttacactccgattgcgcagctaagcttgggtaatttggtttggtttgactttgtggggatttggaggacctccctccccctttaagttacatagtctttaagtcaagaaaaaaatgttgtctctttttaacttgtttatttctttctctaccaaaaaagccctaagtagaagcatcctgtatgtacttttattctctttgggcatgtcatagatgatttacttcccgtaaatcatgctggttgggattagcaacagacctcctgagccctacaggctgcactcccagtgagtcacgatggttattattaaatatttattaagttagtatttgcactaaaagatgccaggtcaaaaagcaaccacagggcttccacagccagagctgccatggtttttgttctgttttgttttggtaggaatttttaagataacattaaaaagaataagtggagctataggagctaggctcatctgcatctgttactgcaatcagggcccctactgtggcaatcagcagtctttccgtggctccaagtggtgtgtgagttcttgtcagcagtctcgtagaacttttcacatcagtgttccaagtttagaaaccagttaacccagcaatgccctttgctacttgtagatgtagagaatcaatgggctgtattcaccatgaggctgtgatacctccttttactctgacattccgaatgttgtcagtattacaaggcgatggttttggttttttatataaactgggg

SEQ ID NO: 120466 - DNA, 1924 bp, Homo sapiens
gagccactgtgcctggctgactcctctttttcttatctcctacatgtcatccatcagcaaatcctcttggctctacctaccatggttattagagacctaaaattgtctctaataacagtcttcaaattaatgatatatcttaatagtaatcttatctaaatcacatttctcaaggttccggggaaagaataacattatggactcaaaaaggtttttactgaattgtaaacttttacttccttttcataatttgtctctgtgtggaagagaaaacttaggttagtttgatgggatttattctttctcaaggaaattttgatttttactctttatatgaggatcctaatggttacaaatcagtttttagaatctgtccccctacgctttttcttgtgtcagttaagatgaccatcttgtaatttttattcaaagtttttctttcatttaaaaagttactgtgttctaaggtactctaattgatatgattatgatgactgatacttcagtctttaagtttaattgcaggtcttggctacattgctacttttcagctttgctttcttagaaaatcaaatctgacttacataaggttctaaatagctaccagttactcttcccccatcccccagtctctcacatcgtctgatttgtcaactttagtggttggaagaggcccatcaaaatgctggctgtatgtggttctctcgcctctcagtactttcagccacatttgaatgcaaagaatgcagacagtcagcagtatttttaaatgtgaaattttcaacagagtgttctacaggttccagttgttggcgtacctcctttccctctccaaatctcactgaaatgatagatggagggaacaaagattttcaaaagaagaagaagagatcaataatagtgctggaaaggagaggaatgtaagagtggatcagaaattatggagaatttctggaatatgtaaagttgatgaagttgaaccaatggaaactagtctcagcaaatccaacccgagacaggtgtaaagaggacttaagcagaggtacacactgttcttctcaacaggcttaggcggaactccaagctcatggtcatctggtgtgagggagcccaagcaggctatgcagcaatcatcagggttgttataaaacaagatggaacagcggggccagtaaacctccagtgcagtagttctcaacttttcctgaatttagaattacctagggagcttttaaaaattctgacacccagaccagttaaataagaatctcacatctcagaagatggaactccaggcacaagtatttttttttaaactcccagattattctagtttgcaggcaaggactgaaaactactagactacggtctgactgtgactttttctcccaagctaaaaccagtaaggccaggttctaaaataaaatagaaaaataataaaataaatttaaaaataaataataaaacaaaatgtgcctcaaaagactccaagtgttaggacttcgactagggaaaatgaatgtattttttgaaacttttttttttttttttttttttttgagacggagtcttgctctgtcactcaggctatagtgcagtggcgcggtcttggctcactgcaagctccgcctctcgggttcacgccattctcctgcctcagcctcctgagtagctgggactacaggcacctgccaccacgcccagctgattttttttgtatttttagtagagacggggtttcaccgtgttagccaggatggtctcgatctcctgacctcgtgatccacctgcctcagcctcccaaagtgctgagattataggtgtgaaccaccacgcccggccttttttgaacttttaaaacaaatttaaaggggaaaaaagtgtaaagacagcttttcacagtaaataatactaaagtgttctg

SEQ ID NO: 120467 - DNA, 1786 bp, Homo sapiens
tgcagtggcgtgatcttggctcactgcaacgtctgcctctggggctcaagtgattctcgtgcctcagcctccccagtatctgggacttcaggcgcgccccaccacgcttggctaattttttgtgttttagtagagacagggtttcaccatgttgcccagggtggtctcgaacttttgagctcaggtgatccgcctgccttatcctcccaaagtgctgggattacaggcatgagccactgtgcccagactatagttttatacttatattttatagcattaggtagtttatcaaaatgaagaaaataatataaatggacagtagtataaatattattcattgaactccattgatcccttatattgtacctctcccaagggaataaatagaaatatttcaatggaaagtcatcctaatttggggattctagtatgacttcagtatttaacatagaactataagagcctatctgtaaaaatcccattgaaaagataaacatatcataaaatacacaaattcaagctatacctacacttgctttgtatatgtcttttgctttgtgtatgtctgttgcttttatcataccatctttttctcttttctttttttttttttctttctgagacggagttttactcttgttgcccaagctggagtgcaatggcatgatctcagctcactgtgacctccacctcccaggttcaagcaattctcctgcctcagcctcccaagtagctgggattacaggcatgcgccaccacacctggctaattttgtatttttagtagagacggactttcaccatgttggccaggctggttttgaactcctgacctcaggtgatccacccgttttggcctcccaacgtgctgggattacaggcatgagctaccgcgcctggctagccgtaccatcttttaaactctattctttactttcttcatctaaggttatgataatcatatatactacatatattatatatgattatataagtatatattattatgttgaggattaagataatgtacaccatcgcctagcattcagcctaacaaatggtaagcactcagatgttgattattattgtggcagtgttaggatttttcactggttttataatggaatggtaaaagctgtgttataacatcttgggtcctgacttcatctgttgactatgcatgcgtacaaaccttggaaacaatgctcagccatcttgcttagccccaggaagttgggaaagacagaatcaatctaagggaactgattattactactgtggaatatgttacagaaattagagtgaagaggtgatgatttctcttactaggttttcttaactaaatattagaggttgtgaattattagaactggtcatagcccatttaaaaagaagctgaattaagaacaaggattttcatacatacttctataataggggttctgttcttttaccctactccccccagcaaatatattttcactaaaatggaagagggcaatagatttggaggatgaaagaattatttctaccctttttttttttttttttttttgagacagagtcttgctgtgtcgcccaggctggagtgcagtggcgtgatctccgctcattgcaacctccgcctcccggattcaagcgattctcttgcctcagcctcctgagtagctgggactacaggtgcatactaccatgcctggctaatttttgtatttttagtagagatggggtttcaccatgttggccaggatggtcttgatctcctgacctcgtgatccacccacctc

SEQ ID NO: 120468 - DNA, 1028 bp, Homo sapiens
cccaggctgcagtgcagtggtgcaaccatggcgtgatactcctgcctcagcctctccagtagctgggaccacaggcgtgtattttttatttttagcagagatcgggtctcactgtgttgcccaagctggtctcaaactcctgggctcaagccttgacatcccaaagtactgggattacaggtgtgagccactgcgcctggcattcttttataatggatgaacatttacaaaatagtttcccaatttagttgtttggatgtttttgtttagactcttagctaaatgattctctactgtatagatttatctcatgcttttcaaaaactgtatatttttatagtatgcatttgccaaattttagtctaacattcccatgaccatccttttaaggaaaaactttgaaatacttttatttagccatacggttaaaatttagctggaactaagtgatctgtgtttagttgatgaactgatccatgctattcttgcatcatgactttttcatcttcccttgattcttttccctatatgcatttaagcctgtctggttcttttctcaagcctttgctctctactcccctttcactcaaagcatttcatgtttcgcctttataaccctagtataagtatcaaacttctcacctgtgacttttgcctctctctacatctctcttctacttttaactttcatgtttacaataagctacctttctcttattttcagttcttaccttctcaaacttcagagaatccccactgcttagtgttcttgggagatgctagaggttacacaaaatgccacctcccagaaggtcgaggcattttttttctttaaaaaaaaaaaaccttttagccaaatacttactcataagaaatgctccattttattctcagtagtatcttcagaaagatttcagaggtaattgcatctacaaaataaagacttagtgctaagaaaatgagcaatccgataagaatatgtaaaataaaaaacattattactaaattcttttttttttttttttttt

SEQ ID NO: 120469 - DNA, 1026 bp, Homo sapiens
taactgtcacccacacttctctcctgagctcaggccttatctctgataaccttctggacatcgcacaagcaccccttgctcaacataccccagccagagttctcttgctctccataaaaagcaatctgaaatgttcgaattaaattgaagagaaagaataaaaagtcctgatgagtggaaccatgaaatgtttcatcttttttccctaagtttaaaaagatcatgaaagtaatacatgtttaatgttaaactatttaaataatataaaaataaaatctaagaagtgaaaattccttcttatcttcccaaatctcattctccagaggtaacactgtttgagcagtttggtaagttatctttccaaacttcttctatatataagcaaatatacaaacacatatatacttttttcctcttggaaataggatcatgttacaaatcattctgcaactcaccattcacttaatagtacatcttgaaaatccatctgtcttttcatgtgagtattagaagattgtttatgtggaatgggtaagacgtcacctgctccatattagtgatattttcagagattagctgtcttaaagggaaaacagtgaaaaagacattttggcatgtaatgaacaatatttgcataattgtaatccagtgctctaaaatgatcatacccacccacccaccaaaatctacaaacaactgggaaccatggttggtggctgcaaatatattggtataaattacactgtttgtgccaggtgcggtggctcatgtctgtgatcccagcactttgggaggctgaggcgggcgggtcacttgagctgaaggagttcgagaccagcatggctaacatggcgaaaccccatctctactaaaaatacaaaaattagccgggcattggtggcgcacacctgtaatcccagctactcaggaggctgaggcaggagtatcatttgaacctaggaggcggagattgcagtgagccaagatcaggccactgcactccagcctgggcaacagagcaagagt

SEQ ID NO: 120470 - DNA, 1055 bp, Homo sapiens
aataaactgatttttttaaaaggcatgcatctatgtatacacacacacacacacacacacacacacacacacacacagacacacacacaaaacaagtgaaaatttattgtttcttcccctgagccccattctccagaattagctactattaatggcttactatattttttctaggtattttctcttcatatacattttctttcttttcttttttttgagagagtctcgctctgtcgcccaggctggagtgcagtggtgcaatctcggcttactgcaacctcccgagttcaagggattctcctgcctcagtctcccgagtagctgggattataggcgcctgccaccatgcccggctaatttttgtatttttagtagagacggggtttcactgtgttggccaggatggtcttgatctcttgaactcgtgatccgcctgcctcagcttcccaaagttctgggattacaggcgtgagccaccgtgcccagccttcatatacattttctttacacaaatagaataattatattctgttctataaatagctttttttccccttcatggcattcttaaactttccatatcaattcgtttgtaactgtgtctttatttttaattatataattttccattgtagagatgtataatagaagtctatgaaggaaatccactcccctcctttttttttttttttttttttttttaactataatagtagtgtttctgcatgtatttttgcttgcttctgtgagaatatctacaggttatttcctggaagtgatattgctgggctaaaggatatttgcacataaactttcagtagatattgggaaattcgcccttaaaaatattcaacaaatttgtactcttactaaagatatgaagtgttatttttctgataactgtacacactttaattttgtggattagaaggattaaacttctgaaaatgaatccttgtcatagtagcttgagatgttcagaagatgatacattaggtaatatatatgttccttggcttatggtggttttacctcctgataaactcattgtaaat

SEQ ID NO: 120471 - DNA, 1144 bp, Homo sapiens
acaagttatgcagtgatgtgaagatacaaactaaggtcattaagttttctttaatttataatttatattaacctattcattgaaaaggatttgatagtttgtgattaaagcaaaacaggcaaagaccattaaaaacaaagacagaaaatgagcataaatcacttgagaaataatgagcagaatgggggaatgggaagaaatctttataccagtaatctgaggcaagatagtttctgtgtttgaacattaaatttagctctgagcttcctggcaagcaagagaaaaaaggaaacagggtgacttttatagttattgtccagtaaagaaagctttttcaatttttcagaagagagaaactttttctgagtcataagttataagaggtttgttatgtgaattcttacatatggaacataatttatatttctaattttgaaaattattgaatttcttctgttgctgtcttagccatcaggtaccattctatgcattgtaattatattggtcatattaagttcatgtccactgttgtcaaaagtggaaataccatggctggggtgtgtttatgtattgcctctagagctgtagccactgacgaacaggaaactgaaagctaaaagttcaggaaatgtattgtatttagactgtggaaaacatatatatgatactttactgaaaaccatgctcttttgaaaactgaaatatgtatgtatttaattagagatgaatattaaggattcatatcagatgcttaaatatgataatagatacagtatgtgcattgtaggccaggaatattgtgcaatgctagaaaaaaaggcaacagattattgtatgtattcagctatattctttcaagaaacaaaacagctggcacatcaattgaattcctcaaggatgtcttatttccagagaattccagagttttagttttagcttagttccaaggaagaggaggtccctgttttacaggatagcctatttcagtcttagggagttctaatggttaacttctgttttcatacactgaatttaactttgttttcctgtgatttattaatacagtctatagctttcttagagttgagaagaaaatgattaattgatcaaactttttttgaaaagttaattgcatctcaagtgt

SEQ ID NO: 120472 - DNA, 1059 bp, Homo sapiens
ttttccatttttaatatgactatattctagattttctgtaattcatgatatattttttaagattttggctagatttgtcagtttggattgtagtttcttttaacttgtttttgtttatttatttattatttttttttttttttgagacaggattgcactctcttacccaggctggagtgcagtggtgcgatctcagctaactgcaacttctacctccctggctcaagcaatccttccacctcagccacccaagtaggtgggactacaggtgtgcaccaccatgcccaactaacttttctattttttgtggagacagggtttggttttaccgttttgcccaggctggtctcaaactcctgggttcaagggatcgtctcactttggcctcagaaagtgctgggattacaggcatgagccactgcacctggcttattaatttcattaatactttgcttttacctccatttaacaaactttggtattaccatatatgagatattttcatgtgtatgtgtgcatttatattttttaaatatgtgactgagttttttccctttttcttagattcctaggctatttcaatatttttatacctgttgtctactctgcagctaatgacacagatagcagtatatgagtttttcttttcttttcttttctttcttttttttttttgagatggagtcttgctttgttgcccaggctggagtgcagtggcacgatcttttctcactgcaacctccgcctcccaggttcaagcgattcttgtgcctcagcctcccgagtagctgggattacaggtgcccaccaccacacccggctaatttttttttgtatttttagtagagtcggggtttcaccatattggccagggcgaacttctaacctcaagtgatccacccgcctcagcctcccaaagtgttaggatcacaggcatgagccaccgtgcccactgagaatttaatacactttatgtaagttaattttttatgatagttatctagctttgccagaccaattttgttagtaaatttaaaacattaaaaaattttgaatcct

SEQ ID NO: 120473 - DNA, 1048 bp, Homo sapiens
gtgcagtggcgcgatctcggctcactgcaagctccgcctctcaggttcacgccattctcctgcctcagccccccgactagcttgggctacaggcgcctgccactacgccagctaattttttgtatttttttttttagtagagacaagttttcaccgtgttagccagaatggtctcaatctcctgaccttgtgatccgcccgcctcagcctccgaaaatgctgggattacaggcgtgagccaccgcctccagccacaaatactttttagtcgccataagcataatcaagaaatcattttgcaaatggtaagcttttcatgttgtgtattctttcccatgattagagaggtaaaaagtggcctgggatgcataaagatgtcgtagacctctgcaatctgccacattatttctttaaaaaaaaaaaaaagcaagcttctggactagattgatttttactgaaatattaatttttctttattatttttaaacactgaagttgaattgtataattcacaaatgcctatacaaaacttttttccatgtcctcaatactttgtatcagattatttatatttctcatggtttggtttctttttcttgtcttcatttttctgaaggtaaaaggggattttttccccccttttctgatctgtaacttgttttgtatttggatgattaccctttataacaaattttatcttctaattatgctattaagcgagaagatagtggccggtcacggtcgctcacgcctgtaatcccagcactttgggaggccgaggtgggcggatcatgaggtcaggagatcgagaccatcctggctaacacaatgaaacccagtctctactaaaaatacaaaaaattagctgggcgtggtggcggaagcctgtagtcccagatgctggggaggctgaggcaggaaaatggtgtgaacccgggaggcggagcttgcagtgagccgagatcgcgccactgcactccagcctagacgacagagtgagactccgtctcaaaaaaaaaaaaaattcttctaaattagattttagggt

SEQ ID NO: 120474 - DNA, 1098 bp, Homo sapiens
tctaatgaagttccatatacctcctctccagattctttaatgaacctccatgtacccattccccagattcattaattactgacattttggttatttgtatttcatatatttttttgagacagggtcctacttgttgctcaggttgaaatgcagtggtgaaatcacagcatgctgcagccttgacctcctaagtacaaacagtcctcccacctcagcctccacagtagctgggattacaggtatgcatcaccatgaccagctaatttttaagtttttttgtagagccacagtctcactatgttgctcaagctggtcttaaaatcctgggctcaagctgtcttcttgccttggcctcccagagtgttaggattacaggcatgagccactgtgtccagccatgtgcttttttaaactgttaaattctcacagagatcataaaacagtggtagtattggtgtaccaattttttttctgagttttttcccgaaattttgttataagtagagaaacataaaaaacattgtgttttagctcagagattgactttggacaaatggtaattatgaaactgtttttgtctttagctgctttttgtcaattcatagcctggaaaagaaaaagaaggattaatttttatgcttttcattagaataaattagtttaagtactccgtatctgtagaataaggtactgttcatctggaaagtttggttagtgtaatatcttaggaatgcaattcctaagatactggaattgtctaaatgttcttcttttgccttttctttctctaaaaccttcatcattgcagtgctttaactgccacctcttttttaggccccaaacctacatcactgtttaaacttgaggtctaaatattcgtctatgtcttgaaatgaaacgtatttaaataccatctctgtagcagctgtataccaacatgacccctccccactccctccagccaaaacacttctcttcctgacttccctcttcagctgttaatgactccactattcttattggtcattttgacttttccttcttaaactcagtgagtcactaaattcttttgtttctaactttatgtctctttatctt

SEQ ID NO: 120475 - DNA, 1051 bp, Homo sapiens
cccagaaaatggtcatttcattatcaaaagcagggttgcaaatttcagattgatcttttcaaaagttagatttgtacttgttctcagtgttcctatctctggaaactaaagaacctcctccattgttagctgaaaattgcacagtgaatttgaaagtcaagatgtcccagtcatggacataatgctgcgataggttactttttggaatggagaaaacatcttagagattgagtctgcatcagaatatattctgaatgagcatggaatgttctttacccatgttagatattaattaattaagtttttccatgtttaacttttttaaaaaagcaagacaataaaaacagtcttgtaatctgaacacatattttgggttttgttgctagcataaaaattattacctagtggatggtaacactgttttgaaattctagcttggaggagatgtttgttacaagagaaaaggtgtttcattgaaacctaacagggtaatttacatggagagatacttgtttctcttttgagttattgttaggttaagacataaacttagaaaaattgagatgctcatctttcccatcttagatttactttcactatgaactttataaattcttttttttgagacagtctcactctatcgcccagactggagtgcagtggcgtgatcagaattattcaagcttatgtatgtgtgtgtattacacatatattacacatatgtataaatatcaaatatcttttttacattatatataatggtatatatggttgctatatgttttatgtgtgtatagcagtatctatctatactgccttatttcccaggcatatttatatgcgaaactttttttctgtgaaatcttattgtaccaagaggaataagtatatatgcccacaaaaagactgggtcatagcagcttttttcacagtaggaataaactactgattcacatagcaacatagatgaatctcagaaatactgttcatagcaagagaagccaggcacagatgagtatgtataagtgtttatgatgccatttatgaaaaa

SEQ ID NO: 120476 - DNA, 1428 bp, Homo sapiens
ggttttggatttacttttcaggagtatgttttccagtggaataaggcttactactgaatgggagctttctttgcctctctgagtgtagacaggagtgtttattttcattgtcttcccattttgttagattgtggacaagggaaaagttaaagcatattttggttaagtatttttaatagtctgggattctatccacctcctccataagggtttttactttagagaattataaagtaattctctaaagggagctgcttctcttggtgtttgaatcaaaagccaagaatcgacttgaaaaaaattcttattctggtgggaaatttttattgtcatactttcacttcaccattttctgtttgtctctcccccagctgacctctgcctgacagtctgcaattatggccctgaccaatttagagattctatacaaatgacatttttaaaacgagggttattaatactcattatttgtgagaaacactttatttagttacccagtttttttcttctaatgtgtcttggttgatatctgtattaggtaagatttatacttcggagattaagtttaagttaagaacaaagttgctaatcttgatttaattatgctagtttattattcattgaatggtcattttacttatttgcctaggtaattacagttagctaatagctgataagagttcgccattgaaccatcaactcttcaaccaataattgtgactattttagattaaaaagaatatagtggtctttattgttttatttctccataacaagctatgaggtctttgtatgtttctgagtctttaattcttttagttatgggaattttgggtgaatttcttttttaaaacatatttttaatcagttcaaatgaaaaacttaaaatattgcattaggcaacttattaaatctttagttatctgtttattcttggaaaataatgcatattttgggttcagtttagtttcctaaaggcttctctgcttaggatgaattagtctggagaggaaagaacatcctgtttgtatacctgtagaagaagttactgctgttaaaagctaagttggctttttgatgtttagtgtggataggttgaacaataattcatcctcacgttcggagggcttattctatgtaaatagttgaaaggaactggataagactgtagcttccattattttttatcatttatataattgctctttagtgtacttaaatatataaaatactattaataattagttgtttattgtccttattctgtgatgatgtatgtatataaaccacatacaataaagttgcatttcataaatttatttacatatgtgtattttagtattttaactataaaagttaaagttttattaactttaggtttaattaaaagcccattttaaaatttagtttttagatattttaattact

SEQ ID NO: 120477 - DNA, 1039 bp, Homo sapiens
atgcatgtgaatgagtctagtgaatgcgaagtgcttttaaaatgagatgtggtttgagcagttccacaagcatgcccagggtcactaccagtgacaggcaggactggccatataatttgcagggcccagtgaaaaatgagagtgcagggccctttgttgagaaagtactaagaatttcaagacggcggcagcagagcattagacccagcacagggctcttctaagtacacggccctgtgtactacacaggtcacatacccatggaactggtcttaggtacagaccctgcaaagaaccgtactgtgccttaggaaagggctgctcatcccacatccaggtatctgcagccatagcgcatgtcatctttgaattctgaagggcagtaatgtttagggaaaatgcaagcacatgtgtttccaaatgccaaggaaggcaagtgcagtgatcagagtggttttctgggagagtgggtggggctagcaaggctgccatcggaactgtggaactgactgttctccacagactctggcctagaaaaaaaaagaaccgtgtagctgtatctacagggcctgttgttgttgctgcggtgtattacaacacagcctggcagcctcccctgcctttctgtcttcctcctggaagagcctggtcccagacatgtgacacgtccacacagccctctgcagatttgcccacactgctcctcactgttccctcaattattaggcttttccaggtctgcatgctttttgctcacgctgtcccctcctgcctgggagtccctttcccccttgtccacacccctctgtctggcaaacacctacttcatcttctaagattcagctctactgtcaggtgacctcttcaatgacgccttccctgcctctcgtaggaagagctgattcctctttccttggcgccttccattgtgccctatgcagacatctgtcacaacccctgtaacatgaagaggagaactgacatgttacgtgtatgtcactgtctcctaatgaagcccttgagggttgggacatatata

SEQ ID NO: 120478 - DNA, 2656 bp, Homo sapiens
gcaaaatttgattcctcatagactacatgggttagtttgtgggtttccacaagagtaccttgtcatttgtctgtgttgatcagtggctttttctgtactgtcttcactgcaggtgacctgaaacatatcacgaagctgaaaccttggggcctttttgaggttctagtggagaagtatgagtggtcgcaggaagaggcagctggcttcacagatttcttactgcccatgttggagctgatccctgagaagagagccactgccgccgagtgtctccggcacccttggcttaactcctaagcccctgcccagcaccacagcagagatcacacactgaccctccgcccttccccttcaagcattttcctcttcccttttcagggtgaagctcttccttcaagagtttctagatcttgttttttttttaatccaacatgttcatttgggtttgcttacttgaccctgtggagatccccacagccattgggcatcctaggtgaatttggccttggttgggctctgccaaagactaatggactaaaatgtgaaacagcctcttgccctgtacctttccttcccattaggacatcctttaaattataagcatcctttttgaaaagagctatgaaggtgtatgagcccatccttttattcattgactctaagagtcaaattttctagtgcatatcctattgccagcataaggatgaggagggggaaagggtcttaattctatgtacagcagagacattaaacttgctgtgtccgggctgcatcatcttcctggactgtttctgttgttctctgtgttcacattttttcctgcaacttttaagctactgtcttttttaaatagctatatgaacaccaaatttgggtaccattttatcactgttcaaagcactgtcaaattcctttcatcctttaatagttaagatctttgaatcttcagtctgatttttaatgtaagcaaaaacagaaccattgaatagtaatttcttgagaacctcaggtgttctataaacagtcctttcctgtatgtcttctattaccctaagaccagagttattttggttggttgttttgttttattttttgtttttgtatccatggctggcactttactcattgcacttgagtttattgccccataactaaaggatcaggatgatggtagaacggagatctgggtttcagagctttcccatttaagaaaaatagatcttgagattctgattcttttccaaacagtcccctgctttcatgtacagctttttctttaccttacccaaaattctggccttgaagcagttttcctctatggctttgcctttctgattttctcagaggctcgagtctttaatataaccccaaatgaaagaaccaaggggaggggtgggatggcacttttttttgttggtcttgttttgttttgttttttggttggttggttcgttattttttaagattagccattctctgctgctatttccctacataatgtcaatttttaaccataattttgacatgattgagatgtacttgaggcttttttgttttaattgagaaaagactttgcaattttttttttaggatgagcctctcctagacttgacctagaatattacatattcctccagtaagtaatactgaagagcaaaagagaggcaggattggggtcacagccgcttcttcagcatggaccaagtgggccttggggattgcagcgttctcgaagtggctgtaggactcgaatttacagaaagccacagaggtgcaacttgaggctctgctagcaagccaccagtgaggctattgggtaaccacctttctatacaggagattggaatctactttgtcatttatccaccacagtgacaaaggaaaagtggtgccgttatgcaatccatttaactcataaacatattactctgagtaactggccagccattcatcggatccttcattgggtactcctgaaatcagacatgttcctgtagaaagaattttaagttaggctttctatgcacctatcaagaatcaagagaatagattgtatcaaacaacggcagggaaatccttcagcaattctaatccactttgggttttcagctgtttttacatctaaagcaatagactagaactgaattatcttctacatagtaaaatcacaattgtggaattacaggaattctggtgatattaaggtgaaataacaaaacacaaaaggccctattttaacagttgatgtgacagtaagttttaatagaacctgtaacttcattttggaaatgcttctccaccaaataagggctttttcccctatttaaggagccagatggattgaaagatgtggaaataggcagctgtagatcttgatcttccaggtaccccatgtacctttattgagcttaattataatactgtcaaattgccacgatctcactaaaggatttctatttgctgtcagttaaaaataaagccctaaatacatttttattctttctactgagggcattgtctgttttctttgtaaatgccgtacaataaacaaattatttaataacctacatgtttccaaaaatctctgttcatttgttgtccaaattgctctgccctgagtaaaaggaggaaaagattggttgagtatgctttttta

SEQ ID NO: 120479 - DNA, 1045 bp, Homo sapiens
acagaaagatacttattaaagacaagtatagtaaattgcaaggttaaagagtttggattccttggtgtggtagctcacgcctgtaatcccagcactttgggaggccaaggtgggtggatcacttgagcccaggagtttgagtccagcatgggtaacatagcgagaccccatctttactaaaacaatttttaaaaagaaaaaagctgttgttgtttcctagacctgtgtatattaagtttaggctcatttgtttgtaaaaataatttggagtagctgtgtgtaaggcaaaggattgttggagctaataacataaaaatgctgtttaagaaataagcaaagtgagaactttggtttgggaaaaacttcagagagtttattttcatctccattattaagcagtattgacttgttactttttagaatgaagtttaaaatattgtttccttcattttctcagcacaaacatttcactgaagatattcaaacaaggcaatatcgttccttggaagttctaatcggatctggctataatacccctgctgacatttggagcacggcatgcatggtaatgttttttccccttggctttcacttgttaagtggtacatatcttgccctgtttgctaatttcagtaaaccagcaaattaactagcagaaaagaacgtaacacagatgatttaccataggtattctaaattctatgtctagagaggtccgaattcaaaaacctgtctggcatttcatttggttactgctaagttcctgttaggtgaaggaaccaaaagtttcttactacagattgttagtggggggaaataatgaaaacaactactaagaggtgttgttggttttgattaggagattacaagtatctttgcatttttagcactcatctattttcagaccaaagaaacccctggaaactgcttcattttgtacaattcagcagctcctcagatacctttgcagctcccaagatgtgaatcccaatcattcatagattcataaatggctattttgcctctggcaagcaactgttccagt

SEQ ID NO: 120480 - DNA, 2337 bp, Homo sapiens
aaggtgtttttatatttaattttgatctatggactatgggcatgggttcttctgttgtggatggtaacagtttgtttcaagtttgagaaccaaaaggaaaaaaaattcctgcgcttctataattttctccagtaaattcccatgcaccttcatcacatttgtactggtgaggcctctaaaaaattcgagtttgtctgaatgtaaaccaaccccacggactgctcagaagaccacactttgttatttattctgtttttatttgggtttataagagtatcccgcatcttttaatttaatgaaagacttaagtgctatgttagggaaagatttgtgaaatttaattaggaagtaattaaagttaacaactatctccaactgggggtaattaattagccacctgaaggctttatctgtttgtaatctccgcccaggctgacaaaatgtcaaagaataagaagaagaaattgaagaagaagcagaagcgccaggcagaattactagagaagcgaatgcaggaaattgaggaaatggagaaagagtcgggccctgggcaaaaaagaccaaacaagcaagaagaatcagagagtcctgttgaaagacccttgaaagagaacccacctaataaaatgacccaagaaaaacttggtataaatagaacatcacgaaaattactgtacaacacactttaacgttaatttatcattgctatataatacagtggtttcatacatacaacacatctctgggggtatctttataagaatatggatcttgtcataaatgttaggcaggtaatatttaaatgtaatttgtaacttttctcaggaaatggaacatagatttcatttaacaattgggtaaaagtaagatcttggcccttccggaaataggttttagatgtttagtcatgtttttatgtcactcagtataagttctagaaaatgttttaatcttgtgagaaatgtttctgttctttcactcacacacatatgcatatatctttttttgttcgtttgttccttagaagagtcaagtaccattggccaggatcaaacgcttatggaacgtgatacagagggtggtgcagcagaaattaattgcaatggagtgattgaagtcattaattatactcagaacagtaataatgaaacattgagacataaagaggatctacataatgctaatgactgtgatgtccaaaatttgaatcaggaatctagtttcctaagctcccaaaatggagacagcagcacatctcaagaaacagactcttgtacacctataacatctgaggtgtcagacaccatggtgtgccagtcttcctcaactgtaggtcagtcattcagtgaacaacacattagccaacttcaagaaagcattcgggcagagataccctgtgaagatgaacaagagcaagaacataacggaccactggacaacaaaggtacctatgcagctatacttcctcaacactccttccctgcacaacacattcacagatttctagactaaaagtatgattgtttttgtaactatagctttacaacaggtgtgtctaagttacgtttaaattgtaatctgtagctaactttatccatcatgtactgagtacacagcacttcatttgttgctgtgagggcagaggtttttaattctggaaactcaaggcgttgctgtgctctttttgtctcagaaaatgtaagttgtcacttgggtattgctgactgtattactcttaccttggagagctttattactcattgagtatttctctgttcattgaacagtcttattgatgatgcctgttgtctgtaggaaaatccacggctggaaattttcttgttaatccccttgagccaaaaaatgcagaaaagctcaaggtgaagattgctgaccttggaaatgcttgttgggtggtaagttaaacttgccttaatggtgttttgaagtgactgggaggatgaatgagaatttggacttagttatgcaaaacatccataattctgtacccagattgatacaacacttcagtgaatatttttttacatttaaaaaaaccttttactatggaaaagtttaaatatacttacgaaagtagaatggtaatcgtgatcatgaaaagtccttctgttaccccaccccactccagatacccatcacccagattcagtaatgtcaactcctggccaatcttgtttttaatatatatatcattattaactttcagacactcagtgcctatgttcatactcccctactcccattttcaaaattgatgactaacttataaattgtaacctccttttaattcacttaacatattttggacactttgct

SEQ ID NO: 120481 - DNA, 1021 bp, Homo sapiens
tttgatttttttgtgatttttatcattttcttttcaccgaagtatttcttctggctgcctatgggaaaatattacagcttttaaccttttagtttttgcctatatacagatatatacacagaacacttggaatttggtaatatctttccccttatttatcctcattttgcagttttgcttgtaactcagggagatattcaaaagaaggattttaactcagagaaaatgttcaacaactgagattatctgagaacagattttttattcttcctataaatgaaatctggccagttagtgtcattaacaagtataaatgttcccatagaagtagcttgtttgggctacagggaaacgtgaaatcaatatttgtcctttttaaccatcttatagctaaatcttagcttcctaaagtaagggtaggctatgtagtcttaattgcctgtgtttgtttcttagggggaagaaatttgtggcaatgaaagtagttaaaagtgctgaacattacactgaaacagcactagatgaaatccggttgctgaagtcagtgagtattagattatatgtatgaatgtgaagaattataaataaatcaagtttcattgaataaaaacacaccaagtggaggctctttagcatggataattttctctataaagttctagtaaccttaaagaggtaaaggaagacaacaatatttacacataccatgcatgtagtagggaactggtggcaaatgctatgatgagaattcttcttacacgcatgaaccaaaaaaaaacctttcaaatgaataaaaatattcactgagcatgttttacaggccaggtagctactgtcataatgtttttttttcctactatggttaaaaggaaagttgtgtaaataaatgtatagcatcttttttgttgtttttcaaatatgttatagaatacataatataaaaatactgtatttactgattccatttatacctggaaactgagataaattctatcaaaaatgtatttttagttctgtttta

SEQ ID NO: 120482 - DNA, 1085 bp, Homo sapiens
gagtgatctaccagagcaggaagaggagattctgggatctgatgatgatgagcaagaagatcctaatgattattgtaaaggtaagttcataaagaggtatgaagtgagacatgagccatctatttgcaatttctcgtttggatgtttgatctatcagcataaacacagttttattgctgtttacttgtatccttttctctaaaacataggaaatagtatttgttcttagtctgacttaatttatcaaagcctaattttatattaaatgtttttacctttttcctctttaaaaattataatacatatttaccttagaaaatttcagagctgtgttaaacagaaaagaaagtaaaagacttctgcaatgctatcagccacatataaccagtgataacattttggcatatagatttttacaaaataccttcttaccactttttttctcatagtgatggctgttaagttaaactggaatgacagacacttaaatggtgtcattaggttgcctgttaatcttttctgtttcttgatgagactttctagagtctttgggtaggaacacaaaatggaatgtatcataccatctagaagaatgtggtccttcttattctcagctgacaaagataaatatgaaaataccttgattcttgccactgttggcagccttttcaggccttcttctgttttctggttttttgggggtttttttgttttgtttttttgagacagagctgcccaggctggagtgctgtggcacgatctcagctcactgcagcctctgactcctggattcaagcgattcttgtgcctcaggcacccaccaccacgcctggctaatttttgggattttttgtttttttgtttttgaggcggagtctcgctctgtcgcccaggctggagtgcagttggcgcgatctcggctcactgcaagctctgcctcccgggttcatgccattctcctgcctcagcctcccgagtagctgggactacaggcgcccgccaccatacccggctaattttttgtatttttttttttttttagtagacacagggtttcaccgtgttagccaggatggtctcgatct

SEQ ID NO: 120483 - DNA, 1031 bp, Homo sapiens
acaatcatctatctccctctgaacatttgttttcagtgtttataccaatagctgtgagcctttatttgtttgtcataagcttttataatttaacagtgtgtgtctgtttttgttttgttttgttttgttttttgagacagagtctcactctgtcacccgggctggagtgcagtggcgcattctcagctcactgcaacctctgcctcccgggctcaagccattctcctgcctcagcctcccaagtagctgagattacaagcacctgccaccacgcccggctaatttttgtatttttcggggtagagacagggtttcaccatgttggccaggctggtctcaaactcgacctcgagtgatccacctgccttggcctctcatagtgctggtattacaggtgtgagctaccgtgcctgacctatatgtctgtttttgaagttgtttctatggaacataattccagaatggatttcatacttactgattttattacttaccttaggaagctggtttggacagtaattttcactttatttgcagttaaataattatggatttagtatacatttggtagtaaaattaattcagctctaacactgatttgtggagtcatttgggagatatattgaaaatttacttgaatttggccacaaattaaaaaaaaaatttacaagagaaaatacttaaatatctaacatttttattcagtaggaagtagagccagtaaatttgaaacaatttaaaaaatgaaatagtatttgatgctttttacacttagcagtgcaccttggaaattggttctatattccatatagtgcagccttactattttttttagggtctgcctttttcactgagtcttagaaatagttccatgtcaggacagaaagagaacctcatctagcattccattaagttgatatgccataatttaattaattaattaattaatttatttatttatttatttgaggcagagtcttcgctcttgtcatccagtctggagtgcagtggtgagatctcagctcactgca

SEQ ID NO: 120484 - DNA, 1004 bp, Homo sapiens
ttgtagagagagagtttcgccatgttgcccaggctggtctcgaactcctgagctcaggtaatccgcctgcctcagcctcccaaagtgctgggattacaggcatgagccactgcaccttgctctttttctttcttcctttttgtctttctttctgtctttcttttcttttgtttgtatcccagcctccttttaagtagctgaaatgtctaattaagttggttagagtactgtgttagaagttcaagcctcaactaaggtaacttgactctgttccatgacttctgactgcactcctgatgacttccatttactttgctaaggcaagctgctagttacaggaggtgagtcaggaagaagatttgaggaagaagcatgccatagagtttggtctttggagatagatgtggttttgaattctgattttgctactttttagcaatctgaccttagacaagttagttaaggaaacagtcttatgtatatatcctgactggcagttcagtcatagtgaaaactgatcaggacctaaagatataaaaacaaagcgtttaaatgaaaattttagaaagttttggaactgttacagtaaatagcatccttagtaatttagtcgtgttgtgtcacaggcagaagggattttcagtcccctggtactgcagatcttaaacccagggtcttgaagctggtgacagaagaaccaaaacttggaattcagggtccctttccagctctgtgtttgttagagtggatttcctttgggttcttttcactgtgctggagtatttgactttgggattttaaattttcttatttagacaattcttcattttacttttgtggacgctgtgcttttatttactaacattaactagttggtgatgatctccattttactttacagataagagaattgaggtttgtcagattactcccctagaaaattgcaaagctgggatttgaacccaggtctgacatacccaaagccctggctaccaatcatgtgt

SEQ ID NO: 120485 - DNA, 1208 bp, Homo sapiens
tctgaactctggtctctcttacctgctccccaacgtcttaacttgcctccgacgtcttcacggtaggccttaaggaaattcttgaatgaatttttccgtgtttactttgggttctaccaaccacacactccctttcatagaggagggcatggggcttttccctgggttagtcaacttcctgagcctgtaaggcgtatcggcttttttgcagtgtgccggcagaccgctgtgtatacagtcggtgtctgttaactgcttctcttctgtctaaacctcaaccagatgcagataatcttccggagtggacatcacaatagtaacgggagagttctttaacaaacattgatgattctggtttggcgtattaagcgccacatgtccagttttatcagtaggatgcataacagtagtttagtgctatcgtggcaagttcaaaagttggtcacagcctagtagaaactcaggtagcaggcttagcagcaagtgaggctaagccttaagaactttcatcatgtactaacgtttaattgcaaaggatcttggaaatcagctcttacacactttgtattcagagagagcttgtatgcctagttattaatacatcttaattttagatgtattatctttatagttttacatttatttgatgttttgtggcatcgtatgcggtctaattccctctgagctgatacaacacatttcaaaggccttcctaggtcaccccactgaatgacaataccagattaggggggtgtaggggtgtgtgttgtttttggaggctacctactgtttggggagagcacataatgacttctctctttcaatagaactaaagtggtaggtgacctcacctcttgctccattttctcttctgtcttatgaaatgtattttgtaagtgcttggtgacgaagtcttgtaaatgagagtttgtgtgtgtctgtttacctttggattatccatatatgggattattcaaaaccagtttttaatcctagatcgtttaatagaaacagcaaggtgctaacttggttctagtgtgcagtaggacttgaaatgttacttttctgtgcctagtttagttattctttgtggaattgatgagaatgtgttaaaacgttcttttctattgatacaaggaagttgcagtttttattatattactctgtattttttagaaatcctggtctctcagactatttgtccagat

SEQ ID NO: 120486 - DNA, 1021 bp, Homo sapiens
atgcgcccacgctggggctccggaccctgggtcctctgagcagacaagctcggggaactgccgggagaagcagaagggcacagcccaacccgaagactgcggtcatctgaacaaaactgaccaggaagggagctctctccgggcctttttttttttttttttttttcaaaactctgtcgaaatcccatcttgaaaagcgttctttttgaattcgcacttgaattaacagcgatccatagagcttaaaataccgactttatctcggtgagcactgtgccagcttgagtggtgtgtttccgattcggttgaaagcgtatttcctttccgtggaggggcggcggtggtagtgcctgcaagaacactgcagcttgagaaactggcaggctcactgattagtcacataccactgctcatttaagtattgttcgacaaaacaattttctcatttggagcaagaaagattcagatctgtaaggcgccctcaagatcaaaaagttattaacagtgctgggaggtattgtaaatattttttgagataattcctgcgaatactgtgttttaaaagtcccttagagagcttgcagggagttatctagttatctgcatttatggcctgaggtacacgatggttttcgtaaggatatggaaccacatagaaaaggaagggaagagatactttttagctttaatttacaccgtgagtgtgttttaaattaagtcgatagcatataatttccagacctgaaatatttcactaactgctctcttaacttccaaggttttataccctgtattttagattttctataatttgaaagctacggatcttaaactaagtatcagatttaactgttagctttttctgtgttttagtaattcgtattgtatgcgtcatttgaaaacgggcctgtaaaatcgtttttttgttttggaacaaattccaggcttttggatgtgttaatctttaaatatgatttctgtgtttcccaaagtcacatcatgaatttcctgtttggtagaa

SEQ ID NO: 120487 - DNA, 1013 bp, Homo sapiens
acataattttttgtgtgacttcttgaactggacctgaagtctacttccaaaaaaatctccgaattttattttatttatttatttattttgtagagatagggtcttactgtgttgcccaggttggtctcaaactcctggcctcaagcagttcccccaccttggcctcccgaagtgctgggattatagggatgagccaccacacccagcccctgaattttattttcaagaatgaaaataaatgaatagaatatttcaatgaataaaattcattcattgaaatatttgtcagtttccgaattttattgctctaaagtgtggtatactttgtaacatttacaaattattttaagcctatattattttaatttatactaagtatagtaaaaaaacaagtagaagcctgtgtgataaccaactatgaatcaaaatagagttttacaaatatgcctttccgttaaagggtaaagggaactagactaggtcttgcagttttaaggaactttatgcattgtctgtgaggggaaatgaagcaaaattgtttaagaatacattgttgcaaagcattgattttggggttttgggacagaaggggagaatctttgtggtgagtttaaggaaatacaaacaggaacttaagtgcctttcctctggggtagggttcttccaggcccttgctgttgattagaggaggtgggacactggtaaccatgaaataggaggtgacagttgagaattactcttagatcttattcaactgtttattcaacagtgtttattgaatacctaccatgggccagatagctaggttctggaaatagagtgctaaacaagacagaaacaagacaatccattctctcctggaacttacagcctagtgggtttaataactacattttgtggattgcttgctatgttctagcattgtgctgtgcactttatcatcagcataaaaagtatataacaaaacctttggtaaaaggatagcaaaacttgctaagaaatcaaatacaact

SEQ ID NO: 120488 - DNA, 1161 bp, Homo sapiens
agctcttgagtttagctgaaaaaggaagattagtctgctggcagattgagtgttttttaacttctttggcttttagggtttttcttacttttggatcatgttttaaaagtcatttttaccttctttcaacagttaaacatttaagttttatttgattttatttgaccctttttctgctttacattcctctgccttttccccattataatacttttagtagaggttagaccattgttatctgtcattaatgtcttagctttgaggccccaaggacttctctgttaaacttaaatatatcatatagattgaaagattatctacagacatgtgatcctataaaaacccatattatttattgtcctccctgcctttacagatgtaaacccctctcctcttttcatcagagctccccctcttttactgctctatcatcaggttgcagaaaataagttttcctgcaaacatagattcccatggcaacataacaaaaaggtaatagaacaaatgtttattttgtctagacctgctgtctgagtaccattagaccctgaacatgttggctcctgttatttgaatatgtggttacaaattccttattttcctcaaaacttacttctcttaggccttggtgatattgtcactgtgcctgtgatatgaaggaaggtgtgtgtgtgtgtgagtatgtgtgtcttactgtcattctactcaaaagtgtgtattgattgcattttcaaacttatggcttaaaatgtagacaccacacaatctgagcatgtgaagaaaaaaagcataccagttttgttctttgttttcgtaagttcattaatttaatatttccagtgcactatactagatattttgtttacagagattttaaaaaaaagaagggtccctcctttcgaaagtatcagtccaggctgggtgcagtggctcacgcctgtaatcccagcactttgggaggccaaggtgggcggatcacttgaggtcaggagtttgagatcagcctggccaacatggtgaaaccccatctctacaaaaattagttgggcatggtggtgtgtgcctgtaatcccagctattcaggaggctgaggcacaagaatcacttgaacccgggaggcggaggttgcagtgagccgagatcactcccctgcactcctgt

SEQ ID NO: 120489 - DNA, 1044 bp, Homo sapiens
cctttattttacaagttcccatcccaggtttcttatactgaattccttatctctgcctcattcttgaagagggaaatggaagtggggttttggattctaccatgatagaagggaagacctacaacaaggctattcagcagcctttgttttagtgaaagccaatgagaagagatcacttcttccacttactaacaatgattgctcaactaataagtttagcttttttatttcaatgtaaaagttgctgaaaacactgaattggtaaaggaaatttctggatttacattttaacctgatgttgttcaataaatatttgaatatctaccttatgctaggcacagtaatagtctctgaggaatataacagtaaataagagctgaggctgttaatgggagagaagaacaatgtaaatgatcaaacaaaataccatgtggtaagacctgaaaggtcctacatgagttggtctccggtgtactctctaatctaacctcacctagtcctctttccactctgtctccaccccagtcactctggcctcttgttctttgagtacagacaaccacatttgcaataagacctttgcaccagtttctgttattgccctggaactttttccccacatacctacatgactgtctcctttccttcaggactctacccaagggtcttctcatcagaagctcttcttttgttaccattctaactgaaatagtacccctactgtcactgtttactccttaccctgctttgttcttagcaaattttgttattgtctgtcttctccctttctttgtaagctgtgttcaagcacggagtttgttttcttcgttgctgaatcattattggagtatatgcactccattgtttgttaaacaggtgaacacaagaattgccattatagggcaggtatagagtgctaaaggactgcatagtatggccacctaacccagacatggggtgtcttcaggaaagcctctgcaaaaaaaatgtatacacagagggcttaacggatgaaggagagttggaaaggtggggaaagtacaa

SEQ ID NO: 120490 - DNA, 1054 bp, Homo sapiens
gtatcagtccatgaaattgttttcagcttttagcctaataaagtccaacttaacttaattcctttgtaaagatgtgagaactagatagctttccaaccatactcaagtctaaccttccttaatttactttaatttactttacttaatttactttaggtgttatatacattgacaatattaggcatgtctttactaaaatgtaattgactatgctttccagaaacaaatactatagaaattatgtgactctccattaatgcctcttttggaatgtgcttcttaaaatgtgctcatttatattccttgccccccatcctgttcattatttttagaagttggtgcatcttccataaacaatcagcaactttgcatgatgcttgcttttgtcccctgttgtaagacttattttgaaaatctttctatatgggagttagaatgtaacaattggtggtcatggattggtctttgggcctcctggaaacaagtatagtgattaagttagttcctgcaagatgcttctgccataaataatgcctttcagtttatttcattgtagcttagtagtaatgcttgatagttattactatatagactgattaatcttataaacttacataatgttttggcagtctcaccctcgttctaaattttggtgataaaatggatgtggtctctgagggggaaaggatttgagagaaattacatagtggtaaactgttctaattaaaagctctttccctctctctctctctctctctgttgccatgcagtcagtggtcctctggctgcctaagatttcttaactcactggtaaccatttacacataatagctgtacttgaagttgctatggtttcattagtagttttgcctaacctttgtgaactggctcaggcctattagttaggactagtattatttttatttaaaaataagttatgtttgtctcttctccataaaattatttagaaaagttcaaagaataaccctcttattatccaatgtcaaaaaatataattatgtgcaaagtagtcttatatgaccgaaattagatt

SEQ ID NO: 120491 - DNA, 1018 bp, Homo sapiens
gctgaggcggggggatcatgaggtcaggagatcaagaccatcttggccaacacggtgaaacctcgtctccactaaaaatacaaagattagccgggcatggtggtgggcacctggagtcccagcaactcgggaggctgaggcaggagaatggcgtgaacctgggaggcagaggttgtagtgagctgagattgcgccactgcactccagcctggcagtagagcgagactccatttcaaaaacaaaaacaaaaaccaaaaaaaccaaaaaacttataaaagtcttctgaagataagaactttcttaggggttctagattgttatgtaacttttcactaatttctaggtatctggtgacccatctcatgggggcagatctgaacaacattgtgaaatgtcagaagcttacagatgaccatgttcagttccttatctaccaaattctccgaggtctaaaggtacagataatacaagtaataattttttaaaatgaattctccctttctcccctccttttagggcttaaacaaacaagtaaacaacttttctaatggaaaattcaaacacataaaatcacaggtaaaggtcatatagtacagtaaactgccatgttcactcagtgacaacagttaccgacatatggccaatcatgtttcttttgtatttcccaagccctggattattttaaagcaagtctagacattatataataccatccatagatacttcagtttgcatatctgaaagataaggactcttcattcttacatctaaacaataatttattgatgtaatctaatatctggtcagcgtaatgttgagattttcaaaaaatcctcaagaaagactaatttatttgttggaggggcagataaacagtgttttaaaattaaacccatctttgatatttagctgctttgagtccttattgagctccagagtgccaaccagaaaatagattaaaagctcaactgagtggagtcaatggctgtggaaattatagtaatggtaaatgtacaca

SEQ ID NO: 120492 - DNA, 1002 bp, Homo sapiens
ttatgctgatttctaatcttactattaacactagcagttcttactgattcatgaaaatgtgcagcaaatatgttatataatatgacaatagaaggttggaggtaactttgacttttttctcttttgcagtatatacattcagctgacataattcacagggtatgtattgtgactttgattacattattttggggaagtggggtgagagtggaagaatggcatttagccaagatcctaatctaaactttagccattgaaatgttgattgattgcaactttactgtaggtttaagctgattaaagaaagaagatgtgtagtttttttctatgtaaggctaacttggactggatattgactgtaggatggagattgtcttttgatagctggatgaagtcttttatgtctggatcctcattattacctgtagggggagaattgatcatgcatcataaagttgatcctgtcttccctgtatttgcttcctaggacctaaaacctagtaatctagctgtgaatgaagactgtgagctgaaggtaaaatgaagagacagtattcattgtttgctttactttgagattatatgtttgactaagcaggcagactttcttagggagtagctttgtgagccatgactatctgaaattcgtattatttttattatcagactttgaaatttaaaccatttctgagtaagctaagtgacattgaaagtggcatcacttgtttttattttaacataaagttaaattataaatttgatatattagtcataataaaggaggataatagtcaaatatcaagtaagtaggcccaaagaggtgataactagattaaatacatttctaagaggagaaatggcagaaacccactcactcaaaataattcaaataaaaaataagtgaattaattgtttctaaatagcaagcagctctagaacttttgttccatttcatttttttaacttgaaaaaatgtctgtacattagaatgcaccatttcat

SEQ ID NO: 120493 - DNA, 2206 bp, Homo sapiens
tcttttctggagtttcatgtaaatggaatcatatagtgtgtatttttgtgtgtctggcctttgcttggtgtaatgattcggtattgttgtgtgtgtcagtggtttcttcctttttattggtaatagtattttgttttatgaacataacagaatttttaaatctatccacctgctgatggacatttgcttgagtttgaggctgtgtaaagcaactgtgaatgtttatgtgcaaacctttgtatggacgtaagttctcattgcacttgattaaatacctgggagtgacatttttgttttgctttttgtaatttcattttaagttcttgctgtatatttaccatacattctaagtatggaccaggaaatctctttatgaaagtgctattttgttctcctttttaataaggcaacagaggtttgtttgttgttgttgttttgtttttttttccctgcctgtttctaagtcttagcagtttgtctgttcctcttctgccctttagattctggattttggactggctcggcacacagatgatgaaatgacaggctacgtggccactaggtggtacagggctcctgagatcatgctgaactggatgcattacaaccagacaggtattactcgccttggttatttagggccttatttaattccatgttggatgcatttgggattctcagaaatagagatggtgggagtgggaagaaatgtcttttcttccctcagtgatccttttaaagcctgcaagtaaaaatatttcacttcctcagatggggaagtggggttttatacacagcttttaaaccttgtgatttagcaattgggtttttatttatttagattttgaatatattctctgagtacttatacctaaagacaattagtccataattttaacccctcaatgttacttggaagaatctaccattctactaataagaaacttgcccctttttaaacagcttatttctcttaagtgtgttttgacttaccccacctttgaacagccctttagtcaggtgaagatcttagtaagctatttatttctgtaaaaatgagtatgattgttgagcctcagatgtcttaaatagtaatttgaatatttcacccctagttacggtttcatttgttgccaagaattgtaacagtgacattgcatatacttttacttctttttaattttgccagttgatatttggtcagtgggatgcataatggccgagctgttgactggaagaacattgtttcctggtacagaccgtatcctttaaaaagttttggattcttgtttcttatctgtattccagtgtccatgggtgtatactccttttacttatctctagggaagactctcagtattttgcttttatagtctagataatgcattatgaggtctttcttcaaactgagtagcttgccttgccaagaaagaggcttcagtttacttttgtgagttggaaaaattcctcataagttgaaaaacccatcaagtctgtcttctttttgcaacagtcccttattaatcatcccacagcagttctgagacctgagcatactcatgagaaactccagatcccagtgacagttttagtcttcttgtataaacacttaatgagcacaagatgcccatttataaatgaagggcatcttgctgttatgtttatgtattaaaagggctatgtttggtacctgcagtgatatactgcttacttgttatgtttgttgtttgacaacaaatagtaaaagcaagaagtgaaaagcttaccatgtaatgtacttttgtttttccagcacaactttttcccagattgcagccaaaccctaatttactccaagacttactgtctagtttatggtttattatagcccctttattttagctcctttcctatctgcggtatgcttgtttcatggtttagtattaatgtcatgaaaaatgtggtctgttggaactctcatcagttctacttatggaagatgtttaggtgagaaagattgttaaaatatatgtctagaattagttttggggattttttctttttttaatagaattgagttaactagccttcaggtggttttggttaggcaatattagacatgctacctctgatctattatgcctagagatctaaaagccattttagtcccttacctaaataaactaattgagtttataaaccagaatgtcaattcacttgcttacag

SEQ ID NO: 120494 - DNA, 1046 bp, Homo sapiens
atttctcaggtaaagctgtttctttctctctgaatattaggattgataacagagttcagtctccctgtatttagcttaccttattactccctacctctggattttaaattagtttaatacctggtgtttctcctttgtcctttgtttcattcaccttatatctgtttctcagaaatttggtatatatatattacagtccaaggtaagagaattagggaaaattcatacttccccctttcctcaggtacatatctcagagtcccatccttgctttgtcctctagagtagctgctgtcctgatgctattctctgttccctgctccccttcctcttcttgtgtctgtatctccagctaccatttagtcagtcacagacctccatgccggtgtagacacacaaggtggcagagagggaaaggcagtataacatacaggttaagcacatgctctggagccagatttcctggatttagatcttagctcttttatttccagctatgtaactttgagtaagtttcctaacctctatttctctcagtttccttaaccgtaaaatgataataatcatacatactcacaaggttgtcgtaagaattcagccagaaaataactggaaagtactgagacgagcctgccagtaaatgttagccatcatgttcagtaatggccttgcaaaacagattaccccttcaccttctcacttaattgtctacctatgaatcattaatgttttgttttgtttttaattctgtgataggtaggaaaggatggaactccttggcagactagtgttagaaagttttcgaagcagtgtgagtcttgtacctttgtggtcctgtctcacagacacctgtctattccctgacccttttaaatgctaactttctgcctgtaggaaatcttccctttgtgcttaggtctttttcttctgtgagctttagataaacaacctagtgtttaaactttttaataagggattcattttttaatacatgagaattcatttcaaaattttggttttagttatttattttattctacttggct

SEQ ID NO: 120495 - DNA, 1042 bp, Homo sapiens
tgaccgctacatcatcaccagtctgttctttcctggttgtatgtttcactgagtcccaagttccagttttaccaataggagccatgtatgttgttttttcaagtttgacccattttccttctgaaattaactcctctgaaataatatagtgtttccattctgagacaattcagttggttcttggctctcccttttcaaactagtctttacagccctcaggagagaagttcacctccaaagtgtaggggtgacaaagggaagaggacaaaagaactactggaggcagcagtgtcagcatacgccggtgtcacgactcaagacatcggcacctcccgaggtgatgaaaggatgtgccatggctcatcttttcaagtcaactagtatttatcaagctgctctgtggaaggtgctggggacaggatggtacctgtccttaaaaccagaatgatcagactcagtggaaagagagttacaagagttacttgaacaactgtctctgattataaaataagatggagtgataaatacactagaatagagttatagataagctattgaaaaaaatccaagaagacttcatggcagagttcttgtttgaataggacttcaaagtgtaaataggaatagaaaaggcttggaaggacgggagaagggggaggtattctggtttatgagtacataaataagtacttggaagcttagaagtgcctggaatatctgatgtgagttgaagcattgagtgcattaaagaataataatttgagccagagtcaaactaggcttgattcttcaggcctgatattgtttcatgccagcagaggtgggagagagagggtttctcagctcattgatgtaatgagccactgtgactaatggaaattgcgtattcttcaggtaggttggggtgaagttcaggtagttgagaaattcacagctcagagagcctgtcttccttagagagagtataaaaattgactctcagccaggcacggtggctcacgcctgtaatcccagccctttgggaggccgaggcaggcggatc

SEQ ID NO: 120496 - DNA, 1105 bp, Homo sapiens
aaagcttcattttagagattacttttgatgcatatattgtaaagccacttgtttgagatttgaagtagtcaagatttttcccatatatgatttactttatcttgtggtggctacccagttaaatatattcctgaagagtgttaatgtgaggaaactaaattttttgaattgagtcattttagatgagcaagaattttttttactgatttctattgtaatataattaatctgattattttagagcaagacagtatccatcccacccccattcctactctgtcccatgaacatatgctataagattttttacttgtcaacatcttgaactgagaagccagtattaaaatcttaacctttataacacaatgatttttgccatttgcagatgacaaaattccctgttattcttaatttagaaataatgtgagtggacttgtttctagtttgtttttgcttgctaaagaacacaagttgtttgggtttagggtggggtttggcgcaccttttctgaaagggccaggtagttaatattttaggcttgggaaccatatggtaactgtgcttgttgtaattggaaacacctatagactgtacataaatgaatgggcatggctgtgttctaataaaactttatatataaaacaggcagagcctggggtttggtgactccagcctagaattttcttccatttaagctgatttcatgtctgaaagaaagtaaaagacaggatgtcaaattactgcattaagttattcctataacgtaggcacctgtggcttatagagactgttgtttttaagtgctgctatgttgcctttatatgtataaccataagcaaaaatttctttcatcctgctctaccttttcctcaaatattttgactacctgtcatgtaccagatgttaggctggggataaatggtgaagaggcagagtggcccctgtcctcgtagagctgtagaccagtacagggggcagacagtaagcaaataaagtaattctaggctgtgataagcactatgatgttatcaagcatggtgctgagagagaattggggggtggggtgttatgtatatagagtgttgaggggaggcctcccttagga

SEQ ID NO: 120497 - DNA, 1032 bp, Homo sapiens
tactgacactgtgatggcagatgaagagggcagtgtaaactgagtgaagctcttgtgttttcacctgctgtctttggcagctaagaaccagctaaagttgcctcactttactgatacatgctgttgacagatgcataaaatgaatataaagtggatatgtgtttggtagcattttgaatctttgtacaggaggagcatgccctacgtgaagtgatcatcctgcaggagccttgacctagagggattcaccgtgttggctaggtttggggtgtttcatttttgttctcggtgtgttctgtttgtttgtttttgttttgtttgtcattgtttgtttttcatttttattttgtcccaacattttcctttatggtccaccattagatattgatcagttgaagctcattttaagactcgttggaaccccaggggctgagcttttgaagaaaatctcctcagagtctgtgagttgatgctttgtaattatctgccctgttgggagcctctgccacttgccttctaccaatctgtactttgacctgggtgtgtttgtaagcacacatgccctttgtgtgctgacttcccggatgagtgaggtataagacagtgtgagtgtgtgtgtgcgtgcacgcatgtgtgcctgcttgcatgcacaagtgtgttttattctctatctgggtacacactaagatcacgggagcctccattagacaatagtatcccagtaaagcaatgagatttgagattctaattcattccaagagattaatgtaaactttgtgtctctgtcctcaagacctgactttcttctttctcagaagtttcacgtatgctctagagctcttttcactgtttctagtgtttgttctcagagcatgagcttcaccatgtatttagtttaacttaatcactaaaagaataaaatgtacattgtctgcacactgttgccccttcccagaagttattttttattgttttagaatagatactcacatatcctatgtaaaatgtttgttcccaacagagggacctttc

SEQ ID NO: 120498 - DNA, 1411 bp, Homo sapiens
atctgcatggccagtcactggctacgtgcctagttactcatgtcattcacagaagtgtactgtagcatgcagctgtgggctctcgggtagggggaatggagggtaggtttttttgtctgtttgggggtggctttttgacctttttaaaaacttgagttgaaaattattttttgcactgtatgtttaacaatgcccttgactaggcatctaagatattaaccagcttcagcagattatgcgtctgacaggaacaccccccgcttatctcattaacaggatgccaagccatgaggtgagaacaaagagactgtacagggatgtcgcactgagaagccacattctcattttattgccaccgtataaccaacagttcttaacatcactggatgcttgcatgtgccttgaggcctgcctatgtgctattgcaagatgttgacttttgggataaaatgtcatccagtcctgtgagattgggaatataattagtaagcttgtaaatggaaaattgttatttttatatttggttgtgtgaatttagtgcttgtgaggcggtttctttctaggtgctctgcctgtagctagggtgtgctactatcgtgacctttatcagaagggtagttaactgaagtccattagcatgctttccaattcatccatttttttaatgaccaaaagaggattctttatttaaaaacaaaactgaaatatccaatactaatatgtactatatttaaaagaaaatacacaaataatatagaataaatacaaacactttggtacagttaggtaccttctttattaattattaactacttagtctaactcttgttttattatcagagatgattggggcacttctttctttgtaagatacccttaatattttggggaaccaggttggcatcacagagggcccttcccagcagctttgtttctacttcagctatattcaggtcgtcttttgatttatctttattaaagggatgactgttctctgaatgagatagttctctcttacctgttttcccttcctctttttatttacatgttcaagtagaaagggattacagccatttatgtattcaattcctaaaactttcttttcaaatcagaaagattctcaattgcttttcaaagcagacctttcctcctgactccacatgcaataattaagaagcggaaggctgggtgtggtggcgtgcacctgcaacctcagcactttggaaggctgagatgggaggatcagttgagcccaggagtttgagaccatcctgggcaacacagcaatactgcagctctacaaaaaaatttaaaaattagggcatgatagcacatgcctgtagtcccagctacttgggaagctgaggcaggagggttgcttgagtcaggagttagaggccatagtgagctg

SEQ ID NO: 120499 - DNA, 1638 bp, Homo sapiens
gtgtaaacataaatatacatacatacttttactgttggactgtattaaaacaggagttttaaagaggtggttaagatagacagcagactttgcttctgaaggtgatagtgggatagcagataatgtttcttgaactgtcacttggaaccaagtactgtgttaagaaagtactaggtttgttatctctaatcttcactccaaccctgtgaggtaggactgttatattaagtttatattaacttttttgttaccaccgttactttgttagcaaggtttaatattgatatcctttgatgtactaagagcacctactgaagtcagcactgtcaaaagactgctggtccaagacttgctttgggaataccaacccctctaccaatttagctgtttgagaaggctgtctcagggctacttcttacatatcttggcctcagtttttaaacttctcatcctgtgatcagaaagctaatgaaagagaatttgattgatgagcattctcgttcacttgaaatgcaactgtgagagatagcaggaataaagaaggtgatgatcataactagggaagttaggatggcagtaagggagaagttctatcaaagacagttagaaacactgaagttagtggactttgtcagttaacactcgttccttagcaggaccaagattctttctttgagagcagtaacattattgaacaaagtcattctgaaaacccttgttttttcaggcaagaaactatattcagtctttgactcagatgccgaagatgaactttgcgaatgtatttattggtgccaatcccctgggtaagttgaccatatatcctcacctcatggatattgaattggttatgatataaattggggatttgaagaagagtttctccttttgaccaaataaagtaccattagttgaatcttggaaggtgataaatacggcttttattatctatttgtgttgtcagatttttttttaatcacatgagatgattgtatgtttaaatgatcacagaacttgggattgggggaatgggcaggtacagtggagaaaggagagaaagtaatgggaatgttgagagaaaagattggtgaggcaggaagaagcagatacagaagaaagctgtaacttgctcacaactgctgtggatttatggtgtctctgagtggaggacagaaaccactgaagtgcaggtgggtgtttagaggagccacccaggagctccctgcagggtgctctgctctaacggtagctgccgttgctacagatcctgtcgtcttccacactcatgaacttttcccctctcctcttctttctctgccctcagaggcataaccgtcctctcctgtttgtggagcttatttgctacctaaacttaaaggaatggcttcctatgccttcaagatccttggcagagggaagtgatggtggcagctgaagatatgtgttgccttggctaaaaaaggagttgctttattattattatttatttatttatttatttatttattttggtagtgtcagggtctcgctcttttacccaggctagagtacagtggcacaatcatagctcactgcaagcttgaactcctgggctccagtgatcctcctgcctcagccttccaaatagctaggactaca

SEQ ID NO: 120500 - DNA, 1076 bp, Homo sapiens
cttgaagaggacagtggacagtgctgtttaatggtggacacagaaggatcagaccaggacctccctacaatagggaagggagctatgctatggtaacgagtataatctgccttctcacttttcttaagattgtattgtgtggtgtgttttaaaatctcactgcatttctttgcatctgtttgggtcatctgtcttcttaagggtcttggcagctatgcttcaggtttagttttatctttttgagggctgacagccatgctgacctctttagaagctggggtgaaggctaggtgattttacctttttaagtacttcatccatagtgattatggagaggaattttagtgtcgctgtgataattcttataatagcagagatactcacgctctttgaagttttgggcagttgtggatgagttcgtgtcagccttggagacagagagtatgtcatatctcagctgggtcgctctcctgccctaggatgaatccacagtctcatcaggggtgggtacgattctactgagactggcttaggtttgcatctgccctggcatgctctcattggctttgtgtgatttatttgagctgtattatctagttcaagggtctgtgagaagctctctttgagccttaagtactacaggatgttgggaaaagatgttgtgttctttctttccttttttttttgagacagagtctcgctctgtcgtccaggttggagtgcagtggtgcgatctcggctcattgcaagctccacctcccggctttaagtgattcttctgcctcagcctcctgagtagctgggaatacaagtgtgtgccaccacacctggctaattttttgtatctttagtaaagacggggtttcaccgtgttagccaggatggtctcgatctcctgacctcgtgacctgcccgcctcggcctcccaaagtgctgggattacaggcatgagccactgcacccagcccgtcgtgttctttcttgtcgtcattctgttctgaagttgtttcattttataagccttaagttttgaacagggcagtactcactgacaccctcttaacagactcagaaag

SEQ ID NO: 120501 - DNA, 1489 bp, Homo sapiens
gttttgtcagccactgactttgtttcactgctattcccaaaacatgaattaaaacttaaattaccccttgatgttagtgtatgtatttatctgtcaagattttttttttttaagagatggcatctcactctgtcacccaggttagagtacagtggcacagtcacggttcatgataacctcgaactcttgtgtttaagtgatccttcctcttccctatcccaagtagctgagacaacaggcacataatgccatgcccagctaataagatctttgaggaatttgttcttgcccctgaccttattggttataagaacatggtcctttttaccctaagggtaacagagacttgtcgtataatctgtgttcaattataaaatcaacagctgataaggtttctttttctaagaagagaagaccatcagaagaatatatatatatataatccaggcattcacctagtactgtaaagtgtaaacttatgaacttgaattgacacatgaatatttactttgtttctgtatccccttgaagcccatatttctccagtggattactctggaattcaagctgtaggacgggtgttttacagcctccaatatacacagcagtagatctctataggaagctgtcctcttcactactcacccccacaccctccacatttaaggagtaatttgcaaagtctcaaaagcctttttcaccacagtgataactggttatatggcagtatttattctcccaagtgccaccatgctgaaacacaaaaatactcatttgaaatatagagttagacaaattaccattttgtaaccccttatgaaataattgcttttgggaaggaaacccagtgaatgcagaaagccataagtgaaaagaatggatatttacttggtaccaaaatatcccgcagattacttgctttggtcaaaggggaaacatcttaacccagtgatcaattttagctcattagtagtgggacagatggccttaatgcactgtcacgtgcacagcatcacctgtatttttgctgaaaatgtttaacctgattcttaccaaaatttttgacctaacttccggtttttgggaagtacaggggatagtggaaagcagggtatagacacatgacagcaaaagaagcaaaatcagacacatcccgagaaacggtcattctcaggacaatcagagggtctctttagatcaaaatcaggaaagaacagggcttagaagtaagaagattattctagactaagagagactaaagaaaaccagtcagttgcagtgcatggcccctaattgaatcctggtttcaacaaactagttctaaaagacaacgttggaataattggagaaatcttaacatgaactggattttagatgatatttagaaattatttgtcagagataataacagtattatgattatataggaagatgtcttcgtgttgaaatatttggggagggtaaagtgtcatgtctataattttatttt

SEQ ID NO: 120502 - DNA, 1667 bp, Homo sapiens
caattagtagaactggggcaaagagaatttatgtcttatcagttaacttagaactagttagggacatagccaggaatggaacccatgtatcctgtgtccagtcccatattctttccacaaaacacaagttcagaactctagttaaatcccaagagccaagaccatctgttgctgtagcttgtgagagtgctctttcattcttgagcacctccgtagagagcttaaaagaagaggcactcagcgatgaaaaacatgagaaaaaaaatggttcttttctatgtcccttgaacttctgtgtgataacgtgttccagtaggctattacatacaagctgtgaggtagcccatcaaaccactacctggacagagaggaaggatcttgagcttagaagtcagagtgcttgccagcaaagagaatagcctaaactctcacatcttacttttccttcccaatttctaggcctgacctatgatgaagtcatcagctttgtgccaccaccccttgaccaagaagagatggagtcctgagcacctggtttctgttctgttgatcccacttcactgtgaggggaaggccttttcacgggaactctccaaatattattcaagtgcctcttgttgcagagatttcctccatggtggaagggggtgtgcgtgcgtgtgcgtgcgtgttagtgtgtgtgcatgtgtgtgtctgtctttgtgggagggtaagacaatatgaacaaactatgatcacagtgactttacaggaggttgtggatgctccagggcagcctccaccttgctcttctttctgagagttggctcaggcagacaagagctgctgtccttttaggaatatgttcaatgcaaagtaaaaaaatatgaattgtccccaatcccggtcatgcttttgccactttggcttctcctgtgaccccaccttgacggtggggcgtagacttgacaacatcccacagtggcacggagagaaggcccataccttctggttgcttcagacctgacaccgtccctcagtgatacgtacagccaaaaaggaccaactggcttctgtgcactagcctgtgattaacttgcttagtatggttctcagatcttgacagtatatttgaaactgtaaatatgtttgtgccttaaaaggagagaagaaagtgtagatagttaaaagactgcagctgctgaagttctgagccgggcaagtcgagagggctgttggacagctgcttgtgggcccggagtaatcaggcagccttcataggcggtcatgtgtgcatgtgagcacatgcgtatatgtgcgtctctctttctccctcacccccaggtgttgccatttctctgcttacccttcacctttggtgcagaggtttcttgaatatctgccccagtagtcagaagcaggttcttgatgtcatgtacttcctgtgtactctttatttctagcagagtgaggatgtgttttgcacgtcttgctatttgagcatgcacagctgcttgtcctgctctcttcaggaggccctggtgtcaggcaggtttgccagtgaagacttcttgggtagtttagatcccatgtcacctcagctgatattatggcaagtgatatcacctctcttcagcccctagtgctattctgtgttgaacacaattgatacttcaggtgcttttgat

SEQ ID NO: 120503 - DNA, 1034 bp, Homo sapiens
ttttcaaccaactatttttgaggaattatcatgggaaaagaccagggcttttcccaggaatatcccaaacttcggaaacaagttattctcttcactcccaataactaatgctaagaaatgctgaaaatcaaagtaaaaaattaaagcccataaggccagaaactccttttgctgtctttctctaaatatgattactttaaaataaaaaagtaacaaggtgtcttttccactcctatggaaaagggtcttcttggcagcttaacattgacttcttggtttggggagaaataaattttgtttcagaattttgtatattgtaggaatcctttgagaatgtgattccttttgatggggagaaagggcaaattattttaatattttgtattttcaactttataaagataaaatatcctcaggggtggagaagtgtcgttttcataacttgctgaatttcaggcattttgttctacatgaggactcatatatttaagccttttgtgtaataagaaagtataaagtcacttccagtgttggctgtgtgacagaatcttgtatttgggccaaggtgtttccatttctcaatcagtgcagtgatacatgtactccagagggacagggtggaccccctgagtcaactggagcaagaaggaaggaggcagactgatggcgattccctctcacccgggactctccccctttcaaggaaagtgaacctttaaagtaaaggcctcatctcctttattgcagttcaaatcctcaccatccacagcaagatgaattttatcagccatgtttggttgtaaatgctcgtgtgatttcctacagaaatactgctctgaatattttgtaataaaggtctttgcacatgtgaccacatacgtgttaggaggctgcatgctctggaagcctggactctaagctggagctcttggaagagctcttcggtttctgagcataatgctcccatctcctgatttctctgaacagaaaacaaaagagagaatgagggaaattgctattttatttgtattcat

SEQ ID NO: 120504 - DNA, 1042 bp, Homo sapiens
caggagcacagaatgtggagttttcacacccagccacggcccaggaaggcctgctcaaaagagtcactgtgtcccaggggacttcatggggaattgctgcagacaaagtgagccctgagctgagtgtttcaggcttcaagaatcaggaacattttagagctgggtgggccctgagagaacacctagtccaaccctcattttacacatgaagaaactgaggcccagaaggggaaggggcctggctgaggtcacacccctgggtggtggtggagctaggacaagctccatctctgcctcagcctagcatgcattctctgtcctccccccaggacctgaagccaggcaacctggctgtgaatgaggactgtgaactgaaggtgagtgggctgcaggctcagcccagaggcgggataggccctcccccagggaagcccctggaagccgctcccagagcctcctcccctcagcaagttccttttctatttatcccctgtgccatagattctggattttgggctggcgcgacatgcagacgccgagatgactggctacgtggtgacccgctggtaccgagcccccgaggtgatcctcagctggatgcactacaaccagacaggtcagtggtcaatgcctgagagggcggtcctggggccatctggtcactcggtgctgactgactgctgggccccagacagtccaggtgacactctccctccctctgcagtggacatctggtctgtgggctgtatcatggcagagatgctgacagggaaaactctgttcaaggggaaagattgtatcctttgctggaaaagccaaactccatctagggattccttccttcaacagacactttatttaaataactgtcttttttttcttaatgtgagagtgatacatactccctgtagaataatttgtaaatgcagataaggctggacgcagtggttcatgcctgtaatcccagcactttgggaggctgaggtggaaggatcctttgagcccaggagtttgagaccagatgtggcaacatagggagacc

SEQ ID NO: 120505 - DNA, 1036 bp, Homo sapiens
ccagcccctggtgtgaggctcttggctctgcccctgcagctgcggacctgctggagaagatgctggagctagacgtggacaagcgcctgacggccgcgcaggccctcacccatcccttctttgaacccttccgggaccctgaggaagagacggaggcccagcagccgtttgatgattccttagaacacgagaaactcacagtggatgaatggaagcgtaagagctggggcctcgggcttcctcgcctccgcctgcagcctctcttccttgcttcctccatctttgtgcctggcctctgccagccctacctgccacctccttcttggtgggcattgtctcctgggtgcttctttctccttgagctgacttcgctctccatgctgtctctgaaggggggtggactttctcgccacagcacctctttacgcaccttaaaccatgctgcctttctcagagcacatctacaaggagattgtgaacttcagccccattgcccggaaggactcacggcgccggagtggcatgaagctgtagggactcatcttgcatggcaccgccggccagacactgcccaaggaccagtatttgtcactaccaaactcagcccttcttggaatacagcctttcaagcagaggacagaagggtccttctccttatgtgggaaatgggcctagtagatgcagaattcaaagatgtcggttgggagaaactagctctgatcctaacaggccacgttaaactgcccatctggagaatcgcctgcaggtggggccctttccttcccgccagagtggggctgagtgggcgctgagccaggccgggggcctatggcagtgatgctgtgttggtttcctagggatgctctaacgaattaccacaaacctggtggattgaaacagcagaacttgattcccttacagttctggaggctggaaatctgggatggaggtgttggcagggctgtggtccctttgaaggctctggggaagaatccttccttggctctttttagcttgtggcggcagtgggcagtcc

SEQ ID NO: 120506 - DNA, 1384 bp, Homo sapiens
agccttggctggggtcctccttgtctcctgagtatcttgtgtgaggtgcaggggatacagtctaattgcagaagctcctcattcttcggggacctggatggggtgggtgagcgaggggtcagggggtgccgaggggaaatctgggggggcgggggttgttggagatattttggaggtgtgtatgtgggaagggctgtgtaggttgagaaactcccgccaaaaaactcgtctagactgtaagctccttgtgggcgaaactcttttcatttccctcatcagcagtcccttccccctctagagtttctccccggtgtctggaggcgtgggtgggacaaaacacgtctgtgtagagtcttgcatggtcgagagatgcttgagcagccgaggaggtggcaggtggggaaggagaagatggagcggctttcatgaaagtgggcgccgcaccgcctgtctgcgctgtttggggtcggtgtggaggcagatgttctcacctcttctagggcctcggtgcctttggaggggtgggtgatgaagcaggtctgttggccctgtctgcccccagggacttggcatttgtaaggaatccagtagccaagggcctctggaacccggacagaattgctgcgatgattctgtttcctttggctccaaatggggtgtgtgccagcccgcctggcactgctcctcagccaaattggttttttgtttgtttcagtcacactttgggattggaaggcctttcaagtaaagatgttaataataccttattaacaagtagcacctagagagctagattgtgttaccctcattttactgatggagtatggaggcatagagagcttaagggactttctctaggtcacagagggccaagattagaacctagattgccccagagcctcgttttgtaccagaccatagcacctctgtggtgttcttaattcccactgagaggaattgagcatcggaagacctgggttcaaattgtagcgttatcacttactagctttacgttgagtgacatctttctgagcttctgtgtagatgataatagctacaccatctcctaaggtagttgtgagaaatattaaaagtaagagggctttgtagtttggaaaaagtgcttttattatcaccgtctctactttatatagatggtagaccctgcaaccaaggcgatgaattgtttttctctttgaaatcttctctttgttcatatccttccaagtctgcccacaccatggggccctgtatccccaaaggtctctcctggtggtgacagccttggtaactgcctaccgcagctccttatgagcttgtcatccagagaatgatgggggaaactaggactttctcttggctgtacaaggatagactagatatg

SEQ ID NO: 120507 - DNA, 1988 bp, Homo sapiens
tatcctggatcaggggttcccaacccccaggccgcagactgtggcctgttaagaaccaggccatacagcaagaggtgagtggcgggcaagcgagcattaccacctgagctctgcctcctgtcagatcagcggctgctttggattctcataggagcgcgaaccctactgtgaactgcgcatgtgagggatctaggttgcatgctccttatgagaatctgactaatgcctgatgatctgaggtggaacagtgttcaccacccaccctcatctgtggaaaaattgtcttccacgaaaccagtccctggtgccaaaaaggctggggactgctgtcctggatggtgtcttttgtagggaataccctgcatactgtagtttgaagcccttagaccatgtatcatagatatttcagatgccttcaccccttcacctctaggcagggtcaaggagtagggtttctgatcgtggtaagaggtattgggagaagactctagtgacttttgatcctctgatggggcccattgttcacgtacagagcttgacagtggatgcttttcttgttttcttttctaaaccgttaactacatgtgttttccatagttagctgtcgcccagctttatgtacatcattagaacattagatctttccccatgttacactgtaataatctgtttacttttctgtcttttgagttagacagggctccttgagggcagggatcatgtgtgtttgatttcttctttcattcaactaatacttattgagtggttacttaggagctaagcactgctccaggaactggggatgcagcagtgaacaagacaaacaaaaattcttcccctcatggagcttatattctagtggaaggaaggaaacaataaacatagtagtaggtaaattatgtagcatggtataagatgatgaatgttaaagggaaaaataaagcagaatgaaaggtagattgctggtggaggaaaaggatttgcaattttagataaagtggtcagagaaggtctcactgagaagtgttgttcacttgaagaaatgaaagactcaaaggaagtgaaggagcaagccatgtggatgcctgaggggcaagttgttcagacagagggaaaagccagtcctcttggtggatgcttgatcatatgggaggatgaatgggtgcataagggcatccaactcatagtctcctggccttctctccttaggcctgtcccctcagttcccaggtgccatgaggaagcctcgtcggaagtcccggcagaatgccgagggccggcgttccccgtccccctacagtctcaagtgctcacccacccgggagaccctgacatatgcccaggcccagcggattgtcgaggtagacattgatggacgcctgcatcgtatcagcatctatgacccactcaaaatcattactgaagatgagctaactgcccaggatatcaccgaatgcaatagtaacaaggaaaacagtgaacagcctcagttccctggcaagtccaagaaaccctcatccaagggcaaaaagaaggaatcctgctccaagcatgcatctggtacttccttccacctcccacagcccagcttccgtatggtggactcaggcatccagccagaagcacccccgctgcctgctgcctactaccgctacattgagaagccacctgaagacctggatgcagaggtagagtatgacatggatgaggaggaccttgcctggctggacatggtgaatgaaaaacggcgagtagatgggcacagtttggtgtctgcagatacctttgagctgctggtagaccggcttgagaaagagtcatacttggagagtcgcagcagtggggcccaacagtcactcatcgatgaagacgctttctgctgtgtgtgcctggatgatgaatgtcacaatagcaatgttattctcttctgtgacatctgcaacctggctgtacaccaggagtgctatggcgtcccatacatccctgag

SEQ ID NO: 120508 - DNA, 1169 bp, Homo sapiens
gctcaaggcggggtgagtggctccctcaagggagtgcccaagaaaagcaagatgagtttgaagcagaagatcaagaaggagccagaggaagcaggccaagacacaccctccactctccccatgcttgctgtcccacagataccctcttacaggtaagcatgcccagaagggctccttagggactcatggtttcttcttgggttggtgttggccctgtgccaggccttcgctaaacacagttggacactatatcctcctccccgaatttaaactcttccttttgaccccaggctcacctggcctggtttgtggttttgattttgccctcagagtaatgtatttcctttagttcaaagtgaaataaaacacttaagttacttagaaactcaggtgataggatatctaagacagtatttttcaataggggcactaagtgacattttggacaggataattcttcgttattagaagtgtcctgtacatttctagatgtttagtatccctggtctttgtaaatgccagtcgcatcccctcccccattgcctggtctttgtgacaaactcaaaccctcctcatgcatgttttcaaaaacccttggggagggtagaactaattacccagtgaagaaccactgtttcagaggatcggcatggccatctgctgtccagcaagttctgtcctgggtatgaggggggtggtggtgtggagagaacatgctattcctcctcttgaagctttagatttagggataagaggatcattcagttcagctgtgtagctaagctctgtggaccccccccccctccgcccccgccattgagtctgtagagagcccatggtacctgttttaaaacatcagagaggtacctggaaccattggagggatgggagcttggcagagaagcaagagatagggaagatttcctagcagagactcatctcaggggtggtgttcattaaacagtatacactgttagagcaggaaggagtcttggagactgttcatctgatgtagtccttgcaccttctcccacacccccagatgaagaaactgcggccaagggaggtaaagttgttcactcctttattcattcaatgatatatttattgagcacttaatacatgccatgtcctgttctaagggatggaaccaggtggaaagtgacaga

SEQ ID NO: 120509 - DNA, 1050 bp, Homo sapiens
tttaggctgttgaggtttataccatgaaaaaccagacgtcaaacaagtctaaggggttgcattgggctcagcctggttgtgggctaccccctggtttgatgggactctcagccgcagaaggcaggaaatagtggccacattaaccatagcttaccccagttcctgttccctttcgctgcttttataagaggaggctgggggtattgaggcataggcttgtttttcagtccgtacgtggaacaaggaagtccaggaccataggaaacgggactctgggagatggttcttttggaggattaggactgcaaggcaagaggtggaaaagcaaatgaaataactcatgctgaatctgagctgcttaactttactgtccttttcaagcctttctctgaggtgaggtatttggccattttattctgtcttcctgtataaggttcagaaatgaaccaggtctggataggatgcacaggctgtaatctgggctgcccactgaccttgtctttcacttccgtgtgcctctactcaaggttgaacaagatctgtagtggtctctcctttcagaggaaaaaccagtttatgcagcggcttcacaattattggctgttgaagcggcaggcacggaatggtgtccctcttatccggcgcttgcactcccatctgcagtcccaaagaaacgctgagcaggtaggtgcagtggtgatttgaggctggtagagggaggtggagagtgaaggaaaaggaatgatggttggggtggggctggcaccccttcttgatccctccatggagcctttgcctacctgtctgggtggcctatcccaggaacaacccccagcactacagagatcttcaagcagctccttctggatggatgaggcttgactttgtagagaattctaggggagagtggagagcatgcgtagctttccatatatgtggggaaaatcctctagatgtagcagaaagccagaagtaggctgaatgagagccagggtggccacattgtgttaattaggaaaaggtgccctttcctcaagacattatactgcc

SEQ ID NO: 120510 - DNA, 1030 bp, Homo sapiens
aagggcccttatccatctctagtctctcttgacaccacccccaaagaatcaaactagctgttgccagctgtgtgatgcataggttatgtgagtctttatctgaagaggcaaggtggttgggctcctgaaaaaggcagagaaggctacctgataatcgaggtttgaaattagaagcagatccaaggacttgtgagccagccagggtaggagaagtcttagtatctccctgtgtagccaaatgacagtagctgagtgagctgtgtgctatggtttccttaaacaaaaagcagaaggatgggaaggaaattgcagtgtctgctccttgccctagccagcaatatttccccccaaacttttatcttgatcagatcttctctatcacccaagacccatttctcacagggaaaggaatagccatcctctccactcgtcactgagccctcctgaggtggctgcctcaccctgtagcatgtgttgggaagggggatttctgcactcagactcactgtgtgtgtccttggcaggcatgaccaacggctttggaaaacacaccgaaagcgggtctgactctgaatgtagtttgggtctcagtggtggactggcatttgaagcttgcaggtaagaacacattcccaaagctttgtcagcagctctgctacccctccttttactctccattcagctacagattgaacctcttcctgcttacctttttctctcttcccccactcctgctatttcctgaggcctcttatctgtaactctgggagttcctaggaaacagggtgacccttgactctcagatctgatctgagagaggaagagtagtgctgatgcttacagggtttgtggggctgaatttggactctagaggataagaaaagctaaatctcctgttgttcagtgaaattaacatttgagccaaagtcccctgctgcccctacacacatttagacaacccagccattacagagttggttttgctctttgccttttggggcgtcatagcctctttatagaggtgtggtgt

SEQ ID NO: 120511 - DNA, 1033 bp, Homo sapiens
agttgccctagcttcctattgcagcctccagagatataggggaagtagatgggaaaaaattatcaggcacaggaaagagaaagatttcagaatcttacacgatgcttctagcctggccctgggttgaagttcctgactcccttcaaagataaggtacctggaagcccactttgttggggtcagggtaggattggacccatcaaactatccttttcttgctcttgactaaaagtgaaaggtgtgttgttggccccttcttctatgaagggcattcttttcagctatgagccacaagagcaagcaaggccaggctctggttagcctgctaattcaggtggcgtgtttgcctttctgcagaactccagtgcaatgcccttgatttatctggggccccttggaggaagtatgtattaatatttcagggtttaaaataggagatccaaaggcttcaactgcaagggttgtttttctttttccccccatactgtggtaataagtatataagggaagaccttatttattagaccagaatcatataatcccagaattagaaataaccttgaaagaactggtcactaacccatcccccacactccctttttcacttaccccttggtttatcttttctgatgattttctgagcaggttggtgctacatgtgctttctatagatcactcattcaaatattgataactgaacacctactgtatgccaggtactgttctaagcactaaggtgcctgttctcatgaagattatcttctaaggtgtctgttctcatggatatggatgttaaaccagtaaataagataactgtaggttgggttgtctgcttaggctggggtaacttggagaaagggctgaaatgcaggccatgattgagtcagttgtgcttttttctacaaatcaggaacatacagacctatttttggtgttgcatcctattttattgagctcatccttctcagagctcatcattctatagtacagtattagcagtttgtaatactttaagtaagacattaaaatttac

SEQ ID NO: 120512 - DNA, 1363 bp, Homo sapiens
cagtgtccaaaaaataaagttttattgggacatagccatgctcattcatttatagattgtgtgtgtggctgctttcatgctataacaacagcagtgttgagtaattgcaacagaggccgtgttgcccacagaagctaaaatatttactatttggccctttacagaactagtttgctgacccctgatccagtctaacttctaaggaaaggagagggaaaaggaagggtggaggggatgttgtgactcattcctgggttgccccagtcaagtggaggccacaggcaggccttttgggcaccattccaagtcccctttgggtgctgtctcctcccctcccccacccccaggcagaagcctcctgctgccctttgaagaccgcggagacctggagcccttggagctggtgtgggccaagtgccgaggctacccctcctaccctgccttggtgagtctgccccagacgccaccctcctatctcccctgccttgccttgggggctaatctgattggattaagccagcagagtgtggtgggagtcagagtgtctttagctgtagaggggaggggggttttgccccagcctgagtgggtcaaactagcaaggctcccagcttggagcactaaaaataggctaaaagtatgcagatcaaggccagggttcttagagttttaatagcatttatttatttccttatgcataaaagtaacagggcccattttagagaatctttaaagctactgataatgcttagacgttttattaaatatttgtcatgctaagtccttgaaatactgaggaaagtatgattattacattttgtaagaagaaaactgatgatttgtggtcattcagctaataaatgacagggttggaatttgagcccagggcttaaaatgtgtgatgtcaaagcctgtgttctgagccactgagttcaaaatcatccacagtcctgcagggataacttggggtgtatatccacttactcttttacaaaaaatgtataaatatgcatatatatgagaccatattgcttttagcctccctttcacttaacagcatatcatgaacatgcacatcttatgccattaaacattcttcatcaacatcacttttaatgattgcatcgtcttcagttgtatgcatgtaccatattttaaccattccctagttggtcacttacattgttttgaatttttcactatgataaacagttggcaataaacatcattgtagttttacccttgtgcacatccatgattatttccttacagtgaattcttaggagtcccttcttggggcaaagtctatgcagaattctgatacaagttgccaagttgctggaagttcattttggtttatact

SEQ ID NO: 120513 - DNA, 1122 bp, Homo sapiens
tcagcagttggtcctgcagcaggggcactgctcaccctggcctccctcactgagtgcccatcttctattctgcctccagatcatcgatcccaagatgccccgggagggcctcctgcacaatggcgttcccatccctgtccccccgctggacgtgctgaagctgggagagcagaaacaggcagaggctggagagaagctcttccttgtcctcttctttgacaacaagcgcacctggttagtgggtgctgctgtgagggggctgaggggcacgccaggggtctgtgccagtggtgctgtgctagtgaggtgtacagaggggccatggatgttaccagttaccctggtctccacttgccagcaacaggcctgcacttggcatgttaatagtaactgaggggtgttgcagatcagattccctgggaaacactctgaggtcgagacttgcatcaggaggctattgaggagagctgtggggcgggagcgatgcagcactgggcagaagttgaactacagcccacttgctgcctcagctcatccactgggcacatctggagctgggtggctcaacaagataagagatgtcaggaattgggcctgtgcctttttgccctgtgccaactagttattcaatgccactgccctgagggaggggtgtggcctgggcctgaggcttccatggtggagagtgattcctagagagggactcagatgagagcctgtgagcttccagcacttccagtagcttctgggaagcatgtttccgtcctgaggggggttctggccagtgcagtgtccgctacaggagacttgctcatttatggtttacaacacttaaggtttctcttagcaccaacaagagagtgctttcaccttagcttctatagagtgaggagggagaactagctaataaaaacagtgataatagtagctgccattgagtgcttactccatgtccttatgcagattgctttatatatctgatctcttttaatcctcatttaagtcttcattaatcccctcataatccattttgcagatgaggaagttgaggctcagaaagtccagaccctgtagccagaactaagatacaaaacaagatcttgctccaaaggctgtatcctt

SEQ ID NO: 120514 - DNA, 1546 bp, Homo sapiens
ctgctgtgtgccaaaaactcccacccaaggtccctcaggggatatttcactgaagaaccagttagaagtagaaacagctgtggggcttgggcccagcttaggagattgcccagatggcaagaggtcctgggctccttcttgaggggctgcctggcccgctccatcctactcccactaactacacctcagggcgggtgaggttccgacactgatcccagagatgccgtggatacgccagggtcccagggggaatctccccaagctcacactctctcccgcttatcgcctattctcacacctcttctcggtcccatcttctgcacccattgcccagtcttgctttctctttcccatattccttttctttttctcttgtgccaaactgacagaaaccgtcaccacactggtctttttctttaatgtctcattccccttgaggccagctgctatgccaggtggtgtctctgccaggctcctcaggcccagacagaggccagcccacaacctatgaccccctcccccaggacaccacctcccacccacagaccttccctttagctgttgacacaacttcccagctctgcaagtgtgccccctggatcaaggcgggtcccctcttgtttttttctttgctgccacgaggtggtccaagccttcagggtgggctcctatcaggctgggtgtgcgagtgtccatctgtccacatggatgtcgagggtggtttgtgtggagctgtgctcgtcagctgggtctgccctcttcccccttttctccttcttctctcctcatggactttttctgcaattgcagtcttaagcttcactctccaccacctggatggcatggcgcctgccaccaaacatcttcctggcctgcgctctgccctgccctgcctagcctctgctactcccacttcccaactccagggaatgcattacttttatttcaaaccctctgcctccttccttctttctcttcaaccccctccccaccttcaccttctcaaaaatggaaggaaaaaaaaactgtgaatggggaatgctgactgacaaaccaacacaactttcagaggcttcagtgtctgttctctggacatttcttttcacctcctgagcaccaaagtcgcagggccagttgcaggccgctgattgccatgttgatttttaacctgatattctttttaattgttttaaatttttcataggggagttttggacaaaacagtcactggggagatcactgccatttttacacacttgactttttaaaaatacaaccaaccaaccaccacaacttcttatacatttgggacatgagccagagtttaaaagggaaccaacaaaacactataacttaaaaggatggggttttggattttgtataataataaaaacaatacagcatatggctagggaaggacatggtgtatataattgtaaaatactgttctaaattattcaggcctatagtttccattactggagtcctccattgtgtggccacacagtgtcgttgatttaaaggagccagtgcttcccctctcccc

SEQ ID NO: 120515 - DNA, 1071 bp, Homo sapiens
cattttatataaattctctcatttcattccccacccctccaatccccgcccagcaatcctggggttgggtggatactttacattttatggatgaccagaggctcacacacatagtaagtgcaacttaagcatcccaattctagactgttatacatttaaataataaagtatgattatttgtcaaatatggaatggctagggtagacgagaagactctgtggggtgtttgcttctgaattatctgagtctaaagacctgtacttccacccttgccctctactttgtcctgctgctttgagctggacctcgcagaacagattctgagaggctaggggcagtggagggatgtaacaaggggagctcatcccagggacaaggagtgccccgcctggctgcatggagttgtgggaggggcagttggcgggaggggtactgccagcaacactaatgacctgttttcatttccacttccagatcaggcgccaccccagctttaagaggtttttttacgagttctcggactcctccctcagcaagctggtagccaccctgcgcagccaggtggctcactcctctaagctggacaggaaccgcgccaggagactctaccagtttgacgttagcttagctaacaaatttgctggcagcaacagccatgccatgtgcatcctcatgggcctaagagaccactacaattgcacccagttcccatacagggaggaccagccggtgagagagggcggggaagacaatggcaatgtagcatgagtgacagcaggctcacagctggcctccagtgggatctacttatcctcctctcccctcccctgctcagttcagaatttttgggtctatctcaaatgtcacctcctcactgaggccttctgagacaattctaaaccatgacaacctttttcttttctgaaacctcactgattttactccataattaacatcttgtttatttggctctagtcttcaattacatgtacatttccatgctttttgatagaatggcatattggactggctacgatcttagcttgccttgttattattttgtgggctctg

SEQ ID NO: 120516 - DNA, 1048 bp, Homo sapiens
ggggaatttgcacaagacaacagctttgagaaattgttgacactactcacgttagtgggcagggtgaatgggcccactggtcagcaccaggagccaactttggtgtgcccaggaggcctctgctgagggagctgtttggccgggcgaggtggctcatgcctgtaatcccagcactttgggaggccgaggcaggcggatcacctgaggtcgggagttcaagaccaacctggccaacacggtgaaaccccatctctactaaaaatacaaaaattagccgggtgtggtggcgggcacctgttattccagctactcaggaggctgaggcaggagaatcgcttgaacccaggaggtagaggttgcagtgagctgagatagcgccactgcactccagcctgggcaatagaccgaggctccgtcataaaaaacaaaaacaaacaaaacaaacaaacaaacaaatcaaaacaaacaaacaaaaaaactaagggagctgtgtgttttggttgcagcccgatggagaatccaaggtgcccaaggaggcccctggcggagaagaaagccaggtctctggacaggccgcaggcccccgggaaaggctcggagtcgtgggactgccattggctctccctgcccactgccccctccaggaaggcgcttcactggacgaccagtgattgggccagacattcagacagcccagctccatctgcagaggctcactgcaccaccgctgcagcccccactcccgaggagaccggagattttctccccagcgagcagaggccttcgcaagacaccaagaaggggtggctgaagaccatgctgaacttcttcgtgaggacgggccctgaggagcccagagaaaaggccagcaggaggccaagggggaaggagggtatctcccagcatccggagcccctggaagcagcaggggagccagccctcaggaagaaagcccaccacgacaagaagcccagccgcaagaagcaaggtcacaagaaacacgcggccgaggtgactaaggcagctcaagaccaggaggccagaggcc

SEQ ID NO: 120517 - DNA, 1156 bp, Homo sapiens
tctctactaaaaatacaaaaataagccaggcatggtggtgggcacctgtaatcccagctacacgggaggctgaggccggagaatcacttgaatccgggaggcagaggttgcagtgagccgagatcgcgccattgtactccagcctgggcaacagagtgagactccgtctcaaaaaaaaaaaaaaaaaaaaatctgtaacagagacatctagtaactttggtaaggacaataatacacgcatttttatatttattattcccccttcaaatagatgtgtagagatgaggttagaattaggccatgtgtttctgtgacttttttcctctctttggtgtctgatttatcttattgaatctttttctgttgattcataaaatgtcatgtctttccttctgtagccctgagcttcctgattgttgtgtcttcctctggccttcaatctgatcttcctgcccctctttggctaagtggagtgaaatattgaggggaattgttagaataccacatgatttttagttggaagatccagagtcttagatatatgaggcttagagatataaaggagcttattacaaatttatcaaatgcaatcctctcagataaagaatctgagagatgagattgcagagtgaggacttctggctcctagcccagtgttcttcccaccaaattaaatgcttcaaaagtagaaaaggtccagagaaattataagtagatggagaaaaatggagagactttcatatgactacaaaagcaatattatcttatctggaaaaatggagattgaaggaggatatgatgtaaccatataaatcataaaaagtgggagtactaataataaggaactctttgaagcttgaaataagtagtgaaaggacaaataagagcaagagatagctatcttgtaaagccccagaaatgttatgaactcagttttttttttttttcttttgagacagagtttcgctcttgttgcccaggctggagtgcaatggcgtgatctcggctcactgcaacctctgcctcctgggttcaagcgattctcctgcctcagcctcccgagtagctgggattacaggcgcccgctaccatgcccggctaattttttgtatttttagttgggacgggatttcaccatgttggtcaggctggtctc

SEQ ID NO: 120518 - DNA, 1051 bp, Homo sapiens
cccacaacagtcaccagagtgtaatattccccttcctaaaattttaaaacaattttgaagaatctgaaaatgaatagttttggcacatattagtagcaggttccttaaataaaacacgggaaatataaaagtattatttagcaatagaagtgaaaacaagtaaaaagtgattgcctctgaaccaacaccagggaaggtatagggaatagcaggggagactgctgggcctccacataaattcttctctactgtttttcttaaccatatacatagtttactttagaaaatttaaataacgttcaagtgtgggcatcctgccttcatcctctccctcccccaaccctcacatgtacatggaagagatccaatataagtctctagtttttttgtttgcttgctttttacttgctgtaggcaagaggtttttttttgcctgtgaacatctaaaatttgggggttttttgtttgtttacttgttttaaagaagacagggtttatttttctctcaaggcttttgctctcaagttgttttggtttctttgtatgttcttttagacctctcacttgactatgcctctcagccagcaaatcttcagttccctcacataatgccccttgctgaagacatcaaaggttcttgcttccaaagtgggaataaacggaaccatgaaccttttattgctccagaaagatttggaaacagtagtgtgggctttggcagtaattcccattcccaagcaccagagaaagtgacgcttcttgtagatggcacacgttttgttgtgaatccacagattttcactgctcatccggataccatgctgggaaggtaactgatgataattttcttccaaattcattctgttctctataaataaaaatacctgctgtttatcttgcattagatataacagtaaaaagtattgtataggttgggcgcggtggctcacgtctgtaatcccagcactttgggaggtcgaggcaggcagatcacctgaggtcaggagtttgagaccagcctggccaacatggtgaaaccctatctctacta

SEQ ID NO: 120519 - DNA, 2025 bp, Homo sapiens
gagatgttgaaaagtaaagctcagaaatattgatgaatggcatattagataggtcagtattgacagatgaggggacaggaataaaaaggagcctagatgctgtctttctgagctgtcagtatagaaaagcaggttcttgggcagtggggagggcatgaaaggccaccatctcaacacagatattttccaagggccacctctgcagttgctatttactgcatttactgccaaagaaactcactacagatgaactttgtggacttgatccttcattcttctttgtacacaaatgcttaaagcaattgcctttttttcctgtctgaagggagcttcctaagacttgaggtgtcttgtaggcattgggttccagtgctgtgtttttaatttatactatgagagagtgggatggagtcttccagaatgaggtggagaagggagaaatctcatctgtgaagaatcatgatggagaagataacattattgcctggatatctttcaggatgtttggaccaggaagagagtacaacttcactcggcccaatgagaagggagagtatgagattgctgaaggcatcagtgcaactgtatttcgcacagtgctggtgtgtggtagccttttttgttacattctcttcctcaggggcatgtgtgatcaatagccttgagagttccatcaactatgttattgactttagggtctctggtttccagttgtttcctttctccctttgttttctattcctgtaacttttaagtccttgcttgtttgtatgtgagctctatcagttaccaagttctggttaaacaagtcaagatagccaggagctgttttgccatctaatgaatcatccaatttggtgataattccagtagctcattgctttaacaaaaccaggaatgcacagggatgaagaagtaatttttcatcttgttctctgcctacattttttcttcctaatctatttacaggattattacaaaaccggtatcatcaattgtcctgatggcatctctatcccagatcttagagatacttgtgattatctctgcattaattttgacttcaacactatccgatgtcaagatctgagtaagtacaggagcaggtgccagctgcacttaagcagctgaactttcagttttcttggaagtcaccgattttttttttttttttttttttttttttttgagacagagtctcgctctgtcgccgaggctggagtgcagtggcacgatctcggcttaccgcaacctccgcctcctgggttcaagggattttccctgcctcagcctcccaagtagctgggattacacatacctgccaccacacctggctaatttttgtatttttagtagagatagggttttgccatgttggccgagctggttttgaactcctgacctcaggtgatccgcccgccctcagcctcccaatgtgctgggattacaggcgtgagccaccaagcccagctgatattttctattactaaacagaaggagtttcaagtttaggttgaaaatcttctgcagaggcagagatgtgatactaactaacccttttcctctcttagttcaaagcactgtgaggaactggagtagacaaaggaaaacagatagtagtttctaaatggagcctgaccagtgggagaccaagctgactgcttccctcttgggactttggtgtctcgactctaacaaacaaggatactgattgtccaacatgaggaacagttcactaataaagtcaaacagcacaaattggccaggttctcctgatcatgatattgcctttttttttttttttttttttttaatttgagatggggtcttgctactatgttgctcaggctggtctcaaacttctggcctcaagcagtcctcccacctcagcctcctgagtagctgggactacaggtacatgccaccacgcctggcttattattattgttttgttttggagacaagagtctcgttctgtcgcccaggctggagtgcagtggcacaatctcagctcactgcagcctc

SEQ ID NO: 120520 - DNA, 1048 bp, Homo sapiens
tctagggacaagacctactaatctgaccaggaaggaaatgaacatgtaggtgactggggctgggaaagcatgggacagggactggtcacttcgcacatattttccatgctgtgattttgggagaaaactgatgtggttaggaaggagaaagtatggacaccagagtgagcacaatttgttagtcatgagaatggcctttttccattgcaggttaccctacctgtaaagaaaaaattaagagaaggcctggcggccggtctgaagtcatctataattatgtacaacgccccttcatccagatgtcatgggaaaaggaagaagggaagagtcgccatgtggatttccagtgtgttcgaagcaaatccctcacgaatctggtagctgctggagatgatgtcttggaggaccaggagatattaatgcatcacccaccccaagtggatgaacttgaccggctaaatgccccactttctcagatggcttctaacgactttcaggattagggccagctgtgggtctactccttgttggagcccatctcacctgggatgcctgcagccagccctccctcgtgatttgtctcaccttgagtaggagacatgcttctcccctaaccttttcctttctgccataattaacatatgtccttttcagtaagtccatgcctctggcaggggatgaagaagtactcactggtaattagctaccatctttgcagcagccctggtaacttgaaaaatttgggtctggtgctgttcattgagtctttgtgtaactgcaaaagcaggaaaggaagtcaagactcctgttgcctcgtgcttagcaaagcagtccttatcctttatactctgttcttgggttttgtttttgtcttgttttataccaggcaaattgcttagtagcaaagggaccaaactgaaaaggtgacaatctctaacttctaaaagcagacaccaatcggatgctcattagaggttaatgaagatgccattcttggtggcctctgcacccaaattgcatctggaaagaactagggtctcattcagaa

SEQ ID NO: 120521 - DNA, 1053 bp, Homo sapiens
tgaagtatggcatatacttgacactgtcctgtgtaaccctttactttgctcaggctttcaagattgagtcttttttcccccaaattaggttaacatgcatttgaccccaacctgtggggtttgagtaagctggaaatctgtgacggtaggctttctagtgtcacgaggtggtggtgactgaaggaaaagctgggatcacaggttccttctgatggagaggaaggtttatttctatgcccctcccaccaccctccacctagagctcacccaagcctgctccagtcccaggggcaggccattctgcaaaagcaggacctcacagaaacaagggctgggttgaggtcacccccttcagagttggttcctggccagatgggtaagaggcatttgtaattttaaaaatgtgaaacttgggtttggtgttttcttctaagtgcctaaataagcaagccaggctgttgatattttagccagagaaatcggcaagccaagattaacccgaatctgaagtttagaatcttgagtttgcatctgcatcatatcatgctgttttgatgaggaaacatttgccactgaggagttggagggagggcaagacgacagtgttaagtcagatcatttaatggtttcccctaagccctggaaaaatatttgaaagaatggcagcaaaaaggttaagaaagcaagccagatttactgcacaatatgcagtacccagtactactttaaatcccaagagaacagtgtgatgtctaatatatacaggtctatgaaaatactgtggaataagcccaggaaggttagatgtgtttgcaaataagttgcccaaagggtccccctctaagtaaaacaaatattcagaccacaggctttaatgtaaactgtcaaaaagtgggatgtggaggatttttgttaagtgtcaatcgaagttaaaaagcaagggtttttggccaggcgtggtggctcacgcctgtaatcccagcactttgggaggccgaggccggcaaatcacctaaggtcaggagttcgagaccagcctggccaacatggtga

SEQ ID NO: 120522 - DNA, 3205 bp, Homo sapiens
gggagttgcactaacttcacgttttagttattcttatctttctttctagctatgaatgattgagttatttttttaaaatcataatttactttgggtacagtcagttggcttggttggtcagtgtttataagtttttcagagaaaataaatgctgcctgccagtgaagagtcttctcatgtcagaccaggggtcttttttggagaaagacttgattggtatgatccatttgattactaacttagtaatttttggcatgtgtattcttggcagagagagacctgctgcaatatctattgaaatcaaaagcattgatgatacctcaaacttcgatgagtttccagaatctgatattcttaagccaacaggtaacaccaccagcattgtctcctgctgccttataagcacattatttacccccaattttgggatgatgtttacaaatcagggtagtgaacatggagaggaatttcatttcttcaggttctttgtaagtacttttctaattctaatgctgggtagtggtgaaaccttggtgaatggaaaatgagtatcagctcccatgtttagactgctcaactgggtgagtaagtcacaaaaatctgttcttttgttatttactaagtgttaggtaatctgaaatgacaggaatgggaaaataaaacattaaaaaatttgtgaagaaatatgagatttaaagaacatgagcaagaaaatgtggaaaattcatagagtgaggccaggcgcggtggctcatgcctgaaaccccagcactttgggaggccgaggtgggcagatcacaaggtcaagagatcgagaccatcctggccaacatggtgaaactccatctctactaaaaatacaaaaatcagctgggtatggtggcacacgcctgtagtcccagctactggggaggctgaggcagaaggattgtttgaacccgggaggcaaggttgcagtgagctgagatgacgccactgcactccagcctggcgacagagcaagactctgtctcaaaaaaaaaaaaaaaaaaaattcatagagtgaaaaataagctttcccaaatagaaactggtgtgttcttcatagtcctgtcttcagcaccgtgagcagtccattggaggcaaggcagtgaatcaactctcacatctatttctttcccagtggccacaagtaatcatcctgagactgactacaagaacaaagactgggtcttcatcaattacacgtacaagcgctttgagggcctgactgcaaggggggcaataccttcctacatgaaagcagcaaaatagtactcttgccacggaatcctatgtggagcagagttctttgtataacatcatgcttttcctctcacactcttgaagagcttccaagaagttgatggaacccaccaatatgtcatagtaaagtctcctgaaatgtggtagtaagaggattttcttccataatgcatctgaaaaactgtaaacaaagacaaccatttctactacgtcggccataaacagctatcctgctttggaagagaagcatcatgagccaatttgataggtgttttaaaaataacttgagttttcctaagttcatcagaatgaaggggaaaaacagccatcatccaacattattgagattgtcgtgtatagtcatcgaatatcagccagttcctgtaattttgtgacacgctctctgccaagcccaccaagtatttcctttatagctaaaagttccatagtactaaggaaataaagcaataaagacagtctcagcagccaggattctggctgaaggaaatgatccgccaccctgagggtggtgatggtagtttctacccatacctcagcctcaggcgagtggcttatagcctccattcatggtgcactttatttatggtactaagataaagactgtcaatccattgatttatctcctcctgtcccccatctaaaatacccatgctgcttttctgagtgttgatgggggttaccagcttgatccactgttgctcttagaaggcccagaaagtctttgggcattgccaagaaatcccggattatgtggaaaaccctcactttctcttcacggctgtaccagaaaatccctaagacagatcttgccgtggactagcaatacctgcaagtgctgccaatgggaactcaatttattcctgggaacctaacgaggagagcccaggcctaggcaggaggcctggaaccctcttggctaaggtgctgttcctgttcctgcaaggtctccagaacccctttggaaatggtgaaggaaccagcccaatagaagtacagagccagctgacaagtccttgtaaagctcactcctcagtccttggcacagccatgttttgtcttctctcttggtatttcttctctcccaactttagccattttgccttggaatcatgattacaattttttcctttgcagatgccttcctgggggatactcctccccaccctaaagggtcgcctgcaacttaggcggattgggtctctctgctgtggcgttctctcttgagagaccctctgaattttagcacaaagtgccttctgtttcacagctgccaccacctttagaggaatttcgtcagaaaaatgtggaggctccatattaatgcattattttttaaaaagttttgataactcttaaagcatcatttgcacctatgtgggaactttgcctgttgcaaagtattgtggccgagctgcagctgggagcctgctttctgccagtcttgaggttctgaagatcagctttgaaaggaaagtatgtcctagcttagccattcagaagagaaaaatggaatatcagagttacagttgtcagtgaaactactttggattttaacctcttagaggaagaaaaaaggttagggaagtgtcaactctggatgaaggtgatgtgtttgcctctcagtctttcattcatagcctgctagtgaaaaggaagtaaatgagattcttttgtgtgactttgtagtctctttgtattaccaaatagttggggtgttgactcctgtgtgttttgcaagaatgtgtggtaagcctgggtaaagagaaggaactgcggtgttgggagagtctttgtgttggggagtggcaggggatgatttgtttcaggggaaaatgcccacattttaacttttaaacttctgaataaactgtgtaaaaacagtagtggaaatacgtggtgt

SEQ ID NO: 120523 - DNA, 1050 bp, Homo sapiens
aagttcccatctctgagaaagccaaggatctaattttgaggtattagagaacatccctccaccttctttctcagctttttaatatgaatgattccatttttttaaaaacttttgttatctcctgaatctgctttctgtttcctcctattcctctctttaaacaaataaaaaggctgtgcatggtggcttacgcctataattccagcactttgggaggctgaggcagggggatcacttgagcccaggagtttgagaccagcctggacaacacagcaaaaccccacctctaaaaagaaaaaattggctgggtgtggtggaacctgtggtcccagccacttgggaggctgagatgggaggatcccttgagcccaggaagttgaggctgcagtgagccatgattgtgctactgcactccagcctgggtgacagagtgagatgctgtctcaaaaaaaaaaaaaaaaaaagaaagtttttctttttctgaggagactgcttgagatgtgctgaaaggcctctgtcttttccaggttctgctgtgaatgggaacatagaattggagctcctggagttgaggaaataaaaagtaactctttttttgaaggcgttgactgggaacatatcaggtatatccatataaacactttcagaattatttcagaaagtctctagtttacttaataataatttggaaggaccatcattggcaagccaagtaagggaagagagcttcttagagatttagggtcttttcctgattttcattcatggtgaagattgggcattagattttttgtcagccgtgtgtcatggaatatattgaatctagcagttatttacaaagtgaagtgaactttgttttttgaggtggagggagcatctaggaagcgtattaccctttacctagaactcagcaacctcttaggtcccgccagcgggactgttcctgcccacagggtggaaggtatcactggaacatagagaagggagaaaggagtggaggaaagattggaggggtggaagtggagagggaaagggagagtgaaaattgtt

SEQ ID NO: 120524 - DNA, 1177 bp, Homo sapiens
tctcttataccttcatcttctccatctagaagctcttttagtcactagcatttattaaatatccgttgtatgcagagcacttcaactgggcattgcctcactttcctaatttgccgcccccttcctctgtcaaagccttcaaatcatgggaccctctggcctctctccctcttattgtattggtgtgtctctgtatttatgggacgcatctgtgggggtggtcatatgccagtgagcactagattaagtatatccttggtggttccgggtgagtctatctggctgctttggcttcaggaacatgggaacgatgcctgtggaggtgggcgtacaccgtctggagggaagatggggtgatagggtgtgtgcgtgtttgtcttcttgcctgtagttctcaaaaagaggcatggtggtcatttttaaaatctatgcttttttcttattcaagttatttggtactttacccatataagggtatttctggaatgatattgtttcatcctttcatttcttctttgggcatggtgattcccacacctgcaactctatttatgtcctcctttcttttcccagctctacctattagctgacttcctagtggtaccagaggcatgatttcactttgggtctgggagtttgggggaaaatgaaaaataggtttaggtattttctgggataagtggaaatcctgtctgtgtcatggagggatggccatacagagtaatccagtagtcattaaagacatacagaatcaggccgggcacagtggcttatgcctgtaatcccagcactttgggaggtcgaggtggtagtatctcttaaacccaggagttcaaaataagcctgatcaacatagcaagactctgtctttacaaaagaaaaataaaaaatcagctgggtgtggtggtgctcttctgtagtcccacctactgggaaggctgaggcaggaagatcacttgagcccaggaattcaaggctgcagtgaaccatgattgtgccactgcaccccagcctaggtaacagagtgagaccctgtctcaaaaaaaaaaaaaaaagaaaaaagaaaaaaaaagacatagaattttattaaggagagtaatctcggtcagattcaaagttctggagtgtaaaagctccgaagttccttttttattacaggctacccacctttctgttc

SEQ ID NO: 120525 - DNA, 1031 bp, Homo sapiens
gtactttggctgtagagctataatggatgctggaaggagcagaacgtaatgttctgttctacctccaagaatactcatccatctatcaccttgtttcttccccatagggccatgtgaaactttctgactttggtctttgcacaggactgaaaaaagcacataggacagaattttataggaatctgaaccacagcctccccagtgatttcagtaagtggtaacaattacgttagccttttcgttctaactgggcctagaagagctgtttcccttgtaaccaaattagaacagataggagattctcacactttgagtatgtagagaataaaaataccttcccaggtttgcctgtgatttgtgttgtctggtgaggcaagatgaatgagtgggtaccaagtgtgtgaaggcagaggttgaaaggggtctttagaggtctactgggaaggtcactggggatgagtatgggacaagcaagcagaagtagtagaggaaaaactcctgggaacagttctgggctagatttgtcctgggctagatttgtccttcatgacagaaagaagtttatctttatgacagtcacttccatttgagcactatgaaatcgttgacaactatgtagtaaaatttcagttcatcctagaaaagcatatgtcaaatcatgtatcataaattcagatgtccctgatcatataagttactactacttggaaaattgatggtaattttgagaaattgtgactgttttaggtccacgttaggacctcaattctagttgagactgaattccctgtaattctgattaagtcctgtactgtatcctctgccacttgatccacatgggagtgccttttacaactctgtgtgagtcttttaagttaatgctttacagcctctgatttgggtttactgtaaacgtactaggatatgtatcatctggagcttttgatgtatgagtagaagaaaagcaagactttagggtctcatgtgacttgaaagagcctactaaaaaaagtagtaaacattttggtctg

SEQ ID NO: 120526 - DNA, 3864 bp, Homo sapiens
ttgtattaaaccaaacaacagccatggactaaatttgccaacagccatggactaaatttgccaatttgtgaaccttggtacatgttttacttcagaacatgttgtaaaaagtcaagacctgtagcatatgttaagaccaaaaccactattcagggattggactgagtcttaataaatttagatctgaatcaacccaatttagaccttgtgacacttaaaaaagaggggaggggccaggcatggtggcacacacctataatcctagctacttaggaggctgaggcaggaggatcactttagaccaggagtttgaggcttcagtgagctatgatcacgccactgcactctagccggagtgacagagcgagaccccatcttgttttaaaaaaagtgtgtgtgggggggatttgataatatgcagtgatgtttgattactgttctgcatttaaagtaaataaggtaaatttgataataaagcattgctttaacaaaataattccggttctctgaaactttctacaacttggtcctttataggtatttcagtaaaagtataaaattggaaatgtcattaatttgaatctacaacttttcataggtgttcttgtatttcaattcagtaaggattgattgagcacatagcagtgaactaaatgctgtggtatcatagcattctagaatttgtcagtgagctcactgttgttgcagatactagtgcagacccgaggaagaacttggaagagagtctcactttggggacttatttttatcataaaagattattagacaaaactctatgcaaaagagtagtaattttaactaatcagagattcagtttatagcagtgttaaagttgctatttgcattaaagccattcattttgccattttttaaagcctttcatcactcaagttttcatcactgaataccttgaagtcaaatgttgtcaattttgagttagtaggtttgcctaagcagaaattggatcttttatatcatcacgattaaatactcaaaacagtatttaagcacagtatttaaattgtttaagcaaatatacaatctaataaagcagagcaagctttgtcattaatcaaatgcatatacctccaggttggccacattcgtgcggagcgtgacattctagtggaggcagacagtttgtgggttgtgaaaatgttctatagttttcaggataagctaaacctctacctaatcatggagttcctgcctggaggtaattacttgacgatgaaaggtcattttttctttttgttctgtggtttctttctctcacatcacgattaaccctcctttctacttttaaatgtgctcacaaagttgctttctatatccttttttaggtctataaaggaagtcagtaacctgtcttgtgctggggtgcctttctacaatcttagtaccataaaagtaacctgttaattcatttacatgatttcagatggacatttctttcttttcttcttctttttaaaatatataggaataaattagggtgctctgcctgctctcctgtcaatgggaatcatatatgatcaataacccaagtgacaacattgaagctataacatcctttgctccaaatttttgtttctttttgtataacatattaataaggagtgaattttttgttacccatattagtagccagaaaaaatttctcatttctgaaattttaagttttatgtaactcagcatgagcatctcctaagacagctccaaagtaaacccagaacagaacatgccatctgttctgaggaaagcagtctgtttgtcagtgagcagatgaactctgagcaaactctggtgggaaaaaaaaagagagagaacttttttcttttttgttcctataattgtggcataatattttgattttgtgacaacccttagatttagggtcatcaatactttttaataaagaaacacatttaataaaaaataaacagttgattaatgttagaaaagagtctggtagaatgaggagaaacttttttaacatttagatgctagttcttaaataagagtaagagccaacttggttaccagctcctaacgtgtcctcaagcctcaacctgtaccatcttccgtagcttctcatgtctcctggaccctgccctttgcacttggtggagctggcctgcagagccatagagcatctggcctgagctctccaatcatctgggcaaacttgcacaggcgaggccccattgactgctctcctgagccacagaactaaggccgtatagctaccttactggggtagcagcccaagtgcactgtctccatgtgtctggtgggtctccagattgaagggctgccaggagtgattaggaaatcatattttttaagtattggactgaaaaagagcactttaataaatggtttaatttttgcctgagggaaaaatagctacttttctccaataatacaaaacataatgttctaaatgaaatgaaactgaaaaagcagcatgatgctctgttaaaatcagaggtttctttctcttttccttgttttctaacataagtgactttatgtgaggtctaaactgaatctttactgtttctcttagttttaaactccttatacatattttctttgcatttctcactgttgagttaggacctgaatctttttctgccattttatgttgctggtattagaaatgatgaaattttgactttgcagaaaactaacgaggttaccttttaactgctagaatactgatactgtgttttaaaagttacataaagggtactagtgtccatttaaatacctataataacgcactagagaaaaaaaagcactgaccttgagaggtgttcattgtactcttccaggaggcagttattgcacattctagtgtatagcattttcagttcatttttagcttttgttgactaatgctttgctacccaagtccttcctttttatttgtttgtgttctgtgaatagaagttggaaagcttgttttcagcctgcccgagtgtttacatttttatttggcatttcagcctctctataacaatacatagattgtatgtggaagtgccatttagttacagatgcagaaaagcttgcagatacttgttcaggcaaagtgaaaagtaaagtagcattttaccccgagtccaaaaaattatcctaagcaaatacagttgttttttaaagtgtgggagaaattttctttttctctcaaaagtaaaatagaaatcacagcttagtggtcaaccttagctagcttaggtgtgaaaatcccatttcttcccatgttggccatgtgggtctatctctggcacacagaagaggtctgtttagccgccttattttggcagatagggaagacatatctgaaaattggtactcactcgtatgttgtgtgtgtgtgtgtgtgtgtgtgtgtgtgtgtgtgtggtggctttgtatcttcttgtttccaggggacatgatgaccttgttgatgaaaaaagacactctgacagaagaggagactcagttttatatagcagaaacagtattagccatagactctattcaccaacttggattcatccacagagacatcaaaccagacaaccttcttttggacagcaaggtattgggggggcattggcatgaactatgcacgtttactgatctgagcagcctctgctttaacacctgcacccctgtggtcatcccagtgggcgagctgtgacctgccttgtcatgattttccttttttttttaaacaggtaagtttgctgtcacttcctttctctgaaaggctatggttctgtaatttggttgaacatttctcttaaaaataaaggaaacttgaaaataagagcaaaattgatgtag

SEQ ID NO: 120527 - DNA, 1211 bp, Homo sapiens
ttaaaattgtaatactttttcagttaattattgcatcctataacacatgaaagcattaggttggtagtacgagtttttgacttggcatttcttttataactttttaggtacggcttgttcagaagaaagatacgggacatgtgtatgcaatgaaaatactccgtaaagcagatatgcttgaaaaagagcaggtaaagcacagttgtagcagtgcttttagcttattaatttttgtctcctaaaacttttctttttgtttaattgaaatatatatttttattacagttttctttagctctgtcatgtatgactatatatataatactacctttttccccctacaaagaagcagttcatatttaaaatcacaaataatgcctgtaggttatatgcaatcttttaaaaattgaaaatctgttccaaaagcagctcttacttgtgtcttccaattgatcacaagatgtccttattgtgagagccttttttttttgaggtcgtacgtggtgtggtagtgtgtttcttaccaaatgctgagaaatagaaattgtatatatatctcataactaaggactaggaattagaatttggaatttataatctaaaatgtgtctttatatgcttcattctgtttacctaaaccaaagttgagtcttctaggtagctcatcggtacctgaaaaagaccagccttctaatttctgaatgaatttgaaaaatacaatgcaaatgacagaacaatgcaaattctcctttaatgataaaggatactttctaaaaccaaaacctggtttgcaaatcaatttataaagtgccttatgcaaaataaataaggttttaaatattggaaagtatattttaaaaagcaagaatagactttctataaatctagtttaatgtagctggttgcttaagaaaagattgcagtgggtgatgaccgcaaatgtcctgtaaaagatttgatgttataggaacatggagaccctgtgacaaggagaactcctaatttagggccaaagaggggggatggagattggccccacatccaatcctttctacctcttgagaggagatataatcactggtcttccctgtcttcatttaaatgccaccccaaaatttggaatttttattttctctcaaattttcatgtgttaccgagaagctttagactcccaggaatttcagttgggagtatcaaatacctgggcggta

SEQ ID NO: 120528 - DNA, 1503 bp, Homo sapiens
aacaagggactgtgcaaggaactgaaatggtagtggaaatgccttcaaaaataggactggcttgcagaacccaggacggtggtgaaaaatacccaatacttgtagaaataacagaaagttagagtatacagtgtttaagccagagggaaagataagaacacatttttaatttatattaaacaggataaaggaaaatattgttgattatttatccctcccttcaccaaaaatgttaggatagtggattgctgaagtaggttagtcagagttcccagaggaggcacccatctgttcagtgtggcttggatgttgtgtctaaatgccaggaaagggagaagtgacctcttaaggatccttctggggtgatttcatatgtgaaaagattatccttagtccacttggacctgttttctagctgggtaagtcacaaacatgacttgttacagagtttcagaatttcagttccttcccgtctcctcccttttttatttaaatattagaaacgactccggagatcagcacatgctcggaaggaaacagagtttcttcgtttgaagagaacaagacttggattggaagattttgagtccttaaaagtaataggcagaggagcatttggtgaggtaaaaatcacagctacttgtcaagtagaaaaatattgcaaaacttcaaagcttctaacataccattaagtcatgattgttgatataacaaatatatggaattaaatgagtcaggcatgccagccccacatcctaattgctttgtctgtctgctttctctttttcttctctccgcagtcccagatctctgttctctgttttgccagagatggtgttggtgtttaaatattgacttagggggagagttgaaaggtagaaggaaatcaacatttattatttacaggctgcttttttcccataatcaggacagtaacccattttatagatggtgaaattaagactctaaaggtatatataatgtctcttgttatcacacagccattgagtactgggaccaaaagttgggctctacttcctgaactcaaagagcttgcttttcccagtactgcactgcctctcgagaaggaaactaatagtgtatctccaccctttatttctccccaccagattgatacagctctaaaaagatgaccctaggagggaggatttacagaaaggagttatataggtagtggtggagagttgaaagcatttgcgactttgtccccgcaattcttggaaatgatcctgcttgggcacaagagcaatctgttggggagagcttgaaagagcccatgcaaggtcattcctgttaatgaaaaatgcccaaactggatgacctactgacgcaataattgcaagtataaaaggagcagtatattattaaaacctggtaccccggggccaggcacggtggctcactcctgtaatctcagcactttgggaggccaaggcgggcggatcacaaggtcaggagttcgagaccagcctgacaacatgg

SEQ ID NO: 120529 - DNA, 1026 bp, Homo sapiens
gctcacacctgtaatcgcaacactttggaaggtcaggctggagtttgagaccagcctgggcaatataatgagacctcatttctacaaaaaatttaaaaattagccaggtatggtggcacgcgcctgtagtcctagctacttgggaggctgaggtgggattgcttgagcctgtgaggtggagatttcagtgagctgagattgcgccactgcattctagcctgggtgacagaacaaaactctgtctcctctcctcgcaacctgcccccctccccccgccaaaaaaaagtaggcctaacaaaggatggaaatctttttacttgtcttagtaacttaattttttttgttttaatgagacattttgagatttacctgtttgtgtcatttttaaaaatctactacagtattaagttacagaattttcagaaagttatcattcagatgtgatttcatgtcttttgtttttgtttgttttagacaaaagaagttagaaaaggtgatggaagaagaaggcctaaaagatgaggaggtaattaatattggcaatgttttccttaaaacccagcgtggcaggttgtatcttgtccagtgagttgttagccttggtacacatgagaagggttttggctcaataacagaggaacttgaggggtagtgtgcttccggatttgggtgttaattcagagggacagattaattattaagtacctaggagaggaaggcttctctagatgcagttatagtaaactagatttagaattccaagagaaagcagggatgaaatcaaattaaattttaaaagagcaagttgtagcatttttatagaattcactgaaaagtctccgtaggagtagggcaaatttttgaaatatttatttattttactttttctgggatacatacgtgtgctgaacatgcaggtttattacataggtatatatgtgccatagtggtttgctgcacctatcaacctgtcatctaggttttaagctccgcatgcatgaggtatttgtcctaatgctctccctc

SEQ ID NO: 120530 - DNA, 1580 bp, Homo sapiens
gatatatttgtgtgacttacaggtacaggtaaagttgcttctggttttctggttgttgcatggtatttcctatgcagccacagctctttattttcttacttaagtgcctccaacttcccataacacaaattaaggcatgatgaacatcctctctgtgctgaacatcctgtgtatgtcactttagaagcctgtgtgacggtttctttagtctttatacctaggggtgggatttctgggtcataggacagtaatttatatttattttcactaagtattctctttctctggcttttgttacatattacctgtttgtcctccagaaaacttgcaccaatttacattcctaccaatagggtaggagagtgcacactgggtggattctaactccaaatctaacacctcttcttttctttgtttctagcagccatggcaatgacaggctcaacaccttgctcatccatgagtaaccacacaaaggaaagggtgacaatgaccaaagtgacactggagaatttttatagcaaccttatcgctcaacatgaagaacgagaaatgaggtaaagaattttgtttgaaaaaattgtgtcatggttgtggcattcctttctcgtattgtaaaacacttataatgctgaaaggagacaagaatagtagcagccttattatagactatcataatggaatgacagtgaaagggcttttcaaagtccctgccattaacccacttatgcctacaagtcaataacacaaacttctattgaaatccaagaaaaaaaatgatacttgggaggttgagttgggaggattgctttagcccaggaatttgaggccagcctgagcaacactgagactctgtatcttaaaaaaaaaaaaaaaaaaaaaattaggcccaatccaaggagttgattgttaaggcagagtggtataatggaatagcagcccttttggagtcagacttgggtttagagtcctgccagtttcattgaatagctgtatgaagctctaataagttccttagtctttctgtgaattggttccctcatcaggaaaatggggataatactacttgccttgcaggattgtgttggggattagatataacatatgtgagtatgtaccatagtgtttcacacatagtagtcacttagttaatggtggtagtatcagctattgttattactgatctggtgtatactgtccacttagtaactcataatttatttattggtttttttttttttttgagatcgaatctcactctgttgcccaggctggagtgcaatggcatgatctcagctcactgcagcctctgcctcctgggttcaagcggttctcgtgcctcagcctcctcagtagctgggactacaggtgtgagccaccacgcctggctaatttttgtatttttagcagagacggggtttcaccatgttggccaggctggtcttgaactcctgacctcaggcattccacctgcctcggcctcccatagtgctgggattacaggcatgagccactgcttggctgtaactcataattaaaaaaaaatttttcccaatattttactatgaaagtattcagaa

SEQ ID NO: 120531 - DNA, 2352 bp, Homo sapiens
ggcttttccttcagtgtggaatctaggcggccacagtctggtgccagctgggtcacaaacagctccgtgacctgtttgtaaacgcgatgctcttagttccagactaaccgctcacaagggtgaagcacttaattaattcatctcttaatcttgttaggggccaacggctcctattagtgtttgagcgtgacggcgacggtgctgtttatgaagccctagcctatttggaggtgaggaagaggagtctgtgggtaacctggaggtcgacagaccgggaggaacgctcgagggagcaccaggcctgttacaacgagcgcgcgccgacgcacgtctccacccacccggcgcaaccgccagagcgcgctcccagcaaccgcggctctcgctgcgtttgtagccatacgtcacggcctcttctgcttctcattgggggagcccgtccaatcatgtgattccagtatggcgtataaataaaggcgaggagaaggcggtggtccgccatttcgtggacgccgggtgagtgagagagttggttggtgttgggccggaggaaagcgggaagactcatcggagcgtgtggatttgagccgccgcattttttaaccctagatctcggtaagagaccagcgaaagagggaatgaggtggaaatggaatttaacagtaccaaggagccaggcccaatggcggcgccagattgagacaaagaggcgccgccgccattttgtgacgttcagcacggggcggtggcgggggctcccggcccatcggagggtttcctagtcttggagtggaagtctttatattcctcattggggcatgagccaggatgggggttacctgggagttgggaaccacaaaggggagccgatagccgagttgtattccaggtcacggcctttttatttttatggcgccttttttttttttggcccctcatttaattgggaagcttctcagaatgtttttgtaaagtcactaaccaagaccggacctttcagttcatattaaatggcccccgtagtcaccttactttcatgtagtttcagattttgcagcctgaatctaatcacctttttctaagaccgaaagatcttccttgaacttaagattcgttctttcatcgcttcccattaaaatggaggcttaagacaggtgccagcagtgtttttaaaaattttcaccagtggtttggtcttagaacttactcctgggcacagggtgtggtcacggcaaataggatgtgtctggactggatattttaattagacaagcccagagtaagaagaacgtggtgtttatggaaagcacttcagctgaattattgagtagatggtttttatgtaattgaaactggtctacaagtttatcagattcatcgtcgaagtgactcagtaataaagctttatcaaatacaagtccgccaaggaagaacaaaaaaataagtccccaaagtgcagtaaattttttagtagcaaatatctctttgtaattttttattaaagtgaaattatctttaagtggtatttagtatattcagtgttgtgtaatcatcacttacacgtagttccaaaacatttccgtcacctccccccgcaggagactactacccattgagcacttactcccagattccctgtcccccttcctctagtccctagcaaccactaatcttcctgtctctctgaacttagctattttagatatttagtatttatggaatcgtgtacttttatgtctggcttctttaacttagcgtaatgttttcaagattttccaacgttggaggatttgtcagtacatcattctgaataatactcattttatgtctataccacattttgcttatccgtttctgttgatggacatttgggttaacatctttgggctactgtgaataagtgctactatgagtttacattttttaaaaaactgtaaagttggtctcgttgcttgataaatttttaccgcgtaagactctggtctatctaatgacatttgatactagccttgttcctatagttccaaatgaccaaaataggcatttatttatttatttatttgtggtttttttttggcgatggaatctcgctctgtcgccgaggctggagtgcagtggcgcgatctcggctcactgccacctccgcctcgcgggttcaagcgattgttctgcctcagcctcccgagtagctgggactacaggtgtgcgccaccatgcccggctaatttttgtatttttagttgtgacggggtttcaccatattggccaggctgggtcgaactcctgacctcgtgattcgcccgcctcggcttcccaaaagttctgggattgcaggtgtgagccgccgcgccc

SEQ ID NO: 120532 - DNA, 3449 bp, Homo sapiens
atcctatttgtttaatttgaaattaattgaaattttaatttgaaactgggaaacaagcttattttatttttcaagacagagtcttgctctgtcccccaggctggagtgcaatggtgtgatcttggctcgttgtaacctctgcctactgggttcaagtgattctcctgcctcagccgcctgagtagctgggattacaggcatgtaccaccacacctggctattttttgtatttttagtagagcgagggtttcaccacgttggccaagatagtgtcgaactcttgaccttgtgatccgcctgcctcggcctcataaagtgttgggattacaggcgtgtaccaccgtgcctggccaaagctcattttatattagtaaaaataagggagctagaaatttgatgttaaattgcacagacacttaggtgtgttctttgcagaatagccaactgagagtacttttggctttaatacgcatgtcagaaagtcaggctgttttaagtttaatatctttgccccctcagaacactatgtggctgccgtgtaagagtggaactgtcgaatggtgaaaaaagaagtagaaatcgtggcccacctccctcttggggtcgtcgccctcgagatgattatcgtaggaggagtcctccacctcgtcgcaggtacttgagagaaagcttgttaagaggtattggtgtaatggagtagctagtaggagcaggtatttctcttaagtttgttggtgggttttaaactttggaagaatcggaggtttctgtgaaacatttgttgggtgtaatttggggtatgtgagttgtgctgagtgttggcttttgtctttaggtcactgttcatgttggtagtcagtaacttctatcttggatctgtcttctagttcatctttctagttgcatctttccaaatcttcccttatacttcagtttaggcctttttccatttcttggctccataatgacaaacattacattcaactctagctcttcacaaatttgtgttttctactattagcacaattgtaatatttatcaaacaggcagctgttttaatgttacaactggtaaagtagaaatcattctgagactaacttaagtcactgaccaataaagggggctaaaaaagaagtaatcccagtcatctgttcttcaatcccaaataggagaaaattcagtttttttataattgaaaatggcatcattcttggaccaggcagtattgtctgggtgctaactccacatctcctcagacctccaaaatagtttctataggactaaatttacctcttacaggtgagtggagtccttctaggagacaggagttcaaaatcttgccccttttgctattttgaaaaacaacagcacactgttgcccatcataataaagagtatttgttagctaatagatggttgtactgatggcttgtttttcattttttttgtgctttttggtccatctattaataaaaatgaaccccgttacagagtcaccatcatgtctcttctcaccaccctctgaatctgcattagccagtcaactagccctttcagcgtcatgtgaccagcgcgccccattcagcttggctggtgtcgtttcacatgacccaggctggccagtcgtcaggttgcaccgccctttggttcccgagcatgctgttttctctcagccttctctccaaccttaaccaaatcggcagcagccacctcgaccgcccacacattcctggccaatcagctcagctgtttatttaccaaatgtcttcacaacaactacagcagcagccttcggctaacaaaaaagcaggaaaaatccacaacacccccttcgccaaccaactaaatccaacgcaacatctggcaaaaccttttcagcaaattcttcctggccgtcagtccggcagcctcacctcaccatttctagcttgttgaaacccaaaactagtaagtttttcctgcttatacagtttactgctggttaaaataaggagtaagcggcttaaagtaattcttttttctggatcaaaggctggctgtgcataattgaatggtaacgtacatatatattgcttgaaaaacttttaagggtgatagggaactcgtaatgtaactaggccttcaagtgaaacttatttgcatgtgcaagatgccaaactaaaaattttaatatctctaacagattagcttttctggcaaaaatttgttgaatcctatcacctttaaatggttttactaacagtttcaaaatttaaaattttggggttgaagtgtgggccaagctaaggtaattttggtaagcctaaacacactcttaaatgtgacgatcacaaatgcagttctaatgtagcacttaatggcatcaatatttacacctaccgcgttttcacaaaattacactatccacctggtacctaagtcttgtcatggacttacaggtttgcatgggttccaaatactggtttatggtactgtttttggaactacttgtgggactatattttggtgtggtgtttgggtagtgaagttagtttgacatgaagttttgcattggacagatctgctgtgaagcattctttgttaaagtgaatccatggttggaatacctgcttttcacttgagctttttgtttcttaatccttctgtgccttttttttcttttcttttttttctttttttttttttttttttttttttggacgatgggtgccagttcttcggcacattcactgggcccaacagtgagattgaaaagttgggaaatgcctcacgccataaatactaattgatgatgagcctaattttcctgtttctgcttttagatctccaagaaggagaagcttctctcgcagccggagcaggtaaatgactaccttttttggctacgttcttagaaatggcagtgtttctgctattcctaaacttttccaggtggcttagttaatgggaataaaccttggctttaatagtgaatcaagttgtaaggatgagtcagctttctttgagttttcaaaggctttttagaaagtatttaattttttaaaaaaggatctgtcacccaggctggagtgcagtggtgtgattatagctcactgtagcctttaactcctggccttggagtgatcctccctcttcagcctcctgagtagcttggactacaggcaagtactgccatacctggctaatttattttttgtggagatgggatctcactttgttgtccaatctgttctcaaactcttggcttcaagtgagcctcctgcctctgcctcccaaaatattggaattattggcatgagtcaccatgccagatcaagaaaatatttatgtataattttatcatacctcattggtcctaatgtttttttgcttgtttaggtccctttctagagataggagaagagagagatcgctgtctcgggagagaaatcacaagccgtcccgatcct

SEQ ID NO: 120533 - DNA, 1284 bp, Homo sapiens
agatgtaatgttttgttttctttttttttttttttttttagtcgatctaggtcaaatgaaaggaaatagaagacagtttgcaagagaagtggtgtacaggaaattacttcatttgacaggagtatgtacagaaaattcaagttttgtttgagacttcataagcttggtgcatttttaagatgttttagctgttcaaatctgtttgtctcttgaaacagtgacacaaaggtgtaattctctatggtttgaaatggatcatacgaggcatgtaataccaagaattgttactttacaatgttcccttaagcaaaattgaatttgctttgaacttttagttatgcacagactgataataaacctctaaacctgcccagcggaagtgtgtttttttttaaatttaaatacagaaacaactggcaaaaattgaactaagatttacttttttttccatagctgggatataggctgcagctatagttgaacaagcagtctttaaaaactgctgtgaaacacaggccatcagggaaaacgaaatgctgcactattaaattagaggtttttgaaaaatccaactctcatcctgggcagaggttgcctagttggtatagaatgttaagtttcaagaaagtttacctttgctttaggtcataagttccttatttgattgctgtatatggatacatggctgttcgtgacattctttatgtgcaaatttgtgatttcaaaaatgtcctgccagtttaagggtacattgtagagccgaactttgagttactgtgcaagatttttttttcatgctgtcatttgtaatatgttttgtgagaatccttgggattaaagttttggttacaaattgttctttaacttgaaagcctgtttttccttgcaaactcaaatctgtgagcttggtaccaagtccaggtataacattcctattggaagccatacttatattttcttgtaaagtgcttttgaattaataaaatattagcataattgtgtatagtcagttgaacccactgttaccattgttcttatcccatgggaagcagttggttacacgattcttattttataagaaacagctgagaggcactatggattagtcttctgaagtgaaggaaatatagatgtcacctaagtgatagttaacccattttttttttttttaggcatagaagccagttcagggtccataatatttagtgaccaacattttaaagtatagcagcaacctggttcttaaacacaaagtaagttgcccattaacaaatggcttttatc

SEQ ID NO: 120534 - DNA, 1042 bp, Homo sapiens
ttaatttttagtagagaccgggtttcaccatgttggccaggctggtctcgaactcctgacctcaggtgatctgcctgcctcggcctcccaaagtgttgggattacaggcgtgagccgccgtgcccggcagactgatcattttgtgatatctccttagagcagattcctagacctggatccctgggtcatagcatgcacatttccaggcttttgacctgttctgccaaactgcccctgaattaagtcaaacccacttgtccccctgtccccactggcagtgtgggggcccctcacttctcatgtccttacagccaagggctctcagctctttccaactcaggccctgtgaggacattcctctggaatacctcttttaaaaaatacagagcattaatattaactagctgtatactagcagacgtgcaatatgtgtctgcaagttgaactgaaagggtgtgaaaccaagtggacgagctcctgacctgagaagaacagttgtctccttgctgccctcctggcttggctggggggtgcagctactgcccatcttccctccctggagccaggtggacggaggggcatgggtgggcagatggaaagggagatgaagggtcgcagggatggcaactgtgtggtgcgggcctgtggagggaatctttgattggacagctttgatcccttccgccacattccctttcctggcagaaatacggctggggtggggggtgggctgggagtgtgacaacgcccccatctcttccccttagatgtctgaagagccaacctgccactcctgcattccaggcatgtcaagttggcattccaaatgctaggggtggcagggaggcatgtgagcagctggagggggggcatcggaacccgcttcacaagcatgtgcaactgctacttcagtgtctctagagagcagagaaccctacacgatgtctgcaggacggggctgttcccgcctcacccctgtcttatcaaacccccttactgggctttccagctttccaaacactttcttttttttgagacgggg

SEQ ID NO: 120535 - DNA, 1037 bp, Homo sapiens
taataataactaccaaccaggaaaaaaaaaaatcacccctgactgtggagcgtgctgctgaagtaggagctttagtctacctgctgctctaggagagacctacacagccccctgagctcagaaaacaaaaagccagactcccagactagggttcaatagacaagtggctctgagaacaggatacactggaatcagcagaatccaaaagacaagcattgctttgacagcatcacagtaatttattttttccaaaatctttaaaattctatttgtagtttagtcaaaagtgcagagcgttttgtttgtccatagtttcctgtatttattttttcagtagataatacattcacatggtccacagtcaaaagatgcaaaaggctattcagtgaaaactctccctcctacccctaccctccagctacccattttcttcccagaggctgtggctggtggcttgtgtccccttcccacagatagtctaagaacatccaggtccttcagctgaaacccttgggcacagatgggttgcagaatctagaacttttcccattttagacaggtaataaagtgcatacagcctgtattccacaacaccagcgggctccgcccagggtgagcagtcagccagtttgccccagactgttccagttccatgtccagggaaccccttcaatcccaggcaaaccaagacagtaggtcctgctagctgtgggctgtaatgtattcacactaacagggacaattaaaaactgcaaatggcttcacatccttttagctctggttttgctaccaaataaatttgccacaaaccaaagaaaaaagttttggtttccagagccttttggatttgggaattgtggatgaggggctggggacctatacacaatatacatatatatttttaatctgcttgaatggaaacacagtgttgggcacattgtttttgcactcaatttatcttagtggctttccacatcagtacatagaaatcctgccctttcctttttactgctgcattggacttcaacacacgggtg

SEQ ID NO: 120536 - DNA, 1004 bp, Homo sapiens
ggggctcattctaacagtgctgtgtcctcctggagagtgccaactcattctccaagtaaaaaaagccagatttgtggctcacttcgtggggaaatgtgtccagcgcaccaacgcaggcgagggactgggggaggagggaagtgccctcctgcagcacgcgaggttccgggaccggctggcctgctggaactcggccaggctcagctggctcggcgctgggcagccaggagcctgggccccggggagggcggtcccgggcggcgcggtgggccgagcgcgggtcccgcctccttgaggcgggcccgggcggggcggttgtatatcagggccgcgctgagctgcgccagctgaggtgtgagcagctgccgaagtcagttccttgtggagccggagctgggcgcggattcgccgaggcaccgaggcactcagaggaggtgagagagcggcggcagacaacaggggaccccgggccggcggcccagagccgagccaagcgtgcccgcgtgtgtccctgcgtgtccgcgaggatgcgtgttcgcgggtgtgtgctgcgttcacaggtgtttctgcggcaggtgaatgacgggcgtgggtcggtgcgcgctcggcttgcgcacacggtgtctctaagtgcgcgggtgacgagagtcgggatgtgccggagaccccggggcggagagcgggattacaagtacaggaatccctggtcacgctccccgcccctggaaacccagctggggcgagggagggcgtggacgggaccgttctgggagctcgcctttggctgcggttggctccaggccccaggcgcagtttgctcgcggcgtggggatgaagtccgtgtccctggaggggcccaggaagggcgaggaaagcggagtggagtaagttcgtctaggatcggtcccgggtggctctgggatccaatctgcgccgccctggcccaggtcccaggttcaggtcctttacgccactgtgtccaccacctggctgagcgctgaggt

SEQ ID NO: 120537 - DNA, 1037 bp, Homo sapiens
tgctcagggcctctatcagctgcctcgggggctcagggcttcccgacctagcccagattccctctccgaaagctacagggctgagcggagcaggggggcgagtcgccccctggggcgccgccgcctggcgcggaccacagcgcgtcctctccgtcccaaacccctgggggacacttgcgccctcttcgtgaggaaaagcatcttggagctgggttaggaacttggggcgcccaggcagcttcccctctccttgcctccctccacgtcgcgtttctgggaggacttgcgagcggttttgttttcgttgctcccgtctatttttattttccagggatctgactcatcccgtgctttgggcgtggagataaggtggaggggccggctcccggcgcgcgcgcgcgtgcgtgtctgcgcgggcgtgtgtgtgtgtgtgtgtgtgtgtgtgtgtgtgtgtgtctgtgtcagagacggcacaagagcgcgcggtttcccaacagcggcgggagtttcggaagcctggccggctcagcgtgacgtgttcgcggccccccggtcccctcccattctccccctccccaccccagggtgacgcgcagccggagtggaagcagttttggcgggcgagcagcgccttgcaggaaactgactcatcactactccctccagcggtccgaggctctgcccacgcacctcccactccgcgcgtgatttcctggaggccggcgccccctcccggccctggcgggaatagcacacaggctttcccgcggagtggggctggccggcgcgaaccgccgcggctactcctgggctcatccgagatcaacccctatgccattaccaccccttcaaaggagcactccttaggttcaacagtattcactgagctcttactggaaattaaaatatggctgaagtctaaggcaggaaggccaataaaggaggctatttttaattgtttctaaaacaagggtttgcgtttctgagttttctttgggctgaaagttattatgagcatgagagcagattttgatggg

SEQ ID NO: 120538 - DNA, 1054 bp, Homo sapiens
ttttttttttttgagatgcggtctcgctctgtcacccaggctggagtgcagtggcgtgatctcggctcactgcaagctccgcctcccgggttcacgccattctcctgcctcagcctcccgagtagctgggactacaggtgctgccatcatgcccggctaatttttttttgtatttttagtagagacggggtttcaccgtgttagccaggatggtctcaatctcctgacctcgtgctccgccctcctcggcctcccaaagtgctgggattacaggtgtgagacactgcacccaaccacccagctaatttttatttatttttatttttagtagagacagggtctcagctagttgcccaggctagtcttggacccttgggctcaaatgattctcccacctctgcctcccagagtattaggattacaggcataagccactgcccctggcctccccaagtgattgtgatgggcctctctggttaagaaacctcaaaattagagagggagtggggttcaatactacagcacaggactcagggcaaacaggcctgggttcagatcctggctgtgccacttatgaactgtgtgatgttaggcaagttacttaacttatctgagccttggttgcctcttctgtaaaaagggagctaatagatatccactttttaggaggattgatatttttaaactgcttagaacagcccccaaacataaaaatatataaataaatcccaactcatgcctagcagagggtggatagaggttatttgagggctctgtccactgtactgggtgacccctttatggggcagtggcctttggcctttttagctgtatgactcaggggcaagtctcatatctcttccatctcctgccctttaaacttggtgtgaagttaccaagagcctcctctcccaaccagctgggacgtgaaactgtgggctccactgatcacaagcagtggggtgaggtggggtggagcagatgtggcatgtgtcccgggcttcctgcctcatgaggactcagcagagctttcacccccagaaactgcaagttg

SEQ ID NO: 120539 - DNA, 1170 bp, Homo sapiens
gcctgcaaaacggtttccttggacacaggcaacacgaggcaggggctgccaggtgtctagacttcagatcacctgatgtgcctggcaggatgtggctcagcctgggagaaatcatcccttgcgctgccccgcccggcccctccttacccctaggccacccgcctgacgacatccttgggaaaggccctcagcctacagcacctgtcagctgctgtctgaaggaggtagttggcagggggaagtgataggggggaggctcagtaaaactgaaggcagagaggaataatcatacttctgttttcaatgcacttctctatacgaagtgctgctggcacgttacctacattaactcagttaattctcatgtctatcctctgagacagtcactattactatccccattttatagatgaggaaactagagctcagacaagttaagttgcttgcccagggtcacctagtaaaacctggactccagcccaggtgatctggctccagagccctcctgcttaaccaccaggatacagcctttcattcagctctgttctgtctgccttgctgcatggactctgtgatcaatttcttgagtatgtgtctgtagccatgctctttaaacttgtacatggccccatttatggatgaggaaactgagacctagagacattaagtggctttttaaagcttacgtagtaactggcagagctaggaccacaacccgggtgctttttgccccaaagtcccgggtacttttacttggcagagcagggttaccctacttggggatctgggtcgggggacttaggaggctggaggaactgtcagactgtttcttcttttgggaattgaccttctggccagggctgcgattaggaaactgctggactctggcaattcacacatatttggggggcattcacacccatgagggacacctctggggggaaaacaaattgattttagctgataatacctggtggcaaacaggaccctggtccttgctcttgcaatagacttgcctttgttgacattagcttgcccttcagttgcctgctctcccagtgaccttggtgtgccaggctggctgagctctgctggtgggggtcaggcctcctgtgggaaggaagcaggaagaccagctggaaggagtgagagagaccctctggtaggaag

SEQ ID NO: 120540 - DNA, 1549 bp, Homo sapiens
tcattttatttgattgtagtctgtttaaacaagcacacagagctagtagtggttcctctgctgggcagcttgacttagagcagacccatgggtgcgggtgcggtgatggataaaatcacatctgtgaagcatggtgggacactccataatacccctcaagagacagagtggacgttccccgagttcttcctgttctcagcagtcggccccattggccccagggaagggtgtcctggccccccactgtcttcctcagttgggcagctccgccgcgtcctcttcttcttggcctggctgacttctgctgtctctcctcagatttctaccactccaaacgccggctgatcttctccaagaggaagccctaatccgcccacaggaagcctgcagtcctggaagcgcgagggcctcaaaggcccgctctacatcttctgccttagtctcagtttgtgtgtcttaattattatttgtgttttaatttaaacacctcctcatgtacataccctggccgccccctgccccccagcctctggcattagaattatttaaacaaaaactaggcggttgaatgagaggttcctaagagtgctgggcatttttattttatgaaatactatttaaagcctcctcatcccgtgttctccttttcctctctcccggaggttgggtgggccggcttcatgccagctacttcctcctccccacttgtccgctgggtggtaccctctggaggggtgtggctccttcccatcgctgtcacaggcggttatgaaattcaccccctttcctggacactcagacctgaattctttttcatttgagaagtaaacagatggcactttgaaggggcctcaccgagtgggggcatcatcaaaaactttggagtcccctcacctcctctaaggttgggcagggtgaccctgaagtgagcacagcctagggctgagctggggacctggtaccctcctggctcttgatacccccctctgtcttgtgaaggcagggggaaggtggggtcctggagcagaccaccccgcctgccctcatggcccctctgacctgcactggggagcccgtctcagtgttgagccttttccctctttggctcccctgtaccttttgaggagccccagctaccctttttctccagctgggctctgcaattcccctctgctgctgtccctcccccttgtcctttcccttcagtaccctctcagctccaggtggctctgaggtgcctgtcccacccccacccccagctcaatggactggaaggggaagggacacacaagaagaagggcaccctagttctacctcaggcagctcaagcagcgaccgccccctcctctagctgtgggggtgagggtcccatgtggtggcacaggcccccttgagtggggttatctctgtgttaggggtatatgatgggggagtagatctttctaggagggagacactggcccctcaaatcgtccagcgaccttcctcatccaccccatccctccccagttcattgcactttgattagcagcggaacaaggagtcagac

SEQ ID NO: 120541 - DNA, 1008 bp, Homo sapiens
tccccccactgcctaatgtgggaacccaagcaaggcccttctaccttttgggcctcagtttccatgtctgtaccacaagagggttgaccagatggccccaggttttcctttaggtctgacatcctgagggtcattcatcccatgcccagttccccccatcctactcctaacagatgtgaccctacttgaggccgccttggcttttgggtcaccctgtctcatcccatcaccccaaacataccctagtccttcagcctggggctctggcatctgagcccgagctcctgcccctgctgtgggaaaggtggggaagaaggggatctccctcccgggcccacccagctgcccagcctttgcccactcggggagcagatcatgcatgccaatccctgttgccgcatggagctcctcagcccactgacctctccgtgcctggtgcaggccaggcccccgtcttccgcctgcctctgcttccccgtcatgcatggtggtggtgtttctacggtgtctggttctgtgcccgtctctgagacagtctctgtgtggaatttgccttaaactgaagtaaatttggttcttttagtaaagcacgaagtttttctttcttctctgaaaaatagcactgacgttgctgcttgacagggtccagttctcctctgtggcttccttcaattgtttgcttcagtgagatttacaatcaaaggccacgtgccacgctctgtgctaggcattgaggatgcagccatgaacaaagcacagaccctgtccctgcacagggcttacaacacacacacagataatatgggagagacccagcaaacacatcaacaaataggctagtaacatcatttcaggtggtagcaagagttctaaagacacatgagggagaaggagggtgatgttttcgatgaggtggtcagagagggcctctcagaggaggtcatggttgaggtgagcccccaggaagtaagacagggagccacgctgatatctggggaagggagctct

SEQ ID NO: 120542 - DNA, 1042 bp, Homo sapiens
attgaaaatgtctaaaaaataagggcactttcccacttacccacaaatgccattatcatacttgacacattgaacaatattctttttttttttttttttttgagatagagtctcgctctgttgcccaggctggagtgcagtgacacaatctcagctcacagcaacctccacctcctgggttcaagcgattctcctgcctcagcctctggagtagctaggattataggtgtccaccaccacgcctggctaatttttgtatttttaatagagacggggtttcaccttattggccaggctggtctcgaactcctgacctcaggtgatctgcccgccttggcctcccaaagtgctgggattataggcatgagccaccgcgcccggccacaatatttttaaataccattcactattcatttcatattcaaatttccccagttgtcccccaaatacccttgttcaaacaaggatccaagtagaagtgggtgctgttcttccagggccctgctctttactgggtgacaattgggtttcttcctctgtgggcaacactgggctctcttcccacggacccagcctgtctgctggcgtgtgcccctggagtggagtcccaggtagaattgggagccaaagaaacggatgtgtgcaaggctggggctgggcagaggcagggcacagcctggccttggtctcagcagccgtcttcccttgcagccatgacttcattggggagttcaccaccagttaccgggagctggcccgtgggcagagccaattcaacatctatgaggtgaggtgggcacccgaaatccagggtttgcactactaagtggcccagtcactgaggactgtagtgagccatgcactgggctgggggcttggtgtgttttcctgtgagaaaggggttattgtcccattctaccgttaaggagaccaagtcttggagaagtgcgagaacttgcccaaagttccaccattcagtaagtggcaaaatcaagacacaaacaacccagacttggctgattccaaatcaccgagttatagt

SEQ ID NO: 120543 - DNA, 2307 bp, Homo sapiens
gcctctcacaaagttctgagcaattcagagcactggtcggtgtgttctagactctaactacttgttaaaggtcacaggatatcaaaagtgtcctcaaagaaacaggaaaccttgctgggtttttgagggcagtcaggaacatggtccacagttagtgaggagcatcaggggtcaaggctggggaataggtgaggacaaggaagatgaagtcgccagaatagtgtagtgatggcctttgtacagggcagagagactgccctgaggggttgtctgggtctggacagaggccagaacaaagtcctggctgctttttcatccctaggatggggcagcagctctacactggacctgtggggttatttatactctttcctttcttcctttttcccaccaggggctggaattctcgcaatggccaatgcggggccagataccaatggcagccagttctttgtgaccctcgcccccacccagtggcttgacggcaaacacaccatttttggccgagtgtgtcagggcataggaatggtgaatcgcgtgggaatggtagaaacaaactcccaggaccgccctgtggacgacgtgaagatcattaaggcatacccttctgggtagacttgctaccctcttgagcagctcttctgagatggccccagtgaaccagcttctagatgacatagaatgacatgtaatgctaaattcattttggctttgcaagtcatgaagcttaggaggcctggcatcttgggtgagttagagatggaagtacattttaataggatgcttcttttctcttcccccagtgcctaggttgccagagcatttgcacaaatgcccctgtttatcaataggtgactacttactacacatgaaccataatgctgcttcttgtgcatgtctgctctgatatacgtcgaacaatgtagcagccactgtcatttctcagtggttttgcctaaccaaacttcttcctaaggagatttatattctggcctacacagcagtccttgatggctgacagccacagaattccaaaccaagtagtgtctgtcagccctcttaactctgtgcacgccctatttcagtcttttacatttgttcttctagggaatgtatgcatctctatatatattttccctctcaaaaccagaacatcaacagtgctgtttctgacacttcagacatcccacgcaaagccacattgaatttttgccaaatgaaaaacacatccaacaatcaagtttctaagaaggtgtcaagtggggaataataataatgtataataatcaagaaattagtttattaaaaggaagcagaagcattgaccattttttcccagagaagaggagaaatctgtagtgagcaaaggacagaccatgaatcctccttgagaagtagtactctcagaaaggagaagcgccactcaagttcttttaacccaagactttagagaaattaggtccaagatttttatatgttcagttgtttatgtataaaaataactttctggattttgtggggaggagcaggagaggaaggaagttaatacctatgtaatacatagaaacttccacaataaaatgccattgatggttgaaattgctgctgtggtctgattctaaatattgtatgaggttccaatggtcattttaatcccagtcatcttaagtagtagtacagagattgaatgttcaagatttcacatcattttaggcttgtggatctccagtagacttctccctctttaagagcaattctaactttaaaagggcagaaccagagaaagaattaagtgacagaaattgacatttctgaataagaggtgtattcatctgttttcacattgctataaagacactacctgagactaggtaatttataaacaagagaggtttaattgactcacagttccacatggctagggagacctcaggaaacttacaataatggtggaaggcaaaggagaagcaagcaccttctttacaaggtggcaggagagagagcgagcacgggggaaaccaccatatttaaaccatcagatctcatgagatctccctcactatcgtgagaacagcatgcagggggaaaatgccccatgatcagtcacctcccaccagatccctccctcgacacagaggattacaattcgagatgagatttgggtggggacacagagccaaaccatgttggggggattacctgtaagtgaaccaggtgtatgtgctaagagacctgcaccatccctggaatttgcagagagcccacctgcacattattatgggaccagaggcagtatatgttgtggtg

SEQ ID NO: 120544 - DNA, 1051 bp, Homo sapiens
atccacaagcctaaaatgatgtgaaatcttgaacattcaatctctgtactactacttaagatgactgggattaaaatgaccattggaacctcatacaatatttagaatcagaccacagcagcaatttcaaccatcaatggcattttattgtggaagtttctatgtattacataggtattaacttccttcctctcctgctcctccccacaaaatccagaaagttatttttatacataaacaactgaacatataaaaatcttggacctaatttctctaaagtcttgggttaaaagaacttgagtggcgcttctcctttctgagagtactacttctcaaggaggattcatggtctgtcctttgctcactacagatttctcctcttctctgggaaaaaatggtcaatgcttctgcttccttttaataaactaatttcttgattattatacattattattattccccacttgacaccttcttagaaacttgattgttggatgtgtttttcatttggcaaaaattcaatgtggctttgcgtgggatgtctgaagtgtcagaaacagcactgttgatgttctggttttgagagggaaaatatatatagagatgcatacattccctagaagaacaaatgtaaaagactgaaatagggcgtgcacagagttaagagggctgacagacactacttggtttggaattctgtggctgtcagccatcaaggactgctgtgtaggccagaatataaatctccttaggaagaagtttggttaggcaaaaccactgagaaatgacagtggctgctacattgttcgacgtatatcagagcagacatgcacaagaagcagcattatggttcatgtgtagtaagtagtcacctattgataaacaggggcatttgtgcaaatgctctggcaacctaggcactgggggaagagaaaagaagcatcctattaaaatgtacttccatctctaactcacccaagatgccaggcctcctaagcttcatgacttgcaaagccaaaatgaatttagcattacatgtcattctatgtca

SEQ ID NO: 120545 - DNA, 1040 bp, Homo sapiens
agagaacagcagccagaggccttagaccagagtgtgcctggcaggaaacagcacaggggccagtgtagctggaacacctgagagagtggcaggagatagctcagagagtagcagagtgcccaatcgtggggggtgttgtaagctgtggtgaggattgtggattttgttctcagagtgatacagtgttgatggagggtttcaagcaggggagtgctgcgattaggcttgtttgaaaaggatccctgtggctaccatgtgaagaatagagggtggggaaagagggaggcaaggctggaagcaaggagaccagtgggaagcttttattcctattcaagctggagatggttgttgtttgaactagggtgatagcagctgtgttagttctggtcctctgggaagcaaacaccaagatagaggtttattgggtaacacctgtgaaagataaagggtcagggaaccaggtttggaagggaaggtcttcacacagcagcgcaggcctgagtaacacctgtgaaagcagaggggcggaggaggagcagctgccagtgagcagcgaggaacaccaggagaatgtggagtcgtggaagccaaaggaagacagcaactcaagcagaagggtgacatcgagtgtggatcaagtaaagtgagtgctgaggattgaccactgggtataaccacgtggaggtcactggcgaccttgacaagagcagtttcagcggagcggtgaggggcgaaagtctgaatggagcatgttcaagcaagaatggggagaagtagagacacttggtgttgacagctttttcaaggagtttttctgtgaagggatgtagagaaataggaggatacttggaaatagagttttgctttttaaaataggaaatatcaataacatgtttaaatgctgacaggaatgatccattagaaagagaaaaattggtctactagagggggaggttgtagttgctgagttctttaaaggtgagcgggattgggtacgtggtggtaggatagtcatggacagcttattcacacagtgtctt

SEQ ID NO: 120546 - DNA, 1057 bp, Homo sapiens
aaaagtttttaaaaggtattcattaaacatcttcctattttccatctacccagtccctacccccacccagaaacttctaaataaatatgaactcctgatattttaatgtctctttttttaaaaaattaaaaattaagtgtaagaatttttttcctaatttaggggttggttatattggtttcagataatcagatatagctatatatatatacatatgtatatatgtatagtattagaattttgagttctccatgcttgttattttgctgaaaagaagtacccagaacacctgcgtgttttactcaaaaaagataatgggtgtttatgttacttgcattgtggtgttttcctttgctgagcatgaaatccagtggttatcacaatttcatgacttacaagcttgaaaatcaagagtcctggagcagttccataatactcctgtctgccctgacctttttgtttactggagctgttgtcctctccctctgcagcatgggaatcattgtgctggagctgtactggaagcatgctccaaagacctgtaagaactttgctgagttggctcgtcgaggttactacaatggcacaaaattccacagaattatcaaagacttcatgatccaaggaggtgacccaacagggacaggtacagttaagccaacattagtttatgttttcttttttttttctccttttcgtctttttttctaaagccagcattagtttctgaagtctctgtcgtaaataggtgataaggcagccagagctctcttttccacttactaaggtctgtgttggttgattctggtgacaacgcctgccttcctcaaacacacatgtgtggaattgaccagaaaccaacctttactcctaggcttggtagagtttttcataacttacatgtactgctcactaagaacaaataatatttgtctgaattatagtgatgcaagtagtctgatcaataagaaggaaagactttataatattttgagaataataaaatcctgggttcttttatcgattcattcatttaacaaatactgagtacctgttt

SEQ ID NO: 120547 - DNA, 1016 bp, Homo sapiens
ttttttttgagacggagtctcacactgtcgcccaggctggagtgcagtggcgtgatctctgctcactgcaagctccgcctccccggttcacaccattctcctgcctcaggctcccgacctctgcatttttaaaaatgaataaaataataaaacataaaatgaataaaccatgagccacgagttacattcaattagttcggaatgataattttaggtcctttctataaatttgttcaacattgatctgattccacatctgaggtgaattcccacgtctgttcttagttttttgtgttttctccatttatctctgctttcaagaaacactatttagggtgggaggtagacaggaaaatagatgtaatgccaagccctagaggtgcataggacaaaaactgaggtcagagtcttaaagagttcacttattggacaaagcactggagactaggctttttaggcagaggaaattgtgtatgcaaaagcaaaaagatgtgaaatagtatgacagtgtagaatgtgaagaaggattgatgggaaatgaaactgaacaggtaggcagtgaccagatcataaagggccatggtaagtaatttggactttatcttttaaaaaagacaggaatctcattccatcacccaggttggagtacagtggtgctattacggttcactgcagcctcgaactcctgggctcaagctacccctcacctctgcttcccaagtagctgggactacaggcaggcaccaccacactcggccaatttttatttttattttttttgtagatacagggtcttgctatgttacccaggctggtcttggaagtcctgggctcaagcagtcctcccacctcagcctcccagtgttgggattacaggcatgaaccaccatgcttgacttaggactttatcttaaaatgattgttattaggtatttaatttgtctggctattggaacaaatgtgttacatcattttataattctctgaaataaaacattgtggggtagaaataatta

SEQ ID NO: 120548 - DNA, 1054 bp, Homo sapiens
caaagtgtaaaaaggtatacagagaagagtacctctccttcctgctcctgtcctctactccctcctcagaggctgcttcatatataccttaccttttcagcggtctccagtgcttatcattgtttgtttttaaaaattattatgggctggatgcggtggcttgcgcctgtaatcccagcattttgggaggccaaggtgggcagatcatgtgagcccaggaattcaagaccagcctgggcaacatggcaagaccccgtttcaactaaaaatacaaaaattagccatgtgtggtggcatgcgcctgtagttccagctcctcggaaggctgtagcaggagaatcccttgaacccaggaggcaggggttacagtgagctggacggcaccactgcactccagcctgggcgacagagtgagactctgtctcaaaataaataaataaataaaagtcattatgatgtctttcctttcttgtttcattgttggagctactggatgtaccagctatgctctttcagtatctgttttctccatatcccttcctctctcagactttgacccctggtggacaaacgactgtgagcagaatgagtcagagcccattcctgccaactgcactggctgtgcccagaaacacctgaaggtgatgctcctggaagacgccccaaggaaatttgagaggctccatccactggtgatcaaggtgagcagaagcctgagtctcccgctgattggctgcttgcttaaaggctaggtcaagctctaggaaatttctgacaagtaactctgtgttgttttgttttgtttcctgccttgccaagacgggaaagcccctgttggaggaagagattcagcattttttgtgccagtaccctgaggcgacagaaggcttctctgaagggtttttcgccaagtggtggcgctgctttcctgagcggtggttcccatttccttatccatggtgagtgtgaaaagggccgggcacagtggctcatgcctgtgatcccagcactttgggaggccgaggcaggcagatcacttgagcctaggagttgc

SEQ ID NO: 120549 - DNA, 1080 bp, Homo sapiens
tgcggaagacatggttcattccttgtggttaaggttgctgtctagtaagaaaagaaagccagtttccatcttagaactgtttcgaaagaattaaaatgactttttcaggctttttgttaatttcttaatgcttctatctttctttaaatgtgctgtttgtttgcgtgctagagtgcccagttgaacaagctgagcaggcttccccctgcgtctccctgtgcctcagaagaagggtcatgctttttgtcccttcctccttctctcttctccccttcccccgcctggcctgctgttacttcagtcttttccaagatagaatgaatagattatttctttccttccaatatatattgttttagctgcaatttagaaacactccacccacatactcaaatcatggctgtagagtttatgcctgtgtgtgtacacattatagttcattgactctgtgcaactattcttcagggacctagtacttaagatactgtactcatatttttccctctttacccaccgcccacagttttcccacccttacttggctctctcttagtcatgggctggcttgaccagtttaattactttttttctgtttcatacttctacaggaggagacctctgaacagatcacaaatgttacgtgagctttttcctgttttcactcacctgccatttccaaaagatgcctctttaaacaagtgctcctttcttcacccagaacctgttgtggggagtaaggtaggaaattttgagaggacttggatctagaattttctttatttgggacctggactgatgtcataaccaaggccttccctgcatattggcttagagggttacagggtgaattgaggggacacccacacagtctagttctcccctcctgctgctagccaggagacttgcaggggcccaccttgtcatgaaggcaggtttccagaaaatctagttaccttgcaaatctgcctcctgcccttaacacctgaggcaaactacttttctatattaaaagaagtgaaatcttaaaatttgaaggacttgagggtgcaattagtctggctttcctaccttaaattagaa

SEQ ID NO: 120550 - DNA, 1065 bp, Homo sapiens
gtttgttgtccacctttcctcgatgtgcaggctggcacagctgtgaacggcagtgctgggtgtgtgcagagctcttcctagatctttcttacgtgtcatcctgtctgacgcccagggcagggatcgccagccccatgtttccatctggaaacagaggcctttgaagggaaaggggtccacccagagttacttcagccagatcacattaggctgaggttagaacttaggtttggggccccaggctcactgttatgttccccaaggtgcatctgttctctcaggcaccagctccaggggtccctgaacactgcccagcaacctccccagtcacctgagggtggctggaggggacaagctagttcagccctcagggagggcaggaagtgggtgaatttctcactttatctcctttaattctgcatatagacagcccgcctctcaccctaccataaatagctcttcctgacagaagtaaccaaccctaaatctggcttctgtctcctgtgtgcatgtacatgtaatgtttactacatctgcgtgtttcaccaggacataaatagtatttttacatgttttcagacttcatgtaaagagatcctactgtgtattttttagagattttatttcctcccccattcagtatgatatctgtgagattcaatccacactggtatatacgtagctctaattctgaccgccttttacagatgagacacgggatcggcaaggttacaggacttgcctcgaatcataggtcttgtaggtgaccgagacagaatttggactgtgtgatccagagccctctctgcttctggatcctgctgtcacccacctccttagcacctgcctcctactccacgtgcccacgcccatcctgctgccctgcttcctcttgtcctctccttggcaggcatgtgaaagaccgttttcacaaaggtgttaagaacttcccgggttcccccactgagggcacatgcatttgaggaagtgctggggaaagctcattggagtgggaagccagggctttgggtctggctctaccagctgtgtgaccccaacaaatcc

SEQ ID NO: 120551 - DNA, 1064 bp, Homo sapiens
attttcaggggcaaagagaacagatgcattgagcagtgtgtcttctgagagttggttaggtaaagaggccaggagaaaattaccaacacgtcggcactcttattatctgcatttggaaattccaaatttggcagtattcacatcttgatccctggcttctgtggtttgaaaactgcttgagactattagctaatttatggcatccaaagcggcatagaacacctccccatgggaaaaggagcactatcttcccagtgtgcatagctgctggaccctgcaggcctcctttctaaggctgtgccattggatatgctaagattttgagctcggaacatccctgcctgcttcctgggtgtggagcccccaggaactgctcctctccctctcctgctcatctctgcttaccttgttttttagtggattaatccctcacctcctgggcgatgtggttttcttgtggggctgtaacctgctggcccacttcatcaatgcctacctggtggatgacagcgtgagtgacaccccaggggggctgggaaacgaccagaatccaggttcccaggttggttggaacaaggacttgtccttctttccgtgtgctgctgatgcccagggtctgggacaaactcaaggattctgggattctcagcatcaggccgggagggtgagagaggacctctcattatccctggagtcatctttgtctaaggggagaacggcctcaagaggcgagattccagattagtacccagacctgggaggaattaatggaatgcttgtccctgggcgccttagaaacagaccccagcttatctaaggctgctccgaggcagtgacccaactagggctcaggaagtcagaagatagaccagctaatagtgatcacctcttgacctttgtgtcacgtcttttgctttttaaaacccttttgtgaacgttatggcctttgatctgacggcatcctagttgtgaagggaacagggcaggtataatgttcgtttaccaatacagaaatcgagacccagagatcacaaattctggagaggctctgggctctccagagt

SEQ ID NO: 120552 - DNA, 1019 bp, Homo sapiens
ctaggctggttccagtgcctcctcctgcagggccctgtattctttctctgccctctgggaaagtacttctctttgcttactaccccctcctactcttactcttgggcgggcctgtgggctcctctgctagagggttgtttaaccagagataagtgtgagggccgggtaagagaagggcctgccgcctctgcagcagtggcccaagttaggagatgcattcctaaactcctatctcccagaaaacaccagtagaggactgctagtgggctgctcccatgggtggttgggcttccccagtctccatgaactgtgtaaactcctcctcaccctgaacaagcgctctttgcctttctacttggttcttcatggtaatagtcctccccatccctgccaggactggctggatttgagcagaactggtgggctcagccccacaccaacgggtgggcttctggtaggtgactgcatgaccctgtatctctgtcttgccttcttcacagtggtgtgctgagctccattgggaagattttcaaagaggaagggctgctgggattcttcgtgtacgtgagtttatacaccccataactggccacgggcatggctctgctaacaggtgtgtcctcaacctctcagaccgcagctgctggcctgggacttcactacatggccctgccctagcctgagtgctgcagccagctctccagagctccatagcgtgtccaagctgcttagcccttttcaggccatggctcatgtaaaagtggaactgtgtgtctagtacatgggggagatgaactgaccagccccactgggcctcatccagttgtggtgggtgtggggctggtcttcatgagctaagtcactgcatagtccttggcctcactgctaaaacatgactgaaaatctgacttggactgagggtggagctctggaagctcacaggctgaccacagccagtggattctgtttgacattgcttttctgacaaattagttgttgccgttaacatttaagatatg

SEQ ID NO: 120553 - DNA, 2065 bp, Homo sapiens
actgcttccaggtcctggacagatgttaccttctgtgcctgtagtcagcagttacctgaaggacaagccgagcctggtctgggtgtgtgtgacccaggagtgggtgcccctgaactgggtgtgactcctctgccacctctgttttcttacagccaagtacatcgtgcaagtggatggtaagatagggctgttccgaggcctgagtccccggctgatgtccaacgccctctctactgtgactcggggtagcatgaagaaggtgagcccacacaaagccaggaacagtcgcccgaggtttcctcatactcccagccacccctgcagcagccagttaccctggtcttgcctcctccttcccagaccattgggggcttcactccagccccatgggggagctcccaccccacagttctgctttcccacagctgtgacaccagatagtggctttcttttccccccaagctccagacctggaggttacctgaggtgggcccagccaatagacactgcagaggaaatatttggagctggttcctgccgcccaagtccccgaagagttccatggaagaggcgtagctgaacttggttctttcccttctctgtttcaggttttccctccagatgagattgagcaggtttccaacaaggatgatatgaagacttccctgaagaaagttgtgaaggaggtgggtgttgagagttggagagggagaggtgcgtggaggggagcctgatgatttctcacccccaagttgggcgggtcattgacaagtcgaagagttgggtccttgtgtatgcatgggtgggatggtaagggaagaagccctggcctggatgtgccgggaaccccggaaagccttctcagccattgttgggcctagcctgggacccgacagcactcctgggtgggggactggggagtgggcaacaggtggagccatccttggcagaccgaccccatgtgcagtccctgggacaggtttctccctcctgagcacttgtagctcccctcgagggccagttccagagacaggccgagggtggcgagtccccaccccatgctctcttccagacctcctacgagatgatgatgcagtgtgtgtcccgcatgttggcccaccccctgcatggtaagccaccccccttcccccgagactgtatctaagctggcgtcgggggcgtggggtgaggggcgccccctcgtggactgtacatagacagccgtagacctgttgggaagtggtagtggggttgggggtattctactggaacccacctcactgaggagagattggaattctttccaaagggaggtggggctcttcccaggcagtagaaatggcatgctgtggtcatggggtgtaacagggaatccgaaaggccctcttcctctcctgctctctgaataggccacgttgttcagtggccactctgcacctggcacccggtggctggagcattatgaagtgtggcccaccacatcacctgtgtgtgttttcttttttttcctcagtcatctcaatgcgctgcatggtccagtttgtgggacgggaggccaagtacaggtgggtaactcttgggactggcagagtggccctgttaccctttcagagtcggccagggcaggccgtgctgggattggttgctgcaccttttctgccctagtgctgtgtgagttcagcctgctgcctggcttctgaggaatgtggcagtggcttcaatagtctgtccagggtcattttctcttcgtcatctcttatcaagggcagccctagatgagcctagatgcctttgcagaggggtgagtgggattgtagtcagcttggattaggatttctggccccagagctgattctgccacttaggactgagctggggtctccttttggactcccgaagtaatgctctaacgatttttccggccctcataggctgatagctctttttatcccctatgaagaagccatccaccccatgggcttggggctcatcccttccattgtgtaccagaccctcacctagatctgctgcgtgcagccctgggtaggtgccaggggcatatgtg

SEQ ID NO: 120554 - DNA, 1052 bp, Homo sapiens
agaaaccccgtctctactaaaaatacaaaaaatttgccgggtatggtggcgggtgcttgtattcccagctacttgggaggctggggtaggagaatcacttgaacccgggaggtggaggaggtggaggttgcggtgagctgagagcacgccattgcactccatcctgggcaacaagagtgaaactccatctcaaaaaaaaaaataaataaataaatatttcagatataagaagcatctgtacagcaagaactatcatagccctacagaaatgagggggtcgttttgtcacagggatgtagggtgattgaggtgagaacgcagctaaggatatgtttgaggagtagctggaatttgaggtaacagtttgctaagcctgggaatgggaggaatagacatggaggtgtctgcagtagatttggtaagaaatttgagtttggggtgcactttggaatagatgacttaatggctgacctgtctgaggtttgggtatgatgtattttcttattgccacatttggaattgaggttggaatgaagtttttcatctggagatgagaataactgagatttgttctgagatgggagtagggtttgcagtacatacaaatggaggtttctctactgggaatatttgggatttgaatgtaagaatgttggggtgtgggtgtgacttggattgtggttggacagtgtctgggaccaggcatttctgttgattgggagtttacgtgctgccaatggttagagacactgacgagctttctggtatgctttgatggggaaaacatgaacaagagccacattagaatttgtgggagaagagttaagcaaagggggcaagaggtgtgaggagaggtggtgaggctgaatcaccacgagactctgagcgtccctttgtctttgttaattctgaaggtgggtcatgagccgatgccccccacccttgggaccaatgtgctggggaggaaggtcctctatctgccgagcttcttcacctacggtgagtgtgcctcccaagcaggaaagcccacaccaacagaaaagaggcctcag

SEQ ID NO: 120555 - DNA, 3242 bp, Homo sapiens
cgtggccccgtcacgtgacggggagtgacctcgccgccgggcgccatgggagcttcggacccggaagtggcgccctgggctcgcggcggtgccgcggggatggcgggagccggagctggagccggagctcgcggcggagcggcggcgggggtcgaggctcgagctcgcgatccaccgcccgcgcaccgcgcacatcctcgccaccctcggcctgcggctcagccctcggcccgcaggatggatggcgggtcagggggcctggggtctggggacaacgccccgaccactgaggctcttttcgtggcactgggcgcgggcgtgacggcgctcagccatcccctgctctacgtgaagctgctcatccaggtgggggaccagaggcgccgtagggagatgggaggctgatgtgaaggtgacaggccaggatttggaggattggggcgggcagtcaatggcgacggatttggggagaggggtggggacggcgggtttggggggccgagtgggtgggatgggagggaagccgtgagggagttgggaacgcaggggtcacgggttttaggatacagaaaggagaccaaggggttagagtaataacagatacgggagagggtggaaggaacaagcgatttgggggagtgccaaggagggagcgatgggctggaaaaacatatttgggagataaaggagtggggacgatggacttgggatagggaagggagcgaatttggggcgagggaagaagcaatagaattgggggaggggcaagaagtttgggtgaagagatggggaggaaggttgggggcccaggcaaagtgtttagagaatgaggagcacataattggggtagaggggaacggaggctctggatttgatagagatggatttaaaacgtcttggggtggggacaaagtgggcgccagggccagaaatttaggagggaaagaaggacaccagactgggggtggacagaggagacggaggtcttgggttgcattgtgatttaatttggtgggagagtgcgaaggcaaagacttttgcaggggaatgctatcggtttaccggagatgggggctctggatttgatggcgacgacggatttggtaggaggaggggacagggtgacgcgtatggggggaggggaacagatagggccagcattgggggaggggagtggcagcgatttgtctagagaggggagctaggaggaggctttaagcggggaagggggatgacgcatttggaggaggaaatggaagtcatagttggggtcagagagaggaatcacagtgcttgtatctgggcagatgaggagaaggggcacgggagtattgaaattgggcagaagggacagtggagacataggtggcaggataggtagggactaccagaaattgagaccgaggtagggatgtctctggaacagagggatgcataggcacttggcagatttggtggtggccagcaatgcggtacagatgaagtgtgctgcttgaggagtgagctggaatgaagggcgtgtggaggtgtgagaattaggtgggtgtggctgggatgggtacagttttgatgggggtcattaggccagaattttccagttaagaagcttggggggaggaaggtaaaaattgaattggagacccatccaagatttgagttgaggcaggtgggtgtcagattttaccatctttataattgaaccgagagaatgcaaaatacaactggaatgagaaggccttgagaatgagagtaattgaaatctgggatccgaggaatggtaatagatttgtgggtgtgaccaggaatatgacaaggaatgaggagattcagtcaggggcatcaaggtgcctgactagaccctaattgtgacagatttgaaaattgttgatggcggaaggtgtagaccagactggcatttggttgtgatttgggaatgagggctgtcttacagggttaagattgtatttacagcagttgaacttgaagtttgggagataaattggtgctttggacctgagaagtgagggttctggaaactgatggaatgagactgagtgagggctaggattttagggcacaggtgggagagtctgtggagtgaaggatactggagcacaagggctcagtgtgagggaaatgaagaagtggcttcatcatttggatgatggcagatctggtttgaaagaacattgaaatgagggtggtttgggaagggaatgggggaatgaaggacaccaaagcgtgagaagaactagatggtgggcaggtaaggatggatgagccctgttgaaggaccagaggtgcctgtctgatttgaacccagctggtgttgagtgtaacatatattagggtaagatcttcaatgggtatagtttgggaatcagagtaataacttgcagaaaggcaaattactgggagtgggggtgtcaggagtggagtgacagatttggggattgtctagattaggtgcgtaagaatgcagtgccttagattagtgcatgtggctgtcaggtttgggagtcggagattttaagatgacagactgtccctgctggtatctgatatagggccacagcatttgccgtagttaggactgggttaacagatttgaggttgaaattgggtttaatgacttgggaacaaataattaaaacttgaaggcaggaggaatgggggtgagatacagccagtgtgcctatgataacccaatagaagttaagaaaatagattcaacagatttgggagccatggggatatgggataacgttacaaatttaagtatgaaattggggtcagtgggactcccaaatagtgttgactaaactggataaggacagcaaaagagcagttgtggcgatttggagtggaggaataaaggaataccacctgtatttaagagaacacagatcaagacaaaacttaattcagaacaaccttggagcttttaacccagaagggaaaaggtctagaagggaagtactcactgcctgggtcagctgactcacccctttcctcctttgctccactgggtcaaaatttttttcttttaaagacagtccccatcatagaggagtttttaaatttacaatcattaatctgttaggcatctcagaatcagatccataggagatagcctgaactttgaaaagcacttgcttgataaaggcaaaaggggacagggttgatcccaaaaagcactggaagcatacctaatccagtttacaaggtagcgctttctaact

SEQ ID NO: 120556 - DNA, 1033 bp, Homo sapiens
ttttatgtatatatattatatatatttatatatttttatgtatatattatatatatttatatatattttatgtatatatattatatatatttatatattatgtatatatattatatatattttatatattttatgtatatatattatatatatttatatatattttatgtatatatattatatatttatatattttatatatgtatattttatatatatttatatattatatatatttatatattttatatatatacacacacatagagatatatgtacatatgcatagagataatacacatatattttgtaatgtgtatatatacaccatatatattatctattcaaaagtaaataaagttgaacattttaaaataatgctttgcggcgctgcggcagtccagatcaaaaatggcggcagttggtgtgttctcggtttctcggctgctgggtcggtcccgcccacagctggggcggcctatgtcgagtggcgcccatggagaagagggctcagctcgcatgtggaagaccctcaccttcttcgtcgcgctccccggggtggcagtcagcatgctgaatgtgtacctgaagtcgcaccacggagagcacgagagacccgagttcatcgcctacccccatctccgcatcaggaccaagccgtttccctggggagatggtaaccatactctattccataaccctcatgtgaatccacttccaactggctacgaagatgaataaagagaatctggaccactacccgggcaccagggaccacagcactggtttggaccattactctgcacatggaccagaaaaagtatatgggaccttaagctcaccttctttacttgtatcaaatgatgactggtatactggtctcccatccctttgcttgtggcgggagatggcttaaataaataacttaaacttaaaaaaataaaataaaataatgctttgtctttaactcagaagtttcgcttctacgaatttatccttagtaaatgatcatggcaaagatttagcttaaagg

SEQ ID NO: 120557 - DNA, 1013 bp, Homo sapiens
gttaataacattaaaaagactgcattgacacacttaaactcccaggacgctcagttctttagggatggactacatggctggtatcatcacttacagaagtattttgaactcgatggagcttatgttaagaaaaaagtttatgttttttatttgtatcttttaatcccattttttcacaaactttatgaagtcccctcatacatgcacagtcatagaaatatacataatcataggtaaccactcccctcactctggacatgtaagctggtcctaatctttctctactgtgtccaatgctgcagtgaatatcctctatagaaatgctaagggcaggttttagtcacgggactggggagcacacacgggaatgccagtgcctgggagcagaggggcagtgagaagacagtgtcatccaccagggaaacccgaagaacgtggagaccgagggcaccacaaccttccgggattgtacaacgtggcctgcagctggccctcactgagtggcacgtgagatgtgacaagcaggtgctgtttgctgggtagattaactgcatgagtgccatcttccctctataaaaatcgctcacattctgtgacggatcgacagcctgcactgttgcctctgagagtgagctgtgcccacagcccccacgggcgctcctgtgcaccgctgggacataaaagcccacaccctggccacaagtgccagggcaaagtttggcctgacacgaaggcagacatttatggactggatatgcgggagaggtagcccagcaaaaagactgcccagtggagaccttctacactggacagtgacttaccaagcccatcagactgtctctcacggggctgcctgaaaaccagaggaccacaaagtgggccacaggcaagggctacataggagaaggtagtgggcagaggccaggaggtggaagccaggaggtagcagaagacatcaggcagaaaggatccataattggccttggcctgagcctccaaggactccagaaaga

SEQ ID NO: 120558 - DNA, 1124 bp, Homo sapiens
ggcggcggcgggatctcctgggtggggagctggcggctcgcgggccggcactgagtccccgtgcttccccctttcctaggcaaggagaaggagcccctggagtcgcagtaccaggtgggcccgctactgggcagcggcggcttcggctcggtctactcaggcatccgcgtctccgacaacttgccggtgagtgggcgccccgcggtggggagggcgcgccgggcggggggcgcacgggcgtgctttagcccggacgagggaacctgacggagaccctgggcttccaggtggccatcaaacacgtggagaaggaccggatttccgactggggagagctggtgagtgccctgcaggagcgacccccaggatgagtgggtggggtgaggggcgcccccgactcccgccctaacgcggccccctcgcccctgcagcctaatggcactcgagtgcccatggaagtggtcctgctgaagaaggtgagctcgggtttctccggcgtcattaggctcctggactggttcgagaggcccgacagtttcgtcctgatcctggagaggcccgagccggtgcaagatctcttcgacttcatcacggaaaggggagccctgcaagaggagctggcccgcagcttcttctggcaggtgctggaggccgtgcggcactgccacaactgcggggtgctccaccgcgacatcaaggacgaaaacatccttatcgacctcaatcgcggcgagctcaagctcatcgacttcgggtcgggggcgctgctcaaggacaccgtctacacggacttcgatggtgagccaggcccgggagggagctgcccaggtgactcggcccggcccggcccagtccggaggcctcggccagtctcccgcgccagccttttgtaaaggtcattgggccgcctggctcgatgctagccggggtgggacgcaggagagcctcccagcgtagtaaagccggggattttcagccagctgaacctgtaatgtttctggcatgattttattcttcaagtggaattcagttagttccaggctttcccgatgaataagaggttgtgggcaaccggcggtagcccagatttttctaaagtctgacccagtttccccgccagtaaa

SEQ ID NO: 120559 - DNA, 1015 bp, Homo sapiens
ggatgttgtgcaagcatccttgcttggatcctgtcggccatgagaatctcacccgggctcctgggcagtggtgaatgcaatttaaggatagtctatgagatacctttcttggttgtgcagacatgcatcccttcatccttcgcaggcggtcctgcctcacagggcctcaagttttgggtctgcggccagctgtgtttgtttcttggagcagttcataaagaatttcagtttatggtttgggctagcagagaggtgggtaatgctttgggttggagagatgccgtaaggtgcgcctccactctccttagcccagagggaaaaatggagttcacctagctcctgagagaagggattttttttttttttaaaagaaagagttatatataccacccagcttctttgtgcttgtttttgctaaaagtgtgttttctcttctattcccttggctcacagggacccgagtgtatagccctccagagtggatccgctaccatcgctaccatggcaggtcggcggcagtctggtccctggggatcctgctgtatgatatggtgtgtggagatattcctttcgagcatgacgaagagatcatcaggggccaggttttcttcaggcagagggtctcttcaggtaactgatggaaacccctggccatggggttattggtcttaatggggctattagtcttcatgggacagtctttgaaattctggagagcttcactctccagtagattctgtcacccttggcttagaattgtaggtgagtgatttacacttgagctggcctcataaatcacatggtttgcacttgagctttccttgggaggtcagaggaaggcatgtgtgagcatattaagaagaaaagacaatctggcttctccaaaaacttttttaaaggtaccaacagaaacctgataattcctggctgttttgccagggagtaaaaagttaaaagctcttttagcatcttctttaaggcagcagctccaaatattttggtaccagtgacctca

SEQ ID NO: 120560 - DNA, 1036 bp, Homo sapiens
ggaaactgctgagatccacctccacagcctgtcgccggggcccagcaaatagcagcctttctggcaggtcctcccctctcttgtcagatgcccgagggaggggaagcttctgtctccagcttcccgagtaccagtgacacgtctcgccaagcaggacagtgcttgatacaggaacaacatttacaactcattccagatcccaggcccctggaggctgcctcccaacagtggggaagagtgactctccaggggtcctaggcctcaactcctcccatagatactctcttcttctcataggtgtccagcattgctggactctgaaatatcccgggggtggggggtgggggtgggtcagaaccctgccatggaactgtttccttcatcatgagttctgctgaatgccgcgatgggtcaggtaggggggaaacaggttgggatgggataggactagcaccattttaagtccctgtcacctcttccgactctttctgagtgccttctgtggggactccggctgtgctgggagaaatacttgaacttgcctcttttacctgctgcttctccaaaaatctgcctgggttttgttccctatttttctctcctgtcctccctcaccccctccttcatatgaaaggtgccatggaagaggctacagggccaaacgctgagccacctgcccttttttctgcctcctttagtaaaactccgagtgaactggtcttcctttttggtttttacttaactgtttcaaagccaagacctcacacacacaaaaaatgcacaaacaatgcaatcaacagaaaagctgtaaatgtgtgtacagttggcatggtagtatacaaaaagattgtagtggatctaatttttaagaaattttgcctttaagttattttacctgtttttgtttcttgttttgaaagatgcgcattctaacctggaggtcaatgttatgtatttatttatttatttatttggttcccttcctattccaagcttccatagctgctgccctagttttctttcctcctttcctcct

SEQ ID NO: 120561 - DNA, 1098 bp, Homo sapiens
ccagtgatacattcatttctcaatgatgtggtcacatctagcaagttaggccagagcacgggccagaccccatgtcccttaacttccagcctattgcctgtccacacaccatcattgctcttagctctctgatttatatctagtgacttgggggatttgtctaaggctacctctgccatcttgtcacgtgtctgtatgattttcttcctgcaggaggtgctctggtaaaacaagtataaaatgaatgtcaggatgttctccctcatggtgggcatcttctctgtccttaataccacccagttcttcatctttgacctgaaccagaagacacacatttgctatgaggccaagttcagcatctacgtggactcaaagtcggagctagtcacttggaccctgttccacagggctaatatcagcactggcctctccctcaccaccatcatcatcggctgcttcctcttttattgtatccacaagaatatctacatggggctgctgatctatgccatgtggatcatcacttacgagctcatcaacttctccatagtcctgctcctcaacgggatcatcaaagatcacttcaagacgctgagttatttgcactggatcttccaaatctcacacatgctcctgcactttttctgtctgcccttcatcgtcaagcatgcatacaacctttacaaggaatcccagactgtgggcaggaaacgccgccacaggctctgctccaccattgcagtgaactcatgactacctgtccgtctgggaatgttgtaccggaagttaaactgaaccatgccagatgccaggaaaggtgggagggaatggtgttcctcaacaatggaaccctccctaccctgcctgtcttctgttgatgctgcttggtttgtcagggcttttgagttttacgcactgaggaatgattctcgggagagggcaggttgtgcggatcaattattttacagatgtgttgtgtgacttgttttagcagttaatgatatgtggccttgtgcttacttaaccatctcactggtgtctgtttttgcctctcactgtcccctctcctctgcacttccttagtttctagttcttcct

SEQ ID NO: 120562 - DNA, 1048 bp, Homo sapiens
tactgcaaggccgtgtccttggcacttagctgctcggggctgttttgggcttttcactgtgcttatgggtagcaggtggtggtggtggtcttacatggatggaaggagacatcaggcagtgctggttgcggtttgctttagagcatttgtggagagttaacctaacaaggctgttttctatttacagatgaactgaggaagtgtagctggccaggggttcccagggaggttcgacctataacctggagactcctgtcggtgagttctacccactgtgtagagaaatgtgagcctcacacagcccttcttgcctgatgaggttagtctggacacattggtcttaactccatagacttctctagtcctactggatatgacagaactatgggactatagtcctatttctgtgcataaagaaatacattcttgagagtttattcacacacatgtagtggtacacagacttgtaccaatagtcatggtgtcatgttcttaacagcgaggaagaagaatagagtgagatagggtgatcccagcacttgctttgagtaagctccaacgttccctgtgcttcactcctgtttcagccggaataaccaaaagttgaaacccactttgatctgtgaagagttgataaattggcctcccttggaagctttactagtcctgctttcaccaagtacagagcactgtgccagccgctatgatagaaacacttgggtttcctgagcctgtaaaattcattcattcatctagtgaggatttattgagagcctgctgtttgccaggcatagtgccagatgctttgagcagatgcaaaaatgaataaaccacagtccccactctccaggcactcactgcagaatgcattacataaatgttttcaagaagaagggtctgtctcctgactgctcgcccccacctctactcttgcaaccatgcaatcattgcctctgccacttctaataagtttgaatactattcagagtagatttggtgagaacggaaggggaacagaaaatataagaatgagagtgggatctagacc

SEQ ID NO: 120563 - DNA, 1105 bp, Homo sapiens
aagttctgtctgagtgttgtagctgtatgtcacagattccattcagctgcttcctaagctggtaattctgaaagttacactggaaaagaatgtaactggcaccaacttacttggcacactgctgagatgtgctgtagaggttgctatatccctgcatttctcagaagtatggccctggacacacacagccctccgaggccatgacttgggtccagctccctcccactgacctacattcactgctgtactgtgccagctctgggagctgaggagtgctcaccagtggcacaagctccagcacagtgcagggccaagggagtaaataatcctgggaaagctggccttgcttcatctgctcacatgtggatctcattgaatgaggagagggcaaaaaatgggtggccagaaccaaaaagggatttacccttggcagttttccttcttggtagtttccaaaccactgcatagattaaaataaaaattaaggatttatccaaccattgtctttccccatctgaccagcagtcttgtctatagggctatctcccagcaaacactgagaggaggaagttgaccctgcagcggaagcgggaggaatattttggcttcattgaacagtattatgactctcgaaacgaggaacatcaccaggatacctacagacaggtacagtcaccacctgctgcctctttgcttaccagtcatatactttaggtatgtctcatggtagtgctctcagggtacaggctttccaagtcttcaggctgtggtatattggttaggagttaaatttatcctcaaaactgtttcccctcttttcattcagcaactctgattttagccattttaaatagacagacttttttggcactagtcagtgcactgcttctcaaactttaatgtacatacaaatcacctaggatcttgataagatctcacctagagattatgagaaaatgcagattctgatttagcaggtctcaggtaaagcctgaagttctgatgtgctcccttgcaatgctgctgctgctggtccaccaaccacactgtgagtagtaagcgttatcgagcatggagaggaaagacaagcttacctagccgtggt

SEQ ID NO: 120564 - DNA, 2052 bp, Homo sapiens
tttagtagagacagggtttcaccgtgttagccaggatggtctcgatctcctgacctcatgatccgcccggcttggcctcccaaagtgctgggattacaggcgtgagccaccgcacccagccagatgattcccatttctttaaaaaaaaattgtcaaaagaacaaactgggccaggcacggtggctcacacctgcaatcccagcactttggcaggccaaggcgggtgggtcacctgaggtcaagagttcgagatcagcctggtcaacatggtgaaaccccgtctctactaaaaatgcaaaaattagccaggcctggtggcaggtgcctgtaatcccagctacttgggaggctgaggcaggagaatcgcttgaaccctggaggcagaggttgcagtgagctgagatagtgccattgcactccagcctgggggacaagagcgagacttcatctcaaaaaaacaaaaacaaaaaaaaactggcatttgtgtttttggacatgccttctctttttcagattcacattgacattccaaggacgaatcctctcattccgttgttccagcaaccacttgtacaggaggtgagggaattacttaatgttctttggcgcttctccccgcatagttctgtggcacctgtttacaggtttgcggctaatcataatagtaccttatgttcatatatgcagctttggttccttcagagcatggtttcatacattttcatttgatctttgttacaaatctgtgagcggaataacactttgaaaggctaaggaacttgctcagaattttgaggctacctggtggcagaatgaagaacccacatcttagaattcctattcctgtatttgctctactttatcaagctggaagtagtgattttttaaattgtggtaaaatatacataatataaaatttactgtgttaaccattttttagtgtacagttcagtggcattaagtacagtcacgttattgtatgaccatcatcaccatccacttccagaacatttttcatcttcccaaactggaactctgtatccattaaatattaactctcttctgcagcctccattctatttgtctctaagaatttgactactccaggcagctcaaataagtggaatcatacaatatttgtccttctgtgactggcttatttcacttagcataatatctttaaggttcatccctgttgttgcatgtgtgaatttccttttttaaggctgagtaatattccgttgtacatatgtaacacatattgttgagctgttcatctatcagtggacacatgggttgctttcaccttttggctattgtgagtaatgctgctgctagtatgggtatgtgaatatctgtttgagtctctgttttaaattcttttgggtatatatttagaagtgggagtagtagttatattttgagacctaacaagttaatgaagtacatggaaggtgtcagtggggctattatgttttgactcaagcagtaactgtaaacttcttaagattagggatttcctttgcaactttacagtagccaggacactaagtactagtgctcttttaacggaactttcagttctcatagtagagagggatggtggttaaaatgctgaaaataatttctatttgactttgggttatatttataattttgtttaaatatagatgtctccactggtggggtccctcatgtcttacccatagcataaagaagattttgaaggtaacatcattattttaactataagattcagctcacaggaagctaaaaacccattcatgatccctttatcctcccatacagttttccatggctcagcactgcttattcctcattttaacttggagatgttcagagacttttcttttacctgtgcatgcttactctgaatttggagatgaggaaagtagtcagtttaaaaggcttctcagccaggcgtgatgactcactcctataatcccagcactttgggaggccaaggccagagggattgcttgagcccacgagtttgagaccagcctgagcctaggagtttgagaccagtct

SEQ ID NO: 120565 - DNA, 1012 bp, Homo sapiens
gctgctgtcaaaggttttttgctatggccctcctggtgtgactctccctactgtaggaagcctcaagtatctttctcatggaacaggccagcagttgccctcattatcctgggtaggtctctccaggcatccttaccccactgccccatctcactgaatcatagcataggggatctgccctagtggagccgtggggtccacatgccactgggacattatttggcttctctcatatctcttcccctacctattctctaccacctctatcacttttaaaaattagtacctgagcctgcttcatgctttatgttatgtttgttgtaaagtagttggaaacagtgagttccagtgattcccctgtgagttgatagagaagttgtctatagctctagccttgcccccaagcagcttctttatctgctgaagccagctgctcctgtaaaagtgggtcctctgcagataagccagctgtgtctgggtctagtggtgacagtgctgcaggtggggaggtcacccctggggagataaagtctctggaatcttatctctgagactgtggtataattctaaactctttcctccaagagcttttaggcttaggcaatattagtctagctctgaactactgaggtccaatataattgaccatgcagccatcatcaaaataaactgcttaacaggaacaacagaagtgattcatataaggaagtcatggagaagagcaggacttatgatgtttcctattttcaaaagaagagtggtgtctgatgatatttttaggtacaaaatgcaacaccaattatcaagtaaccttttctcttttcctttgcataaaacagcacagtaggattttcaccgtagattttacctggaagcatgacagcagtggaactctcggaaaggaagtcctccgcagacctctgacttgtgtccggttccctacatggcatttccacctgattatgtcatagatgatcacttaggattagctaggctgcacataacagggaac

SEQ ID NO: 120566 - DNA, 1147 bp, Homo sapiens
gttctgtaggattgatgttttgcagaacccatcttgagaaataccatcttgttggaattaagtcctagaagcactcacaggcttgactcatcttcctttacatgcataccttctcttttgagtggcaagactgtgggtctgccttatcagaacttgggaattccatctttaaaataaactgtgggggctttctgatcctagctgttctccctatatatgagtgtgagtgtgctagacagctcactgagctgaaatcaaagaaattttccaggccatcttcagggatctgagtataattcattgaacatgagacctgaagtatcattttctaaaactgaacgaacaaatgccaaggaagagaaagatatgttggacctgatgggactagcatgagaaatggcctgtccagtgttgtagtgagatcttcaagaacaaatatgttcttgaagggacatatttgcccacctgacacagacagtagaggggcaggcccttgtttcttaacatcaggttagcctggtcctcacttggccttaaagaccccattgaagacactcgaatctatctttctctctccatttttagataagacctctggactttcttcaccttttgttttacagaagaggatgtggagaactttgacgtgaccaacttgtctcaagacatgctgcgaagcattgaggctgacagcttttggtgcatgagcaagctgctggatggaatccaggtgagctgcttctgcccttgtgggaacaaacgtctaggtccagaggctcccagcagggctttggtttctttcttgctcttctgtatcaggcaggaccacccacccacccactatggctcctcctccttttcatccatctctatccttcttcattggctttacagctttcaaacagcaatggtgggtcgggcacggtggctcacgcctgtaatcccaacactttgggaggccaagactggaggatcgcttgagctcaggagttcaaaaccagcctaggcaacatagagagaccccttctctacaaaaaattttaaaattagccaggcgtggtggcgtgtgcctatagtaccaggtcctcagtgggctaaggtgggaggatcacttgagcctaggaggtcaaagctgtagtgagccatg

SEQ ID NO: 120567 - DNA, 1055 bp, Homo sapiens
taactcagtgggcaagtgttattcctttagattcaattgttgtggattaatttatgacttctgaatagcttgtcagtactgcagtcttgggcaggtgggatggggaggacgaattaaagcacctgaagaaagggcaagaagactataaagcagtcttagacatattctaaaccatttgatagttctttatggggccagttgcatggggagggacccatataaactcagtggtaagactgtggctggcttcagggacctgtgtgtaggagaagcctgccaggcttggctgcctgcaaggtcaggtcgtagcatagcctgaaaagaagtctgaatcaaaggcaagagaagaagttgtacttattgttatggtccccaaatcatagcacaagctgttttgcacaagattttaaaagatacgctaataacataacagcaaaggtaggtcagttccctgcctttccagttcttagtctcagatgttgtggataaaataataaaacagggttcctttcatttcattgatgggaacactgtagtaaattgtctaattaagtggctttaagcttgttaaagcaatgcatagagtttggtggaaaaacaagtagagatttattgcaaattagctagttctcaggtactataaagtatctaggcctttggggaaaacaacagaaccttctctccccttttcttctcttgtatttagttttcattaagttttctgccccaagggaaaaaagggaaaggatggttatatttactggtttgggggcttttttgtggggtgttttgttttgagacagagtactccttctgtcacccaggctggagtgcagtggtgtgatcacaccttcacctccctggttcaagtggttcttctgtctcagcctccgaagtagctgggattacagatatgcaccactatgcccagttactttttgtgttttcaatagaggtggggtttcgccatgttggccaggctggtctcgaactcctggcctcatgtgatccgcccgcctgggcttcccaaagtgctggaattacaggtgtgagcc

SEQ ID NO: 120568 - DNA, 1865 bp, Homo sapiens
ctaagtgaaaagaccctcaggtaggctggcacttcggggagatgggcttaaggaacaacaacaacaaaaaagtttgaggggctggagcagctagtgttggcactatggtatgagttaagactaaagagtagaagggctcaggacattcagggtcttataggccatggaaggaagtttgaatgattggacagttttaaggaaagaaggaaaatgacctgatttaaaatttttacatttctattccagttactattataaagcttatgggggctagagtgagaacagaaacagtaggaggccaggtggtttggactaaggctgtggctgcagagataggaatgaacagacttaggacatatttgaattatagcccatataatttaccagtgatttcaatgtggggatgagggacagagatgaatcaaagatggcttctgggttatgggttgagtagttggttggatagtattgtgaatactgagataagagtttgtggggaggaatagattaggtcagtgagtcgtggtggtctttgagggactgaggaggacaggcattctgaaagattttaaagagaagagaagagggcagttttagctaactttggtttaaagttcccagttaaggttgtgatatgggacattaaagaggtcgtttgtgcactaagaagaatatgcagggagccgggcgcggtggctcacacctgtaatcccagcactgtgggaggctgaggcaggcagatcacttgagatcaggagttcgagaccagcctgaccaacatggtgaaaccccgtctctactaaaaatacaaaaattagttgggtgtggtggtgcgtgcctgtaatcccagctacgtggaagctgaggcaggagaattgcttgaacccgggaggcagaggttgcagtgagctaagatcgtgccactgcactccagcctgggtgataaagcaagactctctcaaaaaaacaaaaaaaaattaacaaacaaaaaagaataagggaattctgtgatctggaactcagaagaatttcatttccttccttcacagggttgttatgaactagactggtccaacaggaaagtatgatagatgtgaactggggcttcttttcaaccttttccggaagctctcaagctgttcttgtggataagacagagaatatgtactccaatgcaaagacttttggttgaattataactggctgaaggtatatccagatggtgtgggttaatgtttactaggttttcctgaaaactttgcctttggctgcatcccattctgtgtcttgaacgaaggtatagaaggcatcatctcataaatttggtggaagagatattaagtatgtctgatctgatggcagattaaaaattcagaaaggtcttgacaaattggtttgataggctgaactagcaagatgaaatttaataggaatcaatctaaggtcctgcgcttgaatccaaggttttccatccagtcaagtatagagcagaagagacaggacttaggatagcatttcttggaggagggggagaccaagaaatttaatcattcctaagttcgaggatacactggcagtgtactagatctgctatgaaagctaatgcaatttatatgctccagtgataatatctagaactgggaaagtaacacttgcgtttgactgtgtaatagaaattaagtttatttttcttaatatgccatccaggaataaagataaaccagcagtcccttcacagactcattagaatggcaaaggctcaagcccatcccctgggagttaagttgaagtaactgggaatacagaaccaggaaaagagaaaactcagtgttcactttatatctgtgccattgaaaggggattgg

SEQ ID NO: 120569 - DNA, 1053 bp, Homo sapiens
cccatttcctcctgattatttcataaaagctgcttccagttctgaatagcttttaattacttactagttcttaaatactgttcccagaatcacttgggtggctttaaaaaaaaagaaaaaaagaaaagcacatttctgggctccaagccaaacctatagaagcagactctgggacacagtgaaagttcttcagttgacttggatggccaccaatgttgggttagttttagaggccctagtccatttggtggccgccttccctaactgccctctcccctgaaaaaagcagcaggtaggtaagatagcccaatggaataaaggtattattttgaaattgccaatttatcgatccctgaaccacaaagtcactaactagagggagagaacaggcatgtttgtggctaaaaggaaggatgcattgtagttcatcctgagtatgtatctgctatgtttttgcagcattgggctctaatggaagagctaaatcgcagcaagaaggactttgaagcaatcattcaagccaagaacaaagaattagagcagaccaaggtactggaaagaagatggaagtttagaatttggttagtgcatgcaactcagcattttcaacagtgcaagggttgctagggaaaataaagagagaaattatggctgctccttgcctctggggagataatctataaaattatagaggcctatagcaggttctgcctgtcagacaacatctatttccttcccttgttcagaagcaaaatgctgggaataaggcacttgcatcctgtattctagtcctttgtctatggtgggtactccttcagagtgtgtcactgatacagactgaggaatattgtagtcaagaaatagttcctcctgaactatgtaatttgaattacataaagtaaagtgaattacttaatgcagtttcttcccatgtcaaatcaggagaactcttgaattaggggttataaacttaaatgcccaccagggccagactggtaatcaaagtgagtgaagtggcctgaatgtaagaacacagtagggagctgtgcgggc

SEQ ID NO: 120570 - DNA, 2232 bp, Homo sapiens
ttttttttttgagacagagtctcactctgtcaacccaggctagagtgcagtgccacaatctcggctcactgcaacctccacttcctgggctcaagcagttcttgtgcctcagcctcccaagtagctgggtcccttacaggcacatgccaccatgcctgtctaagcttttgtatttttagtagacatggggttttgccatgttggctaggctagtctcgaactcctgacctcaggtgatctgcccacctcagcctcccaaagtgctgggattacaggtgtgagtcaccacacccagccgaccccttcttattctcccaaccctgaatgaagcctgggctacacaggctgcttctactataggggaacattctgaagagattttcttccaggaacttataactatttgatttcaaagtcacctctagagatgaccacctcttatttgtttttataatcttctttcccttcactgtccttttttggcatttcatctgttcttaaatgtttatttggtatgattaacattttgagctgcaatgaagcctttatctctttgttgttgaggagaaaacagggccaaattagattttggaagtatcagaataaagctgctcaataaaagctattctttctttactctgaatgggcactatgccgagaatatgcttatagtgcaaccttttaaacgagggggtaaacgtcattaaaatgtggtcactttgggaatttacggcccaagttgaatatatttcagggactctgaggctccttatggaaatgaaacctctaccatttgttagcctatcatatttttgcactggcttatttatttatttgacaaattctgctgtttgtgaccagttcaccttagaccacagatgttaaattcaagttgctaaatgacagtgctattcagactcctttaaaaagaaggccaggtgcagtggctcacacctgtaatcccagcactttggaaggccaaggcaagaggatcacctgaggttaggagctcgagaccagactggccaacatggtgaaacaccatctctactaaaactacaaaaattagccagacatggtggtgtgtgcatgtagtcccagctagtcggaaggctgaggcaggagaatcacttcaatttgggaggcggaggctacagtgagtcgagatcacgcaactgcacttcagcctgggtgacagagcaaggcatgaaaaaaaagaaaaagagaaagaaaaatgtaggccgggtgcaatggctcatgcctataatccgagcactttgggaggccaaggtgggcggatcacctgaggtcaagagttcaagatcagcctggtcaacgtggcaaaaccccatctttactaaaaatacaaaaattagccaagcatggtggcatgcacctgtaatcccagctactcgggaggctgaggcaggagaattgcttgaacccaggaggcagagcttgcagtgagctgatatcgcaccactgcactccagcatgggtgacagagcgagactccgtctcaaaaaaaaaaaaaaaaaaaaaaagaaaaacatatacacacagctttcttttctcaggtgatctttagggaagttgggtctgttagcctcttgaaaaatctctcctgggcagaactgtttcttttcctctgggtccgtttggacttcagatcgtaacttctcccataatttctagtcatctgattctctactttggagaagttctatgttgttttgacagggcttatggactctataagaggaagacaaggaacgggggttgaaataaatgatgagttagccaacctggagcatctgcagagacatataagacataaacaacttgaccctgtgttttgtttacagaatactgtcttatctactctactggtcacctcttaaaattcgtctcagaaatatgttttattttatttatttatttatttgtttatttttgagacagagtctcactgtgtcacccaggctggagtgcagtggcgcaatctcggctcactgcagcctcctcctcttgggttcatgtgatcctgcctcagcctccggagtagctgggactacaggcacccgccaccacacccagctaatttttttgtatttttagtagagatgggatttcatcatgttggccaggctggtctcgaactcctgacctcaggtgatctgcctgcctcggcctcccaaagtgctgggattacagtgagcctggccagatgct

SEQ ID NO: 120571 - DNA, 1054 bp, Homo sapiens
gatagtagggccaggaatctgatgctgacttgcaagcacctgtggtttgaaactggccctctgctggtcagccagaatggaggcagcaggcttgtcacagaggctgagcaggacgtgtgtctgagcctcttatgcccaaggaagacattctgacctgtgggagggcagagtagactttgaaagctggttctttggaactgaagttttaccactttactaacagctgtatgctactgggttttgtgcctaaatttaagcccccacagattttcacttccaagagctacttgatctgacagaatcccattgttcttccttttcacctcccatcactccataagcatttacaggaatactacactaggcatcaggagaaaaagttaaataagacattatctcagcccttacggcacaaacagtctggcggaggagatagaaaggcaagtagatagtgtgatgagttccttatcagggtgctatgaaacttcaaaggaagggacacacctgatttggcctggggaggtgcaggtatgggaaaaagcttcatcaaggaaatgacatttgaatgagccttaaaggttccctaggaggttagctttctaaggagaggcagtagcacaagcaaaacacagaggcatgagaagcagtgacctgtcctgccccagttcccagtgtggcccacacaagacataatattcacatgatgtcaaggcttagaaagtatctacggaggctttgtgaatttttttttcttccctctttccctttttgagaggagcagtgatctgggaatccagatttggccaagatcagctgagtcgggggacggggttggggggtggacctagggacacccatgggctttcttcgcccagtctaccacctaagttccttccctgcaatctaagcatggcaaatggcttcacaaaacatcagggaaagaaaaggctgggcacggtggctcatgcctgtaatcccagcactttgggaggccaagatgggcagatcacgaagtcaggagttcgagaccagcctggccaacatggtgaaagcc

SEQ ID NO: 120572 - DNA, 1093 bp, Homo sapiens
gctggtatgtgggaggggcagcaaggaggctagtgctggggagtggagtgagcgctggggagtgggtaggagaggaagcttgagcaagacgcagattttgtagggccttgtaggcctttgaaaggactttgactttaactcactgtgagaggaatgaggagtgggctttgagcagagagtgacatgatctgacttctgttttctcagttcgctatggctgctgtgtgaggaagagacagggtggcgaggctggaagcagggagtccacggaagggaaatacaggctcctcatttatttatttctcttctttttctccaaagcaaagagattgttctgaagaccgtgctctaagggcatttgaaagactgccaggtagtgcgagcctgagatggtctggaggattctctctagccgtgactccgctgctctgaaggtcaactgagaagtcttgtgggacagagacttgagttaggaagccctcagtcacttgccttccacggtggccagccctgctgccatcattggctgaagcaccaccaggattcacggcacccaactgcttcagggtacttcgtagactctgcctcactacatgtcgaaagagttatttgagttctcttctgtttttttttaatttgttgttgttgttactgttttgatacctcggaaacacctccgttgacagttgttttggataggttgggtgtaccccatggctgcctctgaaggcagtgtctattttgagaggatggcttacctcttctttgtgaaaatactatctcatttcctggaaataaaatgtaaaacctgtcagttgctcagctgggctttggtgtatttaccttccttcccttcctgctcccagacagtctcacaagtaaacaccagcagctcatagattacaaccaagaaagtgactgtatcagatgatagacttcaagtgaatgtcagcctaagaggccaagctgcagatcgtggcaacagatgagctctgttaacctcctgactgtcgtgtttcctttttattacagaggtgggtcactgtttaccttgtttcaggggtgggagaaactcctttccttcagctggcat

SEQ ID NO: 120573 - DNA, 1003 bp, Homo sapiens
gggatggtcccttcaccttgggaatattggttaatatttattcggttttatagttcattttcagtgtacattgtcatgcatggccaatattgcatcaaaagtgtagaataactacaggtaccaaggctttatcccccagtggcttgtggagttgatccatgactttctgttatctgacaccagtggcccagggctctctcagtctgtgagcaccacattttccagtaaaacagctattattgaaaaccaacacttgtctagcatccttcctagacctcattctgaggaagaggctattcaagtgctggcactggaagatgtgtagaattgccaaatctcatcccattgatgatttacactttggaatccctgctgtgatcccagtggctgtgacccaagggcagctgactgactggatttatggttacagttaacgatgaagaggagaactgacccagaatgcactgcccccatcaagaaacagaaaaaaagagttgcagagcttgccctgagcctcagctccacgtccgatgatgaacctccctcctctgtcagtcatggagcaaaaggtacgtgtgcttgtgtggtctgaggccactggccatctggttatttgaacacacagtgtctaatctaggtggagcagactatagtccactgccccttggtcccttgaggaaaattaggaatactctacagagagatgttggctatagactcttttcccttctgccattctcctactaagagtggggaaacttgttttaaataaaaaatggtaatttttccagaagttgctttctgttggttgtccttcagtaggtggcactcttgctgccttaaaccagttagaagtagtggtgagcattgagtgctgtgtgcccttaatagctgttaattatcctggggctcttttgtaagggagggcctctttgctgcggccgtcgagcctaattttcactttttttgcatgcataccgttttctcaattccttcagcggtt

SEQ ID NO: 120574 - DNA, 1102 bp, Homo sapiens
taaacggtatcagtgttctgaactatgacagatgtcctaattcaacctactggtggggaagctaaatcatagcccaggagggctccgttctctgttaagatatagagatcccattctcatccttaaacttctgaggcctgaacagcttgcactatttgtaagaggaaatgtctcaaggagtcatatactctgtaggtccttaggaaagtgatacttggctgacacatctttacatttactacagtaatcatttaattaatttctattaaatggaaagcctcagtccaggtgttgggtacagactgtgacatagttcctgctctccaggagtgaccctgtccaatggggacagcaagtggcaaacaataactggctctaaggcaatgtgatgagtgctgtgccaatgacactggtgttactggagcacagtggaagggataatcagttaggcctggagtgctggggaaagctttgttcttcttgaatgtcaacccttagcaggttttggttctggtagggaaatggatggatcacttaagattggcttcagaattataatgtattcttcaagttagaaatacctgaatagtgaccacctcgggtctattaaaaaatgttttacacactgccgtctgtgactttccttcagtacttctcacaagcagccaagttttgaatcaacaccctttctgagtggtgtcccttcttcttcaaaggaattatgccacattgctaagtcaatattttcatatttattttaaattttaatagataatatattcacatggttcataagtcaaaaaatataaaaagatagccagtgtaaactttcgtggtataaaaatgtaaatcaagtttcacttttgctttcactagttccaagtaattgttttggtattctgtctccaaatgctaacccctgaatgtgtgaataatcacttttattggtcttcttgtatatcgttccttccaaaagctctttttgcaattataagaaataaaaatgttagccttataatggaatcgttgaaaatggaatcaggcatcagtgtttggatattgatgttctaataataaccaccagcagcagaaataacaatca

SEQ ID NO: 120575 - DNA, 1862 bp, Homo sapiens
aagtgggctcctgccaagccacttatccttgcctagtaaggctgtttgactggataagggtaaggtagaagttacagcttgaagcggttccattttaaattatgttctctttatcaagtctactctaggtctgcttctcacttaatcagacaaattagcaaatgtccaatgagagattcatgaagtactctgggtgcttttaattaggctatgaggtcccttctcatttatccaatttctggttgccctagactttaacctccagaacagccagccactgggcccacagttatactgcagttatttatttatgcttcttttcttcattaggctaagacaaactttagactttaatcatctatttttcttaggatttagcacactgtttggcatgtgatggggctaaataaatgtctgttgaacctaattaattgtgctccactacttctctttttcaggccaagatgggcttcagggaaggtgaaggattgggtaaatacagccagggtcggaaggacatcgttgaggcttccagtcagaaaggtcgaagaggcttgggtctgacactccggggctttgaccaggagctgaacgtggactggcgagatgagccagaggtaagtgttaaagtgaggaggagatggaaaagccacttgtgtttttggatgcatggctttaagaagccatatcaacaaactagaaatctccagaggcagtatgagcaaagtggaattagttttttacgtggaaagtactggggatatccagaatggaaaacagaaggctgggggagatatggtgggatgtggatttcctgttgcattataggactgtctaagaccaacgggtagaagatgcttgaaaggcagagtttggctccataaaaactttaataaatagttacagctctccactagtggactaggataccttgtgaggcagtgtgctctctgctgaaagtgttcaggcaggccaagggagcacccactctctcactgtgtgagtaactggagtaggtgccttctaagaagatccttgtacttccccaggtttgtgccatccaggttctaaataggtgcttttttatgccacattgcttttctactgtgggtttagtctgcttactagggtaccagtttgttttcaccctgaagaccaaaggaaactctcattatcccttttcatggcacagacaatgtgagattttattttattcatttatttatgtcctatcttattccgtaaaggatctgtagtgggtacaataaaaacacctaaaaataacattgagatattaccattacagagttgaaactagagaaaatggaactcaaacatctagctttctgcatagttgctgtagttcagcttcagatgtggctctgaactctggaaaattgatattttatttgtctccctaatgttccagttcaggaaagaagtcccgtgaatctgcatgtgataaaagcctaataagtcttctgagtaagattctgacgagtgaggggctcatgggttctggggccggtctcgctgttgccttgtagttgtgggcgttgagaccagcagactggcaatgcggaacagggtagatacctgctgctggttgctggttgtgggctttcatctcagaagtacctgatggtttctatgtcttcattcgtgttaaaacaagagtccacatcctttcagtggggcagaagttgaactaacttcactaaactcaaaatctgaaatcaccctataggccgggcatggtggcttacgcctataatcccagcactttgggaggccgaggcgggtggatcacctgaggtcaggagttcaagaccagcctgaccaacatgacgaaaccccatctc

SEQ ID NO: 120576 - DNA, 1060 bp, Homo sapiens
ttgctgtgtgaccttggcccggtggttttactctctctgagtttgagtttcctcatctataaaatgaggagaaaatactcttttctcagggttgttgtgagagctaaatgaaatagtgggtgtgaagtacctgggtaaatgttagcctccccttgacactttttgtcttaattgagaatcacattgtgtgtgggcagaatgagccagggaaactctgaggaggaaatgggttggtgaaaaaggcaggcctcagagtagcctcacagattttattttttggcaggcatagggttgggaatatccataaggtgactggagctcaggtaatgtgaggatttctttatctagagaggaaattggtcaggggagtttgagagaagggattgctactgtgtggtaggtgccatcagaaaaccctagtcttgtttatttgtttctcctctctctaagtgaggtctagtcaggtaagccttcataccagaactttgatcccttggagagtagctgctggtatgggatggagaaacagatttactatgaggattagcaatgcccagaggtggctctgtgtgtagcagcgggtgccgttttttaaacacttgccatgtgccaggcacctgtttacattttttttttttaaccaatttaccggcaaggtagttgagagagttattgagcagcctgtgtagggtcacacagtgagacatttcagagctgagatgccacaggaatcttgttccttggagggctgtgagttgggcactgcagggtcttaaggtccctttcctatcctggaattcaccttgaggttctgattctctgggcagagcgtgtttgatgtcttggatggggaagagatgcggcgagctcggactcgggccaatccctatgagatgatccgaggagtcttctttctaaacaggtttgctgacatttccctcccctcccctgatgctccctgctctaccttttcaattgagcctagtacatctagtacttttctgtcttgctttattgcagggcagcaatgaagatggctaacatggattttgtatttgat

SEQ ID NO: 120577 - DNA, 1095 bp, Homo sapiens
gtagctgggtttacaggtgtgcgccaccacacctggctaattttttgtatttttagtagagacagggttttaccacgttggccaggctggtctcaaacccctgacctcaggctatctgcctctctggcctcccaaagtgctgggattacaggcttgagccaccgcgcctggctccatgaagatgtttttatgaggagtctgagctaggcctggtgatgtgataggcattgtgggtattttgagggtgggtgaggcaacactaaagggtgttaatcaccagaagatacatttcctgggtgctgtagctctggtgggagctctggattgtacttgccgaaaggcttattttactctccctgcattctccttcctgttgcccattgagctgtcttgttttccttcctctcctgtcctccacttgcctttgcagaagccactggtgaaggaccgggaagctgagcttctgtactttgctgatgtctgcgcaggcccaggtggcttctcagagtatgtgctgtggaggaagaagtggcatgcaaagggctttggaatgactttgaagggccctaatgacttcaagctggaggacttctactctgcttccagtgaactcttcgaaccctactatggtagggacattgaggagggtactaggaggtatgagggacagcccctctatggggacttcaggtcagaagcagttgttatccacatgccatattttctttcctaggtctcttaccctgggcttcacagttcatgtcagaatcttggttccctctggactatccctttttaccctgggcctgcagaatacaggtcaaacactccctcagcagattctcatcaaggccctattaattcctcctttcaggaacactctgcttttgtggtggcaggagataatgaaactgcctgatctctggctgagaactggcagggtttttaacaaatataaacccaatgcccatctctcgccctctgtgccaggtgcagaatgcactgggttgcagacagctcagcaacccacagcagtccctctgttctatgttgattgtaatttgacagcaaatcctaagtcctttctgaacagtc

SEQ ID NO: 120578 - DNA, 1600 bp, Homo sapiens
cgctgtccattgtccggacaggtgacacttcctcagctgtctcctcaccccaggacccacttagaggccctattggacaagaacatgtacaaggggttggtggggaagttaaaaaaatctgcttatattagaggacaggtagctaaatgagtaatttagggaagaaagggctgtggaatcctcaaagtcccctccaaagatggttctcccccttaaattgtctctgagttttaacagacccaggtgctggtttccttgactttgtcatatttactcccaagactacttcacccatctcttggaatagacccattggctgcttttggtgttttctctctaatctaggaggccacttcatctgtaaaacctttgacctgttcacaccgtttagtgtggggcttgtctacctgctgtactgctgctttgaacgagtttgtctcttcaagcctattaccagccgtcctgccaactcagagaggtgaagcctttctctctatattagccagattaattggctaaatgtcagaacagcaaatcatggtgcatctctctggcatgacctcttaagctacgtttaaaaccttgactttaaagaagtgatgagagccaacaggattcaggattcctggatcttttggtcttgtgatatgccagttcagcctctgcctccttcttccaagccttatgctccatgcttatgtgagggattctcagcttggccaaggagaaagtgaccaatagtagggacacttcaggggtcttgggctgggaaggggcaaggagccgctatccagaggcactactggggtcccagtgtgacactgcccacacacaaggtgagagaaaatgcaaccaatcagaattgcccggtggctttgttacaaacacatatttctgggccttctcctgggagagtttgattcattaggtctataatttaacagactccccaggtgattgtgacacagcccgtctgtcacagggaagttaggaactactgcgatagagagtagaaatagagctcaacagagaaggatttgaggggaactttagcaccacaaagggtctgtgttgttctttgtgcgtaggcctaaggttgaacagggaagccattaagctttgtgattccacaaggggttgggggaaaaggaatgtatggggaggaagcccttgctcggtggagtgacagagtatcttctgccaggtatgtggtgtgcaagggcctgaaggtgggcatagatgatgttcgggattacctcttcgcagtgaatattaaactcaatcagctgcggaacacggattccgacgtcaacttggtggtccccctggaggtgatcaagggagaccatgaatttactgactacatgatacggtccaatgagaggtaagccaacgggctggtttttgctggtaacactgaggtcctaaggaagaccagagagtgaaagactgaatggttggctcttggtatcactttgtcaaccctgacaaattggcaactgggtttggtctgctggtttcagggctccctgggactttggttagttaccctcagggacccccatcctgctgccatgccctatcccaagggtggcaggta

SEQ ID NO: 120579 - DNA, 1647 bp, Homo sapiens
tatttcagatcccagaccaggctcgtgtggctccttcttcctccgaccctaaatcgaagttctttgagctaatccaggtaagactggtatctgtggtggacataaaaagttagagatctgtctctagatgtggatggtatcactgaggccccagatgcatggtctccagagggcttgtgcagatgcccaccatgggctctaaggggcggagctaaggctgccacaggtgggaacctttggtatagggtgttgaattccccaagagcacagtcaggccaacggaagattctcatgttcagtgcttgggctcagcattcctgccacccaaagggtggttctggctgtgtcaccctggcaagttcagggtcctgtgggatttgcctacaaaggagacatagagtgtgggatgatcttaggcaagggagctgggcacagggtgaagggagctgccagggaagcccgcagcagggttggcctaaccccaggttctttgtcttatttctggtgagctggtcctcagagttcttttgccctgtttcttctaccactcaacctccagcttttacttgggcctcatttaaatctgtcccagatcatgggcaattgtgctggttttgtgggggtcagggagtagagactgaggttcaagatgccctcaaaagaatagtatgtgtacatttttctaaatggggtaaagagatcactaaactgttctcaaaccaactgctggagaatccttgctttgagttttattgaaggggcagcttttatattctggtgacattttcttataggtctggtaaattgatctgtacttggggactcagtgttctttccttttccagcctctcctaataggtcctacaggaacattccaagcagatggaaatagatcccatttagtgcacagttaggtagagaagggggtgcaggggagcatatttcagagagccaatgcttcctgtcccttgccttgtcgagcctgcccccagcccagataggcacccatactgtcccttcccccaacccggcagtgttttctctgactcgtggctgcagggcactgagattgacatcttcagctacaagcccacactgctcacctctaaaaccctggagaagatccgccctgtgtttgactaccgctgcatggtatctggcagtgagcagaagttcctcatcggcctgggggtaagtctgcagctggcttcctgcccagcttggaatggtggatttgccctttgcggaatctggacagctgcctgccacacttggtacatgttctcttggcattaagtagctgttgctttgaccctagtgaaggtatttcttgaaacttcgtttcctttcttcctctgagtttgccaagtgtcattcattcattctttcatttgtttcttcaattctgtgcattgctaaagggaacactgctacttttcttgtgatacagagcttcccaggctagcagagtggtcagcaggcttatctggcttgagcccaggcagccattcctttgcaacaccaccaccaccccatgccatcccatcccctgtcttgcaaagatactccctgtccctaccctgggccccctggagtctaaagtgaggtgagggaaagccttggcaagctctttatcttacttaactg

SEQ ID NO: 120580 - DNA, 1991 bp, Homo sapiens
ggctcttgcccaggtctgtccacatggattttaggccttccataacaagttactgctaaacagtcctaatagtcctattacccacagcgggtggggaaaccctaacaagaatgcagggctcttgtttgatgcccatgctcagctcttgggggccctgaacatgtctttggaactgctagtggggaacgttcccagaaatcgagcaaccaaaccacaagcaatgaaggcagggttccccctgggagctgtctttcaggacctagcagacaggacattttaaagtgcagaaagaaattcctttgaaactttcacatgccatctataaagtgcattctcaatactggatttaattttaactaagtaaatttatgttaaaaagaacaaaaacaatgtggataaagtgtaaatagatacctcagtctccagccgcatgaagctcccgagagcagggctaagcagtgccctttggcaataacctcagacctcagcctaccctggaaaagtgtgtcctccatctgtctcctcctgactctgttctcttcctcctttctctctcagggtcctggaactttcccactatctaacattacaaccctggcctccttctccctcagcactgggggtcccattccctcaaacaatccttctctttttcatgttcaaaattcctattccctcagcacccatttcttacctgaaaaaaaattaaaaggccaggtaatgtgctaacaatgctcaagtgggaacgggtattcatgaggtgggctggcactctcagaagcacgtgcatcctaaacaaggatgccttaacccctcagaatgaagttcacccactgccaggcaggatggggagatgctctggggcaagtcacctacctagcacccccaaacaaacttcatggcaagaatggtcttgtctctaacacccacttgcctagtgccctccactgagccctcctgtccctcactggacgggagcagcaggtactggccagaaagaagcatggagggtagggaccacatgctcacctgatgggattcatgtcgggccgactaggcttggaaacggctttcacaaatttctcggcaagctgaattctacaatccaaacagtctctctgagaggcaagccaaggatgcctccaccagcacccctacccccagggcattttcacagctccagtaggagaaccttctgaatctgcggcaagactgctctaagaggcagcacccatgtcccccaggaagcccgccctgcccttctccaccgacgtctttattcatgccccgcccctgtggattctgacctctaatttcactatgtcggttggttttcctgaagtgtgccttcagctgtgctcagtcacctccactagaacttcaagtatcatctttattgtatgtgtctgccctgtcaccccaaagcatggaaactacagtgcacccactcagatgagcaacttaaatgggaccactcaagcacaggatatttcttccaaggagtaccccctctacccgcaaggtcaccctcttgctcaaccttaacataaatacctcaacctgagcagctgtggcaaaatggagtgtgctggtatctctgataaccagggcccaagccctagcaaactctgaagtggcaactccaattctcaccctgactttgggaccagtcagtgggtgggagggggaaactctcaggatgtcaacaagcagagaaggcctagataaggggccacacctcgggaggccgctgtcctcccaagctgccctggcctacccccaccctccctaccctggggcccaggtcagaccgctggttaaagtgctgctcccgaacgtcggtgccattcagcacaaggacatcgaggatgtggatggcactgatcttcctctgggccttcccctagaaggataagtaggtacactgcccactctgccaggtgtcagccttcagcccccactacccaccatggcatgctggctccattctg

SEQ ID NO: 120581 - DNA, 1149 bp, Homo sapiens
ggatgagtgggggaaggagacaagaaaatggtctccaatttggcatcaaaacagagtaagttcaaagaaacaaaaccttgatttttttatagcaggttctcctggccagctcatgacagcaggtctccacccactcagggatggcccaataaaaagttgggcaaagcaagggcatggctaccctcagggcagtgcatggaactcagaaaagtgagtctacaggatgcaggagagaacagcagagcccacagctctgccactctgatatgtcctccatcagtcccacgtgccctaggcactgacctcatacctgcctcaggagcagcttccttcaggctgagtcctggcaggggaaagttcccaggcaggtgtcccagaaggaacatgagtgttctctgcagggccctgcctgagctcttcaggggatggagaggaggccacccactcctcatgccaggtgcaatgctccccagtcccttttcaagagggggaagaagccagcactgtgggccccaggtggccccatctcaggaatgacagggcattctgcaggggtggcacattctgaggctcttaggccctgtgcatctggatgaaggagaggacgtcctccttggacagcttgtcctggtcctggggcttctgggagtcatgcacacgaatgccatccccccactcccagaagagccggccatagtagcaaatgctggggaggagagggatgggaaagaggtcaggactgcacccagatggcacagggtcatgtgttcttaagggtgtggggcggaggggtctgtcaatgactttagttgaggttcttcccccggcaggcaaaaggtacccggtaggccctaactcccctgcctcccagaaccaacttttcccaacaaacagctgttgctgctaattgcatccaactggattcctacagtgactgatattcctgacttatctgtctgtgcttctctaatatacagtattagtagtgtggtgacagaaaatgtcagtggctaattacaggcacattagggctgctggggaagcctatgaccaacagtctgactaatggacaccgggtcctaatgagggacagctgggaccttgagtgccaaggggcagggctgtgggccctcagcaggttcccaccat

SEQ ID NO: 120582 - DNA, 1074 bp, Homo sapiens
ccatggtggcactgtgacaatccaggatcagtctgtgtgactaaaataacagaggcgtcagaccaattagtgtcactagacttgggcgaaagagggagggagagatagatggtttcactgaccctagcctgcctcccctccaaggagggctggttctgcctgcacgggactgtgcttgggggtgggggatgcagatgctgcaggcacctccctctctgttcccggctggtttctccaccagttagtcatcgccctggtgctggttgccccccaaagtccgccttcactttgctggacttcctcactttggccccaagagtcctttgtgtatggccttagttccctgggcaaccccatcccttgtttttcctacttaactggtttcatctcggccatccacgcccttcctctgttctgccttgctgtagcctcccacctgctcccctccttattccaaagctaggagttttagagttggggggtggaagggtaagggagatgtctgagtttgctgctcctgccacaactccccctctgatcagccccacccctacttctcactacaaaccctacctgatttactggccactgtcaccgtaagtctgtctggtcattaccatgactcttcctgcccactcacagcctccccagccttgcctgcctgtcgaagatggattaactccgcactcccctgggatcgccacatgaccacttcaagtccccaagccgcccttcgctgcacagactgcatttttttctgccataattacaagcaatggcactgactggagggcatgacagtgtgtggtggggggatggacaggtggcacaatgtctgctgctcaaccccagcagtgcccgagccctggaagtaactcccactatttggcttggaaagtgcttcccactgtctccttcccactcgagctgggggccttctcctctattctgaattgtaatccagagctttcccttgaacatctcttcttccttgattcctgagtgccgcctctgctgctgctgcctcttcctgcccccaccgtccaccctccgctagtcagaccatgacattta

SEQ ID NO: 120583 - DNA, 1062 bp, Homo sapiens
cagaaagtcattccatttgggggacccccattcttccattcgtgaaatggaggtcttatttgccatgtctcctagggaagtggtgagaatgagtgaagtcagagatgggaaatggagcattatggggctccgaggtactattcagtcagctgctgggagggtcacagagccccctgaacccttccacccactgacacccaggctcgccccagccagagaggtggccagctaaacacctggagactgagtcagacacagggagatggactttcaatgccaaaacccaggtttggacaacccagtccagtatgttattaaacatttctccacaactcaagtatttccccaagaacacttctctgaaactctaatcaaacaaatggaaaaaacagataccttaactattttgctaccttgatggtaggtaaagtttttgcttaagaaccaagtcagagaggaagaaaggtgtttttgagcatttttctcagtaatttttgattctcacagaaaaatgtatatttttacaacttggactactaagttattaagatgaagtatgtcaatgagaaaaacacctctgtgttgcccctagatgtctaatcacccggccccacacgtgtggagtgtttggaagccagtttcttcacagcatctccgccactctaggatacgcccgtggggcaggtgcatgccgtgttcagggttctggttgctcctgttgtgcgcccaactggggcatcgtgctggggagacaacagaccaaggggctgctcctctccacccccaacctgtgcttggcccagagggctgggacagctgtgagaccctgggcaacacccactactgtttacagtgtggctcaggccactgtcctgtgcagttcagagctgaaccacgtggaggcagaggacagcaaaacaaagacactccagggaagacaggcctgggtgccctgccctgccaaaacgaatggggggaacacctgtccaagaagactcccggaggccctgcttcccagtcccagtgttttgagagctagaagcctcggcagcccacctctct

SEQ ID NO: 120584 - DNA, 1037 bp, Homo sapiens
cgtgtggggccgggtgattagacatctaggggcaacacagaggtgtttttctcattgacatacttcatcttaataacttagtagtccaagttgtaaaaatatacatttttctgtgagaatcaaaaattactgagaaaaatgctcaaaaacacctttcttcctctctgacttggttcttaagcaaaaactttacctaccatcaaggtagcaaaatagttaaggtatctgttttttccatttgtttgattagagtttcagagaagtgttcttggggaaatacttgagttgtggagaaatgtttaataacatactggactgggttgtccaaacctgggttttggcattgaaagtccatctccctgtgtctgactcagtctccaggtgtttagctggccacctctctggctggggcgagcctgggtgtcagtgggtggaagggttcagggggctctgtgaccctcccagcagctgactgaatagtacctcggagccccataatgctccatttcccatctctgacttcactcattctcaccacttccctaggagacatggcaaataagacctccatttcacgaatggaagaatgggggtcccccaaatggaatgactttctgagaagtcagggtggggcacccctctccttatcagtctcagccagttctctgccccattcgcttctggagttagcccctgcagggttagtaatcaatgactgcaggtaagatccctgcctcccacaatggctggttagagggtagcaggcattctggggctgagtgtcaggagagttgcattccaagtctctgggccttctgtctctctccacggccaacacccatctcagccacttccatgtcagccacttttccttcttcccgagggaggcctggcaatgacacaccatccaccccctgccctgcagccccaccatggccacctccagccccataagcagggccctgtgggagagagcgaccacagagccttgagttaattgcctggttaattgtgtcgtttctctgctactgggcacc

SEQ ID NO: 120585 - DNA, 1056 bp, Homo sapiens
gcagtccatgttctcagctaaagttgaacaggtgatgatgccctgccttgtttcagctgtcctactgtaaacaagggtccttattgtgttctatttagtgccctgtttttgttttgttttgtttttttcattctcatgttttttattggtatttcgctgtgttttgcttttgagacagaatctcactctcgcccaggctggagtgtagtggtgcactcttggctctgcaacctccacctcccattcaagtgttcacccccaccttcccccgacacagcctctctagtagccaggattagaccaccaccacatccggctaatttttgtatttttggtaaagacgggggtcttgccatgtcggccaggctggtctcgaactcctgaccttaggtgatctgcccacctcggcctcccaaagtgctgggattagaggtgtgagccactgcctgattttgctgtttaaagtgcccccgatccccgacccccgaccccaagcatagggctgaagtgctgtctggcattcctaaatccaagaaggctgtgatgtgttgtagaagaaaacaggttttttagataaactgttcaggcatgatataactcatgatgtaacagcacgtatagtgctgttggttgtgagtccagtgttaatgaatcaacaatatatattgaataaggtcactttaaacagaatcacacatgaaacaaggttgcaaaaatgttgtgtccataggcttgcaggaacctcacctggtttggtatttgctaattcaatattagaggcaactttataggacatagctaccaggaacaacaagaaccaactgtattcaggctaaggtaggagtatgtaaatgaaggaatatgtaaataagtgggtgtgtcagtgttccactaaagctttatctgcaagaacagtccttagaccatttggccacagggcttagttgccaactcctggtctagagtaccaggtctatggtggttctgccagattcccttcctctgtggcttcaccatctcttgagatcttgtcaccttatcagtggaaccggggca

SEQ ID NO: 120586 - DNA, 1033 bp, Homo sapiens
gccagcttgtcgttatagggttttgtttagcaattgttgccatgggtattttttgttattattttgttttcagtttctatcagctttgacactattgtatctgttgttataaatttggggcaaatacttgggtggtttcctgctatcatgggtgcatagttcactgcaaaaaggcagccccttgcaaacacaagcgtttctctgtaaacaggagatgccctctccacctgtctatgtgtccttcctgctgagaccatcaattacgggtttcctttgccccagacatcgcagacaatagtgacctgcgtggtgtcagggaggatgcaagcaccccaggtaccccactgaggtcctttcatccccctggcacatacagagacccagcctggattcccatggaggctgtttgctgagccttagagcagcttgacttgcctccatgttggaaattctgcccatgagcagatggattactgtgggccagctgtctgtctgtctgtctttattaccccagggagctgtggttctgaacctcctattgggggttttagaactaagtgtttcaggaaagtcgaatgctgcattgacagacaggagaactggagtcgttcctggctagcccaagttctcactgcatgaccttgggcaggtcaagcctcctctttggctcttaattttgtctgctcaatgggtacagtggggagaacgagacagtcaccctaggttcctgtttttcatgaccttgttatttgtaagacataacgaggaagacataaagcttccttgttagctgtaagggagacatataaagtaagaactaacgattacctcaagatctctttaatctagttagagagacagactgacaacatgaaatagtgcatgccagacatcatataattaaatgccagctgtctggtactcactgttgatgcattaggagtgcagaaacaagagaatggggtgggtatttggggatggctttgtggaggctctgggtccaggaggacagatgagattgcgtcaggcaaag

SEQ ID NO: 120587 - DNA, 1989 bp, Homo sapiens
tgtcctttcccctgtttgtccttctccgttcccagtctttgtctctctacctctgcagatgcctccacgttgatttctcctcctgtcaggcccaatttggaacattaattagtgatgaattagcaatgcaaatcccagcagttgccgtcgcctggtacccacgggctcttggaagggaccttgcaaatctgatcttaatacctctcgcctcctctcctagggcaattacttctcacatcatttgtctgcggaggcggtgtccaacccccaccctcccagcctggctgaggacaacaagttcatctttgtcaattaattattgaacggtttatttcgcactgggaggcgataagagaagggaaaaccgcatgttgtgaaatcatcaccgtaattatacagacgctgctgcatcgcccagcatcacaacgccgcaggtgcctgtggggggtgggaagagaaggaaagggcagaagtcccaggagggagacctgactgtgtggtcttaggataccctttgggcctctctgaattgtgttggacagacacacccacatggagcttgcggagcccacctccacgtgaggaggggatctgcagaattaaggtcataggtacacaggtgcaggcccctgcttccttagctggggtgatcagactgtaggagggctgaagatgtccttatggtccttcccacctgagcttcagaggcccacagcaggccaaaaatacggtggcatggtagagggtctttgatactctagcagaaagcccttacgaagacctgcaaggcccagagcatctgtcccagccccagccctcacccctggccttttacctctcacgtcatctctgatgggtcccaatattgcttattccactccaatcacacagatctctttgctactcgctgtacctgctggatacacacctgccccagggcctttgaatgtgctgttccttctgcttgaagtgctctttcctgggagagctgagtggctctatcacttcctgcaggtcattctcaagcaccaggtttcagggagacccacgctgagcatttctttcaaaattctggtggggaccccaaaacaaaccatctctctctcttcctgttttatttttctccagaacacttcatcacatttcatatatgatgtattttacatatttgtttattctctgtctctttttctcttacagagcataagctccacaaggggctgggattttcgtccgtctcaccctccagcacccagcccctgcattccacctgtgtctgcagtgcttagaactgtgcctggcacaaaataagtgcagaggtcattgttattgaatgagtgaatgaatgaatgaatgaatgaatgactatttgtgtgggacaaagcctggatgtggaaaggacagaggtgagttctttttcctggaacaggccagcaagggccactgcaggaccaggaatttaggaagactcttggcacagatgggaggccctggccaggaaggaaaactgctggaaaaatcattttaaaagcaagtgttccagttgatttcgtgtctgtgcacgccttgaggctggcatgtttgatgctgcccctccatcggtcacatgcagaacagcccccaccccttctcaactccccagggagggcacaggaacatgagtagttgcagacactttgattaactccccagcaagagtccccacgcctgtgtctccttctctcccaaagctgtaatggggggcagtgagctgagggctgggggatgggtggagtgaagctggggcctgcaggggtggaggcgactgagaagaggagtgggaggagggaaagggcttctgcccctaccatggggagatagggaagatgagtaggtagataatgtggggcggggagggggttacttggtgatacatgtggggaggtattgtagtcaagaaggcacctctctctctaggacagaaggagatgcagaaagagagacctccag

SEQ ID NO: 120588 - DNA, 1035 bp, Homo sapiens
cacagccaagtgcactagtaccatgagaagggggatgctcggggaagggctccagcccttcccactttccatcccctctgaagccctgcacagccctcagcatgaattttgaacatgttcatgaaacatccctacccgtttaatgtctgctttgagcatttccacccctgggttgcatgtgtacgggtgcatagcaggtggtcccctttctctatctcttgctcctatttcatcatcttgggagctgtcatttatggagacagcacatactatttggtcaggtgttttacatatattgcattagcccctcattagcagccctgggagaaggcatcattgttcttattttataaatgaagaggctgaggctcagagaggttaagtaatttgctcagcatcacacagcatcacccagctagtgggtagcagagccaggaatgggccccagattgtgtgactccacagctgtgctgtttccatctctctaaagcagacctttcctctccccatggttccttatcacatctccctgttttcgagtcatcatagcatttaacactctgaaatcaccctgtccatttctgtttccttttttgctatccatctccccagcaatgctctttgagagccatctcttgtttgcttttcatgacagtatctccagtgcccagcacagtgcctggcccagaagcatttattgttcgacagattgagtgaaaggatcgtgtcatggtgtatcttgaaacagccctgcctgggttgccttccgaatcaggagatgctgctgcaggcagtgccttcctagggtatgtggagctggatggaggctgaggttcagtggggcagggaccctttggggttcagggtcagaaacatggttctggccattccaagggtgacctgagccaatgggaggctgactcatgttaaagaaactcagtggggggtgatgagcaaattgaaaagccaaggccaaggggcactaggtaatgtactactagtgaggactcatttcagaaggaaaactgtacctgg

SEQ ID NO: 120589 - DNA, 1047 bp, Homo sapiens
ctgcctgctggtggagaacagactacagcaggcaagggaggaagcagggaagacctatcaggaggctgctgtcacaagccaggcaggcctcgggagtgggggctaagactagggtggcatcgcagggggcagattcctgattggttctgaaggtcaagccgacagagcttgctggtgaattgggtgtggggtgtgggaggaggagaaaagtcatggatgactcccagatttctggctgatacttggttaacgggagacaacgtgttcccactaatacaagtgtagggggtgaggagtggctcccaacccttgggggtactggggggcagtgaaagttggctgctggaggtcagtggatggaggggccataaagcgaatgaggtcctccttacatttctgctccctggttctttaacctcagagctaattttcctgtggtctcctgggtagaagccaaggcctggcctggaggaaccaggtaactgcatatgcagagatggctttaggggttgctagaagttggggtgcagcacccctatctccccctgcagctgggtggggtgctttccaggagctggagctctacccagggacccacagtgacccgaggtcggagggggtcagagtctgccaggctgtgggagacccccagaaatgctgtccttccttccctccctttctgtgctgctatgggccaaggccccaccagctctcaagctgcaacattgatttgctttcattgttgttattgttattattatccacttaaacaacttcatagaaaaaaaagaagcccaatgaccatcaaacattaaccattcattctaaactccctgcccatacctgtcaatatatttttacatagcagtaaacagtggtctgttctgctttctcggctgcctttatctcctacacacgtctcctgctattgactgagccctcagacctgtcactttaatggccgcaggacaccccctgcatcgatgtgctggagttcgggtcaccatttctctgctgccgagcatttgggtaggagccaatttccct

SEQ ID NO: 120590 - DNA, 1027 bp, Homo sapiens
ttgtgagccaccatgcctgatcaaaaccagcaaatatttaatgagtacccactacgtgtctggaagggtggtgggtcttggctgcagaggtgaaatgacatctgtccccaaggagctcacagctgagctggtgaacacacagccttttctaatgccctcattttccagatggaggagctgaggttcacattgagtgacttgcccagggccctacagttaggcggtggtggagtcagggttcgaactcaagactgcccaatgcaaagtccagtgcctgtctacttccccaaatgtgaggtttctgaaggcattccctggcagatttttgttccccagcctgtgctgtggcagatgggttggcccaagggagcagcataaggaccccccaggcctgtttgctagaaagaaagacctgaccagaaaggcttaaacaaatgatgactttctcaagtctcaaggtaggttctcaaggctcctttcatcttcgtgctctgctcttctcatggtggtggttctcaaacttggctgcatgttagaataacctggaaggtttaaaaagtcctgatgctggctaggctcagtgactcacacctgtaatcccaacactttgggaggccaaggcgggtggatctcctgaggtcaggagtttgagaccagcctgggcaacatggtgaaaccccgtctctactaaaaataaaaaaattagccaggtgtggtggcggacacctgtaatcccagctactcgggaggctgaggcaggagaatcgcttgaatcagggaggccgaggttgtagtgagccgagatcacgccactgcactccagcctgagcaacgagagtgaaactccatctcaaaaaaaaaaagcccaggttgcacaacatacccattaaatcagaatgtctagggggtggaaaccagtcatctgcattaaaaaaaaaagtccctacgtgattccagtgtgcagcaaaggttgggaaccctgccttttgacattttgcctcaaggtcaccaaaaggctgatggggct

SEQ ID NO: 120591 - DNA, 1051 bp, Homo sapiens
agagccctggggagcaccaatgtttagggggcgggaggaggcctgagaggggacatgacccgagggtctgtgacagagtctgtgagaggaggaggaggaatgagaaagggccaccgggggactggggagctcggggcagctgcagcacagagtggggctcctcaaactttcccgtgcacaagtctcccctgggatcttgtggaaatgcggattcttgattcagcggggctggggctgggctgagattctgcgtgaatctggtggtgccgatgctgctagaccagggattgcgctgtgcaaaatgagggcttcaagtaagaagtctggactcgggttggagggccaggtgggcagcctgttgcctctgagggtccttgcccaatggcctcgcctctctgagcctcagtttccccatgtgaagcctggtttaggcacgcttaccttttgggattacagagaagcccaggagtgatagcactttgtaaactcgaaggtgaactatggggactccgtttcacgagagcagagagggtggcaggcagatggcagggagctccgggtgtgggtggcatgtggcaacaggaggtataggctgtgcttttgagaaatgtggcaggccagggaggctggaatagcagctccccttccccaagcccagccttttgcctgtgaaaggctggagctgcaggggtgggtgaccttggtggctgggtggtggcttgagcagactcgagggcactgcttggctggctttgaagattccaccccaggctcttcttggttcctttccaggcccagaaactcagccgagatacattaattatctggaggattggaagctgtgtagaaaagtggttctcagccctggcgcatgtcagaaccacctggagagctttttcaacaacagatgcccagccccaccccgggcctcctgaatcagaaaccctgcaggtggcatcaaggcatctgtggttgtaagagctgtttagatgattcttgggcacagctggtgtagacagtgtgtctgaaaaagccagaccaaaacagatgt

SEQ ID NO: 120592 - DNA, 1421 bp, Homo sapiens
ctcctggcccagtttgttgtcctctggggtggatcctgtaatctgctttctggcaagccagggggctgggctggccccagtggcctagttctggggcaaaggcagtagccaagtgatggaagaggaatatcttgcatgcggatagcgtcagggaacaccccgccttctgtcccggcttctgctcctctcatagcagtcggaccgcaggtcagtgggattcctctcccttacaaaaacacaacaaacccctgaattatttaatatgcagaagtgggaattgacattatccttaagacaggttgtttgcaacttactggtggaagtcaaaatatttcaccaaaggtgtcatcagaaactactatcctatgttaatttttgtaggaacatgaagacagatgttgaataatttgacaagagcaacacagcttacagaattatcactaagtcaggtttttttccctcctctggggagcacggagaaggaatttcaggaagtgagtgtcccagtgtcatctcccgggtgttgatctgggtgtgggcacttgaggtttttcactggagttcctaccccatgccttgaaactttggtttcctggggctaacagaggcttggggttctcttttgtcctcgagaagctccgtgcttctgttccttctttcttttcacttacagaaattgcacaagcgagggggagcactttgtgtccacaaatccaagctgctttgtttgctttgctggtgttacctccccatcccaagttgattttggccctttagccagtgtgaggggtccccagacccttggtgtcaggctggagagcccccgccttagggtcaagatcctcatgatgtcccatccgacattacaggatgggaatctgcttcatgggtgggcgggggctctaggtcaggggaggaggtcggttagagaggattttgttagcaggaaagcatccttgagggggtgggcaggggagagctgagagctacttggctaggcctggctgtgagctgctgggaccaaggtggcaaagcctcatttagagcctggtatattagctctgctttgctggaacatggagggacaggctgggggggaaggggggtggaatctgtagggagaatggagggagctaatcacagccgccaaggcccggcaaatgaatgatgcaggaaatcaatacctgggggcgggagtggaaatccgggcagtggtagcagccccagcttctcccagctgcccaggaggcatgggggagggcctgggaggagtgagacagaggcaggaatgtggaagacacccccaccccaaacaccactgcccccacgtccctgccactcccccctgcccccctccccactttcatctcatggctgggctcatgaaaggtgggctaggagatgacccacccggtgaagac

SEQ ID NO: 120593 - DNA, 1101 bp, Homo sapiens
tttccttgtcaaaaaggaagaaaaaaaccacacaaaacctgaagtcagcctggattggggaatatgagatccagtttcctcagttggctctcaaattctcctctttctcaatttaagtaaaaatgataaaaatgttgacagtgggtagcatatattgtttggccatcatgtgttaaggcgaaaaaaatgtgaggtgggaaatcagctcctcttcctccccccattactgtttaaattctcctggtaacactttaagcttcatggattgccacctaacaggtgcctccatcataccacatgactgtagttctgcagtaagaaagctggagactttgaaggctggcttttgtgatttgagtcccttttctcttttatcgttttgttttagttttattttttgagagattccgtatatttggagacatagaggcaggaaggaagattgtttctggtgaggacatcttgggaagaagtatggaagtagttttccctttgctatctcccatattgtaggaatggttaacagaaattaagagtaattttgggagtgcagagaaagattagaaagtggatcttaatgtagacttctgtggaagttgtcgtatctcaaggttatgacaaagaagtggattttcattttctcatttttctgcctttctcaaaaatttccctgtggaaggacattagtcaaaaataagttgtggcatataaaaagtcctaaaaatgtgaaaatatttctagtcttcccttcattttgatttgaaaataattggtttgcctgtgaagtgctttcatggactgtctaattcccacaagaatcttgcgaggtaggaaccattatctcattattagctggggaaactgaggctttgggtggataatttgccgcttcacacagggagtgtagggtggagctggtgagctctttagagtgcgtagtaccatcatgtttatggtatcagtctgctgccctggaaaaatcttgtgtcacaagcctcagattgtaactcattgtaagacatatgtcctaaagaaagtcgctgccagtggcagctaatgctcaggatgtatcaggtctctttcctggcaacacgtttatgt

SEQ ID NO: 120594 - DNA, 1296 bp, Homo sapiens
tgcaatgttttaacctttcctaaggacgtttgtagacaattgtgtagtttgtattttataccaaagcatagcaacattgccgccttgtttccatcgtatcacaactgactttggacatgtttcccttactgtatgggccacattcatattttgttcactgagtaaacttagaatatatttaacagatatttgaatgcctgtgatataatggtgggcaaggaggtgctggccccatactctggggcagggggcacagggaagtaaactgacagttgcaatacgttgtacaggtgctctaggggaggggcacctaccctagctggggtggaggtagaggaaagtagcctggagaaagtgacactttagcctagacccacaggaagggtagaagtagagtatggaaacaaatattcctttcaggcagtgggactaacatgggtgaaggccgggatgtgagtgagagcactactcatttgaggaacaggtttgttgggtctgttgatagattgtgaagggggatcacaatctagagataagggggtctgttggtagattgtgaagggtgatcacaatctagagataaggctggggaattgagaggaattggtgatccagggccctcatagcattgtaatgctgaggactttggacttttatcctgagtgcagtgaggagctactcaagaactttgatcagggagtgatgtatatctttaatgtgaaagactattggtggttcttgagaatggcttgggtgtgtgggtatgactctgtgtgtctgtatgaatgtgatatacgtgtttccgtggaacgttgccaagtccagatttgccctgtggtggcgtgaaccagtgtaatgcctggggagaatagagcgaagtacatagaagtgaaagccattcaggaggtatcttttgccttttcccttcatgaaaatgaaggtgaatatgttttaaaaattttatgcagctttgcactccttggaagctctaggtctaaagtcagctagccagggcgcacacccagccctttgctgaggagcctctcagcagaatgttttggctccggcagactaacggcagttcctttaggattgctgctctttcgagtgacttaggctgcaggacttgctgcccagcattgcccagtcaggacactaatcagtgtggctcggttgaataggagagctttaactgcattctcttgtgagaatgcagttgaagaatgccaagaggagtgtacaattcaaatgcgttagtgcttgtaacacgtggttccagttctctccctcttggct

SEQ ID NO: 120595 - DNA, 1049 bp, Homo sapiens
tataatccttaatggtatcaaaattaacattagttttcacaaattaacctttccttgctctaaaaatcagagaactaagaaggctttgaaaagaataaagtccttaaaaagaaaccaagaacagtatataaaagattatttatttagaacagaatacttagagggtgagaactaatatcatttggattttttattaggtcatagggaggttctgtccatgcaaagtgatgtagtattttgaattcttgcaataatcacagattaaaattgaggttaaatattgttgttttctttttcacccaggcctgggactggcaggctgcatggctttgtggctgaggctggaagcagagcctatcaaagtcccctctcttgcaaaaaaaaaagaaattcttttctgtttttgaagaaaggttaaggttgatatctcagcaaagctacttgaaggaagtgattggtcttgacccagcacttgtaatgcagtacttacaaaatcatccagattctggctttttggatttcgtgggactttgtgtcagagtggttttcaaaagagggccttcattccaactgtgtggatgacactgatgttactcaatttttctagggtttctgaggaacagcgatcctgctctgggctgggtccctgtgtaacaagattacattgctgagtgagatatttaaacataagacatttcctgtaagtgtcatatgcagaaaaggaggttaaggaactttatttacagtgtcttggctggatgctgtggctggcggctgtaaacccagcactttgcgaggccaaggcgtgaggatcacttgaggtcaggagtttgagaccagcctgaacaacatggtgaaactccgtctgtaccaaaaataaaaaaattaactgaggtggtggcatgctcctgtagtctcagctacttgggaggctgaggcagtagattcgcttgaatccaggaggcagagattgtagtgagctgagattgtgccactgtactccagtctgggcaacacagtgagactccatctcaaaaaaaaaaaaaaag

SEQ ID NO: 120596 - DNA, 1038 bp, Homo sapiens
ggctcgaaaaatgaaatgaaataaaataaaataaatggagaagtgtttttgtatattgacccacaaaaatacttgcatgtagaaacttttaattttttttattgatttgggaggacatgttcatgtagtctctgaggcctgagttccctgtttctgtggatcagtcactgttaactagctcaccctgttcccccaacctcacccatgctgtagcacttccaatatgtgcttaaaaccgtgcattttatttgtaaggctgatgatcttcttcagggaatattgagcaggatctattaaggaacagttgctttgacttaaatgaaaaagtctttgcaactgacagataaaatcttgagtgaaaatgtgtggagtactgcactcttgtatagtaggatctctttaggggatctcaaaaatcctgatctgtggaagtgtatgtccctacaaactgcattttcttacccttggttttaaactttctaggattatatattctaatatgatagttgaaagccaccaaatttacctaaatagttttcattctaaataaattagatttttacattgtgtgtgtttttggttggagttagggacaggaagagtagactgttggttttgtgtttaaagttgcggtgcagaaaagtcattggacagagatctgtgtaatttggaggtgagttggaagggaaaggacacagaaggtggtcaaaggggaagactggggcaagggggatgaggatggggacacacagaggaaagtagaatggtgggattataattgggaatgaagttgctttgtggccaccatcgtttagtcaaactgtgagaggtggtctcatctgtaaggctagagtaattaatgtgaaaaggtggtggttagggtgaatgagatgttctgtcttttcttgaagtgtggtatgtgagtcccctgggaccttacaggaaagtgctaatgatcacaggatgacagctgagatacagattccaaactaaagtttagtggaaatagcagcagctttcagcaaaattggtgttcca

SEQ ID NO: 120597 - DNA, 1027 bp, Homo sapiens
ttccattccttgggattgatttttcttctctcctctttcccccatgcctggtggggaattcaacagtcttgcccatcgtctgtttaacttgctcttcttagaaaaacaactcacacaagcccttcttttttaaaagattttacagtgaatacatatggggaagttacattagatcttaaagaatttaacagtagtatttcctggggaatgggaccttttcttatttgctgagaggctgatgaagggccccctttctcgtctatcccaaactcctccaaaactccgaagatgaagggcatactgatctcttatctccagaaaaccagctgaaccaagtggctaggcatgggttttggaatcaaagatctggattggaatcaaagacgtgagtttacctctgtgtctctttatctttaaaaaaatagtatcttagagttggctttgagatttaatgagctctgatgcctctcaagcccttgccacagagcctggtcatggtaattacatttattaaaggccagcttcccaacttgaaagaaggagcactgatggcagattagtaaatacagaactatcttacctcatatgggaaatttgcatttatagtgatctccagactgatgccaccttattaattggtgaagtttctgaccagcttttggcccctttggccattttccagagccagtcctttttccagcaagtgttaagcactctattgtgtgtcttgagctatgctaggcaagagataccttggtctggcttctgccctgagaaagctcacggtctagaaggggagatggatcaataaactgacaaaacagtgttcgagaagtgctctgggagatcactgagtattgtgagaactctaatgggcagcttacctagatgggaactgagggcggccaggagagcttctcatgagttaggtttgagctagatatgaaagacgagcagaagttaaccacatgaagatggtaaggaggggatttctgggcagagggaacagcatgtacagagaggcaca

SEQ ID NO: 120598 - DNA, 1207 bp, Homo sapiens
gtctctgactcctggcttgaaagcagtccttctgcctcagcctcctgagtagctgggattacaggtgtgagccactgcacctggccctttgactctttatacccactctgtttcccaccccattagtcaccaaattgattttcttggttttatctgtcttgtctctccctccttgccatcactgtcaccctaattcagtgagcctctgcttcctgcttggcctcttgcctcttttttttttttttcttttttgagacagtgtctcgcactgtcacccaggctggagtgcagcggtgtgacaggcacatgccaccatgcctgactaattttatcgttttcttttttttttttcaggtagagatggggtttcaccttgttgtccaggctggtctcgaactcctgacctcaggtgatccacctgccttggcctccttacgtgctgggattacaggtgtgagtcaccacgcccagccattgatctgttgcctcttactagagcttcttgttggattccagttttttcccactctattttattcatttgtggcctttggaaaatagatctgttcatttcatttacccaccaaaaaaggataagttcttactctttgaaataaaaatcaaactccttagtctgcctcctgaaataaaaatcaaattccttagtctgcctccaaactatcttgtttagcccagtctcccaccctttcccacatatactgtatttgagctacgtaaaactaattgttgttccctacttacagtattctctgaagatctcaaagtgttgttgcacagttatgaatggatttcataatgaccctgaatcctaaaatagaattatttttaaaatttttgttcaagaatgaaaggcagtatatgtatagaagtaaagatttctgtccaagagagttaaaattggaaaaaaataccttatatctaaggggacagattttcagccattaggaaaaattggctacttagagaagatactcaggtgcacagaaatttgaccagctattatagtgtaagttgcacattgcctgtttgagctccctcagtagctcaatttctgttgttgtttttgttaattaaagattgattctttaaaggcacagaaacaatagctgatacattgcagtaaagtgttcatcttaggcatataaaaataattttgatctaacttctaaagaattgttgttagcca

SEQ ID NO: 120599 - DNA, 1104 bp, Homo sapiens
gatcgtgccactgcactcctgcctgggcgacagagctaggctgtgtctcaaaaaataaaaataaaaaaatagcatgatgaaagtaaacagtttgatttcaaagatgagaaaggctatcatagtgttgtagataaagtgggtatcaagagtgactagaaaaggacactgaagaaatgatgtggtctaggtagacaggagcggggaggaaaaggacaggcattccaggctgaggggacaacatgataaaaaagacgagtaggaaattagtgtaatttattaagggtacagtgaaaaaagaactgtttcaggggctttacgtacttacttgatttgatcccagcattaatcttctggtgtggtatgagtgtctacatttcacaggtgaagaaagtaagacttacaggggttaaaactattatgaaatattatgaaagaattatgaaacttctaggttttcatcctccatatatctggctgcaaataagtctgtgctcctctagcaataacttcagagagagttggttagtaccacagagccttatgtattatgatgtgtggttttcacactccaaaatttacttagaaatacttctttttaagcattacatatggataactggagctttattctaatatttcactgtttttagagccttgtaagcttattgaactatttcaagtagaaatagaaaatatgttgtatgtgttttgctgctctgcatcataagcattttcttataatctttcccagtgttgtcactgatgcaaatggaataattgattcataacattctttcttattaagttgggctatgacttcagaattattttttaaaaatgtgctcaaagaggaaatagcctaagaaaattttattttttaagttatgttttgatttctgtttacttttttatatgtttactttttattgaattttttaatgttaaaaaatttaatttttaagttatattttgatttttgttgttttttaaccatatgtttactttttattgaatttattaatattgcaaagttcttgcactgccaaaccatgcctaagaattcaaagaaagaaatggtacagtagacggcctcattcacccatc

SEQ ID NO: 120600 - DNA, 1016 bp, Homo sapiens
accttcctaggagtctgattcctgcgctgacactttgatcaagactgaactccaataggagaatgctcccacatcaggataagtttattcacctatttgctttatttactcttgccagaggcaagtctgcaactccctgcatttggcaaagggatttattagaaggaaacccacattccacatcaagtggtcacataccactttgaaatatttctattgaatcagatacaaaactagtaaattgccagactgtctcattaggtggaaagaaacttctgtaatcctgggtaggttcctcaagtcccttttaaggaccaaaaaccgcaattacttttgcaccaacctacaggtagtttaaactgtaattattaaaaacagaagtgctacatcacttgtctttcaccctgactcttcaaatgacaataaagacacaccaaaaggttgataatagaactagtgatttctttgatttttaatgatgacctgttttagtgttattgcttaacagttttaggtttcacaggtttttttttttttctttttcagtttaaccaaaatggtttctgaaacatattttcaaatgggtaagcagtcatggctttgattatagtatccacttaattaggaccaggcagtcagtcatctgttctgggagacaaaccagtccaggacaagtagcgtttggacaatatgccaaatcctgtcacatcacattgttgctctaaaatgggtggatggattgggttgatggcatacgctaagctccatgagggcagggattgtggctggactaagtctagtggcaattaaatagagctcaaattaaatagagcttttgctttgaggtctgaatccatctccatgatttgtcactagactagtgacaaacagtggctgggatagcatatgttgtttagacagcttttgcttgttctaaaagtttgaatgtgaattggggtttgcaactcaaaatttgtgtttaatatttgcaccttatgtttaatgaacataaagtt

SEQ ID NO: 120601 - DNA, 1958 bp, Homo sapiens
acacgctcagtacaggtgcaatttctttttccgaatattttcaatctacagttggttgaatccatggatgcagaacccacattaaacagagagctgactgtatgtaaaatatggcacacacagatacacacgcacacacttgtctcttgaaattatgccttttaaactcagatcaaacaatatctgtcattgtacttaagccttatctctgaagaatttcccttttttgatgaaaagttagaaactacatattttacatgcattgcaacatctgtgactttgggttggggatgtggtttgaacagtttgggtggacaaaataaattgacttcagagttaagttgtagactcaggacacgaaggacagttgtgttatagcgtcacaggtgcagaggaagtcagaggcaagggagttgccatttggaatggagagctgggttaaataggagtaggtcacaaagagtgtggtccgtaggtaggttgcaagtcgaacggtaggtgcaaaagtgcaaaaacttctcttttccaactatgaaactaggagtggggctttcacccttcagtcttcctgcatctttagctgctttacttaatttctggtctgtgtgccctaatgccatatctctggtggcaactcctatctttttgcccctcactgctgtagagatggaggtctcactatattgtcccggctggtctcaaattcttggccttaaactatccttctgcctcctcctccgcctcccaaactgctagatgtgagctgccccaggctctgtagtggcaactcctaccttaacctggagatagtaggagctctgtttgtcccaggtggatagtaggagagttgattggaattgttcagctaaagggaagctttttaaaaaaagtatgttagaatgggattaggtgagattatcattcttttattttccagtcttttttgtttcttcctgaaattagatttgagggtggtattgtgaagttaggtggtttggtctatatatagtttgcccaatgttgttatatgatgtggtatttgagagaactctaaattatcttgataacccccacttctttttttcttagatgattaataagaatagaattaaattaaaagacagctttttaattttaaagacattattagactgtccaaacatgtctgaattcttagaattaaagggaagtttgaaattaaaatattggcttatccagaaagtagtcatgttaaggctgttttgttgactgcttgattaaaaattaggttacccagtggttttcacaggacactcccaaagattgttgaaaaagacattttgagtgtagaagtatctgagatactggtgcactgtacttggtgtagtgtattatccagtgacctttgaattttctgtgtcacttaaagaaaagaggttcttatttttacttcaatcactgtaaatgtcagtgagagatagctctgtggtcactgactttcaacagtggtaaggtcaggtaagaacttcacgaagccttttaggaatttgtctgtaaagggcactgtgttgtcatgaaacatacggactgctttactaaggacctgggatgctcacacagaaggcaactccatttgtggagaaggcttattttgtctgaattgtttaatgtcttgtctcagacagatgatgactcaaagtcaaatgttcacctttaggggacccaaaaggatacaaaagagaatgcatagtaatgattggcctataggcggttgagtggcaaagctagtttaaagaagaaaaatccttcctatctttttttgtagttctgtaagcattatttgaagaaacttggatttccctgtgtgctttaaagtgaagtgcatgttgtgcagtaaagaagcagatctaacctcattgtggaacttgcttgctgtggtgaatcacagaaggaatgatgtgaaggcaacatttatattt

SEQ ID NO: 120602 - DNA, 1045 bp, Homo sapiens
gaccatcttggctaacacggtgaaacaccttctctacttaaaaacaaaaaaaaccccccaaaaaattagccaggcgcggtggcgggtgcctgtagtaccagctacttgggaggctgaggcaggagaatggtgtgaacccgggaggcgaagcttgcggtgagccgagatcacgccactgcattcagcctgggtgacagagcgagactccgtctcaaaaaaaaagaaagaaaattggaacctaaggagttaatgcagacacaattaatcattctttctgtgtgctaccccctagggtttggtcaataaatcggtatttttataatagaaggtaaacacagccctaattcatacataatcacttgtttgcttgcttgctagagcctgtcgaattttattgggatcatttatgcggttgtgattcttggatctatcgttgagagttgtatgaggtattttatatagttttatccgtcacataagttcttgctgacagtagtggacttaacagattgatggtccagggatatgtaaattgtctgttgacctaatttttagaagaaaagcagaatagtgaaggtcagctggaagatggaaaatgataacaaattgatcttcttagggagcatgtacaatataaggtgtgatgttttgtaacacagtagtttttctcagattggcacacttttctggaaagtgctatattttagcctttgtgggccacaagctctctgttgcagctactcacccctacattgtgaacacaaaagcagtttgtcataggtaatacataaacgaataaggaataaatgtgactgtgtcccagaaaaactttacactgaaattcgaatttcgtataattttcacgtctcagaataacatattttttttaaccacttgaaaatgtggaaaccatttgtattcatctgccagggctactgtaacaaagtgttgcaaactagatgtcttaagcaacagaaatttattgtctcatgattctttctgaaggctgtaagtctgaaatcaaggtttgttggcagggtttgtt

SEQ ID NO: 120603 - DNA, 1145 bp, Homo sapiens
ttaattcttttgaactgaatactgcattattttcaggatagcatgaagatgttggcttggaacttttgaaggggctgcgttatagactctgcatggagacaaaccattagtactaaccacctggctgtattctaaggcttaaaagcaaaatctttatgtgtgatgttttgtatatttggcttaaaaaattcaccagcttttagaggttgtgagatatgggtcatttttgttcagataagagaggtcaataaagcatttactaacatgaaatgtttttcttttctcctttctcagtattaaaagaaaggtgaatggacaaaaagccaataaagggcttaattttaaaaatgtagcaacaaaaactcacactctggctgtcatggtacttgaagcttcatatttcaaaactgtattaacagctttagaaataaactttacagtagctgcatggtgtcaaccagtgcttttctcctttgctttatcctattgtgtcagcagggatgttgcagcaattctttttgatctaaaaattactttgttctggagctgaaaaagaaaaatgttctaatctcccactaaaattttacctgacagtgaggtcagtcaaacaatggaataacttgctaagggagttcagtgagaatctttcaccagagatgtcctgaagttgactagaatgagccagttggaatctgaagatcaagttggaaaagtcctccaggatgagataccccctctgaaccaaatttttaaaaaggagttaaaaagtgtgtattacaaggtttgagaaaacagtgcctatttattcagaacttagtttcaggtctgttttgtactttacaaaacatctttcatgaaggatatatttgataatggaaagtattttttttttaaagctgtatagttctgaatcacaaatgattgtgctatcgtgtatattctgaaaagttcgtgattaaatcacctactgttgtgtgctagcacctcataaaaaatactcttcaatgagatcacatggacacaggaaggggaatatcacactctggggactgtggtggggtcgggggaggggggagggatagcattgggagatatacctaatgatagatgacacgttggtgggtgcagcgcaccagcatggcaca

SEQ ID NO: 120604 - DNA, 1309 bp, Homo sapiens
gaaactctaatacgtggaaattacagcatactcttaaacaattagctggtcaaagaaatcagaaaatactttcagatgaattcaaatgaagacatagcatgtgaaaatgtataggatgagcagggtgtggtagcacgtgcctgtagtcccagctacttgggaaactgaggtggaaggatcccttgagcccaggaatttgaggccagcctggggaagcaacatagtgagatgctcttaaacattttttaaaaaatgtattggatggagcttaagtagtgcttacagagaaatttacagctgtcaatgcctatgttaagagggaagaaagatctcaaatcaataccctgtccttctaccttcactagaaaaagaagagcaagtgaaatctgaagcaaacagaaagaagaacaaaaataaagattagagcagaaattaatagagaatagaaaaataacagtaaatcaatgaaatcaaaagctggttcttaggaaagagcaacaaaattgacaaacatttatatagattgaacaagatacaaagcgagactcaattagcagaattaaaaatgaaagaggagacactactgttgaccttacagaaatacaaaggattataaaagaatactgtgaacaaattgtacaccagcagattatataacttagaggaaatgcatcagttcttagactctgaacttctgaaacagactcagaaagtagaagaaaattagaataggcctgtaacaagtgcagagattgattcagtaattaaaaagctacctcttaagaaaaacttagctctagatggaattctgagggattctaccaaacatttaaagaattaataccagttctacacacacacacacgcatgcacacacacacgtttaggaggaagcacttcccaactcatgaggccattaatacccaaataccaagaccaaaagtaaagtatcataatcacattccaatatctcttatgaatatgtatgccaaaatccttaacaaaatgctagtaaaccaaatcagagatgcataaaaagaattgtatcccatgactaagtgagataatctcaggagtataaggttggtttaacatctgaaaatcaattaatgtaatacatcaacagaatgaaaaacaaattatatcatcatctcaatagaggcagaaaaagcattttatgaaacaacacttttgataaaaacattcaacaaactatgaatcgagtggaacttcctcaatctgataaaaggcttctagctattactttttaactgtgttattttagtggttacttttatctttaacgtat

SEQ ID NO: 120605 - DNA, 1034 bp, Homo sapiens
ttgttagcctttaacaatagtggctgagtagccactattattgttaaaatgtgcccagcctgttcatttttgtgttgtgactttttctgaggtttcatgaatgctttaatgatccgaagttattgttcatttgtccaatttagatgtatatttgtatttaaattgtagatgtaaactaatacttgaaataagcactgtttaaataggattgatctaattttagcccttatgttttagacgttagagatgcccgttattatctttgcatatttcaaataaaatttctttacaattctttaattgccctgttttgaagaaataatacaactaatgcacatggtaaaaatttaaacagttcaaaatggtttacagtgaaaagtaaatatttttacttccgttcacagttccattaccccgagggcaacctatgtaaccatggtgttttttgatggggagtatccttctactttgtactgtgcttaaccattatacatttaaacagtatatgtttgggcatgtactatacatactattcagcttcttatgatgtgttttattgattgttttataacagtgtatgtagaattacgtcattcttttgggtaagattgttttatatcagtatatgtagaattattcttttgggtagtgtcatattatactcaatagattcagcatactttagtctctttttatggacatttaggttattaccaatcttgttttaactgtttaactgtgatttagttatgtaactattttaaacaatactgcagaaacccttgcaatacaagtttttctgcgtatgtgtgggaatttcttcccatattatcttaatgtttttatttataacttcttttatactgtgttctgagaacattacatagcaaagtactctttcagtactcttgagaattagaaattactattcaaaattttactctcttggaataggcttgcagaagacatctctttttcaagaggagaaactcatcttacaaatggtgtttgagcaaacttccttttgtgtagaa

SEQ ID NO: 120606 - DNA, 1577 bp, Homo sapiens
gtgccactgaagcaaatcaatgttttcttactaccaattcattggaacttccaggtcataaagtatcattattaggcatattggaaagtctcagcccaatgaaaatgtggattctgggattttccagttgctttgaaatagtgacagaggctgcctggctgtacattttccccatgtataatgaaaactggaatttaaagggattgatacgacaaagcaagaattatataatgacctagggaaggatgaagcagaatgttcacttctaaaagcaaaataaggaaaatgatgaagaggggtgattatttccatagtagcctgcttagtgactcatgtccctgctaataataagtattgtgagaatgtgtcttattcttggctatattcacagcgcctagaacagtgcctggcacataatgtggatgtcagtcaatgttggatttacttgtgcttgtttatttaaaaactatttggggttagattgtcaggaaccctgctacatgttgtgtaaggcttctagtgtgtacgtgtgtgtatttcatataatacatttatgtgtatgagcagttggaattgatcactaaaatatttcttaaaggtaatataagtacaatttggtatgttgagtatcatgaatgaatcaatgcaaagattcaagtatctttgggtagaatcatgtcctttgaaatgtcagtgtacagtaaaaaggtctgacatcataactagattataaatcctatactcttgtactccaaagtcagtatagttggactggcttgtatgtcctgtttgacaaaatataaattttactttcctgtggcaattcccaaactgggctgaccacttggacttttaagaaaatgtaagcactcttgggcattgacccaacgattttcattcactagatcctggggtggggcctaggaatctgtgttttttaataatttcctttctgtaggtgtttacatatagtcagtttctctgctacccacctttcatgatatactttgaaatttggtgacaatcaccttggaccttttgggttctctggaaatggtaaccagtaaggtaattaataattaatatcttatactggtagagggaaagaaatgctaacatgtgtcatactaaagatcttttaggactagtgctgactttctgttcatatatttcactggaaagctattgtcaggacattttgcggaaggtgttttttaaaatgtggcatattcatagagttgtattgctggaagttaccttagaaatcatttagcttattcccttttatatttgagttaatcttaaaaatgttagggttagggtgtaccacttattagttaagttgcctcatttctcttagccatggtttcttaagcataagatgggaatgataatacctacctaccttatagttttttttaaggatttaactgaaattcaaaaaaagttgctagcatacatcttgtttgtagcagtgtagcaagtgttcagtaaatgtttaatattttgacatacctataatatgatctatggtatacataaaagccaaaagaggtagaaaaagttatagtaattaa

SEQ ID NO: 120607 - DNA, 1001 bp, Homo sapiens
aaaaatgtgttaaagcatggaatcttaaaaagcaacttgaatgtttagtttaatttaaaacataaatttacatgatttgcgtttttaaatgtaggtctaaggcttgttctttgcatgtcatcaactgatttgagagccatacacttgtttctgcataagccacacaaataatacatagtctgtgataatttagcatagtagaatgtggcctctgagaccaggcctcctgggctgcaacccttattctcttttcttactagcatatgaaccaaggcaagttacttgacagttccttgcctcagtttccccatttgtaaaatgcagataataccagtgagtcagtaattgtcaaacacatactagtttaaaatgattaactcatttaatcctgttggtaactggcatgtaagtgcctaagtaattgttaattaagtaatgtccagttttggtttcattaagtgacatgagagtctaaatacatttgtgaagcaatctgaaggtactctttctagatttaaaaaaaatattttaattaagactttttaaatcttgcaaatataaattgtgtatgtttatggtgtacagcttggtgttttgatatatgtatacattgtaatggctaaatcaagctaattaacacctcacacacctatcatttttggggggtgggaacatttaaaatctcttagcaattttcaagtatacaataaattgttactaagtataatcaccatacaattgatttattcctcctaactgaaattttatgtcctttgatgaacatatccccaaccccccattctactctctgcttctgtgagttggactcttttacattctgcacataaatgagatcatgtggtatttgtcattcggtgtctggcttatttcacttaacatgatgtcctccaggttcatccaggtttttacaaatgaaagaatttccttctcttttaaggcttaatagtattccgttgtgtttatatgtcacattttatcca

SEQ ID NO: 120608 - DNA, 1975 bp, Homo sapiens
gataactttagggaagaaaaccttatcttatgtttggggatatatagtgggacagttgcaatcattgtatatattgggtgtgttagagttgatagcctcattaagtttctcttatgtggaaaaattatttggcattttaattcacttcattgtttttttttttctccttttctacaggggctttcattcatatattttaatttttcttgttcttcttttgactagtttattgatggccatgcctcatcttgtctgtaattgttagatggtgctggactaaactttcagtaatatatacagggccacagatgataatgggactagttttacatctatacactataacttttagtgcaagtacttgaaacacacaaaaatcgaggcattttgctctgctgtccttgaatttgggcataaaatgctaaaaccactgctaattacagtaacccacttggaatctaaattgttacattaaaattagtttttaaagtgagcaggatccatattgctacattatagaaactaatacccttattaacagctccatcttctccattgtaatatttccttaaaaagaaaatttgcagacatggtctgaatgatttagagtgatgtgtaacagtttggacaggctggttgcacccctgaaagcctcctttgtcattgccagctaggatgtcatctgtttgaactggtctttttcgtgtttgcctagggtgagtagagagtggtgatttagtagagctgttggctgcttcctggctgctgtaggaagttagtttttctggctatatgtgtatgaggcgggaagcagattgttaggagtctttaatattctaattttacctctgagaaaactgggatgacttagagtgtagtaggtattgtggtttgtttttcccttcctttcctttaccaccccactcctcgccgccttctccttctctttgtcctcttacccatccctcccctttcctcctttgtctggattattagaagaggttgaattcagaaatgtgactaatttttacagattgtgtttttacagactagtttttagaaatgtgacagtttttacagattgactcccttcactgaagaaggaactttctttgtagtctagatttttttagttttatgatacatgtctagtgtagagaagttcagggaccataggactggaagagcttggtatacttacgtgctggtactgtttttttttatacttttctctatttttcttgtgccctaggtttttccttccagttgggttaaaaaaaaaaagttgttgaggaacattgatatggtgaaagagttgttttttatttccatatttatattaaaatagttttttgcatgtgtatgtttctctgagtggggagagatagtagtcttgtgtatgtgtcaggaaaatattataagatgtttccagaattcccagaaattaggactgttactagaattccccaagatgaattagcatgaaggctaatttgtcattaaaacattgatatccttcaaaattgaaaaaaaaatttagaagaaacatttaacaacataatcatttctgccatcaagtaaaaattaaaaagtacaacagtgttggccaggtgcagtggctcatacctgtaatcgcagcactttgggtggctgaggcaggtagattgcttgagctcactagtcagagacctgcctgggcaacatggcaaaaccccatctctgcaaaaaaaaaaaaaaaacaaacccacacaaaaattagctgagtgtggtggcatgtacctgtagtcccagttactttggaggctaaggtgggaggatggcttgtgcccaggaggcggaggtcacagtgagccgagatcacaccactgcactccagcctgggcaatagagccaggccttgtctcataaatgaaatataaaatataaaataaaataaaataaaacgttgttggcaaagatgtattcaaaatagtat

SEQ ID NO: 120609 - DNA, 1546 bp, Homo sapiens
gttctggactggtatatgcccctcagcttctatattggggcagaggccgaagtttggcatgatgaatagaatacaggtgttggaattagaccagattaattcacttactagttctgtaatcttcggcaagttacataccctcttgggacctctgttttctcaatggtaaaatggggttgaaggtatctggtattgtgcctgccacattataggcatgtaataaatgttagatgctaccattaacacatctctttatctttttactcatcttattcacttgttgatactcaattttcctcattgctgttgtgtttatattaagcaggattctaaaggaatatctacttgttgacagcatcttttttgggaaagaaataatgaccccctttcccccatcttgtgacaattgctgttaggtctttggttccagcacatggggcaaacaatcagcatcagagaatacttcctgagggaggcttgctttaattgtaaaacatagtaaagagggcaaaagaaggttggcttattctatttttaggggcagttctggtcaaaggctcaaatcttgggaatggagttgctgaggaatgaagttttaaataggtcagcttgcctaacgtagagcactccaggaggtctttggaaggaagagctgttaagaatgagtccgcttgggagaggatcaggaagggaagcagcggtgagatgaatgtaacagaaaagtcattattatttattattactattttttggagacagagtcttgctctgttgcccaggctggagtgcagtggtgtgatctcagctcactgcaacctccgcttcctgggttcaagcgattcttgtgtctcagcctcccaagtagctacagacgtgtgccacctctcccagctaattttttctatttttagtagacatggggttttgtcatgttgcccaggctggtcttgaactcctgagctcaggcattccgcccacccctcagccttctgtagtgttaggataacaggcgtgagccaccgtgcctggccagaaaagtcattattgattgcccaccatgtagtccctagggtgctgtgctgtcaggtgctgtgttgtgaacaaaggatgttgggttggcctttggagatagcttacacccaaggtcagatatttttctgtagttcctagctttgtgacctagaacagtctgcccacctatgtaatggggatgagactgtatgtctttgatttctaagacccccttctaagttgaataatgccttggcagaggaaggggtaacatagtgttccattattggaacactaagcatgtgggaattatttatatcctgctcaaggtcattgccctggtctcactgcaaaaattcaaaaaattccaacctctggcataaacgggttaaattattcatcgcttgtaaccaattctaaggtatttccttgttacagaaatgctaatgtgatttttttaaaagtgcgttttaaaagcaaaacaatatggtaatacccatcttagtgatgttgggacgattaataagataatgta

SEQ ID NO: 120610 - DNA, 1031 bp, Homo sapiens
aggatttatgcatggggttttgttttcttagcttgtgtgagaaagcagtttcaccttaccaaggtgcttcatatatttgcctaggacggttgaaacagttttccttgaatgaaatcctatctcctatgtacttgcaccaaacaaactttccttggtttactgttgttggtatacagtagaactgtaaaaaatgcgtgctcatcttgacttgaatgattattggttaatgttgctctatcaatgagaatgtaacagaatattttcatgttggagtcaggaagagaatcaagctgagttagcccatcatcagatccatcatagaggctgccatggtgtctcacgcctataatcccagcactttgggaggcagagacaggaggattgcttgaggccaggagtttgagaccagcctgggcaacatagtgagaccttgtctctataaaaacaaaaagcctcctgcagatccctcattcaaatcacctcgggtaagtcacgtaatctctttggaccttggattcatcattataaaatgaaggacttgggcttgacatgtgccaaggtccttttctagccccagaggtaattggttaacttctggaattatgactccttcatgaagttgaaacttttaggtctttttatttttactttttaaaaaactttctatctagcgatcctatataaataagtctttgctaattaggatatgtttaactttccttctttattcattttgtcaaaggtaaacaaagctgcatactagctaaagttctaaggacaggttttagtcagtaatacacttttgcaatagggaagagagtccagtatgaaatgaagtcaatgttgatttgcagagatgactgggagttttaaagggagaatggcaggggacttggcagggtggataaacggaatctgtagactcaaagaagtgaagaatttaaaaagattggtaaaatatggtgattaggccagctgtgcctgttagctgacactgtgactggggaatagataccctatttttcctgatg

SEQ ID NO: 120611 - DNA, 1897 bp, Homo sapiens
gttcccaagattaaataaattttaaagaactgagatttgatcaatggaagtttagacttggatctaatctccactgtttgatgttattaggatgaaagtagtagacttagatggaattgtactgtgaaaaccaaagctaaatagattagtcgggattgtactgtgaggatgtaacagtaacattgttttgcatttgtgtgtaggagtattctcttttcttctgctcttttcttttagttcagttgtagtttgcctctagatcccctcataatcagagaaacagtgctgaaagcttcacaagagtagctaatttaggaaaaggtgtgcatatgtggtggggggagtgtttttgtctaacacattttctgttttggtggtgagatcttcatttcttaacatctttcttgttcttgttcatatgacttttagctcattaaccttgctctctgtgctgcgtagtgaagcaccatttctatttagtctcctgtgtttagcttctcagaagaatttttttgaaaatgtttggaagtgtgatttaattgcaaggctgtttgcacattgtcagtgtgaaagcaaagatgaatttcgtatttagactgtgcaacctgcagatttcatttgttaaaccttccagttggtactcccgttctctcatacatgtgtgcataataatagtatggaaaaaaactcctgttttgttgtatccatatttatcagtttggttgagttatggaaaagcctgtcctttgctttgtgtatttgctcatttggaaaccttgtatagtttatagagacactagtgatttgttccccagcttccctgtgggttttgttccatattacaatctaattccacctctctgtcccatactcctgagctgttaatttgtacatttcgatgccgtttgtttcatcctgtgttttttaatccaaactgaatgtaatgggctgtgtgctttagggacctggctttgccttgccaattagaacaaagtggttactgagtaagagtatgttttaaataaaacatggcacctctgaatggtgctgatactcatttgggaataaaagagatggttttaaccctttgactcacaaagaagagccattataaaagatcatatatatatatttttttttctttgaaaagaagggtaaagtttacctccataaaatgtggttttacaagtttcttaaggtaactaaataaatttaaaagtttgtcattaaaaatgtacttttttccttcatgatcatttgagacatgttagcaaaattctgtaaatttatgaatattgaaccaatggctgctgctgaattttgaatttgttcatgtttaggaaggtgagggtatatgaaaccaatagatatgtcagcctctttttatttttataatatatcaagccaagttttcaatttagtggtgacactccttcccccagagatacttaaaaattatgaaggtgaatgtaagcttctacaatcttgtgggaatattattttcagataattgaattttgagccatcaatgacttaaggctatttggaagtttagctgcactttcaccaaatatttatagcacagatgtttctgaatagaccataggctaatagtttactaattcacgtcatagagagacacttcatcagttacttctgttattgtatttgcatctaccctaaaaatagagttctctttttagctgatatagcagataaactgtaattcatcattggaataaggaaaacataaaacttactttgaagaaaaagtgggactgtatcaaaaactttgaaataaagacatccaagggaaagctagacgtagaaagacttggtgacaggtttagacaacattatagcatgtattaacctatgcaaacaagagagaacaaaa

SEQ ID NO: 120612 - DNA, 1421 bp, Homo sapiens
gaagagaacggtgggtacaattttttggctgcaagtgccaaagtagtaagttctgctatgacccagtaactattataaaccacttaggctctgaaatagggaattaaatgatgccagtgctttggtgtactccaaggaatcagtgtagcttaatgagtgagagcttgagctctggaggcaaatagcctcttcctggctctgccactttacctcagggcaaatcaccagtataaagtcccagatcagcgcagtagtatgggaataggagcaagggtgaaatctaaattacattgggataaaagaatccatgggttcttgatgggaatcatatgtaaggaaagaggaagaaataaatgtgactataaggttttcagtcactgaacagaataagaaaattggttgcctgtgcttgtgggtgtggggagggtggtttagagtcggggtggagggttgttgatgaactgggttttggacgcagcttgagataatttgggaagtgcatatgctgtgtagggtactcagaatttggaactctgtgaaacatctaaaatcaattttgaaaaattgccacgttaagatgaggtccttgcacatagctagtattcattaaatgtttgaaaaacaaaataatagagttgaagcttactgtgctcagggcaatatttctaaaacttgagcatatacctagaggggctgttaaaactcacattgctgggccacactctacagagtttctgatttaggaggcatgaggtggggctggaaccatttgtgtgtcttaaaagttcccaggtgctgcagtggtctgtggatgacactttgagaaccagtggcttatggaagtaaatagaacacaaaggaatgctcagatccttggaggaggaagcagaaaaggagataaatgaagtcacagaggtcacaaccatcagtcagagttagatgacactagtgacatagattatagaaaggggatattttaggatttcaactttgggtaacaaatggcatcaagtgaggtagggagattaaaatgaatgagaaatgattattggatttaatgaatactgttatttgtgatcttggagagcagtgtttatctttttggggtcacggaactttgaaaactgatgaaagctgtggatcccttcagaaaaatgtgcaagtgctcatagttttgcatatatttctaaggaggttcatgaattttattgaggcacttgcatctgaagtaattgaggcacttacatctgctttagtatggatggtctcattaagagtgctaagtgtggaagccagatatgaagagagggaaagcgtgggaagaaggaagtaattgtggatatgaacagtccttcgggattgcaaagccttttgggagtggactgataattgtccagtttccttacttggaggtctaagcc

SEQ ID NO: 120613 - DNA, 1101 bp, Homo sapiens
aataaaataaaataaaaatctttgctttcaaaaaggtttttggttgcataggagggaaagaaaaaaaatggaatatcgaaattagttgtgtatgctgagtttttctaccacttccttcctttgggttaaacagcctctctcctatttattttaacttgtttgcaatttattaggcttggtaggacccagctgttatacctcactcagcacattacccattttgcttttttaaagtgactgaggcagcagctgttctccagctgcacacagaaggcccacataaagctgggtttagcacataagccccactctaagagcattaattcaccaacccagtctttctattttgtcagccactcaaagtttatacttgcctctgtgaggcttcagaaataatggataaatcttctgttaatgaaaatacacctccagatataatattcacactaagtgtggtgttagaataacagatatggctcctcagtagtttttggactcttgtaggtatatggaattgtgagactgttcattttgaggatctgtaaagagttaggacttaccaggtatgatttgaaacactcaagattgtctcttggagtctcacacaacagctattattttatttgaatgagattattagcagattgatagttggaccaggtgctatactttatgccctctcttccctttgtaaggttttcaggcctattaattttttttttttttttacaccattggggtaagattttattttggctgaaggtacttaaaatgggtgggtgagtgatagataatatttgtcttcactattggctgtaaactgggattagagtagatttatttatttattaagcagtcaactagaaacaagtgctgtgaagtcaataatatatggctttagtgaagattccacttaactgaaagtagacctgaattattcatgcaatttgccaacatttatatccattaataaagtggtagtttattttgaaaaaaactttgcacttactgagtttttgttggcatttccctccctcgagttcatttgtcaaagtcatcatgaatatactgttagtatattcatggcttttgattgtttca

SEQ ID NO: 120614 - DNA, 1075 bp, Homo sapiens
gatgattgatggtgctttgcaagtagttaaatacacccaaggtaaaggaaattttatgggattaaaaaaattctatgctccattctaggttgatagtatttgaagcaaatttcatttcattggtgggtggcctcagtacctaaactttaaaaagcatggattcataaaactgttacaacaccacttatgaaagtttctgaagaactaaagagttgttaaaaagctactgtctttctctaaacttggttactgtggagtagcactgtctgatgcaactttttgtaatgatagaaatgttctctatctgtgctatccaacatggtagctacatgtggttattgaacacttcaggtgtggctagtgtgacttaggaactgcattttccattttatttaattgtagttaatttaaatagccacatgtgtctattgctttctgtattagatagcacagctctgaagcattacactgagtacttaagctaagctagtgtttctgagagaaagtgatcctttgtgattttcctgaagctgaagaaggcctgtgtatggcctggagtcagaaattgttgtgacttttcttgattttttcatgaaataatttaaggactgtcttttctttcaaatctgggaaaattctgaaatgttctttctcatctacttagaaagcatttactatcacctttgacgagcaatacagtggccagtatattgtgttgtaggtttgattagttctctatctcagagagacagctttagtgaccgagagtttattgcctatctgcaggaaaataataaagttttcctgtactcaaaattgccagacttggaagtagaaatagcagcttttgcctttctacaacaaataattattcttttggctaattcccatacctgccacctttaccttcattattttctctgaaaaagaaatctgggctcattgcaacctctgcctctcccctaggttcaagcgattctcatgtctcaggctgccgagtagctgggattgcaggcgcctgccatgacacctggctaatttttgtattttttagtagagacggagtttgaccatg

SEQ ID NO: 120615 - DNA, 1653 bp, Homo sapiens
ttagcagggcccagtgtaaaatgaaaatgtgagcctttgttaaaaaattatttagtttcttaaaattctaattttaatcagatcattaaaccaagcactgcacccttcggagctgcagctgcacaggttacatgcctaccaagccagggctactgctgtactccacttcatgttcccttctctgttccatggcccagtaattctcttcaaggcaataagccaagacaattgtagggctggtctcctttgtttcccatctctcagaggtcactgtctttttttttttttttgctagatatccagagtcatgaaaattgtaatttttgtctgtttttatttgtttttgtttcaggcaggaagagaaatccagtccctgttaacctgcctcgcttggatgtagttgtttttaatgtacattttgtttaaggaccttgtagtagctgcttttgtgtcagactaggcaaagatttccctatttggcctcttggcttggtgccttgtttagagctgtttgggtaaaatctctcttgtatcatttgctgatctgttttccaatttgttttcctggtaaccatcaactcattttctgaattgtatcacttgatttgaagcaagtattagcttcctgcttgaaaccactctacccttattcttctttctgctgcatttaactgcaaactgcaatgggtgaggacaattctcttcttccacctcctgcacaatacatccccttgcagtacaatttgatcggcatttgtgcagtaaggtattaacagcttttcagatatgccctgccctattagcaagaatatacagtgatacaaaaatgaatttgtcaagagttttatgacttcatgatctatcgtacaatattaatcctgctgcagtgttattaagtcatttttcatctcccctcaaattaatgttgacgttctattactggatttgttcttgtccccagattaaaacataaaggaaaaaagccttccctgctgcaatattaaaattaattgtagggtaagcagtacctagcttggtgaagtagattcctgctggaaaatttataatgggaatttatttctctgctttctatttgttcttgtgcacaaaaaagcacaattggaatatacttctgagggcaccaggagaacatagcaaggagcagggggtacatttaaagtactgagtttcctaaaagggaaatgaggaatcagtggtctgagcctaaggcaaccatacctagctggtagttccagcctagaggctgatagggatgcttgtggtgatagatgtataggtagaacaattttggctgacttaggatggtattttcttcataggaatagcgtgtttcttgtatttcaagacatttggggcacttaaacaaaaactacaacatggtgaggtcaacagttataaatcacagtacgaccttgttcaggactctggaatgagaagacagctgttatctttgtttcagatttggactaagtgatgctgttctgtgaatattctcttttaaaaataactgttttcacccatattgaagccaggatcatcagcttcatgtctgtgaccactgtagtgagatcttagggtattgtgatttttggtcatggttaggtaggtgctttagaatgctcattgttactg

SEQ ID NO: 120616 - DNA, 1056 bp, Homo sapiens
gcatcatccttcactgtaggtgattccatcatttttcttttttgggttatagtctttttgaaagcacagttggatataattgatgagtagtggtaaactatctggatgatgaaatgttaacatgtttcaagatataggaaaaataagatcgctaaacttccataatgtgtcttatatttataaagtgagtctattggaccaatatggtaattgcaagatagagcatgaaatttcttgcagtgactcaaaagtataaaggtcatgaaatgccaattcttacaattagttagaactgctgagaaagaaactaaaacaaaaattgagtcagatgaactaagtgttaagagctttaaaggtaaaactgtccaggtttcccgttgtacatatgagaagagggagtatattatcagtggcagagccatgggttggaatgggggctcagatgtgcagtcttagctttcacattccctcaggtggtactagaaagcaaactaaaaatttgaacaacagtcactcccttgtgagttcctctatagttgatggtaggatgtgaagatggtactttctgaaaacatttaaattgtatatgattacataatttgaacaaagcagtgtatcagtgctaaaagctagttggcagaaacttttgtcttaaaagtgatttatttaaaacttctactgaagcccagtggacttctacattccagcatccaggtgtccagtactctcatctataagagtgagctactcgtctagaggctaaggcaagtttcagctagatccagctaagctggtctgaactagtggaatgagccagttgtagctgttgtcattgcatctcccttttgagactatggaagcctaggacttagtctgttaattatcagagaggtcattgctgtatgtgttacgtgttcatggggctactgcagcagttatacttttttcagcagtctcaaaaagttgaatgtgaaaaatgtctgaaaaaattaaaaagggatgttttatttctaattgttcaatgatataagacttccagtactttagttttagttt

SEQ ID NO: 120617 - DNA, 1032 bp, Homo sapiens
ttcaaaatgaaatatcctctttaaaataagctcttttgaatagatttagtattttccgggaataaattctgagtttctcaggcaagtccagaactaaactaattacttgcatattcttactcttacagaagcatgctttaaaaactgctggttaaagttattgcagttagaaggaaatattgtgtgaattaaattttttaaaaaaagtttttaatgcttccttagaagaaaatattaattttgccaataagtagaaaaaactggaagcaaagttcctatagtaacgttatctttgcctttacacagctgcattattattaccccattggcctgtgtgattaatgctttttcctcacaactgtggaagcacataggattctttctgtatcactgcatatgaacttcaatgctgctttcctagtaagctgtgtaaatatgtggtctcaatatgtatctccagtttgacctttatgcttttactcctgccaaactttgtccttgctgtggtatctcactacatctattgcaaacttttcctcatctgccagaaatgtcattgctctaaaaatttttattttgtctttgtatctcgcaattcctgacattatgcattattttcccccatgtagttcaagctgttcattttctctcagtaaagcttctgtttataagcttactgttttttgttgttttgcaaaattaaaatatattgcttcctaaatgcttatttggctccctgtctttgaagccagcctcattctgagttaaaacaaatatcttacattgatttgtcttcatagttcttctggttcctcttgttcctgttggttatttaaggatgtggccttaacttagattcttagctcctcctttcctccctccttccaacattattgaatatttgctctatgttagggactcttttggtctccagaaatagagcagagagcagcttcctgagtggtgtgcttgttcgcatgtttttttaagggtctagttttattcattccacaaatatttagctgaattttt

SEQ ID NO: 120618 - DNA, 1663 bp, Homo sapiens
tttaggctctttgtgatattttcattttttgcaaagatactaaaatccttgaaaaagtgaatgttaccagtaaagataaatcgttatcgaactaccattccaacagagtatatcataggaccggtaaaagaattggatttctaactttttaaaaaaacgatttttacatttgcttactagaattatgtgtctgtagttcaaagaacaagttcatggagtgtgtgtctgtgtgtgtgtgtgtgtgttttggcttctgttacaaaaaatatgattacttaacaattataatgttatgatcctgaagatgatggagtcactgtaggaaaaatccttcagtgtcttccataggacagcagcttatttcgcctccatagtggaccaaggaactgacaaaacactcttttgtttggtttttatttttcttagaatggcttctactcacaatcaggttaggcagaccacctggtgtctgcctgtgaatggggatatttatgagcagtctgaagcagttcttaagtgtccacttctttgatagagagagactgcttattccaagctcagacattacttttctctcagaaattgcctgccaacacccccctcatagtagaatgactaattatgagctgcagtcttaacatttttcattgttttgacgttgtatgcttggcagggtatagggtagctctttacttcttcaggctgtctatatttatcaaatacagtgtagatgcctttataatattaaatatgtgatttgtaactcttactctccaatttctatcaataaagcacagctgcttagttacaactctggctggattaagcagtttgttttattttgtggctcactagagtaatttgaaacaatgaagatttaccaaggatataaggccagatttttgcaggtgctgttgtgtgttttgtaaacaaacattcatctttagtggctagatatcaggcaggtccccccaaatttctggtgtacactagagatcagcccagatgtttcttatccggggtgggggtaaagagagggtgaccctaatgatcatgctcaagagtgttatgtttggctgatccagtggttctgactgcctttgttccaggcagtgtgtagcagtttaacagctcctttgaatgtgttagtgaatgaatgagagagtaaaagttggggataaaagcagaaaggtggtggcatgataatactggagaacctgcgtgagcatattaattatatgggtgcagtatgccatgtcaaggcagctgctgactcttgacagatcctattaaccccatgtttttttcttcttcttttgaggtgatcttcttagtagaaatttaattttaacctctttcttaaaataaggaaaactaatcttgggtgtcagtcacattcataattgtaggggcaagcattttagaagaacttaactgttttcaagcactaaattctcaacctgagttgtcttcagcaacctaaggtattaatatgtctaaagagcccggtctcttggtttcttgtgcacgtagtttttgggtttctattaatgaaaggttctggaggttctagaataaaacaggtatacccttttggaaattgcattattaacatgcagtgatcattatttcttcaccatgttgttggaaaatttaattttgc

SEQ ID NO: 120619 - DNA, 1498 bp, Homo sapiens
gctcaggcaggagaatcgcttgaacctgggaggcgtaggttgcagtgagccgagatcacaccactgtactccagcctgggctacaagagcgaaactccatttcaaaaaaaaaaaaagagactcttatctttcttatcttgcagaagaaaaggaattttaagtgcagattttcaatggttataattttccaacaccagacaaataatgaacacaaaatatatgctgctgtaagattatattgatagtctcacagtatttctcttcagcattattatctgatcaacacatatatgaatggaatagtaaaacttaacatttatcatacacttgttatgtacttatttcttttttattatcacaaaagtataagtgtcctcaatttaaatgaggatgcacagagattagtaaccatcccacagttaacagaactaatagtttagcagagcctagattcaagccaagcagtctgatcttttatccaacatttcctgagttcagttattcttagctgccccttaaccccctaataggttttttttgttttgttttgttttctgttgagtatggtttggaagaacctgcaaaactctatctaaaatgaagggatacattaacttttcttcagactaatattgtaagagaaaaaatttaaggaaaaatttggttaatttaattatctaaatcattttctgtatattttccttcaggttctttatatatatgcatatttttgcagtgtataaatatatttgtaaccttatattctacaatatgagacatttcccatgtttctattttgttttccaattattttgaattgttgcatattataccattgacctaatttattcacatttgctcatcttttgggattgttttggttgtttcagtttttcattattatacataacatagtaatgaacattttctgcatagcatatttttcttctcttgaattatttttgtaggatacatttccaggagagtcacatgtactctagaacttcatatgttagtttgtgcctggcagtgcctttattatgtgaattaggtagggagaagtaaatttgcagaataaaatgtgttatattccttgtaaagtcatttttgcattatccagtcattttgcatataaatagtagaaaggggtttagttatttatactgttttcttatttccattggggaaagtaagaattggggagatacaggcaatattaaattagaagtgctttaacgtatcagtcttcttcttcggcatagtcttttagttcctatattttcaggagtatggctggtatatgattccaggccctacaaagaaaatgagaatggaggaaagaatagcattgtaatgatagaagagggttaaggaacacctgttgactctgatgataagaattatgatggatttgtcattcgtacagaaagctaggaacttagctcagatgcatgcatagtgtgagagacaagactcaaataaaaatacacaggtagtt

SEQ ID NO: 120620 - DNA, 1078 bp, Homo sapiens
caaaccacaaaaagacatggatgaatcttaaatgcaaattacaaagtggaacctgattcaaaaaggctgcattctatataatttcattagtatgacatggaagatggaaaactaaagtgatagtacagagatcagtggttgccatgagttcaggaagtgaggaggattgaataggtgaagcacgggggaatttttagagggatggaactattctgtatgatccagtggaatagtggctacgtgacagttgtcaaaacatacagaacttttgcagcacaaagaatgaattttaatgtgtgaaaattaaaaagaaaatgtttaggagatcccaggatagaatgcagaatgttttaaaaacagactattacagatgtatgaaacatctgtaatgaggggggcgggagggggagagaaaaaaatgctgaactaagtaaatttggaagtaagtgaattctgaaagactaaaggcaaaagaacctgcacctgagtattgtattctagctgatgaagttgtttttcatgggtgtacaggttaacagttctgatactgttatacatgtatactggaattgaccaaataaataaatggatggtggaagccagatttctcattgttggggtgggtatttacagaagagtaaggggaagaggctagaatggtccatgtggtaatgaattagagaaggatatatcagtaatgtggatacttaatgtggatacagatggttacatatagaaatatttacagagatgaatgtgtacacagattggtatacacatatatttccttgctctgtctgctgagagggcctagatgcagcaaacagtgattatatgtagcacctagatcctggtttctaataaccattctccaatagaagcaaccagggctcttggagaagtggtcagttctaggactggagtaggaaatatataaattgagctttgaacatattatagtgccaaaaagtaaagtgctttaaaaaaccccacaatgaagggggcatgtcagagggacacaggagccagctgaagagctcccagtggcccaagctggaaggaactatttgaacaacaa

SEQ ID NO: 120621 - DNA, 1044 bp, Homo sapiens
gtaggacagtcccaacttccagttgaataataatcccctagaaacaatgctttgttatttctgacactggttcactgctctcctcttcacagatccattactactagtgtttgaccttctggaaggcacaaggtgctcctgaaatcatagttaggactgggaactgaagggctgatgcaaatgtatcttgtaagacagtctgtgttctgttacaaatgatctccatcctggtgttctttcctgcccagttcatttatttttcctaggatctttgcacagagcagagcaacataaactctattacagtcttatcttttagtgggcttttggccaaaggttcagagctctagaatttagaattactttttacttcataaaatcacagggttgatgttagcactttttttttcagccattaattcatcccttggtcatatgtaaataaactaaatttgtatgatgtagttggtggagtgagatgtctggtttattcagcttggaaaacctctttcagaacatggataaacatgtatttgtgcattcccatagcttccggcaagctctgtagagaaggtcagaggaataaaagtaaaggcaactcctttgtccctaggagtaaaaagtagttgcacacaagagaattgagttatggctgttggtctgttatcttttctttttgtcttttagtcttttcttttagtctaaatattgatatattaggtgaatacagagtttagcatccttgatcaaatttattgtattactagagaagtacatttttaccagtgaaaatacagtcaagtgtgaacattttaaatgcagaaagcctgagattttgtcctattcaataaaacggctgaattatagaatactcaagagatgttgttttccttaagaagatatactataaatattcatgcgtactaagcctatagaaacataaactaggcttagttcaacaataaatacttgcaagctcaatgaagacataatggatacaaagatgataccctcaggaagcttatagtttagttctaaattaca

SEQ ID NO: 120622 - DNA, 1850 bp, Homo sapiens
agtaattagagcttacctaaaacccaaaatgttgaactagaaaatcactgtggtctcttctgattctaaaagttggtgattttcttgacatcacaaattcatgcagttgcgtgtgtgaatagtgagatgttaaacctgtaacaagaagagatagatcttcttcagtgagataatcagcttctgggtggctgagaagtttttatatgagtaagatcaaaaatgagagtctgctcagcagatttgcagagagtctctgataaatttctttagtgccatttcaaaccccaggagctccacatatgatggttttatattgggctctgttatgggcatattctatatctctactctcactctgcagatctgtcgaagcatgttttgataaagagtattgaagtctcaaagatgggttttaatatctttaccaaaggatggcagacattgacagatggtttctaaggatagttccttgcaatcaaatcttatttatagtgccagtatataaaatgagtataggtggtgtgcattattacattatcaataaaaactaacagttgatttccactgtcaatggcatctgacttttctagatcagaatcatgtaatgtggtagaaggagctcttaagtaggattgacaagcctttatctatccttccctctctgttttgagcacttgggcaagtcatttgagctacctgagagactgtttttagaatgaatcacttttcttataatgatggatttttaaaaatcacattaatttattatacagttgttacattctgcatggttaataaaggatgacttgccaagagaaatcttaatttcatcaggtttctagaacagtttttaaaacagtattgaaaacattactatgtttttatacttcttcactgtgtatgaggaaaagttgaccacttgagtgttgttatcaatgtacactaaactagatgtacagttcaggggacatcagcacatatatggacatttggcagatttcttgagccaataattctggtccttctcttttaaaagttcttagttaggtaaccacagataattgaaccagagaagtcgtctcatggtgtgctaagtaaacacagatgaagatagagccagctgacttcagcaactcttctctgcatggtgtgtctctgagacttacattgaagatgtataatatgggttacttttacttcagtttcttgtagttacagcttctgcatgtatcatgccccagaaaaaggtaatcatcttcccattatgacatgcagtatacaatttatagtcttttttgtggggaaggagttggggaagaaagtgagtttaatggacctgaggtaatgtttaataacaggatatgtaagttaaattgaccagctgttgtatgtctctgtgtttgctgtgatagaatttgggatagtgagaaatttcacactaattttattcacactaaacaattctaattgtttcttttttataaaaaaatgtgaaatttgcctaattaagaggctgtcctttttaaattaaatataaatttggtgttcttctggaactctgctgtttcgagtgctttttgtcctcattcagtattattaatgcaagacaacctgcttgcatgcagctaagcatggcttctttctcttatgtataacacagagtgggcagggtgtacaaaactcatctacatccttctcagaaaacttctgtgtaacactgccatgtgctaagcctacggaggtgaggaagagggttttttttttttttttttttttaattgatggttttggctcaagctttggagggacgaagaaatggtgtggattctgtgaaatcacaggatgtctaa

SEQ ID NO: 120623 - DNA, 1315 bp, Homo sapiens
ccaggttaagtttaagcttcttgaggactttagtactgaaagacaatggctcacttgtaagacctagttgaagagtacagatttagatttgttcagtgtgctgtgatctgtaaaaaaaaaaaatcacaatgggatttctactaatggatatgtaaatatataatcattccttttatgcttacatccagggtttaattaatcctttggtaattaagaatcccttcaaagtttgcttgtgagcatgttgttccgaccagctattagctcctatactaaaattggttgccttgcagacctgtgttatcagtaataagcacctcaaaagtcactcaggaggaaaaccgaatggaagacctgagcagagggaatcttcattgtatacctttttgtgtcttttgaattgagccctttgagtatattaactaatcaaataaatagttaaataaaatttaaagagaaaactttctaaactttttcactatgagtgtgtgatctctgatgccaggtactgttttgtggaaggggagaaaatactaggtttcggtagcatcttaacaagtgataaatgcttttggctttatttctcactgacatcttgtacttctggtggtgtatttcttctttctactgaccagcaagtaagttccaaaatactgctgaatatcaggttagaagagagccagtgtttatttcccaccctgcagtcttcagtgtaaatatctgaaaatggttatattgggagagacaaaaagatcttccaaatctctcttatacatctgttagtctacaagagcttgccaaaactgtattctgaacttttacaggatcctgctataacccagcatacgtagccaccatccagattttgttttaaaagtaggtgtggtttaatttatattgaaggaggtttcccaggaagttcctgggccagattaggtctcctccttcatcttaaactccaatagaaatacagaaacctctctgctttgatctgaatatgttttaagagacaatgttatgactggtggttaccgttgcattttaagttataaacagtatgtagccacttgccagaattaacaaataggttagagttacattacattcttttgaatctgaaattgatattttatcacttgttttggcctttttgctgaaatgagaatttgtggacggtgggggcgcaagagaaaaaaatgttggttccatgtctgtcaggtaactggcagagttaaattcctatggcatatttctggtcgcaaaaacatcactaaatgtctaaataaagaccaaaacacttctaacattgaatatt

SEQ ID NO: 120624 - DNA, 1035 bp, Homo sapiens
tttttaccaatatgatgactaaaccaagactggtagatgtaaccttatactttatttaaggtctacaaggaggaggagtatatattttactgtttctcttgttatctagaatttaacatgggatatttacctttagggaaatcttttatattataactctgccctggatgcttagttagttaactgtgcttttgtagtttctttaaggattgtggctagtaattatgaaaatatactaaatctcattactaatcagagaaatgcaaattaaaacaaaaatgaggtaatttcacaccattttattggcaaaaattaaaatgtctggcactgccaaatgttaatgaggatgtgtgggctctgctattggtgggtgtaagaattgaatactgccttcatgaacagtttggcaatatttgataaaggaggcattccttttggcctgacatttctaagtctgtattctggaaatgcttgttcaaaggagtcaggtacaagagtattcatcatagcagtgtttatgttaatggaaaacttagaaacaagccaactctccagcagcaagtgaatagattaattgtggtttgttcataccctagaacactatgcagctattagcaaggaatacatctcaaaaacatggttgaattaaaaaacaagtttctgaatgatgtgtatgtatgacaccattatataaagttgggcaacttgcaaaatcttgtgtttgtggatacttatttgtagaaatagtattaaaacatgcattggaatgcaaaccctgaaccaaatttaggatagcagttacttctaggaaacagagaagggtataggatttgaggagtacacacagattttcaacttgacctgtggtgttttctttcttattaaaactctgaagcaaatatagtgaaatgttaagattagacaaagctagctagtgggtgcagttgttgtgttattctctgtaactttctgtatatttataaaatacatgattagatacattgagggtagtatgtttataatgggccatacatt

SEQ ID NO: 120625 - DNA, 1194 bp, Homo sapiens
aaactcttccttactatgtgtcagaaagagaagaaggtagatgacctctctcccccaaatgtcttgaacttcccttttctaacctggcattgcttgcttgccttctgaccaaattcatcacattgggaagtggaagtatacattgctatctgatgagatttcattttaaaagttctccccagtgaaagcattataggcacttcagagttgtgggtgtttggcaggtgtctacagccaaggagagtgagggaaaagtgtttcaagcccagctgtgtggtagaaatggagcatcttcatccagcatctcccagtgaattgatcatgtgtggaaacaccagtccaaaaggtaactcacagcttatggagggaccagaagctttggaataaagcacaggagaaggaacccatgtgaggaagttgggcaggagctgtttggcgttacagttagaagcattgcctttccattccacgatgacttcaactggtatttgaagctagttattagtgtgcccagtgagccatgcatttctgaggtatctcagtgtttttaaaataaagtctgaaatcttgatctgcttagttccaccaaaccctgttcaaattttctgaaggcactttagcagagcttgtcttttcattttgtgaatactaaactgtaaacaatgttcttaaagcggtaaagggaatatacatttttagaatttctatatttgatacttgaaaagttgggatagaggagagacctggtgtttgtgtctcactggagagggaaactcctgctcccattaaaaaaaaaaagaatcatatatttctagatgtatatttcagtcttccgggaaactccctttacagtttaccttcctaggcaatgatacagacctgtttgttttatggaaatgagtgttaactatattttctcaaactacagaaaataatattcatgttattcgtgtcagcattcttgatctctggttttgggtattgtcccctcccccaagtcttatctcattctcaaaagtatgccttttcctaggttcccagaaaactacttataatttgcccttccctcctttttgcggactttgaggatcagctcccttttgcagttgttggtggactaaaatgacattatactatcacagttgaggtgccagttatcttaatataatatgagtttagcatgtttatatgtgg

SEQ ID NO: 120626 - DNA, 1385 bp, Homo sapiens
tttaacaacctccaactagtaaaattcaacaattcagaaaaagcacatattggaggagtcttgggtaagaagctctcattaaagttgtatatagcaccctgctgagctttacaattggttttgaaatgaaaatctgttagattagagcaaacattatcccagctgccgcgataagtaatgtggagaagattaatgatttgtctatgaaagccagtgagcattaaagtctgctactgtgccctttttaaaaggtgcaggtgagagaagaggtaggaaagaagggaggactatgctattcatagctacatgtttatcttcttcatatgagttagtgattccctagcttttttttcccttgataaaaccaaggaagctttaaatttcaatgatacccccaggactagaatttttcattgactagggaaagtaaggtggaaccggaggaaaaaaacactgctcttatgtaacattgaaggttctcccttcttccaatcagcaacgaaattttcttcctcttttcatggaattaattgcagtaccataatctgtcttcttgtggtaaatgtctgaagatatatgggtgaaaattagtgatggtagagttaatacttttcctcttcacccattgcatgcatcattgaaggtaaaatagagcagggctgctgttatataaccttagatttcctggcttggtagggctgtccaagacaattcctgctttccccattcagcaagtgcccctgttttctgagaccttcagtgtgaggcagggagagtggcaccagcaccactgtgtgaaaatagtgccctgacagagaaagaatggcttagatgagtatttaggagaccatcaatacttaaatataggtttatatatcatagcagacttacagttttattagcacaaacctaatcttgtgatttggaaatcaagtctggtattggaaccaaagttgatttttattgttgtctttttgaattttggtatcctgtaaactcttgccattcaaaatgtgctccttatcacctgagagcttgtaagaaatgcagaatctcaggtcctgccccatgcattccaaatactaaatcagaatctgtattttaacaagactacaagttatttgaatgcacattaaaatttgagaagctccgatataaaccatggcctgcttttctaaaatcagcatctattatacttttcctcttttccaaagtaggcaagaaggctttaaaaataaaaaaggaaagaaaatgctttttgtttcaccaacaggaagcctgatcatgattttaatgtcatagcagtgccatgttttttgatgctgtttgtgcatcttcctggagacactgttttaaaatgcagctatttcttcttaatccttgca

SEQ ID NO: 120627 - DNA, 1142 bp, Homo sapiens
tgaggaaataggcccaaataattttaatgtgacttgcttaggtcatgtagctcctaagtattaatggggtacagacttgattttgtttgagtctaaagactttaaccttgcttttctatccctttaccatttggtcagaatttatctaagagcagataggtaaattgtgtaatttctactaacttgtaatatgtacttaactttaggattaccattattttgatcctgcagggcacagcacaacttgattggaacagccttgggctggagtaaggactcttagtatagttcagccactagctgtcttgatgactgttttgttttctttcctttttctcttgtaaaggcaaggaacgggtatgtgtgttgggagtggttagctttaaggacaaagaatgcatattctttgaaaataagtaaaatcaaagttgctactagaatgtactattctttgtgaattcatcaatttgtaaaaattactgggagaaaaagcgtttggtaatacctttcaatacactctaaccatgaatctataaggctacaaggagctttcagaagaaagctagccagacactgaatcaaggagggttttatccttccgataggtttttattcacaaaacctctctagagaaggagctatgcatgtgtgtgtaatatgtattttaaggtagacattaccccttttcattgaagacagttgatgtgattgaagtattattcccaacagcttagcatgagacatttaataacattttaagacatttcaataacaacatggaagttttatattttaaaaagatttgagagatcaaaaaatgataagtatatgaagtaatgcatatgttaattagcttgatttagccattccacaatgtgtatatattttgaaacaacatgttgtgtatgactatgtaatttttattggtcaacttaaataagatttgaaagttttagaatctagaatgtcctgcctctaagctacctgtaatctgactttttggcataggcaaggaagaaacttttcattttggcatgaggaaaatattcaaatgtaagagcagtttcatacacctatagacaaatgtcttttacttgtctggaaaaatccagaacaattcaagaagaagaaatagcttttac

SEQ ID NO: 120628 - DNA, 2077 bp, Homo sapiens
ttgaataccctaaaagtagaagtagctctgttagagagctttgttaccctctagcatgttgacgatacattttgcttcctcctctgtggtaaaggcagagatgatggatgcagtgcagccttttgattgcaattaaaaaggagattctgcttagcatggtggtcaattagctctttatgaaaaggattctgaccttttatttcatacagatatttaaaaatatgtgagccttaaatgaatcttagcaactaaaactgaaacaaatgtaccattttaattgggtttggaaatactgtacaagataaattgtttataaaatgagatatttttaaatggcagggttcaccttaggcccccaggaggatattctgaggcagggtctctaaagacattcatataggagaatgaaagtcgtttcccccccgctttggtgctttattttattttttttaagagagagaataaaaagtttctggcatgagatggaagattcagaattgtcacctctaccttttcatggtcagtagactttcatagtcatttgtctttaccaaataactttagtcttcagatgtttacatgtcattttagatgcaaagatctttgaaagcaaggcataccaaaaaggagctgaatctatatcatataagcggcttggggcagcactatctctcagaagctgttggatcccatcctgaaacctggttcatttgaagctcaagctaactgggatctggctgttttgcttttgagaagtaaaactacggaggttgaagtaaacaggtttggttttaagtatcagataggttggaaataaacctagatcacatttctcaatctggaatcaccatactatactgttagtgttccagaatttctcaagtttgagaaaccttggcctaaaggagtttgccagttatctcttctctgtatttctttgtgttttgttaataaaattttaaaaggtattgggtcttatttctacaaggtatgtcttattcctcttaaaatctgcttccttactaaaggacaatcttaaaggaccgtaagtattatttggaaagaatgagatgatctgagggtgtatagaatctcagtgttttgtctcacatcaatgatttttagcaacttgaagattaaaattgttcatagccagctttaaaacatacctaaggtcatggaatgacctaattggccactttcttcctctttaaccttttctatacacatttgtgttctgggttgtaaaggatttataattttccccaggatttgcctcagaaggagacacaagaggagtataatgtattcataaggtagagtagtagtcagaagataaaatgcataaattagatgcatatgtgtcagcatggatatacataaaaacgaattgaggaaaagctagttatagtgtaagacatgcagtacagtaccatttatgtaaattttaaaaatcagtactctgtagtgcatggaaaagtataagtatgtggtctacaaggagacattccagagtcatgatattggttgtgtttacagagcagaaaagcactagggaggagaaccgtagctttattaataatacttaaaaatttttatatgcattcatatgcataatgcaaatatgactaatattaaaatgaattctaaatggtggaccaagtggttattaggcatgttttctgtgctttgtttttaatatttttgaaaatacatgcttactgtgaaagaaagccgactattgttcagaaaacaatattattcttcctcattctctcacctgaatattattactcttaaacttatgcatctcttgagacattggggagagaaatggattaaaaactagaaaaaaaacactgaaaaattttatttttgtacagtcagtatataaagcatagtactttataagcctgcattttctactttttttcgttgtctgtatgtagatacctgcctcagctcttaaaggaccttctggttgttaacacttacagaaaaggttgtagtgactattcttgcatacacatcttttaaaatttttaaaaattcattatatatttttcaaactttcaaa

SEQ ID NO: 120629 - DNA, 1047 bp, Homo sapiens
ccacccagctcggccttccaaagtagtgggattgcagatttgagccactgtgcccggccattcctatgtcgaaattctaatacattagttgatatttcttatgcatgcattctttgccttgaaagataaaatgaaataagaatctaatcatagttccttatataggaattctaatgcagttcatgtaaaattttgttcctaatttgatatacattttttctagcaatttttcttccttttaatcagtagtcttcacttaaatattgatacagatataaatatatattatctcaaatgtttatgaaatctcccacataaaataagattatggtattttatttaacactacctctttctaataagagtagttgagtaaaaaatatcatatatagattacaatagttttctttttaaaatgatgatatcaggacaaagggaaaatacagattgagtagtaagaccaagatgaggaatttgaacacagaaatccatatataaacatctatataatcattaaagacagtgcagattgaaatctgagcttcctagggatcaaagcaaaaatggaaatactgtgtaagcagttcaaagatcattgtgttatgaactctaaagtggttagcgagaagagtagcgaacagtgttctcagtaacagctcttcaaaaagtgttttttacatggctttttcttacaccatccctcattatagaagccaagggcgttatatttgaaaaataagtaccggtgatgatgactgaactatatctcattttccttttgcccatttgtcagaattaatggtaagcaccatctctcagactaatgcaagatctaagcctaataaattgcctaaatgagaaaaaaaattataaaggatttttgatctataagacttcctattgagctgcatggaataagagtaagagataatgggagttgtcgtctacatagaacttgatcgtttaatttgtttagtgctatctgaaggaatttgcctatatcacatgctattaaatatttgaaagataatttcagaatggataact

SEQ ID NO: 120630 - DNA, 1033 bp, Homo sapiens
atcagagttagagctaaagtgtactgatctagtattataattagtaatggctatatgtttgaaatacgacttctggccaggtgcggtggttcacccctgtaatcccagcattttgggaggtatgcggatcacttgaggtcaggagttcaagaccagcctggccaacatggtgaaaccccgtttctactaaaaatacgaaaattagctgagtggtggcacacacttgtaatcccagctactcaggaggctgaggcaggagaatcacttgaacacaggcggcggaggttgcagtgagccaagatcacgccactgcactccagcctgggcaacagagggagactctgtctcaaaaaaaaaaaaaagaaaagaaatattacttctttcaaacccaatctgactttttctttggcccttttggtctgtgatctgtgatgctttgcagaatatagtatctttattcctttatctgagagggaaaatgtgcctatatgcatatacaatattgcatatagtttaataagattactcaaaattacatgcaaaagttttctgtgcacacacactatgaatcccagattattgtccccacatatttggtgcccctcccagtgtgaggctcatacttccctgtcctgatcatcaggctcagctacgtgacttcttttagccaataaaatgttaatgaaaaatttatttggcttttatgaccagaaactttaagagctgttaggtggttccatttctcttttccctttgcagtgataccagcagtgttccattaagggccactccttcattctgggttcctggaatgaagatacgtggagcagagctgctgtctaccctcagtagacctataatgtgatcaaaacaaataaaccattgttataaagcctgtagattatagggtcattcgtttttgcaggtaaattagcctaagctgactgataataagaaccgtaggttaagaagatctgttccagacctaggtttttgggttttttttgttttttttttttttactttttgtgtg

SEQ ID NO: 120631 - DNA, 1017 bp, Homo sapiens
aacccatgatgttcaaggattaactatactttaacattttgtttatcctctcatatttatgtttttagtatgtcccttgtaaattgaatacaactggacttcatttagtccaaatattctgccttttagctgataagttcagtctgtttacatttattaccattactgacatatttgtacttatttctaccatcttattatgtgttttctgtttactctgctgttttctctgctgcctttttccttatgacctttccttctgaaaagtttgaaaaactattctttattccctttttccttctgattacccttaaatttttaacatgcgtctttggctttgcacagaatgttaaaatcagtatgtttgcattcttctgaataataagggaccttggaaaacttttaactctagtaccttccactaatcttaaacgtttttgaccagtgttttactcccatggttttttagtcacccagatcagtctttattattggtgttgttgcatttaatttttgtaccaacttccattgttttctaatcctcagagactgtgaactccttaattaagctcgttttctatttttcttcagattttcaaaagaaacagccagacgatgattccgctccaagtacaagtaacagccaatcagatttgttttccgaagagaccaccagtgacaacaacaatacctcgataaccacgccaactcttagtcccagccagcagccgcttccgacagaactgaatgtaacttcaccgagtaaagaggagtgtaagtgtctggcttctgaggggtggtagagagagcagcttaagaactttagatgagcatcttggtaatgcctgaccccagaaaaaacagcacttcttttaattcaagataagtgtccacatacaaggcccaagctcagcaagttagagaataagtttcagccattcctgaagaaatagccttttataccgtcaaagtacatgaagtttgaaccagtctagagagcagtggctctcacctatg

SEQ ID NO: 120632 - DNA, 1044 bp, Homo sapiens
tatttaaaaaatggtagtgccttttaacagatgtccttgctagactgccccgggtctttgaacatccattgggcgtcattggctacatatcttcatttctgtctgacaagccttaatctgttccctggaaatttagtatcactgccaccaagcggctaaacttctgatttgtttgtttttaccaattaaatttctaataatctctaaatgaaaccagtgttccctttttcagactatgcctacttcaggaggccagatattgggcaaaacaggctggtttcttctagtaaagcatttagaaaatattgcctattaaaaaatattttatgacttcctgctgggctggttttaagtgaaatatggtggggagatttatttacagttctctgtgtgtgtgtctttctctttgcttttctctaatgaagctcaaagcatcaggccatttatcagagataattatacaacagatggagtttttccgatatataatagtctcaaagtggaagattctttcccataatgaagaatgcccaaactttaaatgtctcttttgattttaatttaacggtgtttttttccccagtgcatttattcattcatcccaaagctggttctgcaaagcatgctgcttttattagggctgtgttctgaaaagattgatactttgcagtacagtataataatgtacagttatatgctatattgaagtgaagagccataatttatcaaaaatcaatgtgtgagatcattaagttaatctctgtcaaaatacaggagttgagcagttcagcagtgttttcttatagaaattctttctgttccataatgtcagttggataggaacttgtttaagtactggtagtatcatctgaccttccatttgtagtcaaaataagaaccagattaaagcaaaaccatgatttttaagttattcattttctggcttgcttttctttttcaaaacttttaatcctatttttaagtatgcaagtaaaacatgactacattctcaatttttgaattacaaagacacaggtttagata

SEQ ID NO: 120633 - DNA, 1034 bp, Homo sapiens
ttagttgcaaagagagatcctattattaagacctgacagtgttcacttctgcctgtaaagcaagacagttggactaaggtaatttctgtttagtgtcactcatcatattccagctgtggtacagctagctatgggaaaggctcagcaaagaggcagaagagaagggcaccggtgttccaagttgtttttacaagtccacgcaacagtacctgtggcctgaatagatgtctttttttcattagtcctgaagcctcttaggaagaacatgcaccagtcatttccctttctaaggaaagtgttgcagccttttttcagtagctgctgcaggctgagatttatgagaatagtcttgctagctgaactatgtttgaaaaaaaaaaaaaaaagctcttccagtgctgagtggtgtctccattaatgttgttatgagaatcatgcttgtgttgatggtaaaatgcaaatgatgcaaatctagaaatcggagttgagccttagttaagcctgtaaatagtcaaaagtgaagcctaaattggagaggtgacagcccctaattttgtattcgtattaaatatgctttgtcacaagagaaaaacaaaacagtgtctaaaattagtactgattttattagccaggtgatattttgacctctaataaaatggggattattctatttttatccccaagagggtgatgatgtcttagaatgtcactgttaatcgctgttggactttatcacattttgaagtatcagtggtaagcgtttgtcagcatcttaacatatggaaaggtataggattctaggtgagagattacatctgaaaaactaaaattgaacatatttaactgcttacccagaatcctttgagagttccatgaaacatgtttttactcttcttacatacgtagcagaaatggaatgtcttggtttgaaattttgactagcttattccactatcccttacctttatttacttaaatattcacattttgttgagactgggaaacccttttactgttatttacacttagtacat

SEQ ID NO: 120634 - DNA, 1102 bp, Homo sapiens
tattttgtcctttttttttttttaagaggaatcctcatcaagaaattcttgataagatatcctgaatctctctctgcccagggaggcttaggaggaaaaaaaaaagatattctgaatctctacagaagggagagaattgtagccctttaatttgttgtccagaattacctttagaactgtgagcctggaaaagtgagatgctgcaaaggtaaacaatgtacagattatgatagagtggaattgacaagctggttaaaaacggatgatgcatttttaattagcctacagtgcctttagttgataaaataattagatacttttatgtaaatgtcatgttaagtaagaaaattgaagtgttacagatctacaaaaggaatggctatttttgagtattaatgttttacagttactatgaaaggactgatagtagaatatttgattattgtgcttctggcaatgtttagctgaccaattccgtggtagtctatttttttctaattgatgtgctgttatttgtgttgaaggtttttagcacatgattaactgcagcaagtgagggctagtggaaccagaagccaaaaataaccagtcgtcacagctattttaacaaaacttttcagagtagattgttgatctctatttcaagattaagaagaaatggtatttttctgtatttactcagctgtggattttgagtgcgtgaaaggctaaatgcagctatcctccaaaccactgttcttgacttcctccttgagttgtagtcttcaactagccgatgggattgaccactacatgagtaggtagccctgggttttttgacatgctcagtaactctataggagactggaaaaatataagaattctggtgcttcactttgaaatgtgtgtgttgatagttaatggggtatctttatttacttctgtttttgcaggttacagtgaagtgagtatgcagatttgacccatgtcttcaactttatagggctgcagtcagtactctttccccgggaaaatctactaccatattgcaaatgctgtaacaatttctacttgttgggaatacagctgaagaatatagtttcatggcttttatgtggaattg

SEQ ID NO: 120635 - DNA, 1284 bp, Homo sapiens
tttccagaaataagaaggcttcagttaacaaaaacaaagaacccttacatggaagcagaagttacagcattttatggagctatagaagccagtccaggagggtttttgaggatgttgaggctgtgttagctttgcatgtttctcattgtctcttcttgttccctgttttcatgtcgcagtttaccatttgaacctctggaattttagtccattacactttatctggtgaatgtggcatttgtagaaaaatgttcagttgaaattactctgctctctggtctgcctttcgaaactgcaatttattcttgcctcattttcaaattcttgcatttccaagtaatacaagccaatgatgaatgttctccttcctcattacatatagcctttattacctgtttcatgttctttggcactcggccactttctatctagctatttattgctgtcatgtattgttctgcatttatgtacagaagttttttcttttttttttttaaagaaagattatgatctccatgactgtgtggtgacacatagtaggtatttgctaagtgttctttgaagtcagcagtgcacttacttggttttttcctcttttaaaatttcccatctgtgtcttcttacactcactaagggttgttgctgttatggccttgttatagtaaagagtaagctaagagggagctccttaggtgggctctccaagtccttaaacccatgaatctcggcactatacactctaggaacaggtctcagagctctttcatctttccctccttttcagtgagtaaattaaatgatatgaattattgttgtaggagatacacaactctgccaagtaaccatcttttacttctgctagtcacagtcacctggggaccctttttaaaataaatgtgtaacatttgcctatgtgtcctattcctttatgatcaccactgcccatcccagggcatgtcattggggagtgttggggtatgtatcaatatcaacctcagaatgtgttgaaggtcttgattttgcagaatgaaattattgattttcaagccttcactcacccaacaactatatctcttgcatactcttgaattatgcttatgcatcagatctctgggcccaccaagattccataaagggcctctcgatatcatatttcttataatgaaactagatattcttccttggtcagcaatgctttctttatatatgaaaatgattcttatttcttctgacaagcagtttattgtttcttaaggccccctccccttattatgtaaggctagt

SEQ ID NO: 120636 - DNA, 1001 bp, Homo sapiens
attatatctttatagtgagcacccattagatggtgttgataaatacatcaatgagtattttaggcagaaagaagagtaaagtagaagtactggcattctttgctgtactcagttttattaactgattttatattgatcacgttctttgttacatgtcagtattatagtggcagttgaaggtggtaatatttttagatctccgttagtgaaatgacaggcattgagctctcagtcatacctttgtaggccttcgttgaggtgaatacctacctcttaactagaaaaagatggagaatttcttgcttggaaggaaattaatgcaatgtccaggtcatctcctaaaaagcctgaaggaaaattgagatttctcagcaatggacattaaaggtcatcaagttaagccagctgtacttcttttcaagaagactgttctgtgccctcttaggctagccagactgcctcagccttaaatattggccctgactctaaaggacagagcttcctgattttgagaggtaaattgaaatgatttattttgagaaccacaggttgactgtctttgtctccatctttctctgtgtcctgcagtcagcaggttgcccatggtggggatttcaatcatttttcttctgaaccaccaattgttattgttattttgctggaatgttctttgtagcctttatgtctaggctcttcaagttaggattcatatctatgacatgtgctgtacagtgcttctactgtgaggtagtctcccagacagaaaccacatgggccttcaggcatagatggtcagtaaataattactttacagtggtgtcatttcttaggagacacagagtgagaccttaagtgagatcttacctacctcctcccatccaatctatccatacaaggttggacctaaagcagccttgagcttaataatgatgtgtgttagaacaaggatactgagattagactaaggtggttctttaagtcagccgtctctgacaaagggc

SEQ ID NO: 120637 - DNA, 1236 bp, Homo sapiens
aaaattagctctaaggattagcattagacccattattatgtggtttagtaagtgaagacctcagtgattgattaatcagtcaccatttgtatttcaagcaattactgttttgatcaggtgaagggtattgtcatattttagaggtgggcagcagtgtagagtggttggtctacaactatcaaaatgagagaggcagctcttttttaagaaattgttttgtgatcactgtgagtctacgaagcagattgcaaaaagtagctgtagtagcaaatgaaagatcagtttgtctttgtgagatagatgggaaagacttttctttatatgatggcttttagccagacagaattattaacagttaaactcattgtaatctttagattaaaaaaaaataaaaaagcaacacgatgatcattttggtatttaaacagagagaaattagatagatgaagggtgtgtggtcgttcccactccaccccacccctaccatctttgtagagttctaggatctccacagtcaatgaagagttgaaaagtactgccaagtcctaggttgcttttggttagaatgtgtgagttaaagcacatcataccttcagattactagacagagtttacatttcttcagagctcagaatgttttccacatgttcccttgttaattctcacaacattcctgccaagaacaagtattttgtgaaggaaagagatcactttccttggcaacaaactacaagaagattcccttttgtccctcatcttttctaaccgtcaagttataccttcagctaataaaatactgtaaccggagttacagtcatctcctttaattttatttggaaggtatttggatatttagctggctatcttcatgacagtatatttttatgtttaaagtgggcacagattcaatgcaatccctatcaaaataccagtgacattcttcacagaaatagaaaaaaatcctaaaatttatatggaacaacaaaagacccagaatagacaaagctatcgtaagcaaaaagaacaaaactggaggaatgacattatgagacttcaatttatactacagagctatactaaccagaacaacctcaaactggcataaaaagatatgtagaccaatggaatggaatagagaacccagaaacaaatccacacacctacagtgaactcatttttgacaaaggtgccaagaacatatactagagaaaagaaaatatctccaataaatggtgc

SEQ ID NO: 120638 - DNA, 1079 bp, Homo sapiens
gtaatacctacacttgtgtgttctgtctcctggtagagtcaatattcatggaaacatttcagccagtacatttaatcctagagagttgtgtcagtggctatgaactgtattgttcaatattacacactatagttggctcttccaaggaggacttcacatcttcctctgctctgtgaagttttgtttttgtttttgagagggagtctcggtctgtcacccaggctggagtgcaatggtgcgatctcagctcactgcaatctccatctcccgggttcaagcagttctcctgcctcagcctcctgagtagctgggactacaggtgcgtgccaccacacctggctaattttgtatttttggtagtgacggggtttcaccatgttggccgagctggtctcgaactcctgacctcaagtaatctgcccaccttggcctcccaaagtgctgggattacaggtgtgctctgtggcattttaaagggaggtagcttcgggtgtgagttcaactgtataattcacttttcaaatctttcttgttggtccttcaggtatagctcttccctcaggtctgcagtatcagcatttgaggcagaaaattagaaatttgacctacttatgtaatatgcaagttcccatcaggagaatattagggaagatataaacctttcattttttattagtgtttaatgtaaccattgaagaaagatcaaaacagtaaatctgtcatggcaaggaaaaagtatttaaataaatgttttaccttatgcactcatcatcttgggtcctgaaggagttcatttgattcctggggcaggggacaaaaggaatatcaaatatttggcaagattgcaaaaatttctctaatcaaaaaggtgccatctgaccatgttttgccacagaaagcagttctcaccaaagtttatcatggcatgtcatagtggctgtttgctgacagtgtgtgggttttggccattcagtggatgactgggaaagggaaataatctactaattgctttcccttgggttttttgtttccctggaagaactttaatcagtctgcttctattgtttatgttgaagaat

SEQ ID NO: 120639 - DNA, 1017 bp, Homo sapiens
ggatgacactgggcaatgataggatgatgtatgctgatgggttttactgcctcatcttgctgctagcttccaagacaagttgtattctctgttttcctgcttgctcatctgtctgaagagatggtcccattgcctctcccgccagcaggtgggctggcatttattcctcatacctgtgtctgcttccaaggcacccccctcgagaaggatcttcagaaatatttcataatcatggccgattaaagttgtaatcttattgtatagtctgccatcatagttacagatcacaccctcagaaggagttgcttatgtggattatagcaccagctgagacactgtggttaggcagccagtccagcactttactaaaagactgctgtgacagagtcctgtagtagattctgtaggaacatgcaaaagaagtgataaatgtgtatcttgcccctgggagcttacaccatagagagaataagtacagaaacaagtacaactaattccagcttttgcgagcaagagatgtaacttatgtttatttcaaaaagtgaagaacaggaagatagattatgccaatcattaggagcaaatatagtactaatgttgtatttttcttttcaagaattatcttcctcgtgaaatgcttagaattcactttagagtcatggggaatgatgaagggatactagaatgtggagggaaagtctaggagtaggactgtgttttccagtgaatggaaaacttcaaatgtgacttggcaatgcttttgagtagcacatgagcacctagtacttggaaaaactgagatacagctctgttcaacttcgagtgctcaacttcactaaatcacagtaatgagacctttgagataggagaaatctgtaacggagccacagaagaatactttttggaaagggctttccggtttgatccaggagtttatcagcattctggtacttcatgtatttgtcatttgtgcctttaagtaaatacacatctttatgtgtagtaccctcaaaacta

SEQ ID NO: 120640 - DNA, 1045 bp, Homo sapiens
aagaagcctaatacatgctaatcccagtagtataagctacataaactaagaattaatgttataggaggatccttcagtctataaaatgccttgccattgggttaatgtaaataggtttttccttttgcatataaagtaatacttgacttgccaaaaaaaccagttcctactgatttattcaggaatgttctgtgggtagtggccagtggaatagagaaagagagataaatctgattaagatatgtttgaaaagagtaattgacaggatttgatggctgattagagttggctgaagaaagactgcaaagtataaatctggagaactgagggaagaaagatgtaactgacagggaaggagtaggaagaaaacttgattgaaactattttcagtttctgatgagttaaattattatagtcctatagaaaattataaatatgagcctgttttagaaattgctaatttagaaacaatgattaaaactgtgcaaatgaataaagaagaagaatggggggtaaggactgtgtttcagggcaggaaagagaaagaggagccagtgagttaaggaagctaaagaaaggagaaagcttcccacaggatcatgaaagatgcatgagaagagggatcaggaaatgtgaggactaaggaaagctatggccatggctagcagaagatcactggaaaacctgaacgaagtttgtgtaatgtgtgggaaacgaaagcctgaaatcattaaagagggccttgataacaaggaaataaaggcagcagacagaaatcattcattatggagttaattgaaccattaaaaactagcaaatagtggtggttggagggagagacagggtcgggcattttttggtgtggaggtggttaaaatagtgaactattttgcccctactaaaatacaaagaaaagggatccaggaagagaaatagaaaagattagaggagaaatggaagaggcatacaagcaagactcagcagaggcagaaacccagaagggttatttctatctaagagtgtaaggaaggacatacagtcagag

SEQ ID NO: 120641 - DNA, 1053 bp, Homo sapiens
tagagtactgaacatagctgattctgctcccaccctgaaagcttgcattataagtcagacaggcaaaacatttggaagatgagaaacactcacgagtagggtacttaggcatcataggggtgggataatttacatgggaatatctgactttttgtctgtatgtgtgtttttgataaaaattcagaaaatttacttgaattagtgtctcattcatctttacccatttccccacctcacccctacactcagtgtttctccataaaggaaatctattttcagtctttttggcaaaggactcagggccagattaggttaacccctgggcaagtcatctatacttagagaccaaggtgttggggtacagcattattcgaagacttctagcttgtctcttccctccagacctgtccaaatataagtcaacagtaggaggaagtgcccacagttgcaggtactatccagctgcccaaaagttgtataattttataaggctgaatttaaatgcctctaggcttcacgtaactacagagtaggcaggagacttactctgtatttctagaaagtttaacttttttgtttgtttttttgaggcagagtcttgctctgtcccccaggctggaatgcagtggcgcgatctcggctcactgcaacctccgcctcctgggttcaagcaattctcctgcctcagcctctggagtagctgggactacaggcgcgtgccaccatgtccaactaatttttgtatttttagtagagatggggtttcaccatgttggccaggctggtcttgaactcctgacctcaggtgatccacctgctgcggcttcccaaagtgctgggattataggcgtgagccaccgcgcctggctggaagtttaacttctaaatgaatgttctaagaaaatgaaaacagcattgcccatcttaaacacagttacagtaagtcctcacttaatgttgttgattgattctttcaaactgcgactttaaggggaacgacaacaggtcctcagataacatcatttggttatgacgttatgagaaaaaaagttg

SEQ ID NO: 120642 - DNA, 1051 bp, Homo sapiens
gcctcacaaagtgctgggattacaggcatgagccaccatatacccagtctgaaatagctttacagtcacctttccttctgtattctgtagtgtaataccttttagaattgctgcacagggatgcctacccacagtggaatgaaacttaagtcaaccctttctctcttcttgaccacatgtatcatgacacataggaacgaaattgtgtagcagcattattttaggctgatttacagtttcctgtacttgtttttatttcctggttttaaaacctaatattataaaattgtttgaggaccagttcagctgtcatcaggttgactttgagacctgtctgtagcctctgagaatcctatttctttctttctgagaagtcagctttagaagccccctttcacttctgggacagccgaagatatcctacaagtactattgctgacagtcaggactaaatagttcactcagcagttataaagtaatggtcactggaagtttactatcttctgaagcggcagcctttgctgctacggttcctcaattatctgccctattggaaatgggaaggaagagagaggttattagcttttcatagaaactacgttggaactcctattcctgttttgaccagatacctgtttgttacacattctggtgtatgcggtactccacgagattagaagtgcatattcaactgcagaaaccggaaccagcatggggagtctaaatgttaccagataaggtttttagggcattttggttatagtgctaagcatttttgggaaaccgtaaagagggttaggataggtggtgggaatagaggctgacagcagttttcagatgtccgtgtgttcatgcacgcagtatggcccaggtaagttcaaaaccttattcttaggctatttcgatcaaccctgccaggcaattttaaattcttggtgatgtagggcagggacactgtggatggctgaggaaactctgggctctgctggctaaccagcttcgctccactctgcagaggctgtctcatcttttgtgatctgcaaattcttgc

SEQ ID NO: 120643 - DNA, 1032 bp, Homo sapiens
aagatgtaaccaggtctcctagtttacccttcagctttgacgcagactacctaatttcctaaggtcttagcatccacctgaaaaaaaagaaaaaaaaaaaaacagtaatatatgttagatgacttcacattcactcaagtaaagccaacttgtctaatctctggtaaatatagattactctgccatgctcttaacctttgtgggcaggaggctggattgctaaatgcatattgggtttgcttcagtatgcatcctttttaaatgttctaacatgtagtctcttggcttgtgcccaattccgaaagtctgcttttagggagatttgactttttctgttggagaagaaagccctgagctttctgcagtctcaacaggatgtaactttcctagagtcagctgggcattcagtttgacccactgagagcattacacttatgtgcccagaaaaatgactgagtcgactgtcacccttcaaaagatgaaggacaacaatgggaacatgccataaaaaagtctgggactgtttttgacaaagagctcttgtgttcctcctgcctgcttggatctctctaggaaagggtgagttgtactgttatttccttgaggatgcatggatgttggagagatgtttaactgccctgaaaggttttagaggggggataacacagtaatttactactgaaagtgaagactcaggaaggtagtttgagctcaaacagaacacttcttccctgcagaaaatctttttttaaatatatattcgcaatcttttcttccatttgccttccattctgtacaggttattaactgctgacaagaaattcacatctcataaataatgcttaagagccattgctatataaattgaatgtgttatgaattgtgatgggcctttttgtagcattcgatgcctagagcaggaagaacagaggatgtcattttcattaatttctaatgaggtgccaattaaaggcagggaagacgctccaaagggaagagtggccaagctcccctgaatcctccgccccaggg

SEQ ID NO: 120644 - DNA, 1044 bp, Homo sapiens
attgtgtggttacattcaattctgtgttgtctgtactccgcttgtttgtaattatgagcaacagcaaagcttcagttccaggagagtatccagtgctatcttggacatttctgggttacctctaagagtgagctcagcaagtgtaggctcctatgaataacggcaatagaaaggcactgttaggaaagtaaacgtgctactgcaaaaaacaggatacaccacaagccagacagcagtagtttttcagttgtgcccagtgcacttgtgttcacccaggtaactggatgaactgtgtggtgatggtgttctcctgtgagggggaggggcacagttactagcattaaatattgctagaagtaatatttttctgtttttctatcttgttgctagaagcaatatgtttctatttttaatgagtcaaatgctgactctatttatttattcattctgttcatctttattgagttgtagaggaagagcaaggggtaaaactgacaaaagtccctgacctcttggtgcttttattctttaggggagagatgcagtaagcaagggaacagataaacaaggtaatttctgatgggagcaggagatatgatgtaataaaatgacagtgtgataagggaaagggggagctgcaaatagggaagggggaggccagcacctgggaggacatgaaagctgagctgaacataaaagctgggagagccagccattcagagagttgggagagcagtgccctagacagaacaaaggccctggagggaggaacaaacttggtgtatctgaggaagagaaagctggccagcccggccagagcacagtgcgttgcgggaggagagtggagacgcagcagggatcagtcgggggcttgcatgtctttgcaaagaatctgattattgtaaacatagtgagaaggcattgaatggttttaagcaaaggagtgatctgacttaaattttaaaaatattcccctggagagccaggcacggtaactcacagctgtaatcttagcactggggacgcggaggtgggagtatcagt

SEQ ID NO: 120645 - DNA, 1096 bp, Homo sapiens
cctctacatctctgaaaagaagttgaggatgtgaggagggatgagtcagtttgcaaggggtggctgcctgttctttatggcctggatgagggcttaaaagaaagaagtctgaaaagagatgctgttggttggaaaacaagtaaggagagtgtttgcttgggcaggctgctgtgggatgcctgctccagacagggagaacaggtttaggaatggatctagatttacctggaagcttgctcctgtggacctgatccaggcccacggggcctggaggtgtggtgagataatgctgatgggatgagaaggtgatgaggagccagccagcactggcaggtgtcttcctagccctgatcttgttctccccagcgttttgaaagaggcggccagcagactctggggacctcagacgtctgtgctccacatgcgtatcggccgctctagagattgcctgggaagctggagggaatgggagacaccccggtgcagctgcgccctgagttctctgagcctggctcctggctccctgcagccctcccctccttgttcctgacccagagtgactttacctgtaccggctccctgctcgataggcctcttgatctttcatcactggtctttttctcttatttgccagaccagtgtctcccttggatttctctgcttcaaaaagagccttgcagcatcctgcgcttctgggagggaaagacagctggaggcctgagtgtgggcatctcaacctctctcacctacccagtggagtgaaggacagctgggggtccgagtgtgggcatctcaacctctctcacctacccagtggagtgaaggacagctgggggtccgagtgtgggcatctcaacctctctcacctacccagtggagggaaggacagctgggggcccgagtgtgggcatctcaacctctctcacctacccagtgcagttagaagtgtcagattccttggagatggcgattggagcccagcattgctgtctcctctgtttctatctaatactttttctagcactagaaataatccactttcctttgagagctcccactcatttttgggttgtggtttgatcactcccaccatcct

SEQ ID NO: 120646 - DNA, 1097 bp, Homo sapiens
ttttctacacaggatccaaggtcacgagaagcagccagagtgccccgcctccgccggctctggtctgccattcgccagtgcagggatctggcacggaccagatgtggcgaatggcagcacagcgcggtggctgggtctgcacactggcctctgcagccagatttctatattgggagttttttaaaaagacatttcatagccaacaagaatcagtagaagtgctgggagcagcagctggggaagctgccgcccacgggctctgccccttccagctggagccgcccgtgcctccaggggccaagaggatgatgtcgtggcctccattctcgtttctatgcagccccatagtccaaggacacccagtccacatctaccatatagcaagtttagtaagggaaggcagcatacgtcccagggacagtgggtttggatctgtctagaacagcggtttgtggctgtggcccagctccgagagtgatatttgctctggtaggtgagggcctgagggtacatttctccacctgtgccccctcatgttcacagaggatttcagcagctgcaactgcgcacgccaggtggggaagggtgggggtgggcctggttgccccatgttaggaaatcactaccagtcaggtggggctggggctgggtggacaggatcaggattcccttgaaagcccaggcagggtgagcagtcccagtggtcctagtgccgcatcagatccaggtgggtgagggcaggaggcccctgcggaggcagcgtggatctgcccacacataggctactggaatagtttaacccagcaactttcctttttataaaacaacaaatggttcaactctgtctgcaaattaacagctgaacacctgcaactgcaaatgttttttgatccgacgtactgaaataggaagtcatgctcttcccaccctccacccaccagagtggaacccgctgcaaaatccccagccttaattcttgcttcaggacccagaccggtgtcttgctctagggcaacccagggcagaggggccaggtctgcccagcgtttaccactgctgtcaagccacagcccttggccaccatacgggccatcctc

SEQ ID NO: 120647 - DNA, 1050 bp, Homo sapiens
caagggcgccatggtcaccaccacccaggcaaagaaatgggaggtggccagcacccccacccttcacttttcattattattattattattattattattattttttttttttttttttttttttttttttttttttgagagtagaaaggcaacttcattggagcttttggggaaaaaagccttcaaagtcaccttctggcagctctggggagggtcatttggggtggactgagagtgtagggcaggtagggtgtgtgctgggcagcagctgtgtccatgcagccagcacccagcagggcagtctcacaggagccgttgtgagcactttggacttgaagcagctatgaaccaccccccgcccccaccgtctctccctctcacacacacacacacacacacacacacacacacacacacacacacacacccgttttaccattttctcagtgctttttctgctttcattcctttgattttagttagaagcacaagccatgatggatgtgggactcttctcaattgctctttaaattgtcactttttaaatcctattaaatgaagtgtcgattcctgacaaatacattaaaagtgttttattcctagaagagttgggaaaagaaattattttcagcaagagtaggatgtttgttaaactgattccttggcaaaaaagagaaaaaaagcttttgaattgtgcaaaaaattgcccagtattatgctgtcgccccagttgtcaaactgctgtgcagatggctccagcccagtcaacttcaccttctttttaatttagaagataacaaaattgtaatcacttatcctttccagagccaagggggaaaaggaaggtataatctacaataaaaagcgagcgttctgtgtactgaggccacttggtgataaagagatggagcgctcccctcacagacttcaattaagaacctccctttggacagggaagaaaggtgtcaaagaggaaaagaaaattaaatttgcttccttccaggagtttttcctcattagtgcttgcttgtcggtgttattattttaatc

SEQ ID NO: 120648 - DNA, 1108 bp, Homo sapiens
ctatttccttgtcagcctcccaagcttaaaggctggatccatgtcaggaatgacaggtgagtaactcagccacacgagtgactattaactccagtgtccacaggttgatttgcttgtgtgcatttgtggcacttcctctgtggcccaagtgccaggatgagctgcatccgtgtctcatttaggagacatgcacgatgggtctctgtccccgcaagctgaaccgttcaaaaccaaggaaggaaaattatagcatcaaaagggattaaaactagtgatttgctgtttgagcatttcaaatagatccggaacacctatgattcactgagtggagaataactaaaacaaataaaaaatcatttagttgccagggcaatgtattccagcagaatgaacactctatggaggcccattcctaaagggtgcctccaggtagcaaaggcccaatggctttctcctccgcctgagtgtttgcgtgccatttttgtattccaacacaggcctgtctatgacttcctcctgttccctgcgcctgggctagattagagaggtagggtgttaatggtggacttgatgaagattgaagacccattttctcccccttgagacctgcctgatttggataaattgagaagaacaaagcagcccctttctgtccttgggagaaaacctgttcggtgtctgcttttgcagctaggtcggctcctccctggaaaggggcagaggtgggggcagtcaacagagacccctgctcagggaggagaccgtttcctgccgttgcccgagcccaccaagtcacaccaggcccgctgcctcctttattggtgctgccggttgggggagcgtgagttggagcctgggctggagggtagtgagctgccactaggcgcccgcagcgcatgggagtcgagctgctgaccggccaggctggtgtcccctgtccccgattcctcactattttcctccttctggctgctctgctgctctggacactcaaagtggacacagtggaacacctgggagagaaaaggaaaagaccccatgagtgaagggtcagcatgcggccctggagttgccgcaagttgggatactgccctgcccagctttgggg

SEQ ID NO: 120649 - DNA, 1403 bp, Homo sapiens
ttccgtggttggttaggtattttaagcacagaaagccacatcaacacatgactctgatataccatattaccatattaaataacatgaaatattactgatataccatattaaaaatgtatccttcaaagagggtctaattatccagctctttggagaggaaagatggcagagatagccaaatgccctccttagtgtttgaaacgatttataattgtatatgtattttaggtcatcatgttgcagaaaagtataacaaatgtttattggtggcttatatggcaaaaccagccaacagtatctgctttttcatctttttagtgactgctgagttcattttactgtaagaacacacactcatcttgagaccatctggctttatttattcttagtgaataaccaaattctgctattgtgttgtttcataatagctcaggtaagatgcatgacaacccagcatctaggtgatatgacgtaatggaacagttttaagtcagagactcagaaagttgaaagtggagaagtgaacctaggtgggtgattcagtaaagagagagtatttagtctaaaaaagaaaaagtgaggccgggcatggtggctcacaactgtaatcccagcactttgggaggctgaggtgggtggatcattaggtcaagagattgagaccatcctggccaacatgctgaaaccctgtctctactaaaatacaaaaaaaaaaaaaaattagctgggtgtggtggcgcacacctgtagttccagctactcaggaggctgaggtgggggaattgtttgaacccaggaggcggagctggcagtgagccaagcttgtgctactacactccagcctggcaacagagcaagactcggtctcaaaaaaaaaaaaaaaaaaaaaaaagaaaagaaagtgatagtaatgacttaatactatctgtccctctcctcatcctccttctgaagaaatagactgggcagcacttgggctgtattgctccttgctagaccctatacaaagagctagtcagtcattagtaactgtcagtatcaccaaacctggtacacagcctgggcgggtactccaaaaaagtatactggagatggtctttctaaaagtcaccctcataaatggattgttcttcccatatcagataaaatgccatgtagaactagaaattgtcattcaatttttatgcctgagaaatatatagtcagttgatcagttgggatttgagaataaaaaaaattaagtcaagctgaccagcatttccttcatgaagttgccccatcatagcctcagtatggctgtccttcttgtgagcttctgtccgtgccacacacacattcaacttcaggatttagaggctaggcaactagtggtagacattccagaccaggaaagtcagggcctg

SEQ ID NO: 120650 - DNA, 2123 bp, Homo sapiens
gtcatctatacgttaggccacacttggagacaccagttactcacacttgtttatggggttatgaagtacctaaagctgatgcttattttagaatagaaaatagcaataaggagtcagccagtcatacctgcacatttaaaggggacttatcttttgtattgcaggaagtttttattataaatttacccaaacattgggaggcatgtggaaagtagattttgatgctaagtatgtgaattgcctgagttctaaatttagagctgccagcagatcctgtggacccccagtgggaggctcctctctacccagaacatttggaagttaaaggagctagaaggaaatgaagtcctcttgggtagcaaatgatcaggaagaagaatctgagagctcctatttccttctttcttacttaacccaggagccacgttattctgtgagggtaataattttttccatgcctgttataaaaaaaatgaagcatacctcaataaaactttctcagtgagctgtgtgagcacacaaaatgtacatggtcagaaatttttattttattatggaaataactttcttattaatgttatattccaaatgattaaaaataaatcaagatcacatttagttcacctaccatcatcacttacctgttccactccactctactgactgacccccccacattccctctgtgccctcccatgagtttacttactataggcaggtggcacttttcaagcacaactctagtatcgtcctgcttaggaccctgcactgcttcctgctgctctctgaatcaagaacagaattctttgcgtggcctagagtgccctgcacaatctggccccctgcctctccatactccctctgcatccctctccctgttcccatctccctggcatcctctgttttcccaccatccatcatgctctgtcctcacacagagcctttgcgcatgccatgctggtctctgtctggagcccaccctctgccctttgtctcattaaccacccccacttacccttctcagctcaagggccacttttcaggaaagtttgccctgaccacccatcttgatcaaatcactgtgttatcccctctcataaaaccaagctactttttttcacagcccttgttgcagtttgcaattacccattcatagcatggctgttaagttactgttcttttgcaccagaaggtaagctccagagcagggatttggtgttttactcactctttgatccatagtagtagcctagcaagcacctaacacttgtaggggtcagtatgtacttgatctgaatgaatagaagcatgcgtgccattgctctgtctccagtcacgtatgcatgttggtttcatttgtcttgttactgtctggaggtgtcattgtcacaaagcccaattgggaagtttgcccattccagctcagatgctgtcacataaagcgcaaggaagagtttatgggagagaataagatttgcccatggtgatgtagtccttgtaaactacacatgtgtcttcctaacttctctttattaacccattattgatctgtcatctttggctcatttatagcattattccacaaattttaattcagtattgccagaggctcagttttctttggtttttacatctatcattgcccctcacgttagtgacttggatcccctggtaacagtttatcacttcaagttggttactggctggaagtccattacctttatttttaaccactcttagagagagtaaagtttatttttatggaggggccaagtgcttttaaaactcttttccagctgtgcccctttcagttcagaaattgatttgatttaaaatcccaagttcgtctggttaatgtttcaattgcttctctggatttttagagtaaaaggttaaaaaaaaaagcccaaacttaaactctgaagagggactctaaactgcctgccagagcatcacatgtacctctcccagcaggaaagagtctgttcaacagaacagacctcactctggaatcctagagctctctgtacctctcatggtctcaggatggctgcagagggtccagcctaccaccatccagagaggtgctcagtcagcacccttaccatgaccaagtcttgatt

SEQ ID NO: 120651 - DNA, 1041 bp, Homo sapiens
agggaaggcgagccctttaggaggccaggcgagagggtagcttgaggccaggagtttgaccccgcctggccaacacagtgagaccctatctctacaaaataatcttttgtttgtttgttttttaattagctgggtgtggtagtgtgtgcctgtaatcccagctacttgggaggctaaggcaggaggattgctttagcccaggagtttgaggctgcagtgagctatgattgcaccactgcactccagcctgggcaacagagagagaagctgtcctcccaaccttccccaacaacaaaaaaggtaacggtgaaggaaaacggaaaacacaggcaatcctagtcctcagtaatagctttatatgtgatactaaactgaacttgtgcaaaggattttcactgattataatcataagattaagggaaaataatacaagctacttttatagagtgataggttagaggttgtaaattgtgaaccagatatgtaaactgagagtaatggaaacatttggcagtgggattacagaaatgggcttttggtgaaggtaccaggttagaaccttgtatcatttccatcacttagttactgtatgagtttagacaagttacttaacatgctttaatcctcacactttcaatatctgtaatttcataataatagtgcttgctaagaggatatttagaaggattttaataagacgaattgtacagagcacttaacatagggcctaatacacagttaacattaaagaaatgttggccatcatgatcattattattgattgttttttgttttttgtttttttgagacagaatctcgcgctgtggcctgggccagagtgcagtggtatgatctcagctcactgcaagctccgcctcctggattcaagcgattctcctgcctcagcctcccgagtagctgggattacaggtgcccaccaccacgcctggctaattttttgtatttttagtagagacggcgtttcactgtgttagccaggatggtctcaatctccagatctcatgatccacccgccttggc

SEQ ID NO: 120652 - DNA, 1041 bp, Homo sapiens
agaagttgatgctgcttgctggttccccagggcaccctaaggagttgatgctgggtttcttggagaattcagactgtggattcttcatttaaattgttgacccttttttataaagggccacattacaggctgagtaccataggcaacaaatcacagatagagaagcctcgagtttgtacctcaggccagaccagcttactttgtgcttagggagggaaagagacaagccacatcagctacctgtacaaataaacttctgtcgaatagcaaataataccccaccttcctttctgtcatctgtatgcattaactaaagtacttgtaaaccatctatttagtaagctattctagaatttttgttaaagatgatgtgaaacctctatattttccattacaacctatccctttttactttaaaaatctggaaaacagttgtctttcttttgtcttctggcacccctgatagcctccacaatttcttgaagattaccaatcgtgtctctgagattacatctgcaatttctttcagtaggcttggggtgtaactcatctgagtcaggagacttgaaatcatttaaattgactagatactctctttgacttcacctatttgggacttcaattttctctttattatgtttgttctgacatttctaatttgaagaccagtctccttgccaatgaagattgaagcaaacgggaagtttagtagctctgcccactctcttttaatgttctccgttttccatttgcttacctggtaccccacacctccctccccaccaccgccaccatctaacagtgttctatgcgcatctcaaaccaagatgcctaaaatggaattccattatccttccctccctgttcaagtcacgtcatgtcatgattccccatctcattcagtggcaccatccatttgtccattacttgagccaaaaacttgggaatctccctgatttccttcctctccttcaccttcctctctcatccagtcagccataaagttctgtcagtacagcctaaacatctcacaaatccttc

SEQ ID NO: 120653 - DNA, 1132 bp, Homo sapiens
gttatcacacagcctttcaaagatccagcatgttaagggtggtttgctgtccagtttaatgtcatcccttcaccgaatggatgggctgcttccctccccctcttcctctcttgaaaggttagcctttcttcagaatagtacaggtttttcctgcaacatctgtcaacttggcaacgagcacaccctaaggaaattatgaacatttgaagaccatctaaatactgtagggtacctttccttctttctctcctctctccctcttctccctcctgcctttccccaagaagaatggagcagccacatggcaatgtcactgtgtgtctcactgataaattataagcctatttctgtctgtgattcgtttcatatgttgtgatttgcttattcctttgtgatagctcttgaaaccttaaagcagtgacgattgtaaaaggcagactgtgggaagaccccttcgtttaattaaaagagacctcccttagccactgtactgttagcacaaagaggctactttggtcaaatgactcagatgatcttgatctgattcagtaggtcagaaattgctgtccccagcaaatatcgatcagaaggaactgctttctcggttattctgaaactgccagctgcatattacactagcaggtgctaatagttttttgcaggtcggtagaattgttattggttcttcctttgcctcttatccttaaaggtggcttgtcccccatcttgtgtaatacccagatttatgaaatgctggtcccacctacccattccacatggggaaaaatctggctttctgtgtctggggaagtgccaagcctaggtcttatgcttctctgaaactctcaaaattcttttgtaaacattgtctaacttattctgtcaatattcataaaaaggcagggagaagaagggattattatctttataggtagagaaacagtcacagaatggttaaatggcttccttgacgttgcctaggaagctgtttacagaagtgaggttagttctctgaatgcctgctttctagtccattgccttgtgcagtggactttcaagcagaagctgggaagggaagagcagctgttttcctcccgcataattaatatgtagatatgatggaaagagagtt

SEQ ID NO: 120654 - DNA, 1040 bp, Homo sapiens
tcaccatggcgctcaaggccctgcatggtatgatgcctgcatatttgcttcattttataccaattctcatctagctttctgtattccagccacacaggcctttccatttcaaaaatacaccattcattctctgaccacagtgtctttgcacttgctgttcgctctggaatgcccctcaccctctccttatccttcctctcactttgtcaaaccccaccccttttatttaagatgaccttctgttatacctttaagtttcagattaatgtcacttcttcagaaaaggcttccctgaccccccctacccctagtcttggtaaagtttcttagtatgatgcttatagatgtggagtttttttctttcagagcacttagtttcatttgtaactatacatttatttacatggttcgataatagaagagcctgtctgttttgttcactgctgtattcccagcgtttggaaccctgatactcagtaagtgttgaatgaatgaataagtggaatgatgtgttgcattctgaggaccagaagatcaacccaaatcctggtttccactctgctgctgatttactatgtaataaataagacaatctttctgagccttaatttctaaaatgaaaaaaactaacctaatgagctggggctctttttgtttgtttgttttgttttgtttttttgtttttgagacggagtcttgctctgttgcccaggctggagtgcagtggcacgatcttggctcactgcaagctccacctcccgggttcatgccattctcctgcctcagcctcccgagtagctgagactacaggcgcccaccaccatgctcagctaattctttgtatttttagtggagacagggtttcaccatgttagccaggatggtctcaatctcctgacctcatgatccgcccgcctcggcctcccaaagtgctgggattacaggcatgagccaccgcacccagcctctttgttgtttttaaacaggtatccattaggtatagagaactgtgttaatcgtatatgccatccttagttttc

SEQ ID NO: 120655 - DNA, 1055 bp, Homo sapiens
atgtatatttggatattttatcttcaaatactttgttactctcttaacttatcttaatcagttctaaggactctggttgatttaaatgccttattgctaggtgacatagggaatggcttacattttttagaagtattcaatatagtaattccaatgaacttaaaagaatgaatgtaaatgttgtactagtgctaaagaattgaaaatattttagtaattcattcagatttgctatgtagggaatgtttgtgatagtcaggtgaagcccctcacaccaagggatttaatgataggcgagtttgaagagaagtctgtatgatattgattggatgttcagactttccatggctgtgcaggtattttggcctttgattggatatgagtggtatgcttagctgtggaggtatcttcttttcatggatatatgaattcatgtttgcccgaagtagcctcaagaaagttcaactcacaaaagtgcctccatataatttaagtaagaccaaagtgactgaattgtcacttttgaattgtcattgcaaaagtcaagttatttggtgggaaatactgcctgactgatatttggaaagaggattttaaattttagtgtaattgtttgcttggttgttttctgtcttgttttgtttttattttcagtaatgggtagtctgggcgttgtgcacagtccatcccaggtcttgacattctagataccatgagtggctttgcccatccagactgtttattctgcttttttttcccccatgcccataggttttcactcacctgctgcaaagatcatgcttagatcaattagctccttgattctgtccctttattgcagtttgctttgagaagggacttcatatgttccggtgtggggataagatgtccctgccttgtggtctaaaacagaattctgtacctttacaaagggactcatgtctcctctctttcccaagttttgttcatgttggcacacatgtccatactgacctaaaagcatgggaataactataatgggaaagatgagtgtaacttgcaaatgtttattaact

SEQ ID NO: 120656 - DNA, 1091 bp, Homo sapiens
ggaaattagttatctaaacttggaaaatctgattccatatagtgttttaaaaagaaagaacaggagggaaggaaggttattgcatcccttaggtcagcctggaatatattaaccttaagaaccgccattgggaaaaggccctgttagtcacttcctggctcttctgtgcacagtaggagagctgtctctcctttggtagagacttgagctagagaatagcgaaatgatctgatcaaattccactaaaccacattccctctattccctccaaggttgcagacagcagcactcaggctgacacagccatatgtagttgaaaaatgctatgctggttgagttcctgtgggtttaaggaaatggacaaaattagattcaggccaaggtgccagaattaatacaccccttcccttccagaaagcaccagggagattgtcactgccaaagtgaaggacaatataatctttactacccagaccggtaagaacttatgttgaatgaacctacccacccacccaaacccagtaaaatcaataccttctgtctgccttgagggcttgaaggaacagattagggccaaattcctgcttaaccagtgggctctggtacatgtagcagttgccctgattctcaacacgggaagagtggtgtctccttgcagtaggtgtgagcacactggacagtcagttcaggacatagcattaatattggttataaaggtgagtgatcagcttatgtcaaggagcagatggctaaatgaggtgcacagggaatgccgtgagagtcaagcttgaagaatcaggagggaaaatagcccatgatataaaaaccccaaatatagtttccttaatgtgaattttctaaatcagcatttacattatacagttaacttggactgatgagaaatgtaaggaaattaccaaattagtgaatagcgattaactcagaagtaaaattatatcgtctaaattgaaggttgttttacacagcagaggggaggagattactaaaaccttgtccagtctgtcatatcctaattgaaatctgttcatttaatataccccatccttcagagtgcatagttcataatctgg

SEQ ID NO: 120657 - DNA, 1031 bp, Homo sapiens
ctctaagtgcttgctgctggtcaccacacacacagccagcagccctcaaactgcagaaaaaccaataaaaggacctcactctcttcctcccccataaaaaaggaaatgcatgcttgcaggacatacagagaaacctagcatcagggagaaaaacatggagaagcaaacagggcaaaaataagtccagccaagagtttgtatagaatttgacagacctttgctatacatgttcatggcacatataagatccttatggttggaatggaaggcatttggatgtgtcagaggtagaaattgtgtcagatttgggaaaattgttggaaggaagactggagagaggcttatgtcgtctgaatggagggtacagagggaaaagtcaggaggtctgaacagccattctaggaccttctagcaccagatgggtaggccacggtctcagtgctgaaaacgacaagaacatagcccctaaaaagggaaagtaaacacagaaaagtattaatttgttgttcctgcaaatatggatgaaaagagttttatcctgccctgcttcatacttaaaagtgttatttttttcttgaaggatgtgtagattggtggagcgggattttcttttagttgctgtagcactgtttgatttttagaaaatgtgttatgtcagtccataccaacccactaaaaccccaactcacagctgcagaaatagcctgaggatgtgacaaattagtgttcctcatcatactgcgattaggcttaacatcttttaataatgaatgtgactccacatggcaagagaataaactagcagtttgtacaaagatattatcttccaggaattggggtgatacttaaattttaatcactttagattttggtttatgagtgagctgaggtgcatctaaaaattctctcattcaaggcccaaagacattggtttcattgttggcacatgtggcactgatggcccaggagatggtgaattatgtgcattttgtgattcccatgggacctgggaggagtggtgggaggaggac

SEQ ID NO: 120658 - DNA, 1059 bp, Homo sapiens
catatggctttggtcttatttatttattattattattgttattgttgttttgggtttttttgaggtggagttttgctcttcttgcccaggctggagtgcagtggcgtgatctcagctcaccgcaacctctgcctcccaggctcaagcaattctcctgccccagcctcccgagtagctgggattacaggcatgtgccactacacccggctaatttttgtatttttagtagagacggggtttcaccatgttggccaggctggtcccaaactcctgacctcaggtgatcctcccgcctcagcctcccaaagtgttgggattacaggcgtgagccactgtgcccggccaacttttgtcttattatcctagacttactatagtctctccctgtaacaaacaaatatgtacagatttatattcagaaacatagttgaaaaagaaacatgatttgattgtttaatttgaagtttgtaggaaggtgaatgtccaagagtaaattcttaagtgcttccttgttctacctgcaagcatcctttcttactacacaatatagaatgtcactttagagatgcatcaaataaacattttggccaaatggggaattgggaccagtaatattaccaacacagaggggacttttgggtaacaagagtgaattgggccagacgcgttggctgatgcctgtaatcccagcactttgggagcccagggtgggcagatggattgaactcaggagttcaagagcagcctgggcagcatggtgaaaccctgtctttacaaaagtgtataaaaattggctggatgttgtgcatacacctgtagtcccagctacttgggaggcggaggtgggaggattgcttgagcctgggaggcagaggttgcagaacaccaagatcatactactgcacttcagcctgggtgacagaacaagaccctggccccccactccaaaaaaaaaaaaaaaaaaaaaagagtaaactggaaaatgtatcccaaatataaatatcactataattttactacatttatattgatcagaattttaaaatttgaccttacatt

SEQ ID NO: 120659 - DNA, 1523 bp, Homo sapiens
tctgtgttgtagcgcagcacactctgagatatgtgacggcaccagcagagaggtattttcagtcacttcattgtaccatcaggaagaagtttgagtggcatatgatgacaatcagtgatagccctataacctcgtattttataattaccactagaatatattcaatatgtatgtgggactctacggagagagaaaggaagaaattctattcccagctgcataacataaagctgtatttttattaagagctttgactgacaatataaatcataaatcaccaacataaagcttaagacaccagaagccagagagaaaatataacctgtaaaatgtacaatactggtatagtttaatattcacagttcccaggattttaaagcaatttcataccaaattaagacagctgatttttttattcaatattttcttttttcacgtaagctagtcttcttgatcctttgtgccatttctgtgtcatgtcagctgacaataatcaatttggatatctatgcatttgagtaattcattcttgaaaaaaggtggtaaaaaattacagcacatttgttgtaaaaatatttgcataccatgaagtgactgtaaagcatagtcagttgtgaatgaaagtgaacacccaacgccatccagcatggggctgtatgtgtagtgcaggtgcttcatacgtgtttactggtggcatctttgatgctgaagggttaaagagagagtattttgaaatttcctgggtctttttggaatgtacaaagaagaaagtattgcatttgcctgtttttttgatgcagtaatgtatcattaacaatttattgtggtgtatcaagccatgaaacagaacacatctgagcatatttctctgacagacaaaggtgcagattttatgtattgagttaaaggaaatgaaactttcccagcaagggtaagtagaaagaaatttggccatagatataatatatgtctttaaaatgtggtgaaaataagtttaaaagattctttgttaaatcctcacctctattaattaatcactatactataaattatcacagatttcctgccagttaaagacagttagaagatctagtagagagtttggtacattacatagagctaaaaataaattattattgtcctgttgtcattttccccctttgtttaaaatgctctcttgctagtataaaacctgtggtataacaatactcagatttctttcttgagaaagggtaagacagtggatcataaagcacaatttgttaacctctttttaaatgtagcttttgtaatgacactttaatatttcagaagtcctgaaggtttaactttagttttcagtttaaatgaccctcaggttcttggtattagtatttcaaggttaaagtttagaaacagaataggtgtttttatacatatacaaaaaactactggccaaaggattgatggacactgtcattttcaacacagttcatttgaaaatggccatattgaatctataaacacactaaattcagttgata

SEQ ID NO: 120660 - DNA, 1910 bp, Homo sapiens
ctgcctccgcctcccaagtacctgggatcacaggcacctgccatcatgcctggctagtttttgtatttttagtgaagacagggtttcaccatgttggcctggctgggctcgaactcctggcctcaagtgatccacctgcctcggcctcccaaagtgctgggatgacaggcatgagtcactgcgcctgtccaccaattatttctctttggtctttttctatagcactggtacctgaagtagtacctaagcattagaatttcgtatcattttcctttggatacttcctttgggctctgtgtttcctgagaatggactgagtgagggagggatggtagaaatgctactgcttttagccttagtttttcggacaaagaggggtaaagacaaaattaatttggaagcctgttgttggtaagacttaggaaataataaaagatgttccctctttgcatatattctttttttgttgattctacacagcaactgtttactttggagtatttatagtttgtatgttcagtggtttttcagggatttttcttgttaagccaacatgcaaatatagtgaccttaacaactatatctcatgatgtaaggctaaggtgtcaatgtggcagtcttggaattatttcaacccgagcaaaggaaaaacaaacattggtgggttcatcccctatccagatcacaaagctttggattctttttggattctcttcaatgtatttaacctttaagcattagaatagtaggcaaaggaagtaagagaatatgagaactgtttttttggttttgttttgttttgtttagagacagggtcttgctctgttgctggagtgcagtgtcacgattatagctcactgcagacttgaactcctgggctcaagtgatccccctgcctcagcctcccaagaaactgggactgcaggtgcatgtcactacacctaactaatttttctattttcttttgagatgggggtctcactgtgttgcccaggctggtctcgaactcctggcctcatgtgatcctcttgcctcggcctctcaaagtgctgagattacaggcatgagccaccacgctttgccagtgccatgattttaaatcgtgtccttcaagtgttagtaagtaaagtggcctaattttaggttatgtatcagctgtttcattgggattccttttttaggaaaaataaattatctccaaaaagaaagcaaaaacagctttcctttgatctgattatacatcagagttgttccattgaggaccttgaatgcagggattcttgaatttatctggatggaaaggcaagcatgatggattttgttagtcttctaattgaatccagttttgataattatttccattgctacttcaggatttacaattgatcatctttatagtcatgaacataggaaaacattgtgaaaatacccatggaaaatgaaatagtttttggtttttgttgaaagcagtcacttagctgattttgtcctgcatatttccccacatttaactttacccaacttagctccctttttccaagttagaactgaagtctagcacattgggaaaatgacttttattaaatgcatgactagaattcttcaaaaccccagctagactctgcaaggggctgctgcaggttgcacacaggaagaactgtggctggtctgcttctcgtcctgatccgggcatagccaggctggtacacaggcatactggataagtaattggtcttaaatataacattgcaaagaactagaactcaaaagtgattccctactgaaagaacttcctcttttattgctctgaaatgatctttcaatttggcctcattctgaaagttgccatttgaattggactgggaacaaaagttagaatttattgaaaacaactcattgcttaatctctg

SEQ ID NO: 120661 - DNA, 1029 bp, Homo sapiens
tttttcattttttatatttaagtctttgattcatttggaatttatcctcatgtacagtatgaagatggatctgattttttgtttgtttgctttggaactaaagcacattgagaaagaatgtatccgattttatctttttccgtatggccatctggttaacccaacaatacttattaaaaagcccatccctgatttgcgttgttgcctctgttaaataataaacatacaatttcaaatgtagtttggctctatatcttgggttttctactccacaccactgagcagtcgattcatgtgccaatactacattattttatttatagaggctttataacatgttttaatatctgctcttctttttcagggttttcttggctattcttgcatgattgctcttctaaattagccttataatcaacttatctaattttgatggggaatgggttatggtattcttactgagatgttattaattagaattagagagtagtggcatcctctgatcttgtcttcctctccaagaacacggcgtgcaagtctactttcatgccatgttcttttttatgcatgttgcccctcagtttgggccaggttgagtatggagagttggtaaggatattcaagtagaactacctggtcagcaatcagaatgtgggacaggaggtcacaagagagagaggttggactggagatacatgcagggaaccacttgcatgaataatatgtgaattcatgacatgatattttcttgtttttttaaattattttttatagagacagggtctcactatgttacccaggctggtcttgaactcccaggctcaagtgatcctcccacctcagcctcccaaagtgttgggattataggtgtgagccactgtacccggccctcgtgacatgacattgcacactgttgcattgttaagttagtcattcagtatcattctctaaggaacttcctcactgaagatgtttaattcataggtgttacatgaccaggtaatattttcatgttttcttatcaatgaa

SEQ ID NO: 120662 - DNA, 1037 bp, Homo sapiens
ataaactttttttaaaaaatcaatataaccccaactgtttttagtggaatttaatcagcttattctaaaatgtataaagtataaagattaaaagtagccaagttacctatgaaggaaaagaatgggttgtaggaaggggcacatgagggcttctgagatgctgggtaggagttcattttacagtagcttgctaagttattcctttatactttatccatttttgtatatattggttctatcacagaaagggtgtttgactaaatcaatattatgttctagctgtaccataaaggagaaatgaaataattagactagaagggtgaagtgctccagcagaacccagaatgctccccagaatgatactaccccccatgaaaacccctggtttagaaaattaactttgtacggaggtttacaattgcatttgaaggcactggctttttgtttaatgaattgaaaaactgtttttaattagttatcctaaatcccttatgcttcattctgaacctgttatcagtgaacttaatggaatccaagagtaactgatcattactttcagtcacaaacatgcatattttttgccaagttttctgcatttcatatttatactctccatttacttttctttctttatttcttttgcattactgatgtaccctgtacttgtcattaatgaacttaattatttcattgataatttaaccttggtcagaacttctagtgtctgctaatgccttactgtttgttatcatctcaaaattcagtagagtcggcctctcgtccatttatctggtcatggatgaaatgttagacatagaggatgattatgactagctatattactatgaaccactaaaatctgctgctccatgtgcttttatcctgaggccaatatacggaagcctgtctttgagatgggctgtcagcagccttagacatacatgtacaaaggaagaccgaagtcaggcttaagaattattaaattattagtagataaaaattttgaaaccaaaacacatgtttaaaaacaaatgaat

SEQ ID NO: 120663 - DNA, 1034 bp, Homo sapiens
cacatgcctgtaatcccaggcctttgggaggctgaggcaggtggatcacctgaggtcaggagttcgagaccagtctgaccaacatggtgaaaccctgtctctactaaaaatacaaaaataagcccggcgtggtggtgtgcaccagtaatgccagctgcttgggaggctgaggcaggagaatctcttgaacccgggaggcagcggttgcaatgagtcgagatcatgccactgcactccagcctgggcgacagagcgagactccatctcaaaaagaataaaaaatttaaaaatatactttttataacttttataactcattcagattcacacctagtaggttgagagatctacctaatgtttgtggcccataattgactaaacatttacaatgagctggagcattgtcattgagccagttgttgggcggtattatattttttctgtatcacagagaatttcccaattgcttccaaatttgtttcttataaactgaatggactatatgaccttgtatgatgaattttcagtgaacttatgctatctgcttgctgatacctgaagtttctttaaaggaaccagagacttttattctgcaatgagaagtaaaagcctacagtgcagatgccttggaaatataatccacttgaaactcattcagtcattcacaagttttcattagtcaatgaatgagtataaaattcatgctaataaccatcacttatttagtttatcctgggtacctagcctagatgctttgaatacatatctccagtaattcacacaaaaagttgaatgccaggattattttcattttgcggagaaggaaaccaagcctctgaaaggtcaagtaacttgcccatggtcctgtagacaggaagtgaaaaagctgaacatggcacgggccctgtcgtgaactacttaaaaatatagtcgcttattcatcttagaccaccaagactgaattgaatttttaattctgaagacattcttttaatgcattgtatctgccttaccattttttactatatgattta

SEQ ID NO: 120664 - DNA, 1050 bp, Homo sapiens
tctactaaaaatacaaaaattagctgggcgtggtttcgcacgcctataatcccagctactcaggaggctgaggcagaagaattgcttgaacatgggaggcagaggttgcagtgagccgagatcgtgccgttgccctccagcctgggcaacaagagtgaaactccgtctcaaaaaaaaaaaaaaaaaaaatagaattggggtagatattattgcttcattagtttcacatacagaagattctatagcccttcttctcagtgttggaaaataaagtatttatagaaagtagcgtgggagatttggatttaagacaggaaattggaatgtgtctttttgggtgttcctcattctactgcttatgttgactatgggcaggaatctttacctcttaacttcattttttacgtttattgaaatggtactttctatttatctacttatcagtactaggcagattctgtataactttcagtttcaggatacttaaggaatttatgacatttcatgattttgctccaaattgttaactttgtacttagaatgttaatattgaatgtccccttgggcctatggttataccagtatactctctgggctgggtgaggtggctcatacctgtaatcccagcactttgggaggccaaggtgggcggatcacttgaggtcaggagtttgagaccagcctggccaacatgatgaaactccatctctactaaaaatacaaaaattagccgggcgcagtggcgggcacctgtaatcccagctactcgggaggctgaggccggagaattgcttgaacccagaaggtggaggttgcagtgagccaagatcacgccactgcactccggcctgggcgatagagtgagactcagtctcagagagaaagaaagagagagagagagaaaggaaggaaggaaggagggagggaggaagggagggagggggagggaaggaaggaagggagggaaaagaaaagaaagaaggaaggaaagaaggaaagaaagaaaagtaggtctgtgagtttttttggtgcaaaagttggctgtttttt

SEQ ID NO: 120665 - DNA, 1086 bp, Homo sapiens
tcctacaggaaaagtataagtgcaaattactttgctaacttagtactcaatatcaaaaaaaattctagatttggccaatgctgtattagaaaacccaaatctcctggctccctgaccggtgttatatctactatagctcattatctgtgctttaaaagttttataaaatatacataaatgtttaattagtatatgtggtacagaaggccctaatgcattataaagtagacattcaacacattaaaatatgtctattatgccataaatttgacatacctaaaagtaatatgttactataatatacactaaacatttaattaacattagtgttgcttgctttttacaattgtaagggacttgatggaagaatttaaaaagcttatctaagaatgtttgaaaaagaaagttgtccagaagtggttgtgttctttctgaaacctattccaaacaggccttccctcatcttacaccctcaaactgccgttgtcaaggtcaccaattattaccacagtgctgagcccagtagtctcttccgagtccttgtcttgcttcacttagcagcagcactggattcagttgttaacaccctgctccttgaaaaatgtcatttacttgacttccaggacacctctcttctctggtttcctcctatcccactggctgtttctacttagtgcgttttgccggttcctccttctcctccagcctctaaaactgaagtgccttggccttcatctgtgaccctcttttcttttctatacataagcatgctcaaatttggtgacctcaatcaagtctcaagggctttaaactatatctatgctgaacactcccaaatctatatatccagcttggacttccttgaacccaagcttcataaattcagtggcctacttgacacttttacttgaatgtttaataggaatctgaaacttaacataaacaaagccatactcctgagctagcctctacaatcccccatcttctgcagtcttcaggagtttactagatagtaattccaatgttttgcttaggccatcattctgtcatatccctcttcttgactgccagcaagtccttttagtt

SEQ ID NO: 120666 - DNA, 1054 bp, Homo sapiens
ggggaatgacacaagcagatttgtatctttcaaaaccgctccgttttgaagaatcatacccctgggcagaggtgtggagtggattagagggagctcagagtggatggggagaccagtaaggagactgtttagtaattttgatgagagaagagatgctagctaggaggctaaggtcgtagcaacaagggcaggagatgtaaatagatttgagagatttagaaggaagccagtttaggacttggcgattaattggatgtgtgcatgtgggtaagaggtggaaatgagtgagcgagagaaagagagagagagacaaagagagtgtgttcagggccaacttcctgatttctggcttgagcagctgcctgcttgctaatccctataatgagtgagaatggtggagaagctattttggaggagagaggaagtggtagcactgtatgccctttatagtgggaaattgggaaatacgagttgatatgccagaataaggggaaagtgagacaggggcagggcatgcattgtgaaatgaacatgaaaacacatgacagaaacaagtgaacagttaggtgataacacatctgtaggcattgaggtgtggtaagttgagccagggaaaacatattctcaccccttcacctagaagcaagaccagcctaaactaatcttaagtgtgttatatattggcttcagaggacatttgtctgtcagtgtcagggtttcagtctctgttgattcccctcacagcagcctgaatttttcttctctgataaagttagtatagaattctagctttgtttgttaaattgttcatgtggtccattgtgttacaaagtcataccaccacaatccatttgcctgccaagtcaatacttgcttcacaaacatagcagaaattaagatgattctgtctagcttgagtttcttacaatttttttttaaaaaatccttgatccttttatgttttaagagcacaaatgggccaagcgcggtggctcacacatgtaatcccagcactttgggaggccaaggcgggcagaccacctgaggttgggag

SEQ ID NO: 120667 - DNA, 1135 bp, Homo sapiens
actagacagtctgacttggaggagacttcactggattacactaactctctttcagactgacacatcttacattaacttgataccactggttggttggtcacttcccttcctggtagactttgactttctccagccttttattaaactcttcagattaactctggtcaaatatgaggatagtcaacagaaaaatagttaagaccaaagaatcctatcaaggttttctctcctatggattgattaagaaagtaatagcctgcagatgttactatatcagtcagaataggctaggttatactgtagttatagaccactctaaaaatcttagtgccatatttctcactcatacaacaaattcagtaagaattggtagggtctttgttcattgtagttactcagggacccacgctgacagagactcaatacatgcttccatgatcacagagtcaggggaaaaagagctctagagggtctcactctagcaattcaatattccagttcagacaggactcctgccactcccactcacaatttacatggccccagccagccaaagaggaataggaaatttagtcttccatgtgtccagaaggaagagaactggatctagatatcagtaagtagaaataatgactctaattatgtatgaataaatgaataaatcttcttttagttagtgaaaagttaccatgggggcaagtagctttttagcactgtatttgacaagtcagcccatttccataaagctgttttaacatttaaattgtggcatacacttaatataaaaccaagtaataataatagtagccaacaccaacataacagtctgtataatcctcatagcagccctatgaaaaaggtaccctttttatccccattttatagatgtggagtctgaagtacagaggggttaagtaagaagcccaaaatcacataattagtgagtagcaaagctaggattttaacttgggtggtctggctccagagtccaagctcgtaatcactaggccgtaggatactttacattttttcacaacaaccattttccttattaatatttgttaactaattattctatatgctataagaaagactccagttctctagaggaagagaattgaagtatcagcagtgg

SEQ ID NO: 120668 - DNA, 1051 bp, Homo sapiens
atcaccttcctacatctaagtcatatcattgttttactttcaataatagtaacaagaaatttatcatttttctccccttgttttacctatttcacttcatggcaccccttttgtttcttagtcacatagacctacaatttaaatcagctttgattcctttctactcttcatatgtttaagcagttgccaagttcttttcattcatctctcataatttctcttatattcatcttttttttttccattctcattgccagcatcctaatgcagagcattatggactcaggcctaaattattacatctttaattgatttttccaacatccagttaatttccttctgatccatcctgaacatcatcactagatttatcttactaaaacacggtttttgttaaacttagcaatttcaaagtttcaaaatgattgcaatagtaattgaagttattaatgttgttaagagacagcatagtatagtggtatactgtattggctttggaactaaatagatatgggttggaatcccaaattaatcccttagtagtggtgtactcttggggactgagttacttgacctttttggggcataggaatcctcatttgaaaatggggagaataatatgatagtcttataaaaattaaccacagtttgtaaaatacatagtttagtgacatcaattaatgatagttattattagtagaagtgttgttcctgttattgttatctgtgaggataaaatggagaaatggaacagggagtagaggatggaaccaggtagaatagttccaattaaaagcgttaggtaaaagagctcttctacattggaagggctgaggactttttaaagttttcaaagaatgaggactttaaaaaatttgtagttcttaagatgctcacattgtaaaatatatcagagtcttctctcctcaagtacactacagacagtatttttcaggtacatgaactaaaactttgcaaacccaaggatcaatgaccactggttttgattattagaaatttgatggttacttttcagagtgcagttcataga

SEQ ID NO: 120669 - DNA, 1034 bp, Homo sapiens
gctggggatcacctgaggtcaggagttcgagaccagcctggccaacatggtgaaaccgtgtctctactaaaaatacaaaaattagccaggcgtggtggtgcgcacctgtaatcccagctacttgaaaggctgcggcaggagaattgcttgaacccaggaggcagaggttgcagtgagccgagatcacaccattgcactccagcctgggcaacagagtgagactctgtctccaaaaaataaaaataaataaaaaataaaagcatggtcagacttttatatagcatgaattacgctttgcctggcatctttgaaataatacctttaatagaacatttgatgtcatataattaaagtattcaactggcaaagatgctcataaaatggcctttttttgtcatacttaaattttttgtgtattctcatttgttataaggaggggggaaacagaatcaatatattcttcaatttaccattattcatataagtggtactttgccatttgccatttttcaaataatccagatgaccttgcttctgaccacaaagtgagattttgtgtgtgttgtttgtgtagaaatatgttgctacagtgaaaactcacagtatattttgaaaactgctagaatgatgtcaggtatctttggttagttcttcctgttagggatctgtctattctagtttttgctgagttatgatgttacatttttccttccaataaagctagactgttgaggaggggaatcttatatcatgataggattatcctgagcttttgtttaggctattttctaagccttttagggaaggctatttcctgagtcttttgggaggacaaatcaaatgtggaaggaatgtagggcagcagtgcagggactactgggtccttttgcgtttttaggaacatgaggagttgttcatactcagattatcaaatagaaaatattcagtctcaatttaccctggttatctgacatattagcttgtaaactctaatgaaagaactcattttgcaggtaggaatttaaaattagtag

SEQ ID NO: 120670 - DNA, 1160 bp, Homo sapiens
ggagtgaggctgagagaagctttgctcagagagaggtaaagcaacctttgaggagggatatagaaactgtatttctgtctgtaaatgttattttattaagaaagttttatattctaaggttgtgatattcattcattggttcattcaccaaatgtttgagtatcttttctgggtatactctatatagtagatgatttgatctcttttgagttgaattttaaaggactatcctagggaaacttgagagttacagaggagaataaaacatgatttctgccttcaaggggcttacagtttgatagatgcaaaataataaagcagtatgtattaagtgaggtaatagaagtacaaatgctctaggattttagaggaaggaagcccatatttgcagggaaggtttccttacgatatttatactaggccttgaaagatgcctgggatttctttagacagaagaggcagagaaatgtatttctggaaaaagttacaggagtgagaaaggacatatttaggaaatgacaagtgcttcagtttggctgcaatataaggtgtgtgcgaggtatgtagggaatgttaggaaataaggttgatatataggttggggtcagaatagaactttgaatatgccatgcaacaagggttgaatttacatgatagttgatcttgaagactgaaaactaggaaattacccagtcagaactgtgctttagaaggatgtgctgggggactgggcatggtggtttacacctgtaatctcagcacttcgggaagccaaggtgggaaaattgaggccaagagtttaagaaaaatgtactggaaagccatgagtaaaatagattagaatgaaggatagagggtacagagaaattggaattcagaaattctattggaattacctataaaaaacaaaggtagagccactttaaacatgtgcagtttatatatgccagtaatacctaagtaaggccgtttaaagaaaaaaaagtaagctatgataacgaggcactgaacttggaaagatgaaagaaagttcagatttgaatgacattttggaaatagaatctacagaggaggatggaaagagtgaagaagtaggagtggagtcaaacatgatgaaatttttaagcttgggtaatttaggaaaattgtggagccagaat

SEQ ID NO: 120671 - DNA, 1063 bp, Homo sapiens
gggagaagagctcttggagggagctgccatagaacagactgggaataagaccactgaatctagagccatcgtgtttccaggcctggctcagattctctgagactctcagagaatctctctggacctttagaactcagtgttcatttcaggggttgagctagacctcctctccacttctcttccctgccctatcagtccgtggttcaaactgggaagtatggcagcagcttttggctgaaaaacagcagagacccaagagatcatgggtatgctgttcttctcagaaccaaattgtggcccttatattggaataacttgttcattctgggcagtcaacaaatattacattcctgtataggatgatgctgtgcgtggtgctgtggggaaggacaaaaaaccagaaaacagtgaattggacagagaagatgagagctaaaggcagcatatgttgtgtcagattagtgctttgcgtagtaaatgttgagggcaggctttgagatgctgagggaagcctcacagacccatagctgcagagcaggaatatgctatgttcaggcaatggtggaagctgggctgtaggaaacacagccacagatttgaacaaagatggagacagcaatgtggatccagctgaagatgttttttccttttaaatgtaactgttactaggagattttctgagaatataagtattactattgaagaaaatttggaaaatagaaaaagattgagatggtaaaaatcacccataatcttatagtccgtagaccactaattcagtacttcattttacttctttttggccatgtgtatatgtatgtattctttttaaaattgaacttcagatcatattatgtatgttttatattctgcttatttcatttaacattgttttacttttccctacattattaaatgttccttgaaaacattttcgaggggtgtatagtgtttcattatatagaggtaccataatttgacttttcctatattgaagcacatatagtttctgttttgctgttgtaaataacgctctgatgaatattcttgtatataaattttt

SEQ ID NO: 120672 - DNA, 1077 bp, Homo sapiens
aaatgggattttttttttcttccaaagattgtaataactttgccattgtaccattaacatagtcaccacctcatgtttgtcatgtaaccaatttatgtttttactaacattgaggaaatgattttttttatgcttcctcctttctatctttcaattttttcccatctacactgtgtggattatcagataaacaggaaggtcagtgctcgcttaaccagggtttggccagtgctcagtgggtgggaagccgtcgggagaggagctggaggggttgtgtgtctgaacccctgtgctccacattgggcgcctgtcaggttccactgacttttcattgtatatttggaaactctttcatagccagagcaaagcccagggaaatctctcctcctgtggtgttggtcgcgttcttgtagtttccatttgataacagcatagtttacagagaactttttgagcttttggagaactcctgagacttattttgtctttgcctgcagccaaaataattgaagcattgtcagtctatttcagcagcacttcttcaggtagactgtgatactatttgggatgttcagatagaccaaagagaacacagattgtagctcctcctggagctataatcctggttttatatatgataaaagtgaaatggaattttagctcacaagacataccaaggcgacttggtcattatatagtagcagcctcgcttataatttccagagtttcctctgagttttaatctggcatttgtttcttcccttctccaaggaaaacaggagttcttagctcttccctgtagcttctgaaataaattcacacagaatttgaaggcaagtgaagtaggtcagaatccttccggaagccaagaacccacttatcttccctcctttagttttctgttttgtctgcccatgcacatttcctcttaggtcctctaaggagagtatgggaagaaagggagtcaaattcaatgatgcagaaagggtcagagaaagtggttgtagatgactgatgagatttgacaccatcctcactgccggccatgtaattctctaaaaaaaataggagacaaga

SEQ ID NO: 120673 - DNA, 1004 bp, Homo sapiens
gtctgtagggtgttgggaggaaggtatgtttagcaatgagggcagacagatagacaggagccatgtcctacagggacttgatagtgtcgaattctaaggatgatgggaaaccatagaagggtttaaaccaggtgatggtagttgagatttttgaaagataactctagtgtgatctagtgtgagaatggactatagggaagaccagacagcaggtgggcaaggaaaagtgaatacaagagactgggaaggagctgccagtgaggcaggaagaaaacaaggacaacattttcatggaagtcttaaaaagtcagtctttcggtatgaggaggggagatgggagagggcagtaggtaacagaaaatcgactcctggttgtagcaagatagagcttagtggcgtcctttaagagccatttcagtggagtcaagggagaagggaatagaggctgagggaataggggtagcaatacatgtagaagataaagtatcactgggaggggaagcagagaaatgatgaagaggatggagggggacctagggtcaagggaggatgatgttaaggtatgtgtgtgtgtggactggaatgataccacagggagggaggatttgataatgcaggagagtggatctttgtaggggccgtgtacctcattatgggagaggggctggatctctagctcaaggagaagattgactttaggtagaattgaggttccttcttttcctgtaacaggaggaaaggcagagtatgtagaatagatgtacccagattgaaagaggcaaaaatggaagccttaccttcatgttgacagtgcttgtgccttggtgggtctttgtggtatatcatggcctcaagctctgtttttgcaggtccactgagttatttgtgctatatatattcttttcctacccaggccatctatctcagatacagatctgtttacatgtctgtctcccccactaaactggcatctcttcaacaagagtagttatctttgtatctcc

SEQ ID NO: 120674 - DNA, 1062 bp, Homo sapiens
ctcaaaaaaaaaaaaaaaagttgcaaggaaataataaaatgttgaaaatattttattattggatggagagattatgaataattattctctttttttgaatttccttattgaaaaataattttcttaatgaaaattctataatgaatgtgtaccacttttgaaattcaaaaaagcattataaaaaaagaaacattaatttttcttaacaaaatgggttgagacttcaccttcagatcacacattctttgcagagctgctggttttcgtctgacgttttaaaaagctgtccaccacaccttggtttgcagagcatgtctctgtaataaggtaaaggcctcatggcacagtgagaatagacgtggcctaggagcccggagacaggactgtgctatgccgacacatcgcagcctgaagtcactgcctcgtccctgggtgtttcttcatttacggagctagagaacgttggtccatagtttctatacggttccttgcagctctaaacctggataattctgattcttccccaagcttctcagcatcttctttttctttttttgtcccctaatatcatctcattgatgctaagttgggaggctagatccatttgaaaatctgactctgggaatctttgttgttgatattaaaaaaaaaatcccttggacacttaaacctgtaggggctgggcatggtggcttacacttttggggggccgaagtgggaggatagcttgaagccaggaggttaagaccagcaacacagcaagacactgtctctacaaaaaatttaaaaattagccagaggtgatggcatgcacctgtagtcccagctacttgggaggccgaagtgggaggatggcttgatcccttgtctcaaaaaaaacaacctttagggaattgctttttctaactagggactttattctctattacacctatttcatactttgtgcacccatttttaagatctagagcagaggtcaacaaatgtttttggtaaaggaccagataataaaaatttcaggccttgtgggcaacataaagtctctgttacaaattattcttt

SEQ ID NO: 120675 - DNA, 1649 bp, Homo sapiens
agtggtccggggcttcttgggttttagaatcaaataattttgaaattggatggtgtgtagaaatagtggtgctcaccacaggtttcatgtgtccccttatgttgcccagcctttgttgctattggatttgggctttgtgacttgcccaggccaacgagctatgagtggaagggatacaggacacttctgagccaaggcatttaaaagctagtattcctcttacatccttttctgggttacttcttgccttgttttttttttttttttttagtactagatagaaaaagatagaaccatacaaattttgaaatatatgtgtctctaaataatgaaagaaatttagcttatgtgatgtagaactgtttagtacagtctgtgaagaaatatgcttagcattctcttgcccatgaacatggagtgtggatggcagagtccagctctggtgttgtgactcatccttgatacctcaccagtcctggaacaacctagttgtggaaaaactgggataggttggatttggttttagatattatagacaggtgcgtcaggcagctgaatttgtacagtaaaccacttttgtaaatgatcagatttctgtgtctgataatttgttgggaatcacttggatgttggttgtgctggaaattcttattaatgtgaaagacactttatagttattgtttccataaagccaacaagattcaaacataacagtattgagaccaaggggcatctcagccttaaatccatttttcagcatgcctaacacacattattcttattaaatacctctttctataaacctagctgttgctacctcagtgggttgcttgcagtttgactgtagcctagcttgcttaattaagacttaaaataataccttcggttctgcctgggacttgagagaatagccagctctgaagcctttgcttgctgtaatggttgctcagtagttggagttttgtagcaacaaggtttggaaatcctctaccatacaatggtttttattgttaataggtctagttgtaagtagtcatcctttttgacatcagttccttcttgctgaatactttattcttctcagttttcttttcctccctttcatcttttctgctctctcctttcctccccttcactgcctttctcgttctctttctttccatatcatgaactggtaaatttgcaaaaagggactccatactgctgccatgtgtagggtccgggaaacctgatcattttgaagagctagcccgttctaatgctatggttaggaaacatcttactgaatgttgcatcttttgtgatgtgtgaaattccagaggaagtacagtttggggaaaaaaagtgtatccttgggacctacattagagaatataaatcacaaatcaatatacagttcagataatactagatcgtatacagcaactgcctgtgacagcagtgggaggtgggaaaagtcccctccctgtgtgcattttgagaaatacactgtttttatttggtacagttgcatattcatttctaacagactgcatcctaaaagaattggacttttatagattccatgaatattcagagagtcaccaaaaccaattttgtcctttaccttatgtgtctagacccatctgtcatttgcttgctagatggtc

SEQ ID NO: 120676 - DNA, 2788 bp, Homo sapiens
ttgaatcccctttacaacatccccatctggcaggtgtccagcatcagcatctctagggattagcagagttcttgacaatagaaaccagcttctcattgacaccaggatattgcagattgctatctctataccagtagttctcaaacttttgttcccaggagccctttattctcttaaaaattgttgaggaccccaaagagcttttgtttatgcaggatatgtcaatatttatttgttgtcttaaaaatacaacagtaaacccattacatgtcaatatagatatcatttttgatgaaaaataactatttaaaaattaatttaatggagagagtagccttgcaaatcttaatgtctggcataataaagagaagactgctggattctccatttctcattcaatctgttgtgacagaacaggtgatggagcctgtggaaagctcaagtgcacagacatgggaggtaaataacttctctgaattcagaagttttgatctcacagacctcccagaagggtctcagggactcccaggagtccccagactacattttgagaactgttgctctcttatacaccaagggatgggattggtgatgtaaattggcagggactgcagtgaaagaaaaactagatgcaaaaaggggccaagaaaaatgtactcacatctatgatcaacaagtattgagtgtttactatgtgcccaagtggaaagcactgaagatacaggttgagtgtcccttatctgaaatgcttgggaccagaagtgttaaggattttgaactttttttgattttggaatatttgtattatacctactggttgagcattcctaatccgaaaacctgaaatctgaaatgctccaatgagcattttctttgctcatcatgttggcactcaaaaaagtcagattctggaggatcttggatgcttggatcagggatactcaacctgcactaacactcgcgtcaggtgttctctgtcttcttcaatgtgaaggctcattttggcctaaaaaaatttttagaactgtaagttaactttttaacttacagcatccattgagaaagtgaacaaaaagcaactgtgaattttgttctcgttttaataaatttctgttttattcatcacagcaatatctatggacattagatagaaaattcattagaaaatgaatactctatattgtatacattaaacatttggtcttcagccagtgctttgtacccatggagatctgcagaacctttgcagatatatctgtgcttggcctctgtacctgccatgtcgcctatgacccacaagttgggaactgaattcactcatctgttcttgtcactggcattaaagacattgagtgatggatttgttttggggttatttttaagcctttaagacttttgatgccttcaattaagatggccaggtatcataaagaattcatgcatgcgcttccggggcttctggttttcttgacttgtccttatcttgctaagagcaatggataggcatttgcagatcaggcactctcacctgccctgtaagatgttgctcagagttaatggaagagaattgtgttgagagagttaatactgagttagagaaaagtggaagtgtgtaatagtgcaaagggaggagtgagaaattaaatggtatctttttagaagtctgccttattgcagtctgcattgctccttggggatttttctactgagtacaagaaaatcagcaagcactttttgaaaaacccagatgaaattactgccgtaaatttttattttttttcatggtataaaacccttaatttagatggggagggtttattaccagtgttttcttggcatggctaaattcaattaatttcagatgacaagctccaggtcccccctactaccacccctctgctgccttttcctcccccctccatcccccaatatgtggaaaatacaatttgttattggtttgcctttggctctggagacctcattaagggcctgagaaagagattctatctctctttctttgacacctttctattttctgctggattcagaccatttccattgccacatggaaagtatgcatggtgtgtgtgaggggaaggttagcagacaagtagtaatgattataccttttaaatattgatttgaaatgactattgcaagttaagaaattgttaactgcagtattcaactaagatacggagctcagcttaagatgacgtctctgaaaagaatgtgggcacatttagacaggaaaacttattcagcgctctgacagttcatatgtaacatacctggttgtttgaaagcaggaacaagatgtcaacagaatatcgtatttactcacagtcctaagacagcatgctgcaccttcaagttcttgttgctatcagaatactgtgagcaaacgagggaaataatctatggtgttttgttttgtttttctctgcatggtaatatagaatctattgtagtgtgaataaaagaagtcacaagagattcattactgtttgtgaagtgtactgtctgtgtctttctgcatgggattctttattttacttacaaagcagatataaaaattagaattgagatgatagagaatatatattgcataaataagcaatttaaacagaagttttaccattataacaaataaataccctgcttcagaggttggagattagaatcctgttacattaaatgcttgacaattaattagctattgtctataaagttcccaagatgacaagttacttaaatactattattaggagtagctggattagtaata

SEQ ID NO: 120677 - DNA, 1053 bp, Homo sapiens
gtggagctagaactgtgaaagggcagggagagttgcaagcaaaaagggatgaagtggtttgagagtagtaggggggaacaaggacagctgcctcctctatctcctggctctgggatttatggggcattaagagaaaaaaatagtaacttgagagggctgttggggaagcatgtttaactgctagtgataagaaatcaggagagagagaggttggagagggagaggttgaagagcagagctacctgagaagggagaacaggtagatgggctgtaaagtcttggtggagagattagcctgggccgtctcctggagagaagggggagggcagcagccctgtttgtgggttgttggctagaggctgcccctcctctttcatttctgcagaaggcagcgggaacagctgctgagagtagggcgatgggggattgggtaggagacatgagaggaatggaggaggtgtgatgtagctgctgtggagaatggaataatagaagtgacacatagaaagagcatgaggagatagtgagggctcagctgagattggagagtgagttaggcataaactcacttccctcccttttcattacacgtagaatgtcagttttcccctatttccaccaaactgaattaattgctttctcatctgtttccatagtgtggagcacctacttttatatcacttatcacattgcgttacagtgatttacctgttttccctttcagagtgtgagttcttggacagtaaagcttatttatcctctcttcatgatcacctagaataatggctggaatgtaacaggcactcagttaacgttcattgaattgaatcaaattgcacaagtatggtcattttattttcctaatagctctttcccttcatgaatctgatgccatatattctaaacaacttattcatttctgtgggcacagtgtgctcattaatgataagccatcctatttctgtgttacgcaagagtaagacctgcgcagaagatgaagatatcctgctcatctctgcaggtttggtatttgtgtatttgccttggggattt

SEQ ID NO: 120678 - DNA, 1042 bp, Homo sapiens
ccacatccttattcttaaatagctcacagtttactggaagagtgaattttacatgggtcatctaaatgttgacacctaattaatagtcaccatatggggtttggtatgtacatgttccacaggaattatctgatcaaatgagtgatgcaaactgtagtatccctttccttttttaaaacatagtagtggccgggcatggtggttcacgcctgtaatctcagcactttgggaggccgaggcgggcagatcacctgagatcgggagtttgagaccagcctgaccaacatggagaaaccccatctctactaaaaatacaaaattagccaggcgtgatggtgcgtgcctgtaatcccagctactggggaggctgaggcaggagaatcacttgaacccgggaggcagaggttgtggtgagctgagattgtgccattgcactccagcctgggcaacaagagtgaaactccgtctcaaaaaaagggggaaaaatagtggtaggttttcattgctctgtggatgaaactcaaaattcctactctgagctttcaagagggtcctagaccatttcatttccctttcctctacatgtacacatctaaggttaagtccttcccagaactgcgccttatgtttgaaacgcccttcctgtcatctatgcaagcaaatctttaccttttgcctttccatgtgaaacttttccatatctgtgagaaaaatgacccaaatatatggtttcccctcattctttgaattgcgcctaatgaatatgaagttaatcatcataatttagatatgattcaagctacatcagaggtatttacagccaggagcggtggctcatgcctgtaatctcaacactttgggaggccaagcaggcagttggcttgagctcaggagttcgagaccagcctgggcaacatagggagatcttgtctctacaaaaaataaaataattagccaggcgtggtggcaggcgcctgtcatcccagctactcgggaggctgaggcagggggatcacttgagcccaggaggtcaaggctgcag

SEQ ID NO: 120679 - DNA, 1034 bp, Homo sapiens
aaaccaagaataatagacataatatctctgttgtctctcttaatatgcaggcccagaaagaataaaagagtaaatctcttcccctattatcttttagttgtaggagaggagtatggagagaggatattgaaataaattatttaatgctggatagttctatgcttagtagtaagaaaataacacttctttgttcaatgtcatgatgccattagttcctgtgtgatttgaggagtttttgagaaagaaaatagtgttagtttactggcttttaaagtccaggccagttttaagctcaaattccatagtgatatcttttaagcaaattcgcttatttaccacccagcattttgcctcattgccctgccccaggctctgtttgtatgaagttgtcatgatgtaagaggaaatgttgactgttctcttaagaaagaaagccttgaataagaaaatcatgttctcattaaatccgctctttaagagtaggtgggaggaattgctatcgatctaatggatttaacagttcatatagaaagtctgtggaatagaagtaatattctgcagctgagtaactgtagattaatccatcttcagacagaattctggaagcatctgtaaaactggaaaattaccttttttttttccaggcacaactggactaaatgtatttcccaaatactttagaattaaattatatccacataagtaggtctactaaaaattatatgaaaaattgaaataaaatcataaaatataaatgttaggttcttcttggctacatttgctctggtgccagtctgtttcgaaggtctgcagtgttgaagggtaaccagaggtcacttgtaaaaattctttctttgttagatggttctctaatagctagtggtggtccattttagtttttagttggatgaagtagtccttttaaggtggatggtgaagtcagacatttaaggttctcttcaagctcttcctttgacccttttaaaacctttttattttattctacccactgaaagcacatcaccaagccctcc

SEQ ID NO: 120680 - DNA, 1063 bp, Homo sapiens
attgtgttgagttggtggcagaagaggcacaatctgatggaatgaaggaaataatgtattcttgattggtctggtctttgcattcctcatatgtgtcttccattttctttttattaaatatctctttattttttccattaatatactttactcagatcactgtgactgcttaatagatactacacagtaatagtagctgttttcatgtgggagataaaaggatgaactagtcagagatgaatgttaattgggtgcatctaataagcctgagatttcctgcttcagtgtcatcatgggagttgaggcagagcatttggaccttcctagcatgtcacctactgaatgctcttgacccgttctgaattgcctacactgggcagtgcaggcatgacagagtctgcgaccaggtagcccttcaagctgcattggaggcatggaaattctttgccggtctgtagtttgtgccatccagatttttgaaagtgttctgaaggaatctgtgttctttcacctggttttcatgcctggccttaacctagggacataaagtcacagtagctctataggtgtttaaacacatagttctacatgtatctggttagttgaacccttctttttttttttaaattcatggaatggctgacttatttatttcatgtaacataatcttgaaaatacaaagtactctccctcctattttctagtccagtgaaggtgatcactttcctctttcatttaccttggttacttgtttcctgccctgaggtgaggctacttgtagggctgattaaggtgagatattttctcctttttgaggctctacttatgagctagaataataaaaattcaagaattgtgccgaattttcttttgttgatgactgtgatttagtctgttatgtaactacaatgtataatttacacatcctgaagatcatcagtctctgtacagagtgactatatttaaccctcacttctttggaaaaagagaacattaccaattatctttgaaactgtgtttgtgagacagtgcacattgatccaccctctgtctccatttttaa
